United States Patent Application Publication US 2006/0134663 A1 - sequence listing, part 134

SEQ ID NO: 447502 - DNA, 136 bp, Homo Sapiens
caaagtttggctattttaattcaatttcattgttcaaggtagtatgggtatattaagtggttcatttccctcctgaagaaaacaacttctgtctgatgtgattttgtgaaattcaaacatgactctttgactgttt

SEQ ID NO: 447503 - DNA, 554 bp, Homo Sapiens
tcaaaagagaggcgctctcaacatcaaggcacaaagaaagacgtctccaggatcgtagaaatgccgtcactagctcccgtggtcaggtagatgttgtcggggtccgcaggcacaccgccatccctcctggtgatgtaggcagccacatcttcacggatgcagttgacaccctggctagcactgtaggaccccaggctgttcccgccacaagcctgcaggatccgccgggcacgtttcttagcatcttctgggaagctggggctgtccagcaggtttgggtaggtgcatagtgccatcacctgccggaggaaggtgattggctgctgccccatagcctgggcgtccccgatgttggctcggatgacctctgtgaatggctttttgataccccgctgcagctcgagctcgatctcgccggccttgagcacgatgggtccccgcacggcgtactccaccgccttcacctgcgggttcatggactccagcgtgaggatgcgctcgcgccggctgcgctcgggccgcaccttgagcaccgccgaggcctcggcggccgc

SEQ ID NO: 447504 - DNA, 2154 bp, Homo Sapiens
  misc_feature (166)..(166): n is a, c, g, or t
  misc_feature (1892)..(1892): n is a, c, g, or t
taacccccccgggggcgcacccagatttcttcagggccctggctgcggttgctgggaaagcggagggccccagtttcctccttggcagccctgggttacacccaaagggcttttaacagttggccttctgaccgtggccgcagccccccagcatctaaccccaagnctagtgcaacatcctgcccaggtccacgtgctactgcgctcctggcgcctgcctccaggccaccgggcggaccctttctcagccccaggggccttccaggcccttctgttcaaaggaccggatgcttcacaccgctaagggctttatttcacagatcatggtggtgagtttggatttccagccctcaccacggttaagtcacacatttcccgacacctgctcatttctccagatctgaaacatctcacccaacacatcctagttgttgtaaaccccaaatgaactttccagaagcaaaaacaataacagattcagagaaccctggtcacacctgctgagcaggtcccctctactctggttgcatatagaatgcttgtttgctcaaaagagaggcgctctcaacatcaaggcacaaagaaagacgtctccaggggcaaaatgatgacgaagtgaccagcggcctctgcgaggcccgaggcagagtcacgggggaggcgagttcagcctgacgggcattgggaggaagagccaaggacaggtctcccgctggggctcaggcgtcctcacgcgtacttctccaggaagttgatgtggaagtctttcaccttctgcagcaccgttttcagcttctccactggagggaggatagtcatcctgaagtggtaagtgccttccctctgcccaaagccactgccgggcacgacacagatgccagtctcctccaggagcttcatgcagtagaacatgtctggagccatttgatgggcctgagcagcctccacagctttggcaggaatgaagatccgagggaaggcgtacatggccccctgcaaggggttgcagtgaattcctgggacttggttaaacaggtcttccgtcagctttgcttttttggccagattacccaggaccgactccttctctcggctgaattgctcaaaggactcctctcctgccaccggggggttcacgacaatgtccatggcggcctgcccagacacttggggggcacaggcgcaccgacagcagcttcaccagctggcccttgatctcagggtgcaggttgatcacctccatgtagcctcctctgtaaccacactcgcccatgtagcccttggaggtggagtggaaggaggcgagctccacgttgctggagtactcgggccccatctcgtacagcaccttcttgaaggagtggaatctgcaatctggagagtacacgttgtcctggtacacctcatcagccaggagaaagagcttctcttcccaggcaaagtggatcacatcttctatgcactttctgctttgtacctggcctgtggggttcccagggttgattatgcagagcaccttaggatcacagtggtctttggcctcctgcaccgcccgccggagctcattcacattcagcgcccagcagttctcctcgtccaggtagtaattcacctggatggcgtcgagctcagagatgacagctgaatagaggggatattgtgggatggggatcatcacacctgtccgtgacttgccgcccccggagacgaggatcttcaggatcgtagaaatgccgtcactagctcccgtggtcaggtagatgttgtcggggtccgcaggcacaccgccatccctcctggtgatgtaggcagccacatcttcacggatgcagttgacaccctggctagcaactgtaggaccccaggctgttcccgccaacaagcctgcaggnatccgccgggcacgtttcttagcatcttctgggaagctggggctgtccagcaggtttgggtaggtgcatagtgccatcacctgccggaggaaggtgattggctgctgccccatagcctgggcgtccccgatgttggctcggatgacctctgtgaatggctttttgataccttttttccgaagaacttatcactgagactctattgcttctttcttcattcgcgtagatcctctctccactggaccttgatgaagggaatccc

SEQ ID NO: 447505 - DNA, 460 bp, Homo Sapiens
gaattaagtatttcatgtttttatttcaaaagaaaaaaggataccaagaagcagaagaatgaagcagttaaaaccagcaaagctgcaaagtaggaaagaaagctgagggagagattgatccgatttcaacgatgtggccacttaatgcaaacacaggggtctgatgctgcaaacctaagtcacatgagtccagtgacttcagcaggtccactgatccaccacagtgacagggccaggccccttcctgctgaatcctaactttacacattctagacacatgtcatggcacatacaggttacactttatggttacatggaaattgcatgcaattcacacagagaatcattttgaaggcactgtatttttcagcaggagctgctactttctggcaagtccttcctaggttggctcacaagtggtcctcctttttatttattcctatatgaaactttggtccaa

SEQ ID NO: 447506 - DNA, 873 bp, Homo Sapiens
gttgatggacttttgggtctgagtgcctgtaaccagattccggaaacgacaggacagggcctggtgatgttgatgatggggatttgaacgggtatgctgaagcttgtaatgcgagtggggtttcctgcgttttatgcaatggctgtagatttcctcccacttctaaagcgctgcctttctgtgacacgcagggagagttcagtctgctagttcgtatggaaacttggggacctcactgtgctgcttgctcttggcagaggatatcatttgagctgtcatagcagaggaccacatttaccagggtgcactttggcctaaagaatagtaacctttctaaggcttagttcctctggcatgaccaaaccagtcccaggaggcccctgggttccagtcaaggtcatgggagaggcccaccatggatgaggcctgggggagcagggtggaaattaagtgcccaggtatgttatggatagcctgcagccctctccaatccctaccctccgaaacgcagtgaagggggacatgaaacaggtgaggcagaggagcaaatgcgggtcaagaattccgaactatacttgacttacagtgcagctgtgatgtgcacattggtgtgtgccacgagacagcatagtgtggtggaaagaaaatgggttttgaacagagtgtcctgggtttgaatctctgcttgcccatgtactagagagtagtcgaacctctctgggcctcagtttcccagatgtaaaatgggaatagtagtacttaccttgcacgggtgctgagagaattccatgagacgacacaacccgtgtaaagtgcctggcataggcatatcacattagggcactcagtaaatgtgatgtcttttctacttgc

SEQ ID NO: 447507 - DNA, 334 bp, Homo Sapiens
tgaattgtgctcagttctctttacttcctacaaccgagtacatgggtcacagggtggagggtgcaacaggacatggaacatgcccctccgtgccccccaacacacacctgcacacaggatggtggtgtctgcagcatcacaggtcatgcagggcatggggaaggggaggttcacacacacatagatgcccacagcgggtaccagacggagaacacccctgaatatacatagctgtacatggggaacccccaggtccccaccccaaccctctcccctgtcttgctgtcccccgcaggggaactatattgctttgagagagccaccccaggggctg

SEQ ID NO: 447508 - DNA, 402 bp, Homo Sapiens
cggagtgaggggtgctggaggactggcagccaggccacgaggggaacgggacctggaaatccccaagcctgggtatgagaaggcagccgagtgtgcggcggcagggcaaggttggcctgggccgcccagaggtcttcagacccaggggcgaagctggccacgacccagccccgcggtgaagccgcgcctagccttggtgctccctgggggaagtgcagggccacggctggcccggttcccagtgtcctcccccagcccttcgctccccaactcgagagccaaatctgtgagggcatgggctggagcccctggctgccttcctcttgcccccatcccttctggccaggccaagtccgagggtgcaggggcaaggaggagagttgggggcctgagccctggctc

SEQ ID NO: 447509 - DNA, 962 bp, Homo Sapiens
  misc_feature (846)..(892): n is a, c, g, or t
ggtcctaaaccgtacaatgcaaatcacaattcttagtgtaccagcaaaaccacagcagctttttaaaaagattaagcaaagatttcatcgtgttccaatccatatcatcttccagcctcagtcgctgagaccttgaagatgggccggggagaatacctacattggtccttgtggcttatcggtatttcgtttttctttaaaagccaggggtgaaatccctaagttcctctggggagaagcagagatggtggcagcaggaaggctgggcctgcttggtgggtccaagatgcgcgggcttctctgggctagaggccatcgagggagggctgcttcctctgagatgcttaatgacaggaagcggctttatttgcttgagttttagccagagggggtggtgagctgaccagctggtgtcattggatggcgtgacatggtttgctctgcgccctctctccatgagcgtaccctgtgagtgaacgttccttttacttattctgatttctaattcggaggcacctccttttgagcggcggctccaggtcctcaggcccggcgctgagcatgggcgaggagatgatgcacggtgccatggcagccttctccgcgggttttggcacaggctggatcacgcagccggtcttgggcagcatccgcagagcataggcatggtcctcgtccgcggggttattaaggttcgggtctgacttgtcgccccccgccagggcctcctcgcccatcagctttttggccgcctccccgtccaggtggcagttggaagcacagttattctccttgaccgactctagctcgctcaccgccggttcctcaggcgacagcagcttcttnnnnnnnnnnnnnnnnnnnnnnnnnnnnnnnnnnnnnnnnnnnnnnnccgcgctcttagcgccctcggcggcggcgccgcgcgtgccgttcacgatgacgttgcaggccgcggccgc

SEQ ID NO: 447510 - DNA, 469 bp, Homo Sapiens
cggctttatttgcttgagttttagccagagggggtggtgagctgaccagctggtgtcattggatggcgtgacatggtttgctctgcgccctctctccatgagcgtaccctgtgagtgaacgttcaagtagttcgcagttattcttgaaggcaagccttggagtttccttagcatagtgctgctggggaaaattttccagcatgtcccatccttcatctcctagccttatttctcttgaagtaggctccgtcggcaggccgcaaagcacttctcgctgcagaagcttttcacctcacttcccatactcagggaatagcgcttgattcccactttctggcaccaggcacacattatttgtacatttgacacatcatcttctgctggtggctttatgaaaggtggtggaattaaaggtacaataatggcacactgccatgatcctttgaaccctgcaggtgagtcactgagt

SEQ ID NO: 447511 - DNA, 642 bp, Homo Sapiens
  misc_feature (584)..(584): n is a, c, g, or t
tggtgttcttgtagttgaaatacgaaaggtttcctgactgaccgatcgaggtggaggtggagccatggacaattctgctggaggagcacgaatatcctcatgtggctgattatagtgctcatgtggcacatgttgcaaaggaggtggtggcatcatgatgtgctgctttggcggaatatggctcatatggtgcttgtctggtggcattataaaacgctcagggatttcagttggtggtggggcaataggaggatgaacattttcaagtgaagcacgggtaacaggttttccagctctcatatggcgatggttgatatgagcctgtaagtctctctgagacaaatatgttctcttgcacccttgaacaatgctacacatgaagagagaacctcgtgtacactgctcaattcgctgcacaggatcactacagcctggacacatcttatctccctttttttcatgtaaaatagcacagtcatagcaaaaaacatgcttgcatgggatcattctcccatagattttatagggcatccacacttgtccagaaatgaactggtgatcatcctttcacctaagtgttatcntgaagcccaaaaaggtgccaggaaatctttgtgttgcgaacacttaccctcttacgct

SEQ ID NO: 447512 - DNA, 830 bp, Homo Sapiens
gcacgaggtttttttccagaaaatgtccctttttattccatacgcaaataagtagattcatttaaaaaaacaacaacccggaggctgcgacgtctgcagagagccccagcctgcctgctcctggaacggacgatgggacccacaggtccagggtcctttctccaccagcacccgcgagaggggtagcacagccctccgggccggcctgctgtctgggtcccaggaaagggacgtttagtgttgggggcagtctgtggggacagtcaccgctcagccttggacagccggttcgtagttttcctttgttgcgctgggcttggcctgagggcagctgccccgggtggccatggccgaccgctcctcgctgaggccggggggtggccgtggcgccgggggctgcgcagcccagagtctctgcatggccccctgttcgagtggggatccagcctggcaaatgggtggggcgtcccattacattctagaggcgctccccacaggagctgaggcccgcccggccgcggcctgcgctcccgaggtatctaggaggccgcaggagcgaccatcccttccctaacgccccctgagccctgcgcctgccgctgaatcgcgcgtccacacaggtccacagggtcgtggggagagggcccggcaggcggggctcacaccaggccaggcatctgcgcccgcagaaagggcacggaggcggcggccgggaaggcggccagcgggtaggcgagggccccggagaagccgagcagcggtgggggcggcgcgggcgcggcgggcgccagcgggaagggcagggtggccgggggcccagcggcggccgc

SEQ ID NO: 447513 - DNA, 201 bp, Homo Sapiens
  misc_feature (119)..(119): n is a, c, g, or t
  misc_feature (176)..(176): n is a, c, g, or t
  misc_feature (183)..(183): n is a, c, g, or t
ttttttttgccagagtttacggttttattttaaaacagtagtaaacaatttcattgatttttcttaaatcaaaccacctcatactcggcttgtctcaggcaaaaagtaaaaaataaaantaacgggagggaaacatggaaaccgacctaccttccctagaaataagcccctgggcnttggcanctgggaatgggcttttgg

SEQ ID NO: 447514 - DNA, 644 bp, Homo Sapiens
  misc_feature (595)..(595): n is a, c, g, or t
gcatgaaagagactagcacgtttttcattcagatttacccaggaggttgctgtctttcatacaaagatgaggttcactggtaggaggcaaaggtgggactagggaggtgacccgcatggggccgatggagagaaactcttcccaccccggcaggaaggggcctcttcctggccgccccatccacactcaggttctgcccccagacttgggccctcgcctacaggaaggaggctgccccaggcccaggggggtcgggcccggtgacctcaggctgcctctgcaggggccatcactgccacgaggccggggagtggcatgtccagttgcgccccagggtcaggctgtccggcctctgtgtctgggtagcagtgccccaggagaaagaccctccctggcctgtggtcccatctggccccgtactccaacccgcacgggtgcccatacatgtctgccagccgggcgaagcggggcccccagtctctgatgtagtcttagtcctggtcctgatcgccctggctggacaggatggagctcagcgttcccgccaccgagccgtcaccctcgtagtcatagatgaagggctggtcgtaaggcnggaccactgggtcactatctgcagccttcaagccatcattgatgaagtc

SEQ ID NO: 447515 - DNA, 1478 bp, Homo Sapiens
gtcgtttcttttgttgttcccacgcattgtgcacactgttgtttcacattctcacagccctcagcacaggtcacgtcccagcctcagctctgggactttggttcagggttcagagcctctggtctgggttgatcggataacctcctttgaccctgtggcagcaggcggaccttggctcttctcgtccttaccccagagctcagggcagtgccccgtgcaagtcgccccacttccacgaaggcctccacgcagcggtcaatgtcttcctcgctatgcactgctgagatctgtacccggatccgggccttgcccttggggaccacggggtagctgaacccgatgacaaagatgcctctcttcagcatgtcatccgccatgcgagaggccagccgggcatcacccagcatcacagggcagatggggtgactggctcccgagatagtgaagccagcagcttccatcttactacggaacctctgggtcttggcagccatagactggacaatggtgttactccccatcagcagatctagggccttggaggcgcagccaacgacagcaggtggcagactgttggagaagaggtatggccgggcgcgctgccgcagcagggacaccaggggcccaggccctgtcgtgtagccccctgatgctccacccagggccttccccagggtggagttgatgatggtgacctggtccatcacacccagcagctcatctgtgccccggtcctgtgggccccaggaagccagtggcatggcattcatccatgaagaccagggcaccatatctagaggcgaggcagcagatctcctgcaggggtgcgatgtcgccatccatggaaaaggccccatcagtggccaccaggcgcagccgatgcttctgggcctcctgcagcttggcttctaggtcggccatgtccaggtggcgatagcggtacttgtgggccttgcacagccggatgccgtcgatgatggaggcatggttcagctcgtccgacaggactgcgtcctctggggtcagcagggcctcaaagaggccggcgttggcgtcataacagctgggatagaggatggcatcctcccgctggtggaagcgggctatttttgcttctagattcttgtggatgctctgggttccacagataaagcggacagagctgaggccagctccaaactcctccagagcctgcagacctgcctggatcacctcagggtggctgctcaggcccaggtagttgttggcacagaagttaaggattcctccggagacgccgtccacgcggatgtgcggcccctgacgggacgtgatgacccgctcactcttccaagtgccagctccgcagatgccttccagctccccctccagaatgccacgcagctgggccagcgctgactgtgcgcggcggccgcggggcacccagaagagtgcggcgcgccaggcgttcccaggccacatcgctcctacctcccgct

SEQ ID NO: 447516 - DNA, 483 bp, Homo Sapiens
ccagcgccgtttctctgtccggagcatgaagtcctcggcctccctcataatactctcttggccgtgactgccgccaggcagagggagacacggaagaacagggtggcgcggcggcgccccgcctacgaggcgcagggggtccgggtcagggtcccggcaggcgctgccctactcggagcggcggtgccaagcacagagttcgggactgcccccggctccaaatgccgcggcgagggtccgggtcccccaagctgagcactgtcccttcttcctcttcctccggggccgctgcctggagctgctcccggcccgggggactcttccgagccaggggcgccccgcatgggcaggggcctgggtcagcctcgggttgggtccagggagcgaccgccggggccgactccacctcccgcgctccaagccgattcgtcccttcagggcagggcctgcccgcgaacagcccggcgagacgagcgcggccgc

SEQ ID NO: 447517 - DNA, 375 bp, Homo Sapiens
gtcatttttccccactagacttcaagttccatgaaagagatttattttgtcctctgttctgtggtgtgcttggcataaagtagataagcaagcatctgctgaaggaatgaattaaatgccagctgcaatccccaaattacagtagatacacgggaaaattttctttaggaggctgaattctaacagcatgatatcaaacaaggatagggtcaatacagaggccagtgctgtttgaaagtcatcatttcaatggtaactccttcacttgtgctggactcggtctcccctcaggagactcctttcctgttcaaagtcagtattttatatactcaaaaccaacaacaaactccaggtgtaactttattccaccttctc

SEQ ID NO: 447518 - DNA, 978 bp, Homo Sapiens
atgcttgtaactttaggcatttattgaaaacttatacatgccatataaacaaactaaactcttttagctgctataccaagtttccataaagctgtctgctggttggggaggctacagcctgaccacattctttgccattgcctacaaggggtaagaaatggcacatggaaacatggcaggccgactcacgaacacaggcctgggccagcgctttcttcttcctcttttattcccatcagtcctagaccagagagtgaaccatgagtgctcttggttcctggcagcaggatgaggcagagagtgcccgggcacaagctgttgtagagctttccaatcttccggctccagcgccaggctgctatcttcggggtggtccagtttcagagtctgcaaggcctcctgttcaaaggggggagagtacaacactgaagccctgggagccttgttagattcaggtggtaagcctctgagccaggcatggaggtgcctgggggttagggcatgcctgcctttcagcttaccagtccttgcctggtgagaactgttgagggcctgctggagcactgccaaaaccttttgaattttccggaaacagtattgtcctctgctttccacttttaagatcttcaggcaagatcgcagcttccaggccaagaaagaggcggggctcctgcaatagctgttctttgaaggtttcactcactccagcacagataatatagagcctgggttttcagcaatctcgctaccagctcattcacgagggtgtcacaattcaagcgtgagctctgtctcaggcctctgcaccttgactgcagattaccgatctaccagaaataccattccaaggactctagtggccagctgggcagcttctaagacttcatactgtatacagagatgaggctgcacggggtaacggcgaaccacctgtcattgacttggactcgggccaaagcttttgagacacagccctct

SEQ ID NO: 447519 - DNA, 503 bp, Homo Sapiens
aattatctcttagagtctttcacataactgcaacatgatggtggttggaaaaagagtcatccaaagctcaactagaacgcacgtccgaggtggcttcttcattcatgttgtcttgtgtcttagtagatggaatagctacaaactagccaggaaacaatctctgtcactctccacgcagcctctctacaggactcacttgggcttcctcacactatgatgccttcatgacacttggacctctgacacagggggctgcattcccccagaacacccatttcaagagcaagtattccaagaggttggaaacagaagctgtcagtccttctaaagtctggaactaccacaaggttacttttgctgcattctattgggtaagcagacactgggccacacagattcaaagggaggggaaataaactctatggggagaatgataaagatttttgcagccattttaaattcattacaatgcctatgaaacatttcctaggtatattaagtgg

SEQ ID NO: 447520 - DNA, 522 bp, Homo Sapiens
ccctttttttgagcatttattctaagtctgacaacgcgttctgcttgtcatttaagcccacagcatagaagctattgttctgcccactttacaggtaaagaagtcatggctcagaggcattaagtgactcgcccaaggtcaccctactacaaggcagagacgaaaattcgaacccggacagtctgactccataacttgggcttgcaagcctccagcagcgagcagcattgtctgtcgggccacagcgcaaccccagggcgctaacgagacacgagagggagctttaggattccccatctcgcggggtgggcaggacaagcatcagtaacgaggaagacgaggcctgaggaggctggaccactttaacaaggtcacaaagagtttctgctcacgctaggggagcacccccaaatccctcgggaccactggggagcctgagccagagctccccccgcacagaggcggcagcgcccagctcgccgaggtcaggcctgcgagcaggtctgctggccccagggcgcc

SEQ ID NO: 447521 - DNA, 578 bp, Homo Sapiens
  misc_feature (567)..(567): n is a, c, g, or t
gccgagcttcggcgagagcccgccgttgtcgcccatcgacatggacacgcaggagcgcatcaaggcggagcgcaagcggctgcgcacccgcatcgccgcctccaagtgccgcaagcgcaagctggagcgcatctcgcgcctggaagagaaagtgaagaccctcaagagtcagaacacggagctggcgtccacggcgagcctgctgcgcgagcaggtggcgcagctcaagcagaaagtcctcagccacgtcaacagcggctgccagctgctgccccagcaccaggtgcccgcgtactgagtccgcgcgcggggcgcatgcgcggccaccctccccaaggggcgggctcgcgggggggtgtcgtgggcgccccggacttagagagggtgcggccctggggaccccccctccccgagtgtgcccaggaactcagagagggcgcggcccccggggattcccccccgagggtgcccaggactcggaaggggcgccccggactcgacaagctggaccccctgctcccgggggggcgagcgcatgacccccccgccctcgcgctgcctctttcnccccgcgcggc

SEQ ID NO: 447522 - DNA, 441 bp, Homo Sapiens
gcaagcttttcagacagtttaacacatttattcttgttttttcaaaaagagcaaacacgtggcgttacaaaggtcctccgtttcgcacgcaccggtgtcccggcagcgcgctgcgcgtcgggaggcccagtctgtcgtcccgtggggccgggggtcaggaggtcgggcaggcgggatttggggtttcgcgtgttccggaccggacacttcgccatcttaacgagctaccgcccgggttaaggggcacccagggcaggtgcccggccgggggtggggtgtccgagccgccggtgcctggacgtggacccctgcaggaagggtccgcgcgggaagcgagctctccacgagtccatgacagcaggcccgcgggggcagggagcctgcgccaggcagtctttctagatcctggcccagcctggccgctttcgcgcccgtgctcct

SEQ ID NO: 447523 - DNA, 213 bp, Homo Sapiens
aaaagaataaaatttattgtactctcctcgccccagggtgcccctgggaaagcctgaggctacttgtacgcgttggccttgtgcttcggcaagaaggcgaagctggggggcactggcccaaggagcatctcgctgatgcggatccagtcggctgccttctggctggccatcagcgtctccaggtagtcgcggcccaggtagtagggcggccgc

SEQ ID NO: 447524 - DNA, 937 bp, Homo Sapiens
  misc_feature (628)..(628): n is a, c, g, or t
ttttttttctcattctgtagtgtttatttttccatttttaaaaaagaaagagggggaaacaaagaaggaaaatacaaagaaagaaggtagacaacgctcttgcatagcccgaagcccagagagaaagagttggctggcttgtgagaagacatgaggagttgggaaaaggaatgccagagttccctgaaccaatacaaatctctatgcaactcaaggctgccttatagagccagctccaggactctgccaccagctttcagctctgctgaaacctaatccattcccaggcctggatacaagttggtagcctgttggtttgcagagacatcttttaataatcttgggtttggccatccagaaggcctctttctgctcagggtttctgcagtgtcttttggtgacttgttagcagccaggggctggaatgttatcatgggctcatgtccttcaccagaagggcaatctgctcccgcagctgccgctcccctttcctgcactttgctctggcttcgacacctcagcaactcagtcttgtggtcctgatgatgcatagggcagtagctctgtggttcacacagttccatatattctggaaagaagtctctgtagccgcctttaaggatatatnagctctgggtagtacaatgcaggatactggttcagagacctgtcctcttcacgcagacagcggcacattcgggggcccctctctgaggagaattcacagtggaacacgatgattattctcttctgggtgtccaaagggacgatgggcttcttcagaaagaagttaaacagttcttcctgactatataagtttaaggctccctggatgtgtcctcccagatactcatatggatagcgacaatcaatgacataaaacttctcaatcagaccctggaacttccccgacagtaaggcagccactgtttctgcc

SEQ ID NO: 447525 - DNA, 548 bp, Homo Sapiens
acgtcctgttttaagagcctcagccaccctttcgcgtgatcctttttgagaaggaggatgagggaaagcgcagcggcaaagagtaggcaggccagccacacgagggcccagcgcttgtggatgtatttgtccatggggcaggcccatagcgctcccaagtcatcgtcccatagctgcagacactggcctgactgcaggtcttgtagtaagtactctccaaggcgagctgccctcgtggaggctttgctgggtagtgaagtacagccactgggttccaaggcacagagggatctgttgtcctgggggcctcgtgtctccaacagtagcacatcgtctttgagaggccccagggagtcagcccacaagcactcctgcagctgcagcttctccgagctgttcacgtccacagtgacgttctcccaggaaagcggtgggaccagtggctgggcaggggtccccacccggagcccgccagcacagtgccgcttctgcgggcagcgagcacggtgcgtccagcagccagctctgcagggtcagcagtcgcagtc

SEQ ID NO: 447526 - DNA, 810 bp, Homo Sapiens
ttcgcgtgatcctttttgagaaggaggatgagggaaagcgcagcggcaaagagtaggcaggccagccacacgagggcccagcgcttgtggatgtatttgtccatggggcaggcccatagcgctcccaagtcatcgtcccatagctgcagacactggcctgactgcaggtcttgtagtaagtactctccaaggcgagctgccctcagcccacaagcactcctgcagctgcagcttctccgagctgttcacctgaacacagaggttagggtggcctttcagcaatgggaactcgagaaccttgtccacagtgacgttctcccaggaaagcggtgggaccagtggctggcaggggtccccacccggagcccgccagcacagtgccgcttctgcgggcagcgagcacggtgcgtccagcagccagctctgcagggtcagcagtcgcagtcgggcggcttgccagaggttctggtgtgcgcgggggtcctccctgaaggggcagatgttcgtcctaacggagtcaggttccagaggccacacctgaatacagaggcagggaaccaggtctgtgtggttcaaggtaatgatctgcggtccagtctgtggaacaaatcaaggaaggaggtcggcgaagataaggaggaacgaggaggaggccaaagtcaaggaaaccaggaaggcagaagttcccccaccaattttccctttgcttggggtgagtcctcttcaaggatcctctctgatatggcactgggtcctttgcacaggcatcggcctacagtgggaatggacttgggcaagggggagggctca

SEQ ID NO: 447527 - DNA, 382 bp, Homo Sapiens
ttttttttggcttaaacaacagaaatttattttctcatagttctggaatctgggagtacaagatcaaggtgttgatggggatggcttcttctgaagcccctttccttgacttagagatggctgtcttctgcctgtgtcttcacatggtctttcctctgtgcctgtacatccctggtatctctctctgtgtccaaatgtcatcttctttaaagacatcagtcagattagatcaaggccactctcacaccctccttataatttaatcacctctttaaagaccatatctccaaatgcagtcacactctgaggtaccgggggttagggcttcaacacgttaatgggagggcacaatttagcccacgacacctacatatctctgtat

SEQ ID NO: 447528 - DNA, 532 bp, Homo Sapiens
ggttcaaaatatttttaattttctctagtgatttcttcttttatccatggattattgataagtgcttcgttaaattttgaaatatttggtgttttcctatatctgttgctacctatttccaatttaattctactggggccagagaacatatttggtgtgacttcttcctttgtttttcctggtatgatctcaatcctttcacatttatcaaaatgtgcgttatggcccagcatgcagtctaccttggcggatgtagcatatgcacaaggaaagaatgtgtattctgaaactggtcgggtgcagtgttctagaatgtcaattaggtcatggtggttaatagtattgttcagaacgtctacgtccttgttactttttgttgctgttgtttgtttttgtctaattattctatcaactgctgaggggaaggtcctgaaatcttcaactgtgactgtggatttccctctttaattctgtcactatttcttgaagctcttgttaggtacatttttccatgcagcattggttttctgcg

SEQ ID NO: 447529 - DNA, 611 bp, Homo Sapiens
cgcactggtcccagggtccgggcccgggcccgcgccgttcttggctcctgtcgcggccccggtcgggggcatctcgttccatctgcagatcggcctgagccgtgagccggtgctgctgctgcaggactcgtccggggactacagcctggcgcacgtccgcgagatggcttgctccattgtcgaccagaagttccctgaatgtggtttctacggaatgtatgataagatcctgctttttcgccatgaccctacctctgaaaacatccttcagctggtgaaagcggccagtgatatccaggaaggcgatcttattgaagtggtcttgtcagcttccgccacctttgaagactttcagattcgtccccacgctctctttgttcattcatacagagctccagctttctgtgatcactgtggagaaatgctgtgggggcttgtaccgtcaaggtcttaaatgtgaagggtgtggtctgaattaccataagagatgtgcatttaaaatacccaacaattgcagcggtgtgaggcggagaaggctctcaaacgtttccctcactggggtcagcaccatccgcacatcatctgctgaactctctacaagtgccctgatg

SEQ ID NO: 447530 - DNA, 1163 bp, Homo Sapiens
gatctcgtgtgtgtcccgggggtgccctggcccctcacgcccgggggttcctgcgattctgagaccgggtttaacggtttttcgaccccactgttggaccgggtcgcccctgccctgcccaattgcttccgcgccggcacatggcagcacccggggcagttttgtcagggagaaacatcccggttggattcccttttcagctgggatttttgtcctggaaggactagctggaatttctttcattggggttctccgcagccccagggatgcttcttcctctaacagaggccgctcgaggcagcagcaatttggtcccgggcttcctctgagtcgctgcctgacttgcagcatgagcagtgcatgattccctgggcaaagcatgagcagagtgcggaggccccggcgcccgggtgaggcgggcctgggcaccagagctgggcagggccggggaggaggccaagagccgaggctcacccacagggggccccagcaaggggctgtctgacaggtagtatgtctcccttttaagagacgtggggcttttcttcatttccttttctttctcaaagaggtttatttttaattttgactcctgtatgaatctttccacgccctggctccgagggtcttcaggcttggcagcttgggctgcctggttccggctgctgctctcaatgtgtaaagccagtaagtgagcttctttgtacacctccacgaacttctccccggccagagggctccaggcaaagggactctcagatgtgggcaacggaggctgttcgggaaccggattatttaattccaagctggcagcaatacatctttctttatgtccaaagggtccgaagaagacttcatcatcttcatttgcactcgaagaagacaatgaaagatcgaagtcaaatttttcatcggccaaaagaagaatgtcttccttcttagggtcatccatgttcacgtcccctgcccggcaggctgaaggctcatcgcggccgccgcctccttccatggagagagctgtcagaagtcaccaaagcggcagacgatgcaggacgcgcctccggcacggatttaacgcggcgccgggagacgcgggttgccgattggtcggtttgaaaaggcgccacccatgcctcgctaccttaaaccgcttagagtacttg

SEQ ID NO: 447531 - DNA, 455 bp, Homo Sapiens
caggctttgtaacatcatcattctttctgggctgtctctcttttccagatgcctatgatttggtatttctcctggccagagagtagcactggaaacattgaacacaaagtattctaacccttattgctcaatgtgtttttccagagcagcccaaaaggttatgctgggtttcatgagctgcagaggatgactgactggtgccacctagaaagacaaacagcagaaactgcagagcttggactgagctcagacaaaaatctctgctgcttgtacccagcttgaatattatggccaacacttgaagaatagaaagcatcacttaaaacattttaattatccccacatgtaacatgggccctaaatgttctgaactgaaaacctcactatgtagttgaaggtcaatgacacaagtttcagatattaaaggtttatcactgtttcctgtctaacctatt

SEQ ID NO: 447532 - DNA, 1338 bp, Homo Sapiens
tcggaaaagcctgggcgcccagacaatgtccttttaagaaaggccccgttgaaggttccaaggatggctctggtttcggaacacgttgcaagaaagctggggccttccagggtttctccacgaaaggagtttttccagcccacagccttttggccaagggcgtccggcaacccaccgtgggtggcttctgtgatgaggtggtcgccagtaatcaaaaccagcccaagaagggcagccaaaggcctccttgccagggaaggaagcctcatcagacggggcactgggtaacctccagctgatgccttctaaggtggcaatgtctgcggggtccaggaagacaggcatggaccggtacaactggcaaaggtgccggacgatcgcagggcagcaggcgctgctctgtaccaggtaggtggcagctgctggggaggccatgctcatcaggagcagcaggttctcctgggccttcaaggccacccgactcttcttgctctggcacagcccaagcagggaggtaatcaggttgctctctgtggtcccaccgtccagctcctcggtctcagcaggcatgtggctgttcaaggcctgggccccacaggactccccgtccagctggggcctggcaggagcaccatcgtgggagcagtccttgtccccgtggctggttgtgtccttaggcagggcagtgggttctccgcatgctttcttcctacctacaatctttttaccttccaggatgtaggcgagcagctctgggtcctgctggatcttggagcagaggacggtggtgaactgcacctcctccttttctgtaacggatccggaagcagtcccaccaagtcggaggagtttctgcacaggcctgtgaacgctgaggtaatgacagcagggggtgctgcacctgcgccagaaccttgctgaagaactggaacacctgctgccgcatgcctggggggtactcggccttgcccagcgtgcagagagtctccaggatcttgtgctgcagcaggtacttccaggcagggccctgcctcaccctgcggccgcctgctgctgctcttcatacaccacggatatccagcatctgcttcagccgccagggaatgtctgtcttcttggcgggggtgctttcatctgtgctctcgatgtagtagtgcttgatgcccttccagtgctccacgaaggcctgcagcaggtcaatgctgggctcgcgccttcttggggacttggaccggcagggcctgcacttcccacgtcccggggtgacgggaagggcgtcctgcaccccaacaaggtcctggagttgtcgcccccacggcttcctgcagcagcgccccg

SEQ ID NO: 447533 - DNA, 893 bp, Homo Sapiens
  misc_feature (256)..(256): n is a, c, g, or t
  misc_feature (649)..(649): n is a, c, g, or t
actacacctggtagggcgttaaacccccatgggtgggtgttgaaaaaataaattcggggggttcggttttcccccccaagccaaacatttttttagcacccttccaggaccagaggacagggaccgggattgttgacatacaggcaggaaaaacagcatttccaggagggaaggggtatctaggggagaagtgcctgtcaggagatccttggcaagatgacagtgtgtcctggaggaaatgtgttattcctccctntgaaagccagggagcagggtgcctcctcatgaggaggcctagcatgaacctgacactcagaatatctgttcccatgcgggcaggggctccctggcctttgtggcccccactgaggttgtgtgtctgccctccgcagcgcgagcccagcattgacctgctgcaggccttcgtggagcactggaagggcatcacgcactactacatcgagagcacaggtgcggcctggccctccccagcccagggaccctggagggagcggggaggaaggagtgtgcagagtgtcaccattcaggtgtcctgggaaaggtaacctgcccagtcgttcagaattggagccgagttcacggagacagagaaccagacagacagaagacccagagccctgggccactnccactcctgatgatttagctgccggtcccactctgaccttttggaaagaggctgtgtgaggaaggagtagcctggttgggggtctcactggcctgactctgcaaggaagaggtggctgcacttcccccagcttccagctccagaccttcaggccccaggtgcttgtgcctaggatttaatgatcaaaagaaaagaatttaataaattcccctttcccctgagccagcttaggggcaatgtcctt

SEQ ID NO: 447534 - DNA, 465 bp, Homo Sapiens
tgaatccctgctgtgtccccagcatctagagcagagcctggcacatggcaggcccatctttgtggagtgaactgggaacaggagcgctgggatggtggagtgttctaagtgagacagccacagtgcccgtcctgtttgctcctctcgcccgaactgccactttcagtgtcaggactgggaagagcataggcagaaaggcctggaatccagggagccccaggctgcccactgcccaccgcccacctcagcctggcccagcactcagagggtctcccacctcggcctggcccagcgcacagaggcctcccacctcggcctggccaagcgcgcagaggcctcccacctcggcctggcccagcgcgcagagggcctcccacctcggccttgcccagcgtgcagagagtctccaggatcttgtgctgcagcaggtactccaggcagggccctgcctcacccgcggccgca

SEQ ID NO: 447535 - DNA, 1101 bp, Homo Sapiens
  misc_feature (25)..(25): n is a, c, g, or t
agggccccagccccagccccatggnaccagccctctgctccctccgaccccactgaccagccccccgttgctcacgcaaagccagacccaggttctgggggccaacctgctggccctggcgcggcgggtgaggccctggcggtgctgacttcattcgggaggcggttgctggtgctgatacctgtgtatttggccggggcagtgtgactcagcgtgggtttcgtgctcttcggcctcgccctctacctgggctggcgccgtgtccgcgacgagaaagaacggagccttcgagcagcgaggcagctactggacgacgaggagcagctcactgcgaaaactctctatatgagtcatcgagagctacctgcctgggtgagcgaccaccctcggtcctctgtgcagcatagcccccttccaccccttccatctggggcttttcctccttatgcctagagtcagctccctgccttgggacagtgggccccagactttcccctctccccgctagccgcctgcctgctggacgcgccactcttggaaccgactgctcactctccccacccaccctttcgcatgcccagactggatccttccacagaatcaggacttcttcctctacttgggcaacagcagtaataacatctggggaccccgtctcagccgaagctctccctcctagccaagccatcttgaacgtccctcttgcttttggtgccactcgcggctttgctgctcctggaaatcctggtcccgttacctctcaaaggtttccctagtctttcccatcctcctcgagactttttacctacttaaagccatacggttctctcttttctcgcttttatccccgggtacccgctaggacccagccccggcccctggacgaccctcgggcagccaccttcaagcctccagccgccagactgcagcgcgacagaggcggctgctggacggagggagggctacgggaggaggtggtgcggctgctgcagtgcccgcggcgcacactcccccgcactcctcggccggccacacccttttccggactgtgggctgcgcttgttccgttggggcagagacccttatttctgcggcggccgc

SEQ ID NO: 447536 - DNA, 971 bp, Homo Sapiens
acagttgatttctaggggtcgggccttgggatgaagaaacattgacccagccccccccgaaggggaagttccccaatgagtggctccagtatcacccgcaaaacgcccatgtagctgcatgcccttgactcctgctttgcaaaaatatttcttcacttccacatcaatctgcacatcacctacatagctgatgttcaagtccagcaggatctgctcttttctctgacctgggtgaaccttgactccaatgatgcgcaatggcttttcacccagttccactcgtgtaaatgtaaatgtttgcagatgggggttagatcccctaacagccggagccacagtttcagccagaagcttctccatatactggcccaggaagggccagacctgggccacaatcttattgagccattcagccttttccacgtctgggaagctgacccaggcaggtagctctcgatgactcatatagagagttttcgcagtgagctgctcctcgtcgtccagtagctgcctcgctgctcgaaggctccgttctttctcgtcgcggacccggcgccagcccaggtagagggcgaggccgaagagcacgaaacccacgctgagtcccactgccccggccaaatacacaggtatcagcaccagcaaccgcctcccgaatgaagtcagcaccgccagggcctcacccgccgcgccagggccagcaggttggcccccagaacctgggtctggctttgcgtgagcagcggggggctggtcagtggggtcggagggagcagagggctggtccatggggcttgggctggggccctctcctggagatcgctccattgtgcccacctctgggaggatccgcccgacccagggactggctggaggttgcctagtcttgcgatcagctcccccaggcaaaacgtgatccccgggagggaagaggggacttcaagccctcgtttttgaacgccacccaggcc

SEQ ID NO: 447537 - DNA, 887 bp, Homo Sapiens
  misc_feature (361)..(362): n is a, c, g, or t
gcgtataaatttgtgaatattcggaggcctccgcgcctagacgcctccctgtgtgggagaggaatcccaggtaaaagaccctctcaagaaacttccaattgtggagatttgtgtttaaggaaccgctttcgggttgcccccccggggcgggtttttttatttggtggaagaaaatccaagggccccttattcattgggcccgggaattttccttgggaaaaccagcttatgggcccaggttttcacctaaccttacgggggccccggggggcccaaaaaggaatggttttaagaaaagctttcttgagggccgaagggcggcccgaccaagggtgattatgttactacgattctctttctnngggcaccactgcatatttcatttattttgtttactatctagtcaatgtaaacttcacaagagcaggaatgcttctgtcccttttgttataaagtatccccgggacctcataacagtgcctggcatgtactaggggttcaataagtgtttgctaataaagagatgctgagtgcatgaggccccaagtgggctgcatcacatcccccagggaaacgctgctcacaccattaccccatttcacagatgaggcaatcgaggctcagagaggagtccatagctagctaataagaggtggagacagaattgaaacccaggtctctgactccagggctgtgtgctttcctctctccaagcacacagcactgggagagtcttgtctccaaggcaggctgcatgagatcagacagggagagagcctttttttttgtatctgtctgtataccacaatatggcttaggaaggtcttggtggttaacaaggctcccaaataggacccagaacacaggtgctcaataaacatctggac

SEQ ID NO: 447538 - DNA, 1044 bp, Homo Sapiens
  misc_feature (69)..(86): n is a, c, g, or t
  misc_feature (130)..(145): n is a, c, g, or t
  misc_feature (155)..(156): n is a, c, g, or t
  misc_feature (159)..(159): n is a, c, g, or t
  misc_feature (161)..(272): n is a, c, g, or t
  misc_feature (526)..(535): n is a, c, g, or t
ggggggagaatcccaagccccttgttttttgccgcggtgtgttctttggaaaaaaaagttttggccccnnnnnnnnnnnnnnnnnnggggccgggcgggccaacaaaaaaaggttttaaaaaatttcttnnnnnnnnnnnnnnnnccgcaaaaannttngnnnnnnnnnnnnnnnnnnnnnnnnnnnnnnnnnnnnnnnnnnnnnnnnnnnnnnnnnnnnnnnnnnnnnnnnnnnnnnnnnnnnnnnnnnnnnnnnnnnnnnnnnnnnnnnnaagtatttattgaataaaatgattctatcaacactgctactgtattcaagccagtgcaataaaaaagtgggtggacagaggtcattcactttgactttgcctgccccctccaaatccccagtgtaaacaggaaaatgagaagtcacaggtagaggacatgctgtccaggcccatgtaaccaggcatgtaacatacaaaggaagcccctctggttaactagtcctgaagaaggtaagcctcaagtatgcagcttnnnnnnnnnngtagaggcctcagctcatttgtgaaaggaagcaagagccataattaatgtaagtcctttgggaacctcattctggctgtgtgtaggtttcctggggcccctacataaatgggtaagacgaagtgcttcaaacaaactgtacggctccctttttaatgtctgaaggtctatggggactgtctcctaggatctttgcatgtctgttgaaacaaggcagctggggaacagtacttgtgctactgagtccataggttcatctgttatttgcctggggagccaggggggtaaattcccgaatccagcatatgctctcctgcgggctgtttctcttggcagacactgtggtttagccgtctcagtcgttcctgagcattttgtagaatgttgttaaccaagacaacgtgtcgctggtcattaagtagcttcattaacataggggtcaagatccagggccacgttctgatcgtcatttatgccctcgtgccgaattcgccacccaggcctcgctac

SEQ ID NO: 447539 - DNA, 902 bp, Homo Sapiens
  misc_feature (719)..(729): n is a, c, g, or t
  misc_feature (868)..(868): n is a, c, g, or t
  misc_feature (870)..(870): n is a, c, g, or t
ggcctggggtggcgaattcggcacgagggggcttcaggacaattcgtgatggcgggggctggttccgccgctgtatcgggggcagggaccccggtggcggggcccacaggccgcgaccttttcgccgaagggctgctggagttcctgcgacccgctgtgcagcagctcgactctcacgtacacgccgtcagagagagccaggtagagctccgggaacaaattgacaacctagccacagaactgtgccgcataaatgaggatcagaaggtggccctggatcttgacccctatgttaagaagctacttaatgcccggcgacgcgttgtcttggttaacaacattctacagaatgctcaggaacgactgagacggctaaaccacagtgttgccaaggaaacagcccgcaggagagcaatgctggattcgggaatttacccccctggctccccaggcaaataacagatgagcctatggactcagtagcacaagtactgttccccagctgccttgtttcaacagacatgcaaagatcctaggagacagtccccatagaccttcagacattaaaaagggagccgtacagtttgtttgaagcacttcgtcttacccatttatgtaggggccccaggaaacctacacacagccagaatgaggttcccaaaggacttacattaattatggctcttgcttcctttcacaaatgagctgaggcctctacnnnnnnnnnnnaagctgcatacttgaggcttaccttcttcaggactagttaaccagaggggcttcctttgtatgttacatgccgggttacaggggcctgggacagcatgtcctctacctgtgacttctcatttttcctgtttacactggngnattttggaggggggcaggcaaagtcaaagggt

SEQ ID NO: 447540 - DNA, 1030 bp, Homo Sapiens
  misc_feature (251)..(261): n is a, c, g, or t
  misc_feature (946)..(982): n is a, c, g, or t
aattgagggaagagaaggagtctatcaacacggctacgttattcaaccaggccataaaaagtgggtggccagaggtcattcactttgactttgcctgcccccctccgaattccccagtgtaaacaggaaaatgagaagtcacaggtagaggacatgctgtccaggcccatggtaaccaggcatgtaacatacaaaggaaccccctctggttaactagtcctgaagaaggtaagcctcacgtatgcagcttnnnnnnnnnnngtagaggcctcagctcatttgtgaaaggaagcaagagccataattaatgtaagtcctttgggaacctcattctggctgtgtgtaggtttcctggggcccctacataaatgggtaagacgaagtgcttcaaacaaactgtacggctccctttttaatgtctgaaggtctatggggactgtctcctaggatctttgcatgtctgttgaaacaaggcagctggggaacagtacttgtgctactgagtccataggctcatctgttatttgcctggggagccaggggggtaaattcccgaatccagcattgctctcctgcgggctgtttccttggcaacactgtggtttagccgtctcagtcgttcctgagcattctgtagaatgttgttaaccaagacaacgcgtcgccgggcattaagtagcttcttaacataggggtcaagatccagggccaccttctgatcctcatttatgcggcacagttctgacggcgtgtacgtgagagtcgagctgctgcacagcgggtcgcaggaactccagcagcccttcggcgaaaaggtcgcggcctgtgggccccgccaccggggtccctgcccccgatacagcggcggaaccagcccccgccatcacgaattgtcctgaaaccctccgctctcgacgaattcgagctcggccgatttggcctgatnnnnnnnnnnnnnnnnnnnnnnnnnnnnnnnnnnnnncgccgccaccgcgtgcacctccgaggcgccctatagtgatcggtatca

SEQ ID NO: 447541 - DNA, 841 bp, Homo Sapiens
  misc_feature (140)..(175): n is a, c, g, or t
  misc_feature (504)..(576): n is a, c, g, or t
  misc_feature (749)..(785): n is a, c, g, or t
aagtcccattttcgctgctcctgacttatttttgcttttgtacaaaacccgacagctacagcaaaactttcagccctccccatcatcggtacaaggcaacagtcccaggcaagcaaagctaaacaaggcgtcccaacttnnnnnnnnnnnnnnnnnnnnnnnnnnnnnnnnnnnnacaggggtggacgagcgcaggccggtgctcagatgtgggtcagcggcaccgttccgttgactgcagtcccggcgccctggtagtgctggtgcacgccgtgcaggcgaccgccgggcagcggagaggcggcgtcggccgcgtccccgccgggtggcaggtacatgctgatcatgtcgcgcaggtcgccgaggcacgcgcgctgagagtgcgatgcgatggcgggcggcggcgagctgggctcagacttcactaccgagcccatggggcccaggctcatggcggctgcggccgcagctgcggccgcggcggtggcgggctgctgcccgtannnnnnnnnnnnnnnnnnnnnnnnnnnnnnnnnnnnnnnnnnnnnnnnnnnnnnnnnnnnnnnnnnnnnnnnnacgttcatgtagctctgagcgccgggcggcatcattgggctgtactgcaggccggccatgtcgtagcggtgcatcggcggcagcgcgggcggcggtggcgggctgctcatgctcgggggctgcgcgtagcccccgctctcgacgaattcgagctcggccgatttggcctgatnnnnnnnnnnnnnnnnnnnnnnnnnnnnnnnnnnnnncgccgccaccgcggtaactccagtcgcctatagatctatacatccatagattatct

SEQ ID NO: 447542 - DNA, 970 bp, Homo Sapiens
ggttataaaatttattgatctcatttaggaattaagagtaaaagcttgaaaaccctgaaacaaagtagcccctccccactacccaaacgaaatctgaacacattagcgcgaagaaatatcaaacagatcacggcagaaatcaccaactcaacatgattggacagaagctgtcccgcggccaggtgcggcgaggcgggagacacacgcacacctggctataaattaacattggctttagctgccgcgctgcttggagtggtcagcgccccaaaaaaccacgaggaaaacagacgcgacacgactgggggcgtaggcgttgcagttctccagctggcctcacccgatactatgtttctcccattcactccttggctaactgcaaactaacaagacaacattttcaaatgtaacagaataaccctggaactcaggaggaggagtgggggctgttttttctttgcaaataacacagcgattcccagcctacaaaggtgaaaggagcagcggcgtggggcaagagagctctctagaagtcccattttcgctgctcctgacttatttttgcttttgtacaaaacccgacagctacagcaaaactttcagccctccccatcatcggtacaaggcaacagtcctaggcaagcaaagctaaacaagggcgtcccaacttgggggtgcggggcgggagtgggggtgggtgtgggttacaagggtggacgagcgcaggccggtgctcagatgtgggtcagcggcaccgttccgttgactgcagtcccggcgccctggtagtgctggtgcacccgtgcagcgaccgccgggcagcggagagcggcgtcggccgcgtcccgccgggtggcaggtacatgctgatcatgtcgcgcaggtcgccgaggcacgcgcgctgagagtgcgatgcgatggcgggcggcggcgagctgggctcagacttcactaccgacgcatggggccc

SEQ ID NO: 447543 - DNA, 375 bp, Homo Sapiens
aactctatataccttctctagtgatcttaactactccaccacattcatctatcaaaagtatctttactcatacatgctgaatttgtattccagcctggattccagaccaacagggatatccctatccaaaactgccaagagcactattttaccctatttggttgctgcattgaccatttcactttgttctgagaggcatcccgatccccttactcttataagaacttccatttcccaggctcccttgccaacttgctgccagctaggttttgcccagaggcaacactgagggatactggcatactgggggggcaagaggagatggaaactcttctgcctcaaacagcatctgcggctcccactcccatgtctatg

SEQ ID NO: 447544 - DNA, 443 bp, Homo Sapiens
tgacttaggacaatcaaaaatgactagtcaaaccaatgatctagccaatttctagtgccggtgagtgggaagagtggtgaagaccctaagacatataccccgtgggcgcctaaagcactaagctcacgacgctgggaaagcggggccgagaaggagggactcggggcgacccgacagcgccagacagggcggccggcgccgagggccgctacctcggtgcggcggtacagcgtggcttccccgaaggcgccgcggcccaggacgcggatggggatgtagtgcagttcctcctgctccgccgcgccgccgccggctcgcggcccctgactggcgctaggccccggactcgagtccccgcaacccccggactcgctcccaaagtccgagttgatggaatcgcagtgtcgctcgtactcgcccagcaccgacatggcggcggccgc

SEQ ID NO: 447545 - DNA, 496 bp, Homo Sapiens
aacaaacagaaacggagagatttattttaaggaattgtgtggctggcaagtccgaaatccatagggcaggctggcaggctgaaaagttaagtgagggttaatgccatagaccggagtcctgagtttgaattccacagggcaacaggctggaaactcagatagggtttctatgttgtagtctcaaggagaattccatcttctttaggaaacctcaatctttgttcttaatgccttcaactgattggacagggcccacccgtagtatggtgggtaacctgctttactgatttaagcgttaatctcatctaaaaaatacctttaccaccatgtccagactagtgtttgaccaaacaatgagttggcatactccacgcaaggtgacgtgcaaaatgaaccatcacagcacttcttgtgtcttcatgtgcccacctggtacatgggggtacaactatctggcccaaaggggtggtcaatcctgagtggataaataatagga

SEQ ID NO: 447546 - DNA, 574 bp, Homo Sapiens
ctgggcacacagctgattgggggtgaggtgaagcaggtcttgggcttggagagtgaccgctcttcgctcaccggagttgggttgatcctgcgagaaggcttcgtcctgcctgtagggccggggggaaccgagcctacgggagggaactcctccaggttgctgaggtttggcggatcagacagcgtgaggctggggcggctggggctgccagagcccctaagcctccggcccccggctccgggcaggctctccccgctgaccccctcctccaggccgcggcctccacgctcgcgggccggccccgggccccgcctcctgcccccgcggcgggccagaggggcctcggcagcggtgctctgggcctcggtcggagggaaaagctggctgcgcgccccgcggctaccccgcggcgggcctcccggcctccctggcaaggctgccgaggcgcccggggtcttggcgggggtcgggggcccctgcgggaggacgcggctgctctgctccctcaggaagttcaacaggaacggtacgaattctttccgcagggcccggagtgagctgcccgggcccaagc

SEQ ID NO: 447547 - DNA, 954 bp, Homo Sapiens
cttaaaatagtcaccagacggctttaacaaggaaagctcttctgatcttctaatattcaggattttgcagatatcactgacagctttaaaaaccacagctgagaagctgactcgcaacctcaccatcttcaaattcggcagacgaaggcgcagcattttatgctgaggggtgaagagaagctttgcatctgcctggaccccatatttgtccagggtccagtgggttttcagaagccagcaatgcttctgttcccaccaaagagcaaagtctgaccagtcttgggatatattgatctgttctactaacttgagcatcactcctccaacatgaaggtctccagatactctcagtgtgacgtctttctgctgctcttcattgggatggtcaacgcggaccacaagctcccaggaagcaaatgtaaagtcagtggatgacagcattgtggcaaatgctggtgtctgctcctttccaggagcccagtagcgtccagcctcgcagtcgcgcagcgtggagagctgcgtccctacaaactaccccgggccgagccgaggagcgggcgctggcgaagtggggagcggggggcgcccagtggcggcggctgctcagctaagtctgcggcaggtgagggactggagccagggcgagcaggcgaagctgcctcagggacctcccacggaggctcggtgcctgcccccagcctggcgcggcgtgcccggtgcactgcacaggccccagcggcccggctgagggcagcgcgcagcgtggcaggcgagggcacgcccagccccgggcctgctaggtctcgctcccgcggagaggaggcgcagtctgcagatttttaagggcaaagggtggccgaagggctgctcggcggagagaaggcggcgagaacccggggcgcacgctcgacgcgtgggtcgacgatatcccggaacttccggaccggtaccagc

SEQ ID NO: 447548 - DNA, 457 bp, Homo Sapiens
gggtaacaacgcagagctcaggtgtgggaaggtgccaggggcaggggtgcagaggggctgaggctaaggggggtgcagaggctggagaaaggataacaggagagagtatacaggcatgccttgatttattgcacttcacaggtagcagaatttttaaagaaattgaaggttttgggacatatatgtgacagcaataggttaagaaaagcaaagcagagaaattgaagatttgtgtcaacactgctttaagcaaatctgttggcaccatttttccaatagcatgtgcccattttgggtctctacattgcattttggtaattgcttgcaatatttcaagcattttcattgttattatatgtgttatagtgatctgtgatcagtgatctttgatatattattgtaattgtttcggggcgccatgaaccgcacccatataacacggtaaacttaatcagca

SEQ ID NO: 447549 - DNA, 581 bp, Homo Sapiens
ttttttttaatatctgaagatatttattctgagccaaatatgaatgaccatggcccgtgacacagccttcaggaggtgctgagaacatatgcccaggatggtcagggtgcagctcggttttatacattctagggaggcatgagacatcaatcaaatacatttgagaaatacactggtttggtggagaaaggtgggacaattcaaaaggaatggggatgggggctttcaggctacaaataaacttaaacatttcctggctgccaattggttgagtttgtctaaagacctgggatcaatagaaaggaaatattcaggttcagataaaagattgtggagactgaggttcttttgaagtctcatagtggctgcccttagagacaacagatgacaactgtttcctattcagacctttagaaggtgctggactctcagttaatctcctcaggattgggagggcctggaagaaaaagatctagctatgttaacagagattctttagagatgtaaatttcccccccaccacccagaaaggacagttttacagggccatttcaaaatacgcaaagaaccatgttttgggg

SEQ ID NO: 447550 - DNA, 679 bp, Homo Sapiens
  misc_feature (633)..(633): n is a, c, g, or t
tgtacttttctgtaatgaacactatttttgtggaagagagtcttttttgcttgctgtatttttctttattgttaattgacaaataattgtatgtattcatgaggtataatatgttatatatataacacttttctttttataaacaaataaaaacaaacatctctcttttttctttccagctgtagcaggccagggacatggggctgggccctggacagggtggtgaggacatcccggttcccacgaaaagcaaccgcctggcaagtctggagcaggcgaagagggagtgagggggtgtggctcgctccccaagttctttggctcagcttcagtgctgggtcattcttggggactgctatgcccactgggcactgcagaacttctggtgcgtgtggctaaggggagtcgggaagagccctgtccctggaccagaccttcctgttgggagtactgggacccagtgaccttgtgcacctttcctgaagcttctgggccccaagtggtcgaatgcagagtgggctggggagtcacagactgtgcttcctgctttcaacctccgttccaggttcctgtgcgttccgtgggcccatccacctggctgggcttggctaggctgtgaccttctctgaggancagggctctgcctgcatttggagctgctgggacctcagtgtcaccc

SEQ ID NO: 447551 - DNA, 589 bp, Homo Sapiens
  misc_feature (575)..(575): n is a, c, g, or t
tgatgtcatcatttttattcattttctctttctgaaaataagagtaaacatacaatatatattttctgatgatatatattagatctagttaccgtagggtcagaaaaccatccccaaccactcggaggcagctttcaatcctgacattcggtggaggggaaaaaagtgtccgtgattgccaaaagccgaatctttctttattattacacagcagtaacaggaaaacctaatgctctgtcagacacaactgaaacctgggaggccaggaggagggcagcagacactacagagaaaccccgaagaaacccaaacaggaggcgcacccgcttacccagccccatctctcggcccagtctttgtggcaggaggcctgggctcagaggcgacactgagggaatgtatcacaggcagtgaccacccttggggcagaagtggggagttggggatagtgcagctgccagtcggtgggggagcccgagacaggggctctgggagcttttgcctgggcttgaccatgtggggtcagcactcgggaggctgtggcccaactggcacagctgtcagggcaccagccngggtggttgcaagt

SEQ ID NO: 447552 - DNA, 1131 bp, Homo Sapiens
ctggattatcatcggctggaaattcatgttggatgcaagtttttattgataacaagttattttttgttttatatgcaaaaaatgttcattgaatgcctcctatttggctggcactgcctaggcactttcacaggtatttcatcctaatcctcacaacagccctatgaggtaatcattggtcccagtttacagaagccttgggtgggagattattgcttgatatacttctatttgccacacatttttgttggcaagacgttcgtatcggctggtgattcactggtcaagagctctcattggccaggagttcctatttgttgctgtaagattcaaataatcaaaatactagaatttttcccccacaagaatgatgggaccaatggcataagagtaaaggaaggagagtcagtgggtctctccctttgaagcaccatttgagtttgcattggtcagccccaacacaggtgggcgggatgaggtggtggaggaggagacgcggtggttataagtcttctcgcttcagtaggatgagcttcctcacgagcgctgtgatctggggtctgacctcctccactgacacagttgggtcccaagcccctaccacctttccatctggggctactaggtacttccagaagttccaggtgggctccttcccagaagtctgggccaggtacttgaaggcaggatgggcaccagtaccggtgactgcaatcttgctaaacatggggaatgagacactgtaggtgcggcgggcaaagctctcaatctccttgttgctgtcaggctcctgttggccaaactggttgcaggggaaggcgagcacgttgaagtggtgggggcccaggtctcgctgcagctgctgcagggctcggtagtgctggtctgtgaagccgcactcgctggccacattcaccaccagggacaccgatccgcggtacttctccagcgacaccagtttgccccggatgttgaccgccttgaagtcgtagaagtcctgctcctgctgcgcgcaggccgcagcccacaggagcagccacgccgctgccaccgtcgccgccaccatggcttgttccggaggtggcggcgtcgccctcgtgccgattcaccacccggcctcgactagccgta

SEQ ID NO: 447553 - DNA, 245 bp, Homo Sapiens
aatttttgaaaactttttctccctcatccactgaccctcaataaaatcaacaccttttaatgtcatctcctgggtattgctgggcctgaacaaattagaatcctatgacataggcatggaaagttattacagactctacagcctgaattacctactacttcataggtacatccctagctaggctggaagctgccaagggacatggcaacagctcactctcaacagcaaggtagaacgtagggact

SEQ ID NO: 447554 - DNA, 1386 bp, Homo Sapiens
cggcatcttatttggttgtttttattgttctgtggcctcctcccacctgctaacatttaggcctcagcacatccggtggctacaactaggaatcacacattagtaagcaagttcatttccatttcctgaaggatgaatttatcttgggaacatttgagatgggtacatacctcccagagccagacttgggaggaatctgtcaaaaatatcaagatgctgagccttgtcttagaaaggggcttcagaaatgctttcatgggcggcggcttcttcccggggtaaaggtctcgtggagctgcagggccttgctcccaggatggtaaaacagggacccagagctgttaagtggctcccacaaagtcacccaaccaggctgggccaaactgggtttgatggccaggtgtcctgtctctaagcatctctggggtcttgctctgctgagctgaatgtgaactgtgagggtcaaactacttttcccaactgtttccaaggcttagcagaaagtagaggaatgttcttgcaacctagctgcttgccgttgctttactgaaagtgcctctgttgtccccttccaggttctgccacattctttgagtcaccttctggatattctttgtaaagtttgtgtcgtaggattcgcccatctgcttgccggcgctgcttgacgcactgcccacggttggggataccttcggccacgtcacctgggctcaggatgtggcactcatagcccgagggacagagcaggggttcggccccatcctccgtggtgctgcacgcctctgcttgtaacacctcctcagggccatccaggagccagccattgccaccaagccatcgaggtttcggctgcaccagccagtctaagactggcgggggcggcacagcttctaggcaggcgtaggcgcatccgttgtagcagcagcgccggtgccgcgggcactcggagtccgcctgacagcgcgcggcctggcaggcgccggggggcagcgtccgcggaggcggcgggcagcggtctgctcggggctgccgggggccgccgggcgcgcccgcctcctcggcacgggatttctcggccagcctcgcaggcaatgcccgtttccagatattcttggcagagccggcgtggaggagaagtagcaagaggcacagagcccggatgatctgcctcctgcagctgcccggccccacgccggttaaaggcatttcctccctgggcagcgaccttccagacgcacacagaagaggggcccccctcgctgcgtgggcctgtgagtggggacaggagcatgcacagtctgctggactttcttagttccacccagcagggtccctcggatcatgtgtccgcgtccagcacatgccccttcctcgatggtggctggc

SEQ ID NO: 447555 - DNA, 914 bp, Homo Sapiens
  misc_feature (151)..(152): n is a, c, g, or t
  misc_feature (451)..(479): n is a, c, g, or t
ggtataaagaatgcacgggtaaggaaggcgcgcgcggggtgaagggtggggctttccaattttgaaatgttctaggggatacttgcgcgggggcggttttcttttgatgggggcggccttacacatttcgctcgccgctcggagagggggnngggtttttactcattagaagaaaaaagaagcagcggcggcggtatgtattgttcgctccgacctttgcgggtggcggggaaagagaacgacggctggtggtgcggccgggggatcgttcagaaatatattttggggaggcgaactgcggggacccacaccggagaaaaactgttgttaatatagagggagggtgtgctttagcgggggagaggaagtacagggccagaaagaggtgggttatattttggggggaatagtaaacgggataagtagaatgtgtgcgggtgtggcgatggcnnnnnnnnnnnnnnnnnnnnnnnnnnnnnatattataggatatgagcgttgctcttttttggcgtggtgtgcgggcatggttatatcttgggggctcttgtgggtttcggtgggtgggtttttttacatctgccacttcatttattttatttgcaggaggagttgaaacaaattttaagggagattttcattttccccctaaacatgaatcattcaagtaaaaccaacttaactatagaaatgtagcaaagtaaggggaaagcagcacaacaacccaagaggcaaaggctgggggggagaggtgggtgcagtccgcatataacatatgcataaatgccttatgattcacctgctcaggaccgcctccccagaaggcaagcacaaggacccattttaagaggatgtttccccccaaacatctgagaatgcttcaacttaaacagcttaaggttaaaaagacaaag

SEQ ID NO: 447556 - DNA, 530 bp, Homo Sapiens
ttctttttttaataggactctaggaacaccagggaaccatggactggagacagtggacaaagccctgttactctgtttggattcttgcaatgaaaactagctttcgcttctctctacactggcatccacatgtacttacttgcaccctgtgatgttacaagtgtgttttatttcctaagcttctgcatgtcatcagaggtatacaaggagtagggagatgcactgaacaaacctccccccaaggtgttattggcagtcagctcttcccattttccagatcagtctgccctgcacataaaatccacagctgctgactgcagggcctgtcactgttaccagttctgcctcttcatcacacagtcagcatgacttttttgctcaatcaaacttaccccaacttggattgttccattggagtggtctggttgctgctactgcgatttcccagctattaacatagacattacagcgctccaaccactcaaagactgcagcaacacagtcatcctggatagcagccacttcaggga

SEQ ID NO: 447557 - DNA, 504 bp, Homo Sapiens
cagctggccgttctgcaaggcttcctgggcctgcagctccctgacgtcacacacgggcggccgcaggtccagggggccgtgcgcgaaggcacagtgcagcccattcttcacgcagtggccacgtgcgtctgtctcgtggatgcaggttcctgttttgtagtaacgcaggtggtacttgcgttctgtgtcccccgtcgtccggtgcaggtagggacactcgtcgccgtcggggcacacgccggtggcttcgttgtacttggagcagtacacgtcggggctgtagttgaaggtgccgtcgcgcctgcggaggggcctgcggcgccgctggttgaggaagtgccagtggaagcaggtgaacggccggtgctgcgcgcacttgtgctgtgaaaacagggggcactgctccgtcctgaactccttcaggtacctgtagtgggtcggcttctccgtctgcgggggggacccgctcagcgccgctgccgccgctttcgaaaccgacggcat

SEQ ID NO: 447558 - DNA, 508 bp, Homo Sapiens
  misc_feature (22)..(22): n is a, c, g, or t
  misc_feature (88)..(98): n is a, c, g, or t
aagcaaactacaactaacaagnaaaaagcttaggaattggcaatttaaaaaaattttaaatgcattcaaatgagaatgtttaatttgnnnnnnnnnnnacaagaacttccagatgctcactgcatgcttctctctttatctctgatatcagatgctgagtgcagattgttccatcacaacggattttagtaacagctactcaaaataacatgctgttataactccttaattaaaagcgctttagttcaaaagccacatttgataagcttatttgttaactaaaaataaaatcggtctgcaaatcagaaatttgatgtgaatatctacgtgccataaaagtacatggttcatgtccagttgaaaagtacagctgcagacaaaaggctttctcatgttcaactcagtgttttataagcaatgtagcaaagacttcaaaagaggtggccatttacacaacagtgtaattacttctaaaattgcatttctaattgtgccatatcattcaagt

SEQ ID NO: 447559 - DNA, 413 bp, Homo Sapiens
  misc_feature (111)..(121): n is a, c, g, or t
  misc_feature (391)..(391): n is a, c, g, or t
ttttcttttatacaagtccgagaaagcaaactacaactaacaaagaaaaagcttaggaattggcaatttaaaaaaattttaaatgcattcaaatgagaatgtttaatttgnnnnnnnnnnnacaagaacttccagatgctcactgcatgcttctctctttatctctgatatcagatgctcactccaaattgttccatcacaacagattttagtaacagctactcaaaataacatgctgttataactccttaattaaaagcgctttaggttcaaaagccacatttggataaggcttatttgttaactaaaaataaaatcgggtctggccaatcaggaaatttggatgtgggatatctcggtggcccttaaaggtacatgggttcatggtccngttggaaaggtacagctggcgg

SEQ ID NO: 447560 - DNA, 566 bp, Homo Sapiens
tcattgcatatgtagagaaggcatgcgagttgtgttcctgaaaaagcgtacgatgacaccctagtggtaacgaacataactaaccctcatatcttgcatctcctgctgtaataaatggtacaggcaagaataatcaatggatactgaaaccattacataaacgtggcagggcaatagaatattcctacagggggcaaagtacaccccacaaatcattcagtaatttaaaaggaaaaaaatgttggatccaatttatacccagccagcacatccatttgaccctgcctgcccctggggacccactaccctgatcctaggtaaagcagctccagtgatggccgcaaagttccagcttccaccttgtcaccttacctcctataatgacaggcaccgctgtctttggcaaggccatgtcattccacctgccagggcaggagctgcagcaactcctgtgcccaggtccagcaggagccccgggtgaactggctttcccagtggctgtgtcgaggcagctagcaacacaatcctgaagtacaagtgctttaccaccacgtgagctttgcctt

SEQ ID NO: 447561 - DNA, 511 bp, Homo Sapiens
ttttttttatggtctggagacagagaaaggtttattccatttggccaaagcaagaagacaagacagcaagatttctcaaatccccttgacaaagagataaggagagggtttttatgcagctgacgagtcagggaaggggagttttggggaatggagggaaagtccgtgtgtcttccgtgtcagctaacactttgagcagccagacctccgggtgtcagcacctggtcgcagcactttcaaggcattcactccgtctgcaaacatttctcatgaccctcatgttatctcctcccgtttgacaaagaaacagtagatcagcagtttataatgatgctctcctggcacagcctggtgccaacaaacatcttgcaagcactgactgagccccggccagaagtctggttctgttccaagagcttcaggtagtggctgcccactctcaggtcccctcaacgctgggagctgttccatcatgcaatagaagtttttttctgccctgctcactctctgg

SEQ ID NO: 447562 - DNA, 392 bp, Homo Sapiens
ttttttgacgctctggccatgggttgtgcaaagaaagctttttatttgagaacacctagatacttttggaaatgttcttgttggatcacaaacaacctaattgacagtctatcgccaacatccacaaacacagcaaacagtccagtcctgcagaccacacagggtacatctagagggttctacttgcatcacccacacttccactcctgtgaaacaactgtcttgggcatgaagaagggccaggataggccaggtgaatggcaggctgcccaacaaccccaatcccaaaccaacctcccaggccatgggccccaagtccctgcaggaagatgctaataggtacaacaggtagaacatgtagacacaaacatctagtttattttttctgactg

SEQ ID NO: 447563 - DNA, 792 bp, Homo Sapiens
ccgcaggggagttaaattgctgccgttcctctccttctctcgtgcgttgctgccttgttttctaaaggaacgttttaattcacgtgttttagtatttttctacccgggggcgcgctacccgcctgggtccagactctgctttgtaaacgggttttctatgtatggtatgtgtaggtatactttggacaccttacaacgcttgcgcctctccaacagaggcacgtcttggttattttgggcatcgttcttccccttccacttggtacccccgaacgcagtgtgactaaactccccactgccccttggacgccgatcgccttggggtgcaagtttggggtgcaaacgtctacttcgcaagagggcttgggaccgccccgccccgccccccggccgccagaggttggggaagtttacatctggattttcacacattttgtcgccactgcccagactgttgactaaccttgtgagcgccgggttttcgatactgcagcctcctcaaattttagcactgcctccccgcgactgcccttttccctggccgcccaggtcctgccctcgccccggcggagcgcaagccggagggcgcagtagaggctggggcctgaggccctcgctgagcagctatggctgcggcgatagccagctccttgatccggcagaagcggcaggcgagggagtccaacagcgaccgagtgtcggcctccaagcgccgctccagccccagcaaagacgggcgctccctgtgcgagaggcacgtcctcggggtgttcagcaaagtgcgcttctgca

SEQ ID NO: 447564 - DNA, 770 bp, Homo Sapiens
  misc_feature (44)..(44): n is a, c, g, or t
actttacccttaccaatttaatcattcacagtgacctcacaatncagagaacacatgctctctccatgaactctccccttcaaggtacattcacagcctaaataccagaagtaattttctttacgaacaaatttactgattgacaaataagcatccacacaggaagaagaatgttagggtggctggaaataacagacattcaaatacatcacacggtttaaagaggggcctagttttcctgagtccattccaaagtcagaaacaggatgtgagggagtgtgataggtggtgcatgagactccttctccagaatttccaagggatggtaacttagattcaggtctggtcaagaataataatgatgtttgaagatgaggggaatgaaatacatgtagaggcatcctaggatgcttcagttctaaaaagaattaatctacttcttcaattgtggggcctgtggcaggccttccaggcacataccctgttccgcaggcaggcccagtgcatcctccttggtagagttttgtgatgataggggtacacatctgctccaattcctttttcttatgatcaaactcatctttatctgccagttgattgacctgcagccacgaaagaagctcgttgcatttatccaatatgttattcttattagactcactaatcttggccttcaaaccttcatcactcacaacactcttcatgttaaaagcataggactctaaggcattcttttgagcaattttctccctctggacctcatactcagc

SEQ ID NO: 447565 - DNA, 1173 bp, Homo Sapiens
  misc_feature (77)..(109): n is a, c, g, or t
  misc_feature (1045)..(1045): n is a, c, g, or t
  misc_feature (1054)..(1054): n is a, c, g, or t
  misc_feature (1151)..(1151): n is a, c, g, or t
  misc_feature (1158)..(1158): n is a, c, g, or t
ttttatgaaaattctcagagataatgcatttataaacacagaaatggttacaacaaagatggccgtgatgagtgagnnnnnnnnnnnnnnnnnnnnnnnnnnnnnnnnnaatccgtgtccggcatctgactgtggcacctagggagctaagtccagtccttgcgtttgccttgaactctcccttctccgcaacacccctgttttggagtttcacagataacacaaagcctcccacagctccttgggggtgggttggggagactgagagtatagggtctttgtaggcagagaaggagagaggcttcaaggaaatccgtaaaaccataacacacacttctaagccacctgtgaccaacttgggaatttctggccccttggggaccacatctcagcccttgcccccttcaaataaaaggaggtctagcccctaccccaaatctccttctaccagcagtcaataggaagcaaagtgagacgatgtaggggaagaaatggctctcagggactgaggcatttgagaaacctctgttcttttgcaggcaagaatagaacaagaggctggttgcatttggggctcccttttctctgttatctgggagggccagcctctagtcttacatcagcccaaactttgaggataaggagggtaaggatagggtaagtggccacactggacaaggttctatgaggtcatagcaaatccttcccttgagcaccgacccccagttttagaagctttgcttgggaggggaggctgctggatgacaccatcagctcagtattcctttgcaatcaggagggctgatgttccttttgaagaagagttcagaaaaaggatggtatcctgtgaaggaaagccgtgacagaggcccaaggagatggagccaaggcctgtcaaggaagaaaaggacttttcccaccaagagttggagaaagaagacaccaggactacttcttcctcttcccagtgggtggcagcacggatctctaagagctggccaggtgctccacctggatggtgctggtggtgacagtgacggcagantgtccttantgactgctccgccgtcttatacggggtcaggtcaaaggaacactggggtggagggttgcgctcgctgtcccccgacggcctggtcgacgatatccantactcgnggcgtaccagcctgg

SEQ ID NO: 447566 - DNA, 633 bp, Homo Sapiens
  misc_feature (418)..(418): n is a, c, g, or t
  misc_feature (540)..(580): n is a, c, g, or t
ggggtaaaatggccaacactggaacaaggttcctaatgaggtccaatagcaaaacccttccccttgaagcaccgaaccccccagtttttagaaagctttgccttgggaggggaggctgctggatgaacaccatcagctcagtattcctttgcaatcaggagggctgatgttccttttgaagaagagttcagaaaaaggatggtatcctgtgaaggaaagccgtgacagaggcccaaggagatggagccaaggcctgtcaaggaagaaaaggacttttcccaccaagagttggagaaagaagacaccaggactacttcttcctcttcccagtgggtggcagcacggatctctaagagctggccaggtgctccacctggatggtgctggtggtgacagtgaggcagatgtccttatgatntccgccgtcttatacggggtcaggtcaaaggaacactggggtggagggttgggattgctgtccccacccacccccaccctggggggctgccccaggagactggaagtgtggtggtggctgtnnnnnnnnnnnnnnnnnnnnnnnnnnnnnnnnnnnnnnnnntgatgcctgggagcctggcctgggcctgggcttgagcctgagcctgagcctgg

SEQ ID NO: 447567 - DNA, 1759 bp, Homo Sapiens
  misc_feature (85)..(104): n is a, c, g, or t
  misc_feature (111)..(124): n is a, c, g, or t
  misc_feature (136)..(260): n is a, c, g, or t
  misc_feature (1064)..(1072): n is a, c, g, or t
ggggggatcccacccctttttttgtcccgggtttccttgggaaaaacataggccctgtttcctttcctttgggggcccggccccnnnnnnnnnnnnnnnnnnnnttttttnnnnnnnnnnnnnncccccaaaattnnnnnnnnnnnnnnnnnnnnnnnnnnnnnnnnnnnnnnnnnnnnnnnnnnnnnnnnnnnnnnnnnnnnnnnnnnnnnnnnnnnnnnnnnnnnnnnnnnnnnnnnnnnnnnnnnnnnnnnnnnnnnttgtaaaaatgaatttattaaaatgctcataattataaaagaatattaaaatgcacagaaattaacattaataattataaaagaatattaaaatgcacagaaattaacattaattacaaactttacatcttatgccacaatgtgtgaaaagcatcatgaatagttctacttcagttaagctgctcatacatttttaccctctcaaacataatatgaacataaaatggtacaagaagtgtttcaacaagagtacattctgacccccattgtgaattaatgttttatgaaattcaaggcacacatgcaataaaaaagggaagactttggtgacagtttataagatggccttgtttagttttaaaataaaaatgatagctttccctttctaatgatatatagctaaattatctgagggatgtttaatgaaaaatcccctgagtatttgctctaatgtttcaatatgctaaaattcacaggcattaaaaaaggatataaagctcagtttctctagtggttaacactggacaggctgaaggctagattctccctcttcacaggtccactgccacacccatcgatttcgcccagggctgctgcctctgaagccacttacagatgcagccaccattgtctgcagacacagctccatgcttttctttatcactgcaagtcagccgtggactcactaacaaacactgtggatggcatggggaaatgaccctgcatctgcactacaactttgctcttttgggcatcttaacagtgtcagatattacatttggtgcctttcaatatgtagagggnnnnnnnnnccctcctgtccacagcagcacatttaatctatgaagaggattttctctgctggggctatgaaaacaaatgcacatttcttttaagttctatcatacatacaggagataaggtaaaaacatttccttttctatgctgacatacatggcgagtaactgccaaatttaaacactaggagatagtcacacacttcagagaagagaagaggtactagagaggaagtgacacccgcttccagaagcagtatctcaggagtgaagagaggaacagtggcactcccgtcttggctgcgaatgagaaagagtttccttcagtgggaagaaattcatttctccatcccagtgcagtcagacttcatggggcctgtcttgaactctgattgcatcattaacacgatcaagagagacagtgaaatggggtcccggatccactgggacaattcaaaagcctacaatactgctttgatggatcctacataattacttacaaatcattcatggcaggcatttgaaatcaatcatgacctagagttacgctactttattgtaaaaagcctctaaaatctgagttttcctttgctgctgggattctgataggttggctcctctggtgtttaacagcatcccagtgaagcccatgcagcatgaccatgatgcaaatcacctccctcttgtgcacccagcaatgac

SEQ ID NO: 447568 - DNA, 541 bp, Homo Sapiens
cgctgctgggctccgcggttctggggctgctgcttgtgctggccgcggtggtggcctggtgctactacagcgtctccctacgcagggcggagcgacttcgcgcggagctgctggacctgaaagctggcggcttctccatccgcaatcagaagggagagcaggtcttccgcctggccttccgctccggcgcgctggaccttgactcctgcagccgcgatggcgccctgctgggctgctcgctcacggccgacgggctgccgctgcacttcttcatccagactgtgcggcccaaggacacggtcatgtgctaccgcgtgcgctgggaggaggcagcgccgggccgggccgtggagcacgccatgttcttgggcgacgcggcggcccactggtatggtggcgccgagatgaggacgcaacactggcccatcagcctggatggccagcaggagccccagccgttcgtcaccagcgatgtctactcctccgacgccgcgtttgggggcatcctcgagcgctactggctatcttcgcgcgcggccgc

SEQ ID NO: 447569 - DNA, 892 bp, Homo Sapiens
  misc_feature (178)..(178): n is a, c, g, or t
  misc_feature (722)..(722): n is a, c, g, or t
aatttgacctcatcgaagtcgaagtcgccataagcaggtgtgtacatgtcgtcgatttacaggtggctgctgttgaagtggtgcaggcggatctgttgggcaaaacgcagcaccttgtcctggtccacggcgcgcccgtacagcgcccatgtggaccaaatggggtctcggaaggccntcgggtgcatggcacccttgacggcttgttgaagtagcgacgcaccatgtacttgtggatggaggtgacgtctgagcccacgcacactcggtagctcagctcttgcgctgcggcgcggccggcgggtggcttgtagggcgtgtcgtggtagcgcgcctgaagccgcagcgagcgctccgtgctgttccagcccaggtggaagggcactgcgtcattgactttgatggcggccgcgcgcgaagatagccagtagcgctcgaggatgcccccaaacgcggcgtcggaggagtagacatcgctggtgacgaacggctggggctcctgctggccatccaggcggatgggccagtgttgcgtcctcatctcggcgccaccataccagtgggccgtgagcgagcagcccagcagggcgccatcgcggctgcaggagtcaaggtccagcgcgccggagcggaaggccaggcggaagacctgctctcccttctgattgcggatggagaagccgccagctttcaggtccagcagctctgcgcgaagtcgctcncgccttgcgtatggagacgctgtagtagcaccaggccaccaccgctgccagcacaagcagcagccccagaaccgcggagcccagcagcggcttcagctctttggaaggcttgggcttggcaggtgagaagttgtcgggcaggaaggtgtacatagctgcggctgcgatgg

SEQ ID NO: 447570 - DNA, 446 bp, Homo Sapiens
ttttcattcaaggagcatttattgatcgtctagtatgaaccagccccagtcaccaggcattgaggaaatcattggtaagtaaaagaggcaagttacctctcaacacagattttgtttttaaacctcacagtcttgcaggtgtcattgtcctcattttataaacaagaagagtgaagttcatacatggtgagcaggttgttcaaaagcacacccctaagaagtgacagggccaggactcatctcttcccttctcaacacttcctctcctccttgctgggtggggtggcaggcagagggagaacctgcaaattaacattgtgtcattatttgggttctgaagtccctagatggtcttttatggtcttttatacttatggagagaaataggtggaaatatgtctcctccatgttcctggttttaacttcatatcactgaaagaggcact

SEQ ID NO: 447571 - DNA, 497 bp, Homo Sapiens
ttttaaggttatacatggatctaaaataagttttatttaacaatcccttctctattacacatcatacacaaattattgcatgataaaatacttccaaggtgttggcaagagtatacatggtaaaaggggtcctccactagtcaagccaggctggagacctcttatctggtctagattcttcaatttatagatgaggaaactgaggcccggagagagtaagagacttattacagtctcttacaaacttaagaggagcacagcgaagactcctaagttcattgttctttagcggcagtctgggtgaggttaagtgcctttcaggtcccaggagacttttccttgctggaaaagatctccagcagcggagtttctgaccctgcccccttcaccaggtgcagccttacccacactaggctcattagagaacaaatattcttgggggctaagcaatttaggttcactttatgaggggctgacttccccttacatgcagtcgg

SEQ ID NO: 447572 - DNA, 472 bp, Homo Sapiens
attttgtaacgtttttaataagaaaagttttaaacaatttatttttggcaaaaacaggtagggcaaccaccaccccacagccctgagtggaataggaagacttggaaaagcacacgaagagggcagggacatgatgtgtcatcttgtagcagcttctgagaaagagctcagtccaatggcaagttcaagtccacgggtgaaacagccaggatgccctcccagcccccgtgggcctggatccagggcgtgaagctgtgcacgtgctccacgctgagtccggccagggtgccccccagcccggccacgcgccggctcagctccatggctagggccaggcgggccaggggctccggggaaggaggcgggggcccggggcatgctcggcttgggcgagagctgtcatcccggctacagaacagctccaccaggcgggcgaaagagtcggaggacaggcggaccagcttgctgcgca

SEQ ID NO: 447573 - DNA, 513 bp, Homo Sapiens
tcagattccacaaggatttattggcaccggacctagcctggtgcccgccccttcaaggaaagacactaacaaggaggagtgccggcaccgcaagagccctcccagaagcgcccagactgggggtcggggaggacgctgccattcgtggccaggaagggaagggcgattccggaggagggtgggcacggcgcagggaaaggccgggtggtgggatgggcaaggaggcggggtaccggccccgctagaaggggaactcgcagacgtagtagagacgccgctggcagtcgtggtcccaccaggagccgtcgtcagaggcctgcgccacgcagttctcgagcgtgccaccgttgggctggtccgggctgagcggatgcggcgaggcgctgggctgggcgccgagctcggggcggggtgagcgatgccaggcgaagaaggacacgcgctggcccgtttcgaagaggagaggccctcggcgcgccgatcgtgcacgcccagccacacgggccagttgta

SEQ ID NO: 447574 - DNA, 507 bp, Homo Sapiens
  misc_feature (376)..(417): n is a, c, g, or t
ttttgatttaggacgagtattttattagatttggtactttacaagattcaagttcttaaactcaagatctggcatcgttcccttccctgctaaccttcagtcccgaattaaacgcagacgtcttgacccgcagcccagctgctctccagcctcgctgctccctccgctcacagctccgcatcctctgccttcctcacaggcttccgtccgcacccccgtcctaccggctgacactgtccaactgtccaagacccatctcaaatcctacctgccgcaaacccttcctaaatttcctcacctaggcctgctacagcgttcttattttccacatttcttttctggctctcggactactcagctgccaaagcgcatccannnnnnnnnnnnnnnnnnnnnnnnnnnnnnnnnnnnnnnnnncatgaggacgggctgcgctctgctcctcacacaatccccagcccagagcaccctgcttatttattgaacataacagtgcaggccggccta

SEQ ID NO: 447575 - DNA, 586 bp, Homo Sapiens
  misc_feature (170)..(211): n is a, c, g, or t
tgaatcaagcagttatgggccccctgaagtatccttttttctggaacattctgaaagtcatccttgcctatgggaagcctaggccggcctgcactgttatgttcaataaataagcagggtgctctgggctggggattgtgtgaggagcagagcgcagcccgtcctcatgnnnnnnnnnnnnnnnnnnnnnnnnnnnnnnnnnnnnnnnnnntggatgcgctttggcagctgagtagtccgagagccagaaaagaaatgtggaaaataagaacgctgtagcaggcctaggtgaggaaatttaggaagggtttgcgggaggtaggatttgagatgggtcttggagagttggacagtgtcagccggtaggacgggggtgcggacggaagcctgtgaggaaggcagaggatgcggagctgtgagcggagggagcagcgaggctggagagcagctgggctgcgggtcaagacgtctgcgtttaattcgggactgaaggttagcagggaagggaacgatgccagatcttgagtttaagaacttgaatcttgtaaagtaccaaatctaataaaatactcgtcaaaaatcaaaa

SEQ ID NO: 447576 - DNA, 881 bp, Homo Sapiens
  misc_feature (612)..(612): n is a, c, g, or t
gttcctagaacagtgctgaaagtcatgcgttgcctatgggaagcctaggccggcctggcactgttatgttcgatagataagcagggtgctctggcttggggattgtgtgaggagcagagcgcagcccgtcctcatgctttgtccactgaagtaggccaggcagagagggagtacagcaatggatgcgctttggcagctgagtagtccgagagccagaaaagaaatgtggaaaataagaacgctgtagcaggcctaggtgaggaaatttaggaagggtttgcgggaggtaggatttgagatgggtcttggagagttggacagtgtcagccggtaggacgggggtgcggacggaagcctgtgaggaaggcagaggatgcggagctgtgagcggagggagcagcgaggctggagagcagctgggctgcgggggtcaagacgtctgcgtttatttcgggacttgaaggttagcaggggaagggaacgatgccagatcttgagtttaagaacttgaatcttgtaaagtaccaaatctaataaaatactcgtcctaaatcattactggcccaagcatgcagtgtttccgtggccgacagactcgagccagcgctgtcnccatggtaaccagcttttgtgtggcttaaagcttgcatccattttctcctttcatcgttttcccaaaacaattccgtgagggctgttagccctgcttggtagacgaagaagccgatgcggtctagggtcacggccagggaggctttgggacgccaagtcagctcggcggtcaccacaccacctacagggctcgtcgggccctcggggtcggcggctgctggaggcgcccaggggagtcctgctggttccatcccgggaattccggaccc

SEQ ID NO: 447577 - DNA, 2645 bp, Homo Sapiens
  misc_feature (181)..(232): n is a, c, g, or t
  misc_feature (2559)..(2595): n is a, c, g, or t
tgaaggggggagtgttatgaaagaagagagtggtaggtgaagtgagatattctgagggtgagagaggggagagaaagtagggggggcgacagagaagtgcagatatggtataagcaatagatgataagtggtgattgatatttgtatgtttgtgttgttgtattgagggtgtgaggagtannnnnnnnnnnnnnnnnnnnnnnnnnnnnnnnnnnnnnnnnnnnnnnnnnnnggagaaaaccgtgttattgtgcataacaacaaacatgggtgaagtaagaagaggcatatgaaaacaagattaaggtggaagaatccttggtgggaggagaggagtgagaaagcagaggcactcttgtagccataaacgcatttccttgttggcatctggactgctccctcctcatgctccactatagacttctctttgcttgagctacatagtctcactgctggccctgcttccttgtctcacagtcccagagtgctccctccccaaacccgatggaggagcgcagcttcataccctattgtgtgggacagcaggctactcagaaggtgttacttggattttttgcagctgttagtgattctgacacccttggacctccaggagtagctcctcctgccacgagaggactctggcttttctaataaggaaggttctggccaatcagtccaagaaaggcccggattctcttccaaggtgttgtctctgcagaaatgttcctcagggtggaaggtgctgctgcagcaagggatgtcccctgagttttcaggtatgtagtctgtggctgcagcaggtgaacactcctaacactcccatttcttactgttagatctaagagaggagcagtccctgtgggttccgtgggatccgcatgtagcacacagaatgaggcaccacctcccttcatcctcaaagctgtctctgccttgttcatacagacagatgggggcatcacagtgctgatagcgctgatataagtctgagaaagcccctggctcgagttcccaggcagcatctctgtctggaatatgaattcccattctcagcatttcttgaggaaactcttttcgattgttacactgtggacatttgaagaaatgctttgctgatgtgtgggcatatttctgtatgcacttgcggtggtagatggcttgactacaacacgggctctggatgttctcaacactctgttgggataagtcttcacaacataagatgcagctttcctcccccacatgcccatgttggatgttctgtgttgggcgatgtttgtcacaaatgatttgtactctccaaaaaattgtgaaaggcaacccctttcttggccacaaggcagatggaagtttctgaggcactgatccttctggcagttgatagcagctccctttttcttgcacacaaagcagatcttcctagaagcccgggctgcctcctttttgatgtcttcaggcagaaatccatggaaacctctgttggactggcccctctgaggcagcttactagataagataagacagaaataatgcacgctgatattgtctttctgaagaaattcccctaatttttcgggatccccaggttctcgaaggcatagccagcaaacaggccctgaagacggtttcctctgggttaccctcctagtcttggcagattttctcaatctctggcattccttcttttcttttacagtcttcattcggtgctgtctctctctcctctcttgaattcttctatactattgtgaggacaatacaggctcttccagcttgaaacttcagttctttgcatcgctgggccaagacgttccttgagtaggattctgtgcacacactgctagttacaagacgtcacgatcttcaaaacatctgaggggtggctttgcaaatgaggcttccacaagctgccaggcagtggcttcctaacccggcggacgcccctcgaaacgattatcaagttgtttcactggacaggtgctgggtaaaagcttgttgagaaaataaaaaataaataaacgtgttcgacccgccgccgcaagaatgatttatctgtaaaatacgtgtcggtgtggtcacaaccgttccccggaggttaacagccggagaaggggcttaaggagcatcccgcggatgccagaccaggctcatgtcgcgcctgccgggcggccagtgcagggccgggccgaggtcgcctccgccgctcctcctcgcggtagctcaccggccgccgctcccggccagagccaccctcccagctgtctgagggcgccgctgtactggagctttagtcgttgacacaggccgtggtagctacctccgggcggccgcccctgcgcggtgactgcgccggcgaagactgcgagcgcgcaaacgggggtgggtcacgcggactatgaccttcgggaatcgcggcgacgcctaccgttagtagaaaccgaccgctaacggccgcgcgctaacggccgcgcgccccgcccatcccctcctctcgcgcctcagcgcccaacaccacacgctctcgacgaattcgagctcggccgatttggcctgatnnnnnnnnnnnnnnnnnnnnnnnnnnnnnnnnnnnnncgccgccaccgcgataagctccggtcgcccatagtgcatctactcactct

SEQ ID NO: 447578 - DNA, 785 bp, Homo Sapiens
ttcccctaatttttcgggatccccaggttctcgaaggcaatagccagccaaacaggccctgaagacggtttcctctgggttaccctcctagtcttgggagattttctcaattctctggcattccttctgtttctgttacagtcttcattcggtgctgtctctctctcctctcttgaattcttctatactattgtgaggacaatacaggctcttccagcttgagtaggattctgtgcacacactgctagttacaagacgtcacgatcttccaaacatctgaggggtggctttgcaaaatgaggcttccacaagctgccaggcagtggcttcctaacccggcggacgcccctcgaaacgattatcaagttgtttcactggacaggtgctgggtaaaagcttgttgagaaaataaaaaataaataaacgtgttcgacccgccgccgcaagaatgatttatctgtaaaatacgtgtcggtgtggtcacaaccgttccccggaggttaacagccggagaaggggcttaaggagcatcccgcggatgccagaccaggctcatgtcgcgcctgccgggcggccagtgcagggccgggccgaggtcgcctccgccgctcctcctcgcggtagctcaccggccgccgctcccggccagagccaccctcccagctgtctgacgggcgccgctgtactggagctttagtcgttgacacaggccgtggtagctacctccgggcggccgccctgcgcggtgactgcgccggcgaagactgcgagcgcgcaaacccgct

SEQ ID NO: 447579 - DNA, 495 bp, Homo Sapiens
aaccacttgtaacaactttattgtactgggggagaaatctcacttttatattccaaaatgaaaaccagttttggtgtataaggggtacggtagcatgttgctttctgaaagcctttgaaaaatcctaaaatggccacagtgaaaacaacacaggtttcaaacctggctaagtgagaaaggcaggagccagcggtatgtcctcctttttaagacacctcctgagatgggcagttttttaagctgccacttcgagcttcacagcccttcaaagagggggtatggagaggaacttcattttctgatgagaaagcagcagtttaaagaagagaacaaaggtctccaggcctggcaggcagcagctaaggggctagaatccaaatctcatgattaatgacctaataccttttccactatatcaagctgctttgcagatacacagcaatatttccagatttccaaccacttttaccatatgtgagcctcaaaaccaacgca

SEQ ID NO: 447580 - DNA, 1145 bp, Homo Sapiens
aaaaccttatttggcaaggattggggaagcttcaccgatcctcccccctttgcaagctagcgcatcacatgaaggccaagcccctacagtgttccgattgtggaagtcttctggcatagtcaaccttacccctcacatcgagggattcacacggggaaaagcccttatgagtgtcaaggactgtgggaagggccttcaaccaatactcttcccttggggcgggcacaagagggacaccacttgggaaagaagccatacacctgcagtgtgtgtgggaaatccttctctcggaccacttgccttttcctgcacctgagaactcacaccgaggagaggccctacgagtgtaaccactgcgggaagggcttcaggcacagctcatccctggcccagcaccagcggaagcacgcgggggagaagccctttgagtgccgccagaggctgatctttgagcagacgccagctctcacaaagcatgaatggacagaagccctgggctgtgacccacctttgagtcaagatgagaggactcaccgaagcgacagacccttcaaatgtaatcagtgtgggaagtgtttcattcagagctctcacctcatccggcaccagataactcacaccagagaggagcagccccatgggcgaagccggcggcgtgaacaatcctcgagcaggaactcacacctggttcagcatcaacacccgaactccagaaagagctctgcaggcggagcaaaggcagggcagccggaaagcagagccctggctttgtttgacatccaaaaaatcatgcaagagaaaaaccctgtgcacgttattggggtggaagagccttctgtgggtgcttccatgttatttgacatcagagaatccacataggagagaaactttgctgatgacttttaaccacaagtaaaaaatgtggtaagtccacatagtgtactcatggaaggaggggctgggggtagaaatgtcatgggtgacttctgactttctaaggaaatgatgcttcccaagcacccgaggttggttggtcccaaatctatcaaactcagtgccctctttagcgacatattttgtgacattccttccattacaccacagtgagttcacaggtaatataacctacccacctgtgtaatgtc

SEQ ID NO: 447581 - DNA, 1761 bp, Homo Sapiens
gcggccgctccaccgcgaacttctccgcgcactgcgcgcacagcgcctgggcctgggtgtccgcccgcgacgccagcgtccgcgcctgctgctcgggctccaggtacgacacgcagatgaagtcctgtacggaggagcgggaggcccgggccttgttgagagtacgccggcgctcccagcggtggatggagtcctgcacctccacactcagctgccgggtcaccgtgatcttgtcgtagctcttgatgtgctccagggccccgtaggtggtggtcagatagtaggaaccctcccccagctgcagggcggggtccatgagctccatcatgtactccacattgagaagcatctccgtgaggttgctgcgggccagcacatacatgagcacaggcaggaagtcatccgccccatagggcttccctgggttgccgagggccatggagtcgtagatgagtttgcaggtcttgagcaggatggagatcttcttctcaggtgagtaggccttgtgcatgctggtgaacttctgcaggatcttctccatcatgggcacctccggcacgctggtggtcacacctaggtcagtggtggtggtggcccggatcactaactggttctccttgagctgctgcagcgtaccatccttgctgtggatctgatgcaggcatgagttgatggcttccttcaggggcttcaggacacatttgtacaaggcagactctacaattgcttcgagctcctcctcggagtgcagggcggggtccaccagggccttgagctcggtgctctgcagcaggtagctcttgagctgggtcatcatggtgcgaatctcctgcagcatctccgtgctggaggtctggcgcgccatcatctccaggctgtacaccttgtagtcctgcaccaggctgccaaagtacgagcccttgtcctgcgccagctccaccaccttcttgtacagcttgcggttgttggagaggaaagcgtggaacatgctgctgaaactggcaaagctcagccggtgccgagccttgcccaggatcatggagggcttcttcttcacgctggggctgctgaactgctccagctcctcctccgtgctgctggtggagtaggagtcctggtcggtggccatgacagacacccccaagctgtctgagagggaggccagggagcccttgaactctggagagctctgggaatgggcagtggcctgggcaggagggtgctgagtcccagcctgagaagcagggctttggccctctctgggtggacccggcgtgggttgtctccaaggccatcgcctgtgtgcagagctcagcgttctctaagggagctgggagggtcgaggccagttgctcgagagatccgttttttcctggggggcgggactgggggttgtttggctgtcctgggcagctctggcatgctgtgaggatcgctggctttcacctctgtgtcctggccttgctccgtgctctcccggggtgtgtcctcagggccgtctgaggtcccttggggaggcaggctgagctggtccccctctgccgccatccccggactttggtcttctaaggacaccctctcggaaacgcggcgtctgggaggggcagtgggaaggttcttcttcgcaggcagtggcggggcggggacctgctgcaagggactggaggctgccctggcttcatcgcttcctccctgagggggcccaggcctgcagtggggcatgggagtctctcgcaggtcatcatgggcggctggttcgat

SEQ ID NO: 447582 - DNA, 674 bp, Homo Sapiens
  misc_feature (125)..(134): n is a, c, g, or t
  misc_feature (270)..(270): n is a, c, g, or t
  misc_feature (480)..(490): n is a, c, g, or t
ttgcggggttacacgcccgtcacatccccttcgtagcgaggcctgggtggcgaatccggcacgaggaagagtgtagatttgggcattgaggccttcaaattggattgttctcaatgtccagaagnnnnnnnnnntttagaagagacccaaatcagaaaacaaaagttgggctgaattcaatgcgaattattttctagctcaatattaatactgcttatgtcagctgaatttcagcctttcaataacagctagtcaagtatttttttagcnttgtgggctctcctattgatcgtcatcttattttagtggaatccattatattgaagatgtcaagttcctcatttcccatacaaagaatgtgagattcatctttcttgaatctttgctaagtgttgaaggggacttttggcatcttttcaggaggactataattgggccctctaactaaaaagtctcctatgccccttagatagatgagannnnnnnnnnngaccttgtacccaccaacattggtgggaggctcagaagggactgtgtttgtaactttgtagcactttctaaacagtgacctgttgtatgggcattataggacagtccgtggggtggggcgggggatgggggagatggacaaatgaggtctggtttaaagaatgagaagtgtgaccaggcatggt

SEQ ID NO: 447583 - DNA, 465 bp, Homo Sapiens
gctagttcatattttatttccaataggtttggagctttgttgatttttgcatttttgtaaaaaaggaaaaagttttcacttaattcattgaaagccctttcgtgctgagcccaagggggagcctgggccaggaccagaccctctcagccctcttgttcctaccgcagacacccggtgctgggggtgcggctgctcccctccgcccactctgccctcccgcccctgctgcatctctctctgtacagaacaatttttaaaatggaagctaagacacaatatacactggacaggcacacacacacgcacacaggcgtccgcccagaacagggcgggacaccagctgcactcagagagcaccaaggaatgcaaacggagcccctccgggtaggagggcagggcctgggcccccttggtcctcagtcctcagtccgcactcctccccgccaattgccctgctagctgcca

SEQ ID NO: 447584 - DNA, 1082 bp, Homo Sapiens
tttttgcaagttcatattttatttccaataggtttggagctttgttgatttttgcatttttgtaaaaaaggaaaaagttttcacttaattcattgaaagccctttcgtgctgagcccaagggggagcctggggcactcgctgccctcagcgcagagctcacacagcgcagcgtgttggcacggcagcactgcccgcttctgttcctgacacttaaggcatttcaccgactgcatgtggaacacggccttgtccacttgttccaggtgggcccgcagttgtttctggagggagtagagggtggagagtgagagcgcctccaggtcggagaaggcgggcagggcctggggctcaggccccgcgtgtagccgctccagctcctcctggagcttcttcacctgcacctccagtgcatcccgctgctcccgggccagctcgcactcggcgcccgccgcactggcccgctcaccagcctcctccgcctctttcttccaggcatcacaagcctgcttggcctgcttccaggactcctcccactgcttgatggtgctgttggcttcatccagctcttgccgaagtcgggccagctcggcagcccctggccctgataggaaagcgggggaagtgcccggggagaagcttccagaggcaaaatgctcccagatgctgctgttcatcccgttcagacccaaagatccatgtgatgctgaggttcccaaaaatgtgttttccgactgactcaggtggccctggggctgctgcaggaaatgcgaggagaggctgacgggaggggacggggatgctgagtggaaggaggcagagctgcccaaggagccggggatgttcacgggcgcagagctctgcagcaagctgccgccgatggtgatgcttcctgggtggggcactgtgctgttatcgaaagtcttctccagggcggccacgccaaactcattcaggtccaggtcatccaaagcagactctatgactgactctaccgtgtcgctggtggggtagaagggcagagcgtttgcattcatgccggggacgctgctggtgcccactgggctagggggggtagctgcca

SEQ ID NO: 447585 - DNA, 477 bp, Homo Sapiens
atttcaagaatggtatttatttccgacattactgtagaggcacacattggactctgacgattccccttgcagcagacatttgtgaagctgctggtcggcacacccatcaatcagtgactcctgcactgcagaggggccacatgcacgatgctcacgtgtgcacaggggggaggacagcacccccaccaggcagacgggcccagaaacagcatctgcccagcactccagaccatgcctgccaccagggcttctcagttctctagcatttgaacctctgatttaacattcatctctctccaagactgggtggggcactgcctgtggccagacgtctcccacagcagggacagcaccaggcaagaagggggcctggtctccaggcaggaggagtgcagcccacctcccctctggctgacccctgggcagtgagcctttccatcacccctacacacatcaggctcagagacaaaaggcagg

SEQ ID NO: 447586 - DNA, 572 bp, Homo Sapiens
ggggctctcctaggagacctgaaggctgcttccgctaacccgggctggcgctgctaacctcacccaacgatccctgctgtcggaaaatgtccagaggcaccatccctgctatgaagagggaatgccagtacaacagccacaaggggtcttcctgtggccctcaaacaaaaaatcactgcattacatcagcagactgcattggagagaaaggcgccgggacagaaaagcctgagataaaccacctgtcattcttggagaaaaggatgctgcggctttcccgatttggttgatgagatggaaaatcaacccttacaggaaggacatcaccaattccggaaaggatgctgcgccagtcatgtttccgcactctgtgagacgttgaaatctccagaagttgcccaaggttttcaagctgaacacaggagaaatgactctggatctctgaggactgttctcctcaataaggagctgcaatcttggctccaccaccctccctccaaaacatctcgtgtgtctggtatctggttatattgtggcctgacagagaagtttctttcggggccagtgaatta

SEQ ID NO: 447587 - DNA, 145 bp, Homo Sapiens
gaagtattccttgatacagtttattgtgctggcaatcgatggagtgttccctctactctcctcctttcctcttgccctctcccaaccttacctttcctcctgtctcccactcttcttcctcatgtattccaagctgcagaggacc

SEQ ID NO: 447588 - DNA, 469 bp, Homo Sapiens
tcaatgtcaaatgcactttactgggcccctgggcctcccaacactgtcctcaccaaggctggggcaccccattcccagcaccaccagctgcccaggaagcaggacggatagagggaacacatgtggaatggctgttctcctaccccagagggtgccggatgatgttgacagcacggctgcttccctctcccctgcagcttctgtccccacccagcagcttggcctttcccatagcagggaagggggatacctggggcttcaaaccagccacctgctcctgcttaaaatggggcaaggggccatttgcaaaattcttcgaggggcagtggtgaggtagaaggggtggcagcctgctcctgtctgggagagggctgggcagacactgggagccgggcagacactgggagccgggctggctcttgcttcaggcccagagccctgggccctgctcgctgaggaagctggtgcc

SEQ ID NO: 447589 - DNA, 542 bp, Homo Sapiens
  misc_feature (500)..(500): n is a, c, g, or t
tggtaaggtaaggtaagttactactaccaagttatgaaacaccatttgatgattgcaattcattttctctggcatgaagaaacaatcactcttgtaacacattgatactacaaactacattatgcacaggtagccaaagaaatctatcacaattcaaatgcaacagtctgtcccagtagcatacagttggtatcctctattttccattgtatcctctattttccattcaggatagcacaattgtccagtcgctctcttctcttccatactggatatcagttaatttgctcaagatgcggcttgccagcttaggaccattctccatagttggaatgtgtattgtctcgcctttgtacagtatatcagaaactgggccgacaacacaggctgtaccagagccaaacatctctcttactcttgttccccttcagggctgttgtcaagtcatccatggtgaggtatctctctgacaccttaaattcaccccactgatgtgccangtccagaaatgcaccgcttgtcacttctggaagaatgatgcc

SEQ ID NO: 447590 - DNA, 348 bp, Homo Sapiens
caaatttattttaaattgtggtaaaatatacgtaacataaaattgaccattttaaccacttttaagtgtacagaagaaccaaatcttgattagttttagccccagggcttggcacagtgacactcagcaaatagttgtgaaaggcatggaggaggagggaagggagaagggtctgcccctgtacctgcatgttgacgcacctggttgtccagcaagtctgcgtcagggaaggacttgggggcaggaggtggctttacccaggggtctttagctctcttggttgtgccctgctttctggatttgggctcagggcaatctcatctcttcttttttctcctgctcacaccc

SEQ ID NO: 447591 - DNA, 470 bp, Homo Sapiens
  misc_feature (100)..(160): n is a, c, g, or t
ttttttttctcttgctaacctatattttatttgtaggagtgtccgctgtgacctttgggatgagtaagggaaaatatcacacctttctgcccctacaatnnnnnnnnnnnnnnnnnnnnnnnnnnnnnnnnnnnnnnnnnnnnnnnnnnnnnnnnnnnnngaaggaagtagcccagtctgtgcgagtagtccctgagcgtcaggcggggaaggagagccggctgcctttgcgggagctgtgaccgcctgctttggtgcctcccacgcaccctccttgtagagacgattaatcccagacttccattttcctagcagctcactaggcgggccttgcttcagagcagtctctcatttcctctgcacaaagccctcaaccgtcctctgcacggccgcttactgagcgcccacggtgagcctggcacgatccttgccctcttggtccccacagaggtggaaggacaggcctcgcg

SEQ ID NO: 447592 - DNA, 932 bp, Homo Sapiens
ttttttgagtcacatgattttggagtttatttttcagagaaggtcattaactcagcctaacttatataccaaaggcacagtgacgtcacacaacctctccagagtcatgaggctagtgagtggcaaatcattaaagcctagaatctgtctcctacctaacatattccaacctgaataaaggcaaagagtgtgtgacagaagtgggaagacgggggaccatggggtcaagggctccatgactgctcaagaccacaaaatagctgcccatggcatttcagacacagtgatgcctgggtggtctgcaggctgccctgatacccgctgccagactctcagtcaccaacctgcgcaggtgctttgggagaggcctctcttcactgtccacagttcctgtccatgttccagtagatagatcagctctggtttgggaacaggatgccccagtgagaccaggagcctgcaggtctccagcatcacctcctggtacagggtcctctgggccaggtccaggtgcccccattcctctccagtgaaggtcacaaccacgtcttcaaatgatactaatgccaacgccggcgccgccatgggcccagggggctgggtgaggccgtgagagtcggcgaggaagccggtcctgcgggctcggccgaccccgggctccggctctgggctgcgagggacctcagtccccgccgtcgtgtaaaatgcacacaaggttcgcggcgccgcctctgcgcgccgtgaggacacagggctgtcgccaaggccccaggaagggttttgcagacgcttgtgggggtgggatcgcggctgacataaaagcgtgtaagtgggtcctatcctcctcactgtccgtctctactcggtctcgaaaagtggccggaatctggcgttctacccactcttatccgaaaaattccggaccggtacca

SEQ ID NO: 447593 - DNA, 553 bp, Homo Sapiens
ggggcccaggtgcagttttttggggagcacagggccggtgctctcggtgaccaccggtcagccgagtggattcagcgagggtttttagtgtttgtgcctgtgtccccgtgtgcctgtttcctggtgaggctggactcctggcaatgtctgaacactcacattccccaggcatgcatgtgcagccgccgccgccacgcgtgtactgtggcgctgacccctcctgtagcagctgtggtcttggcctctcgtgttggtggcagatgtcccatttcccagttactttctgttgtccaaaagtttaactgtcctgccagccaaagctgctgagcattactctgatagaccatcagtccttggtaagtgtcctgtgcatctgggataagcatccgtttgttttcagctgcgctttctgtgacttgctctgcgtgagtcctcggtccacgtgggccgttgcgctggttcccagcctgcccgacacactcactgcgacgcctcccttgcctactgcttgctggcttctgtgttctctgcagtaaacattgatttctgaaaa

SEQ ID NO: 447594 - DNA, 459 bp, Homo Sapiens
ttttttttgtgaggatataatactttattcactaacacgggccgagggaatgtagtgatgtggggtgggcactgtttccagggaccccggcaggggattctccctgtctcccagttccagggcagccgggcctgccgtcccctcaatttcccagacccggaggccggggcgaggaggagcctgggttagtgcagccaggtcgaagccccagcgcgcccctccgcagccctgcgggactcagctgccctcacactccgggcaacgctcggtggcagtggcggccgtggcgccagggggcagcttgaagtccctgccgcagccggcgcaaatatacaggcggcgccgcatgtgcgcgcgtcggtggcgaatgaagtgcgagcttaggcggaagcggcggccgcactcggcgcaggggtagggccgctcgcctgtgtgcgtgcgcgcgtgctccgccaggtt

SEQ ID NO: 447595 - DNA, 443 bp, Homo Sapiens
tttgaagttttattgagaaatattgataacataccacagaagccactgatttaaagtgtaaaattcagtggttttcagtatatttgcactgttatgcaaacatcaccacaataaattttagatcattttcattaccctgaagtaaacaccatatccctccatttccccccaactcccctaatcctgggccaccacaaatctactttctgtttctatgtgttggtctattttggacattttatttaaatggaattacataccatgtggtcctttgtgaccggcttctttcacttagcataatattttcaaggtttattcaatcttgcatgtgcaaagggggcactttacataaggataaacctggagtggggggtacttactgattgatttggaaacttccctccgaaattgtaaaggctttcaaatagaggaacaacctattc

SEQ ID NO: 447596 - DNA, 1298 bp, Homo Sapiens
  misc_feature (400)..(440): n is a, c, g, or t
agcggaggtcctctgcgcgcacccgcggagacccgacccggccgagggcagagcgcaggggaacccgggcagccgcggcgcagagcctcctcccacggcccggcccctccggtcctgcgcgtgtgtactggatggcattggctggattcatcggaaagacgcggatctttgctgtgacaccggagatcggagcccggagtgctcccggaacgaccgccgccgccgagtgacaccgggccgcgatccgcaggggccgccgcgcacacccgccgccgccgaccgtcccctcagcgcgcgccgctggccccggattatcgccttgcccgtgggatttccagaccgcggctttctaatcggctcgggaggaagctctgcagctctcttgggaattaagctcaannnnnnnnnnnnnnnnnnnnnnnnnnnnnnnnnnnnnnnnnctgcgaagaagctcaagacaaaaccaggaagccggcgaccctcacctcctcgggggctgggaggaaggaggaaaacgaaagtcgccgccgccgcgctgtcccccgagagctgcctttcctcgggcatccctggggctgccgcgggacctcgcagggcggatataaagaaccgcggccttgggaagaggcggagaccggcttttacagaaagaagtcctgggtcctgcggtctggggcgaggcaagggcgcttttctgcccacgctccccgtggcccatcgatcccccgcgcgtccgccgctgttctaaggagagaagtgggggccccccaggctcgcgcgtggagcgaagcagcatgggcagtcggtgcgcgctggccctggcggtgctctcggccttgctgtgtcaggtctggagctctggggtgttcgaactgaagctgcaggagttcgtcaacaagaaggggctgctggggaaccgcaactgctgccgcgggggcgcggggccaccgccgtgcgcctgccggaccttcttccgcgtgtgcctcaagcactaccaggccagcgtgtcccccgagccgccctgcacctacggcagcgccgtcacccccgtgctgggcgtcgactccttcagtctgcccgacggcgggggcgccgactccgcgttcagcaaccccatccgcttccccttcggcttcacctggccgggcaccttctctctgattattgaagctctccacacagattctcctgatgacctcgcaacagaaaacccagaaagactcatcagccgcctggccacccagaggcacctgacggtgggcgaggagtggtcccaggacctgcacagcagcggccgc

SEQ ID NO: 447597 - DNA, 701 bp, Homo Sapiens
gtatgataacacccgaagatttatcaacacaatgcagccttggggagatggcaggcgagcctgagctgggtgctatttgctgctgctcttgggaagaggtcggtagaccccgaccaccacagcgtggtcccgctcatagggctccagggtcagctgctcttgaggcttcaagttctcctgctgcaacttcctcacctcagaagcaaacacagcctcggcggatgcggtggagtcgatgcagttggccttgatggagatgagaaagtggcccccattgcgcaggaaggtgtgggcgttcagggccacgatgcgggactggtccggctgggccacgtcggcgaagatcacgtccaccatcccgatgagcatgcggtacttgagcgggtgccgcgcgtcctccaggaccggaatgatgttggtgcgcttcttggccacgttgaccagatcgcggccggcgcggatgggagaactcgacggcgtagaaccaggccgtctagggccaatgatgtcggagacatagggagacggtaggtagcctgacgcggagcccaggtacagcaccttggactctgggcttagattgtggatctaggtaccacgcccgacccaggatgtgccgcggccagctttagagcggaacgggttccacgtgcggtacatcctagctatcacgccgacctcggtacaccagtgatgcgccc

SEQ ID NO: 447598 - DNA, 579 bp, Homo Sapiens
  misc_feature (56)..(56): n is a, c, g, or t
cagcccatgaagctccctgggatccctaacccaaagtcctctctcccttttgtganaactcttgacactttatctggtcttttaaaagtagcacttactactacttcctctatccttttttctgagcctgcccggccgcccgcctctctggaagataagttccctgaggaaagaccttgtcttctgtgtcctgccctcactggctgtagcagatcacttatggtttggggaccattcaagggtttcccacctacacatctgcccatgcttcttcctccccatggaatttcttctccccatcctaccactcgtctgcctgatgaatttccttgtttagcaagactgcccatccctcatgaccccagtgacagattttctgtcactgatacatgacattgtgttgcgccagtgtgtttatgtatgtgtatggacggcttagtttgtgagacactgcagtcaggatcttgtcttgttcatctgtgtatcgcaggcccagtttgtgcctggcccacagtatgtgcttagtaaatgtcttgtggatgagtggagtatactgggaagcccagcctccctcatatc

SEQ ID NO: 447599 - DNA, 810 bp, Homo Sapiens
  misc_feature (220)..(242): n is a, c, g, or t
aaatgaaagctacatacctctttactaaggctactgtatttggtaagaatgaagacttacttgtattttaaaaagatgtttaacatagagtttctaactgacagatctggaaatcaatctgaattggacatatggcttcaatgcacaggagaagtttcctcatattgctaccttaacatgaaattgacactcaacttgaaaactctatgtagaaagagtnnnnnnnnnnnnnnnnnnnnnnnttcataaacatttattcacagcccctttaaaagtacaacagtgaagtaaaaccccaattaaacaactgcccattaacttgttacttaaaatgtagacttaaaaaccaatagactttttttggtgtgtatgcaattgcttttataaacacagtttaggttggaataaggaagtcctaattcatcatgttggagcttgccctcgctgctgcaggctgttgaagtgagcctccttcaaggtctggttgatatgggagtaaagaccttggcatggtacatacccctcatgcaagaactggggaaagtttgcatcgggttcagtaacaatctggtttaagttgccttctggtccacttgctctctctgggatattaatgcggctgctgctcctttcattatcactccatgaaaattgctacctctgtatcttgagaatcctgaaagatagggtttctcttattccttttgggctgggtggaatgatggttgccctctttactgccatttcttcttcttttccgtacagggcagcctcccatagtcctgccctcggaaccatagcaaccgcccc

SEQ ID NO: 447600 - DNA, 567 bp, Homo Sapiens
ctggtccccacggtcatcacgctttgctttctcagccaagatctcggggctcagggcggaaacgcagcggatatgtattttcttccggggttggtggcgctcggctctcatgacctgcaggaaaagaagaagaaatggcagtaaagagggcaaccatcattccacccagcccaaaaggaataagagaaaccctatctttcaggattctcaagatacagagttttcatggagtgataatgaaaggagcagcagccgcattaatatcccagagagagcaagtggaccagaaggcaacttaaaccagattgttactgaacccgatgcaaactttccccagttcttgcatgaggggtatgtaccatgccaaggtctttactcccatatcaaccagaccttgaaggaggctcacttcaacagcctgcagcagcgagggcaagctccaacatgatgaattaggacttccttattccaacctaaactgtgtttataaaagcaattgcatacacaccaaaaaaagtctattggtttttaagtctacattttaagtaacaagttaatgggcagttg

SEQ ID NO: 447601 - DNA, 760 bp, Homo Sapiens
  misc_feature (73)..(115): n is a, c, g, or t
ccccataggataaagggttctgcctgggtcaacaggaaaaagtggggcttttaaacattcctttttagtttcnnnnnnnnnnnnnnnnnnnnnnnnnnnnnnnnnnnnnnnnnnngcttacaacaaaattttcgctgtttatagctttcttggggaagaaaacacaggcgcaaattctgatgttaggaatgttttaagcacatatcttcaatattattcatccaggaccaaagtaagtccgcatgcaggaaatgagtgagtttcacagctttctgagcccctacttgacccaggaagcccagctggaacctcctctcactttctactttcttctgatattccttgaaaatacttctccttcatagcggagataagtagttttaaacagcttggttccttccctgctgtgaagtattgagttttatttcaggaccaaaggacataaaccagtttatgacataaacaggtttagacaatccctcatgcaagaactggggaaagtttgcatcgggttcagtaacaatctggtttaagttgccttctggtccacttgctctctctgggatattaatgcggctgctgctcctttcattatcactccatgaaaactctgtatcttgagaatcctgaaagatagggtttctcttattccttttgggctgggtggaatgatggttgccctctttactgccatttcttcttcttttccgtacagggcagcctcccatagtcctgccctcggaaccatagcaaccgcccc

SEQ ID NO: 447602 - DNA, 515 bp, Homo Sapiens
  misc_feature (410)..(410): n is a, c, g, or t
  misc_feature (431)..(431): n is a, c, g, or t
  misc_feature (488)..(488): n is a, c, g, or t
  misc_feature (496)..(496): n is a, c, g, or t
ctggaagacttttcagtacttagttgaactaagtaagcacagtcttattccagagtggtcagtgtaaatctcttgtcctagtaaatacaatatgcaatctctgtcctgtcttttgcagattgtctaaacctgtttatgtcataaactggtttatgtcctttggtcctgaaataaaactcaatacttcacagcagggaaggaaccaagctgtttaaaactacttatctccgctatgaaggagaagtattttcaaggaatatcagaagaaagtaggaaagtgagaggaggttccagctggggcttcctgggggtcaagtagggggctcaggaaagctgtggaaacttcacttcatttcctgccatgcgggactttactttgggtcctggggatggattaatatttgaaggtntgtggctttaaaaacattccntaaccttcaggatttttgcggcctgtgttttctttcccccaggaaagcttttaaacnggcgaaanttttgtttgttaggttccc

SEQ ID NO: 447603 - DNA, 521 bp, Homo Sapiens
tctctccaccatccagggctctttgccttgctctaggaaggagatcacatcaggtttggaaacggcaagacccagtgagaccaggttgctgtaggtctccaacatcacgtctctgtacaaatccctctgagcaggtgccaaccactgccattcttcttgggagaagactatggccacatccctgaacaattctgacccaagggacatgacttttagaatttcaagggctgataggtcctccttctggttcctctcttggggaagggcagagtcctgcgacggtagagctaaggggtccatgcacctgggctatgaggctggaagcagaaagggggcgccagaaagcgcacgccgcgagggccggcgggaaatgtagtctcacgccggtaaagccacagagcgacgatgaggcgagacgtctgcgttcttctcaggcctgagacccaaccggcccgggcaccagctcctgctggaccccagagcgcctggaaagctccggaacctctcacctgccgcctcct

SEQ ID NO: 447604 - DNA, 590 bp, Homo Sapiens
  misc_feature (31)..(31): n is a, c, g, or t
agactaacacaggtgaccaatgttgtcaggnaagttgttcttgctacaatcttagccatctgtttgtctgaaaaacactacaattttagccatgtgcctgggatcaagttgatgatctggaatcactttggacctaacaaatcgcccctagtataacagaagcctctcctactgcatccctttaactagctgactatatattcaaatctcaaatgagtacattaaatgggcagcatccaaaacatctggaaccccaaatgcaagggggtcaaaaattgagttttaaaatattttatttttgataatcgccaaagtttatacttaggaatataaattttgtacatggtaaaaatattcagactatagaaaaagtggtctgaatcttcaaataatccttctctattctcactctgtttattgcgttgcttcctgttttagtgagaaaggtagcaggtgagaattccttaatctcccatcactaccactatacaacctgcatctgtgattaagtttcctttaacttctcctgagactgagtgacctgatcctgctcctacagaagtaaacccttccacctatcacaccccata

SEQ ID NO: 447605 - DNA, 753 bp, Homo Sapiens
  misc_feature (626)..(626): n is a, c, g, or t
ttttaaataataatgcttttattattgtaaaaaacaaagcaacgtgagacaagcagttcccaagttggtgacttagaggctggaaaaaaatccatggaggtgtcacatgaaaccagtatgtcttgaaaaagacagtccttcttggcaagctgccaacaacactcatattgggttctctggcacaaagctgggtcaagtccatgccctaacttgtcagagaggaagactcagactattcatgatttcttctagcaaatggggagaagcagaggtctgcttccttgagcaggttcaggaggtaaatgatacacactgtgtggacctcacaggtggtagacatgatacggcttctgcctcagaaactgtcagtgacataaacggcaagagccataaatggcaggtgagaaagtctaacactttctaaatggcatgttagaaagtgtaacacatacctggaacttaaggggaatccgcccactgtatatccttagatgttggggcttccaaatcacgtacttgtctctctcacaggtgtactacttcagtataattacactgaaaggaaattgcatattctcagtacagctaaggctcttctccaatgtgaactctctggtgtgaatgangacagatttgcagccaaaggatttcccacattgactgcactgataaggccctttttcccgtgtgaactctgcggtgttgatgaagctagaactttggctaagggatttcccacattcactgcactca

SEQ ID NO: 447606 - DNA, 924 bp, Homo Sapiens
  misc_feature (122)..(130): n is a, c, g, or t
ttcacagggcgaaattatgtcacttcttactccaggctacaaactatacaacatcagccagtctgtctctgcccccaagtcagaaatgtgtatgggttatagcatttattataccaaactannnnnnnnngaacagaaacatagcttgtaagcacttaaactattaatggtcagttcatcatacaccagtatgaaagttatttgagggcagggatggcctctttctgaaccttgtatcttcaggccaaaaaaatgtctgttgaatgaaaccaatgttgatgtacagcaatgtggctggaatttagaaagcttaataaaaattgggtgagggggcatctaattcagaacatgtttttgggtgtaaggctagtatcatctacttttgaaaacataatttttatgattagcaggtaaaggtagcatgaaactgcaatacactggctccagacctttcctctctgccttgccacaggcatgcttggtggtctgattacaaaagtacggatctcaacactatattttttattctaaaatctcaaccaaaatgatgggatcatgggtgcaaagtgggtttttcctttaaattgtgagaaaccatttccacatgttcagctctagtgttgttctcatgacaatgcaaagtagtattttatgccctcaaaactgaaccttaaggtagagacaattgctgcccgggccaaacacagatccctccaacccctcactgtaccttaggaaagctggggtaaactacagattcaacaatatctcaataagaaaatcccaaaaaccttccccaatgccctgtggttcggcctgaacatagggaaaatggactgctgggtggctacagaacaggaatgaagagttaagaataataaatgcctaacttacagggacagaaccaatctttcattaatgaca

SEQ ID NO: 447607 - DNA, 409 bp, Homo Sapiens
tttttttctggttgcgctgggtctgccactctcctgtggcttgctcctgtccagctgctgtcccagtgccacaatggtctagcctcgtggccagaagcattttagccaactcctggtctgctccactctcttccttcttccgccgctggggcctcaccacctcttcctcctcaatcacccggtctgcttgaatcaggtcagcttcctctgccatctctatcagcgaactctcctcctccccttcttcctcctcatccccttctgcctgggctgtattctcaggtcctgctggagaaacactttgcgtgaaagaaccgacaccaagacctagccactccagcatcatggaatgcttccagtgctggaagcaaatccattcactatcctgcactggtccattcatgagact

SEQ ID NO: 447608 - DNA, 514 bp, Homo Sapiens
  misc_feature (75)..(75): n is a, c, g, or t
aaaggtggcaatttaactgaaacttggcgggctgccccgggaccgcggctggaattccctccaatgtgaccaaancttgggttccccatgcgcaggttactgtcaccatctgcccctcggagacgctgggttcgctcagggtcaggagtggtgcccgggaagctgtagatggtcacgttctcccgggtctcccggttttcgccccccagggtgacgttgcagatcagctgcctggcaccctcctgctctgcgctagctgtggctgtggcagtggccacgaatgcgttccccttcgagggtgacatcaggactcagattctggtcccccagtgcgaggtagaccctggcctctgaggctggaaacagtccgtccagagtgcagctcacgggcctttccgagccaacttccaagagccggggagcagcgaggcgcggggcatccggagacagggagaaggttcggagctctctgggggccgagctgtattcaaacagtcccagtccgtgcggccgc

SEQ ID NO: 447609 - DNA, 915 bp, Homo Sapiens
  misc_feature (179)..(179): n is a, c, g, or t
gcagctgtacgccggttcgggattgcccagagacatttcaagtggccgagtggcagtcatcctcaggacctagagggtcccgacaggtggagcccgaactcctaaaaaggaacgcggaaacttggatgttgtgcccgtcaatggcagtggcctgtccactgcctggcctggcctccatntgcagctagtgaagtgcccgtccctacagtgcccctgcagagtgtgtggcgaacgagccacaccacgctgccccagcgcaggaggctgcagaaaaagaagtgcagtgcccggcagcctggagctctgtgtgcctgcccagccagaaaacagcaagtttgacaacaagaggaagacaatgagagtgatgtcaaacttggtggagcacaacggggtgctggagtccgaagctgggcaaccccaggctctgggaagcagtgggacttgcagttccctgagagaagcagaagctgagggcagagagcgactttgtgaagtttgacacccccttcttaccaaaggccctgttcttcagaagagccaagagcagcactgccacccaccctccaggccctgcctgtccagctaaacaatgacacgcatccagctccaagaaagtcacctttgggctgaacagaaacgatgacttgccgaattcaggaagacagacaaggagtatcttggtcgagtcccacggtgcccttctcgagtggccttcgatcctgaacagatagcccctccacggggtgctgacgacccccaccagctcacctgccagctcacccctggtggccaagaagcccctgaccaccacaccaaggagaaggcccagggctatggatttcttctgaggagcagcagagtcccttgtaaaagactgcttttgtacagaatgcgctataaattatacctttaaga

SEQ ID NO: 447610 - DNA, 648 bp, Homo Sapiens
ccgactacacccccaagtagcgaggcctgggtggcgaattcggcacgaggcgtccttgtgcccgtggcttcattcgctgaacacaggagaccccagaagacacgctgctgagtgaaggaaactcagcttccgcggagcccggagcttcccctcttagatcaccccgactactggttctcgcgtcccagagctccttggtgtctaaaggccttgtctgatctgcacaggcttcgggaggcggacactgagcagaaacaacgccacgcccggctccgagtgtcccatgctgccaccactaaaatgccctgatttttggccatatgtgacctccctgggtggcacgggccctaggcacccgtggctgtgcgcctggctaccaccagctcaggcctctgagcaatagcccctgcacggaaaccacgaccagggtaaccccggccgggccggttcgcgcccagcctggttcaggtgaccaggcgggagcttggcacacctggcgccgtcccctgaccccgccccggaccgggccgcaccccggaacgctctctctgggcgccagcggcggcggtgcagggccatggcggcggcgccagcggtgtgcgcctcgcaggggagctcgccgggtgcaccgtccgcgccggcggccgc

SEQ ID NO: 447611 - DNA, 438 bp, Homo Sapiens
ggtgggggggtgatgaaggggaaggacatgaagggatcggtagtggtgagaagaccaacttcccaaatattagtaagtttccatttcttaagcatgtaagtgcccaaactgtgctaacggctttacgtagaattcctccacctaagcctcacgacacccctacaaaattgataaagatatgaatccatttcacaggaagtacgtttagaaactcgcccaaggtcaaacgacctgcaagcaacaaaacccctcagaggtggctggaacagcgggactacagagctcgtgaactcggccgaggaggaaccaggcgaagccggcggacgcgagtccaggccggccaccagaaagacgccccgagcccgggggccaggcccagagttgcggaggccgcccagcccgacctgattcaggctccgctcgcgcgcccgcggccgc

SEQ ID NO: 447612 - DNA, 469 bp, Homo Sapiens
tcaggagtcgcttaggttttattgaaatgcctcgatgccgttttttcttcttccccgaattaagccgccgggggaggaggtgggtcgcgcccaccgttgccgggactcgggccggcagacacgggccacagcgccccctcgccgcccgcgcgcacgactcctggcctgcgtcgcctccttccgtccccgcgacacggaggacggcgccgcgcccggcgagcgccccggccttctcagtcggccgcgtccccggggagaccccgagcccgagcctccggggccggctgttcctcgcgctcggcctcgcaggaaatccccgctcgctgaaacttgcgtgtccacgtagactcgttctaaattctttggctcagggccctcctggcaattcgcaaccaaggcgccccggatccaggtccatgctgggcggagtggaccgcgaggggtaggcgaccagacgcgaggccacgcg

SEQ ID NO: 447613 - DNA, 512 bp, Homo Sapiens
taactcaaacagcaattccagacagcaagagaaactacaggaaagaaaacaaacgtgcgaggggcgaggcgaggaaacaacctcagcttggcaggtcttggaggtctctgggaggagaaagcagcgtctgatgggggcgggaggtggtgagtggggagaggtccaggcggagggaatggcgagcgcagagacaggctggcaacggcttcagggaggcgcggaggggtcagcgtggctggcttaaaaggatacagggactgaggggcaagaccggctcaagggtcaccgcttccaggaagccttctatttccgcgccacctccgcgctcccccaacttttcccaccgcggtccgcagcccacccgtcctgctcgggccgccttcctggtccggaccgcgagtgccgagagggcagggccggctccgattcctccagccgcatccccgcgacgtcccgccaggctctaggcaccccgtgggcactcagtaaacatttgtcgagcgctcactctg

SEQ ID NO: 447614 - DNA, 286 bp, Homo Sapiens
ctcccctccctcccccctttttccatgcagctgatctaaaagggaataaaaggctgcgcataatcataataataaaagaaggggagcgcgagagaaggaaagaaagccgggaggtggaagaggagggggagcgtctcaaagaagcgatcagaataataaaaggaggccgggctctttgccttctggaacgggccgctcttgaaagggcttttgaaaagtggtgttgttttccagtcgtgcatgctccaatcggcggagtatattagagccgggacgcggcggccgc

SEQ ID NO: 447615 - DNA, 436 bp, Homo Sapiens
gttagtgtagagaatacactttttaatgatatgatcagtggtgggaatcaaaatcttaccccgaaggagtttattaaaacaagtaactgatgttagaaaatgttctttctagctccttgcagaatcctttggggattctgaagcaaatttcttaagcagtctgaattctcaaaatttagtccaacattcttcattaacaggcctgggtaaatgcaagcttcatctcttccagaatttaaatttctccttatgagaacagaagagggtagaataaaggagtttattgtcagcccacactctcgtacttaaaactcagggcagaaatctcaggctggcaccattgccacttcacttggatggagagcagcataatctctctggaggaaactaggcttcaccgtcgccaggtgacaacgaaatgccctaaccccgggct

SEQ ID NO: 447616 - DNA, 976 bp, Homo Sapiens
  misc_feature (904)..(936): n is a, c, g, or t
ggaaggaaaataaatcctttatttttttaaacctatttgaaacctcttaagaaaattccacaataatcaggatttctgtaaatattgtcaatatatatgaacatatttgaaaaactacagttacagtatatttacatttttggaaacttttcttcagggccaagtaacatgttgtatcttcctttttgcttgtgggggcttcaggttattcatggcctctgcctcttctttaggagcagctctctttaacttcactggagtagttccaacaggggacaatggtggcgacttcacagggcctgaaggacttttcctatgcgttaagtcatggttctgtttagcgtcattattattgtgttccgttttattgttcacaggcaaattggaagacaaaattaggggtgaaacactcgaagaggaatttgataattttctaaaggcattactggtaaagcttgcctgcgggggaggcttcagtcgatcattatctccattctctgtctttttcacttttatgcttgtacttgttgaacttccatcaaatacgatgaggggtcttttccttaacccatctacagtgctactccttttagtctcatttttaatctcatgttgttctcttttcttttccatcattttcccccatctattcttcggcaaatccctctgaggcaatggtattgcatgttggacataaaggtcagtaagactgtctttgtttactcttacatcagtttcaacagctatgttcttctgctccagagtgaggagaaggaactcctgggacagcagctccgggtgcagcagcagttccgagtccgtgcagctgcgaccgcccacatcccccgccatggtcgtcgccaccgctctcgacgaattcgagctcggccgatttggcctgatnnnnnnnnnnnnnnnnnnnnnnnnnnnnnnnnnatgcgccgccaccgcgtgagctccagtcgcccatatatca

SEQ ID NO: 447617 - DNA, 490 bp, Homo Sapiens
ttttttagaggttaaatgaccccatttgtgggggggtttattgttaaaatgattaaacatgctaaaatcacatggagtggctattccacttttgccctgactccatagtggggcaaatgggaactacaggagtcacttggtttgtgtggcctctggggatggttagacttggagggttagcggtgagcaggttagcaaagccccaagcatccttcatgtagtacacttttcccagcagtaaaaaaattcagagatttcccccttcttcacttttctttcctccctatatgtgccctacttctcattctcctatggccctggaacctcttatgcttctgcccgttatggtcttagactagatgatgagggaggcttttccttgacaccagcattccagtctcccttccttggaactaatctactcagcatgcactattgtggtaagctgcttgatttaggtctgcctagggggaaaacgaggctccagtcc

SEQ ID NO: 447618 - DNA, 525 bp, Homo Sapiens
atgcaaaaggagctgggagagagcatgaggatgtttgaggttccagagctggaaggctctgaaaagtaggattttgtacctaagaccctggttaaagtgcagtgatggtctggagagagacaggatgccccctctcccctccttagcacctggtcttgcccttccagtctctgctctcatgggcacagagtatagcctcagagcatagtccttcatgttccgggaggttacaggtgccacagttgactggggaaggggatgggggcaccctaaggctctgataccccagaagggactagtccttatgaagtgtcaccaaatacacagcagacaccagaagaggtgggaggcggtaggtctaacaggaagggctcaataaccagaatagttcaggaaaagcccagatattaatctcagctctggtgacattctaaaaaggagctagcaccccagggtgccggtgaggattcttcctttctctagagactactctgctctgagctaacctccccattttctgccctt

SEQ ID NO: 447619 - DNA, 683 bp, Homo Sapiens
  misc_feature (25)..(25): n is a, c, g, or t
agctgccttctccccctgcacttcncatgtctctgagtgcaaagggccaacttaccaacatagtgagtcccactgcggccaccacgccaagaatcacccgctccaacagcatccccacccacgaggcggccttcgagctgtacagcggctcccaaatggggagcaccctgtccctggccgagagacccaagggaatgattcggtcaggatccttccgagaccccacggacgatgttcacggctcagtgctgtccctggcctccagtgcctcctccacctactcctcagctgaggagaggatgcaatctgagcaaatccggaagcttcgtagggaactggaatcatcccaggaaaaagtggccaccttgacgtctcagctttctgccaatgctaatctggtggctgcttttgagcagagcctggtgaatatgacatcccgcctgcgacacctggcagagacggccgaggagaaggacactgagctgctggatttgcgagaaaccatagactttctgaagaaaaagaactctgaggcccaggcagtcattcagggagcccttaatgcctcagaaaccacacccaaagaacttcggatcaagagacaaaactcctcagatagcatctcaagcctcaacagcatcactagccattccagcatcggcagcagcaaggatgctgatgcg

SEQ ID NO: 447620 - DNA, 461 bp, Homo Sapiens
cctgttacgccgtcaatgcagcaggcaatgaggggaatgacacagccctctcattcccggaacgtagtcaatctcggctctgcggatttcacagaacacactttgcctattgccggctccaacaagaagtaactttccaggaagctgccggccccggcagccgccaggatcgctgcctgcgctgcgctggccgccggggattcacccggggaggcggggccgctggggaaggctcgcggggaatacagcacactttcccctaaatccctcgtccgcgccgagtgcagggctctcagagttcacctagtcccacctctcacccacaacagtttataaatggggaaggtcagacaagttagtagcagagctgggtctagaacccaggagttcgaatacaatccgaggctcatatcgagactttaagttgtccgattccgaagtttatttgcttttttccctct

SEQ ID NO: 447621 - DNA, 401 bp, Homo Sapiens
ccaacagattggttttaatgtaggaaactggttaaaatatgcattagtatctattgctgtgtaagaagttagctcaaaacatagtgacctaaaacagcaataatcatttattgtctttcatggtttctgcaggtccagaatttgggagcaacatgtctgagcagttctgacacatggtttttcatgatattgcagtcaagatatcagctggggctgtggtcatctgaaggctcgactggggctggggaatcttgcatggctgttggtgagaatccacagcttctagccacagggggtctctcccagagctgcttgagtgtcctcatgacatgatagctagtttcccagagaaagtgattcaagggaacaaggcaacaatgccttttaaaaaaagttatgca

SEQ ID NO: 447622 - DNA, 389 bp, Homo Sapiens
ctggggagaaacctcgtgggtaggattcagaggggcttttggtttcccattttccacactgaacccttctaactggtctctgaccctgattattaagggctgcaaacaggaaggattttattcaccattgatgcggctccgagtagtcccaaagcgaggcagtgcccacaaggtctgtgctgagaaggctgctctgccttcgcggtgtctcccgggtgtgtgctgagcagaacgcagctccgccctcgcggtgccccctggcccgcccgcccgggtctgtgctgaggagaacatgctccgcttcgctgtatctccgaagtctgtgcagaggagaactcagctccgccctggcaatgctctccgggtctgtgctgaggagaaggcagctc

SEQ ID NO: 447623 - DNA, 982 bp, Homo Sapiens
  misc_feature (41)..(77): n is a, c, g, or t
  misc_feature (712)..(712): n is a, c, g, or t
aaagactcatataggggaccggattacacgcggggcggcgnnnnnnnnnnnnnnnnnnnnnnnnnnnnnnnnnnnnnatcaggccaaatcggccgagctcgaattcgtcgagagcggctggagtttatttggtcttttgttaatgaacgtttcaaatgcttctttcatggcattgataaatttctcattcttcagaaagcagatatcaattatatggtcaaccttatctttaaaatccagcaattcttgaaccatggttttatctttttcaggattaattacaatagtgctgccaaatgccttgatatattcgatccactgctgcaaaagaacctgaactccacctcgaactctactgaagagctgatacagaagagacaaatcttgaattcggttttcatcaaggaggttatttaaacctttctgaagaattgctgttaagtgttcacctagaagttgtttttctacagtagcaattaatgacttctgggtggtctgatctaagtaagtaataagtctgtctgcttcttcttctagacgtttgttaacatgatgtagatattcatgaacctctctttcttgcattaatttttggccttcagctgcatagagccggttagtttcttccaaaaatcgttgttcaaaagaatcttgataaatttgcaaatcagacagcatgcttaaaaggcttcgaagtaaacttctatcaatngcttcaccattcctttccctctcaatcaagagaagaatgccatcaattgtcttattctgcactttctgatcacttataatatgagccctaaataactccagtcccatgtcccaaatggagggtaggcattgaattctgaagaacgtaagttctaatccagaaaccaaaaaatgctcctgatcatgatcattggtctgccatggtgttgcagcatctatcaatcttctctaaaaaaagaagttatcaatgaatcctctcttgaatggtgaa

SEQ ID NO: 447624 - DNA, 743 bp, Homo Sapiens
  misc_feature (648)..(648): n is a, c, g, or t
ttcaggttcttttgcagcagtggatcgaatatatcaaggcatttggcagcactattgtaattaatcctgaaaaagataaaaccatggttcaagaattgctggattttaaagataaggttgaccatataattgatatctgctttctgaagaatgagaaatttatcaatgccatgaaagaagcatttgaaacgttcattaacaaaagaccaaataaaccagctgaacttatagctaagtatgtagattcaaaacttcgtgcaggcaacaaagaagctacagatgaagaacttgagaaaatgttggataaaattatgatcatatttagatttatctatggcaaggatgtttttgaggccttctataagaaagatttagccaagcgcctgttagtcggaaagagtgcatctgtagatgctgaaaaatcaatgctgtccaaacttaaacatgaatgcggagctgctttcaccagcaaacttgaaggaatgtttaaagacatggaactttctaaagacatcatgattcagttcaaacagtatatgcagaatcagaatgttccgggaaatattgagttaactgtgaatatcctgacaatgggctattggccgacatatgtgcccttatgagttcatttaccaccagagatggtanactttaggagattttcagacatttacctaggcaaactagtgcaggaaactcagtgcagtcaccctaggacactgtgtaaaagcgaatttaaagag

SEQ ID NO: 447625 - DNA, 468 bp, Homo Sapiens
agtgcgacctcctatagtcaaacagcttatacttcctggaaattcaggtaacttgaaaagctcagacagaaatcctccactcagtcctcagtcctctatagatagtgagttaagtgcttcagaattagatgaagattcaattggatccaattataagctaaatgatgtaactgatgtacagattctagcccggatgcaggaagaaagtctccggcaagaatatgcagccaccacgtctcggcgcagttctggttcatcttgcaattctacaagacggggttttcaccatcaccacgcaattcacctcgaccgtcacctaagcagtcacccagaaattcacctcgttcacgatctcctgctcggggaatagaatatagtagagtgtccccacagcctatgattagccgcttacagcaacctcgcctttcacttcaaggccatcccacagatttacagacaagcaatgtt

SEQ ID NO: 447626 - DNA, 580 bp, Homo Sapiens
gagtactgaaacctttattcccattttactggaaacaaagaacatgaacaatttactagtcagaaaaaaagtgttttataacccaaaacaaatatttgccaagagctgtaaattgcttaaatcgcttaaactggagatttcagtgagatttttagcagtagattactaagctccttagttatagaacattcaatgcataggaaagtgtttttcctacaaagcataactgaaatgtagtttaactaatggtttacaattcagtcaaataccaaagctgcaaaccatttagggagtcatcaattacatattttgtacactttcaaaaagcttacagctgggatgggttgtttattttcaaagcatgactgctttaaaatgatcatattctttagcctgccacctaggaagcattaagcatttacttgcagaatgaacaaacgagcacgttgtcttgtgttatgaagtatataatataggtcgttttagtttcttcattcgcagactatcaggctcatttcacgtgactgcttgcacttagaactgagttatcacggagtaggaactctccaacatcgtcgtc

SEQ ID NO: 447627 - DNA, 440 bp, Homo Sapiens
aaggctgcttcctgcctttcggcccaccagctgaaggcacctttttattccagccccaaacaaaaagccagggactggtaggcctgcatcagtctccctcccactttgtgtcctgaccccacaaagggcctttgaggttggaaacccctgtgccttcatccccatccatgcttcctgggggtggggcctctgactaaatatgacaccgtttttcaagaactgacccagggggtcctgaggagaagggcacagtcttgcaaaatggtctcgaatttctctgctgagtttttcatccccctgcttggatcccagtgctgttaccttttgaaaggaactgtccctttagccgaaaaaacaaaggcctggggaggatagaagtcctcggaggaaagggccaagggatctgggacccttttttgcttttcctaagattgatccca

SEQ ID NO: 447628 - DNA, 459 bp, Homo Sapiens
gccgcgcgctccccagccggccaccaatcccgccctccccggctcctccggacctcctcggcaggcggcggcggggcctgcctgtgcgctctgcgcccgcccgcgcctacccctccatggcgtttatccggaagaagcagcaggagcagcagctgcagctctactccaaggagaggtgcgcgcccagctgaagaagggcccagccgggggcctagtcggggccggtcgtggggacgccggccggagatctgagggacgggaggcggcgtgggggccgggcacggaggcaggggccggacgcgtgtccagggcctgggctgggggctgtggcggaaacctgaggtcggggtgagaggccgggggcctggtctgggccggagcctgccggggacaggaactggatgacgggccaggccagattccaccgcggagccgaggcatgccgagctatccggcagt

SEQ ID NO: 447629 - DNA, 1035 bp, Homo Sapiens
  misc_feature (46)..(64): n is a, c, g, or t
  misc_feature (297)..(601): n is a, c, g, or t
  misc_feature (908)..(908): n is a, c, g, or t
  misc_feature (1003)..(1003): n is a, c, g, or t
atgcaggcctgggtggcgattcggacgagggagaatagtctcgagnnnnnnnnnnnnnnnnnnngttagaaactgattttaataagtcacatgatacaaaagaatgagaacattcaaagaatgagtaaaatactgctttgtcccaaaggacaagcagaaaatgttaaggcacaacggatgctcagaaaacgtaagaagctgaagggaaaacacatcatctgtgtactcagacacacacactccaacccatcacacgaacacaccctcgcccgcccatcagagaagaattcgcctggnnnnnnnnnnnnnnnnnnnnnnnnnnnnnnnnnnnnnnnnnnnnnnnnnnnnnnnnnnnnnnnnnnnnnnnnnnnnnnnnnnnnnnnnnnnnnnnnnnnnnnnnnnnnnnnnnnnnnnnnnnnnnnnnnnnnnnnnnnnnnnnnnnnnnnnnnnnnnnnnnnnnnnnnnnnnnnnnnnnnnnnnnnnnnnnnnnnnnnnnnnnnnnnnnnnnnnnnnnnnnnnnnnnnnnnnnnnnnnnnnnnnnnnnnnnnnnnnnnnnnnnnnnnnnnnnnnnnnnnnnnnnnnnnnnnnnnnnnnnnnnnnntcacctggaatcaaagcagcagggacagcctgcgctggagccgccagaacaggcaggcgggcagctccgcaagaccgagcaactccaggacgggagacgagaactggcagctgacatgaccctgtgaccaggacattccaaaagactgggggcccttcccaggcctcttctttccgcctattattttaacaaagtccatgctgccagaaggcaagcctacctcgaaacacctggcacattcaccagctaccaaagggagggagggtgaacaggctctgatactttggagtaaaagcccaagcttccntctcccacgggtttttccaccggggaacgaagaacaagcccagccctgtggcaacccaccaggaagtcccagggaagcaccttggtgaaaaccgnaaaacccaccttcgaagggtccccagggctgg

SEQ ID NO: 447630 - DNA, 440 bp, Homo Sapiens
  misc_feature (235)..(235): n is a, c, g, or t
  misc_feature (248)..(248): n is a, c, g, or t
  misc_feature (280)..(280): n is a, c, g, or t
  misc_feature (353)..(353): n is a, c, g, or t
  misc_feature (393)..(393): n is a, c, g, or t
  misc_feature (399)..(399): n is a, c, g, or t
ttttttttgttagaaactgattttaataagtcacatgatacaaaagaatgagaacattcaaagaatgagtaaaatactgctttgtcccaaaggacaaggcagaaaatgttaaggcacaacggatgctcagaaaacgtaagaagctgaagggaaaacacatcatctgtgtactcagacacacacactccaacccatcacacggaacacaccctcgcccgcccatcagaggaagganttcgcctgggganttcaggctggggggcgggtggcttcacggctnttaatcccaggcactttggggagggttgagggcggggcagattcatgagggtcagggagtttcacggaccagnccttgacccaacatgggtggaaaccctattttttactttnaaattnccaaaattcagcggggcctgggtgggcctttgcacctgtta

SEQ ID NO: 447631 - DNA, 364 bp, Homo Sapiens
ttctctggatctttcagccacaaatgtcctggatggcagcagtatacagataggtgagtcaacacaagatggcaaatcaggatcaggtgaaaagatcaagaaacgtgtgaaaactccctattctcttaagcggtggcgcccctccacctgggtcatctccactgaatcgctggactgtgaagtcaacaataatggcagtaacagggcagttcattccaaatccagcactgctgtttaccttgcagaaggaggcactgctacaaccatggtgtctaaagatataggaatgaactgtctgtgaaatgttttcaagcctatggagtgcaattattttttgcatcatttaaacatgcagaagatgttt

SEQ ID NO: 447632 - DNA, 594 bp, Homo Sapiens
gcagtactctcagcggtttaaggtagcgaggcctgggtgtggaattcggcacgaggagccaggaaggcgagctctgcgcacacgggcgtcctgcagcagccactctgctttccaggaccggccaactgccctggaggcatccacacaggggcccaggcagcacagaggagctgtgaacccgctccacaccggccaccctgcccggagcctggcactcacagcaggccggtgctaaggagtgtggcgcgggctcgactcccactgctgccggcctcccgagtgactctgttttccactgctgcaggcgagaagaggcacgcgcggcacaggccggcctccgcttcccgggaagacggcgcactcctggccctgggttcttgctgctgcccaccctctgctccctgggatgggccccgaggcgagcagcttcagcacaggcctggccctgctccaggtgcaggaaggaggataaggccgggccgagaggcggcacacctggaccatcccatgggcctccgcccgcgccgccccgaggatgagtggtgatgtcctctagccacccctagcagcgtcggctctccctggacgtgcggc

SEQ ID NO: 447633 - DNA, 779 bp, Homo Sapiens
ttttttttaaagctttttattatagacattttcaaacatatacaacagtaaaatgaataatataatgagccctcacacctccatccctagtaactgattatccgtgtgtggcttactctttgatcgatactctcctgctttcccctagcccccacagttagactgtcccgcagcaaagcccagacagacatcctatcggtctgagaattccttatcaaaagcttcccgaagaggaactctatatagggcaggactaagtgtgctggctataggtctgcagaaatctcaacccttgggagcccttgggtggggcctgggcaggtccctgggcagtagccgtctgtagtgggcggctcatctgctgacaacagtatgacgaacaaatagcattttgtacccgcactacaatgcaggagaacgccaaacaccgctttattgcattcaaaccttctaaggcacgtcagccagccctggccttgtctacagccatgattatctccttaaagagttaactctaaaaaaatattaagctcaagaaataacagctcaaatactcctaactaattaaaatcaatagtgagaggcagaatacggtaaaagataacatattagtattattgatcacagatcaatttcagagtacttaaaacaggaataatcagctaccacatcttgaaaaatacaaagacttgatcctaaccttttatttatcatgccacacggactgagacagtccccagtacctgcctcgtgccgaattcgccacccaggcctcgcta

SEQ ID NO: 447634 - DNA, 299 bp, Homo Sapiens
ggaggccatggccgtcgcccccgaggagcctccgcccagcgccggcgaggacatcgtgggggacacagcaccccctgacctgtgtgatcccgggagcttaacaggcgatgcgagcccgttgtcccaggacgcaaaggggatgatcgcggagggcccgcgggactcggcgttggcggaagccccggaagggttgagtccggctccgcctgcgcggtcggaggagccctgcgagcagccactccttgttcaccccagcggggaccacgcccgggacgctcaggacccatcccagagcttgg

SEQ ID NO: 447635 - DNA, 417 bp, Homo Sapiens
  misc_feature (309)..(309): n is a, c, g, or t
  misc_feature (333)..(333): n is a, c, g, or t
  misc_feature (347)..(347): n is a, c, g, or t
  misc_feature (358)..(358): n is a, c, g, or t
  misc_feature (372)..(372): n is a, c, g, or t
ctgcaaaagctgtactctttttcctcaaaatccaaatcttccacctccttccacaagagaacgacctcctgggtgtaagaccgtgtttgtcggaggattaccagaaaatgctactgaggaaattattcaagaagtctttgaacagtgcggtgatattacagcaattcggaaaagcaagaagaatttttgtcacattcgctttgcagaggaattcatggttgataaagccatttacctttctggttataggatgcgattaggggtctagcaccgacaaaaaggattcaggccgccttcatgtggcatttncccagggccagggatgatttcttntggagtggggaatncaagcagaggntgcgttgcccgggnaggagcgggcaaccggcgcaattgggagggagggaccggttcagg

SEQ ID NO: 447636 - DNA, 589 bp, Homo Sapiens
gtgtttagtttagttttggtttgtgtgtttggttgttttaaccagtaaaaaaaatttttagtaagttccaattgtgtgtcagaattgtgctaggcgcagggggcaacgaataagcaagacagatcaagcctataccgtcttgaaatttaagtttagggaccactctctgtcaaaggatccagcgctggtaatatagattgctgaaggcctttgccttctttccaccaggcaacagaatttgtgtccccgtcactgcttcttcttctgtgaaaaatatagcttcagtttggtccacgaatacagaagttggtcagagatattgttctttcaagcacacaacaagcaaaacttggccaatacacaccaatcaaatgcacttcctttttccctgggagctcctgccacatctcagccctgcagggcagtcttcataagggagacaaaagaagggctatgcactggcactgacagttgggcaggtagtgctcaaataagcctaaatctcaacattccaagggaatcttcaagatcaaggtagacctagtccagtcatctcttaatctttataaggatcactggactggatgtg

SEQ ID NO: 447637 - DNA, 266 bp, Homo Sapiens
gagttgcatggtctttggtcctaaaaatctgagggctggcagactctggacagtttctgcgggtctccaagccagcatgacactggcttgtaccccagggcctggagctgctgcctatatatgctctatatagtaggcataggcaggttttagtatcaaaatattgtacctggctgatatttgtgaatttggattggtgaagtggttcttagcattggctgtgctagagtcaaactctcctagacaggaaggagcttgggtatttt

SEQ ID NO: 447638 - DNA, 1101 bp, Homo Sapiens
ttttttcacaattaacatttattgaccacattcataacagaaactcacccacattcacatgaactttgctacaaccaagaatcacctgatgagaaatcatttgggttgaatcctgggtgtggattctgttctgagaagacagcgactgtcacagacgcctcctgattggtggactctcaaagatcttgatcgtgacacatttttgtggctgttcttgacagtagctgaagattccaacttcaaaccccaaaacactggcgaatggccatgatgaccctcgggatggcctggaggagggtcaggaggccgaggggcagcagacgcgctgcaggagccggtagctggtcctggtagggggcctggagctgctggaacttggacaacaggcactcatcaccgcagatccgccagcagttgtgccagcagcatgcatccagcaggggtgcttggatgcctttcaaactctgctgcctcctgactatctgctgctgagacctcaggacctggggcacccagtagggcatcactgcctggtccctaggcatcggggaggcggcccccaaagcggtggcataggcaggggcacatcttggcggttatgggggataggaaattgaaccgtcttttgactctgctttcggggtctcagggacagagggacccagtaaggcagtgctgcttccacccctggacacaggcaggcggccccacgaatctggtctggcattcacagcagatggcccaggggccagggttcatcgaatgacgggggaggcacacttctttcttgtaaggtttgagatgtgctattccttgcatcctgcgcgctgggtgtgagtgccaacctgcagagcccgacgcaccccgcgcccggccccccggcagcagagcctgaggctgctccagtggcctcatgatgatggtgacaacgccgcggggacggtggggaccggctcgcacgcatatggcttcttatggctgacgcgccctttcacacacacatcgtccgcaggccctgacgcctggctcccgcctttccctcctgccccaggaggaacccaacccgagctcaaccccagccccaacctcaaccgctcagag

SEQ ID NO: 447639 - DNA, 476 bp, Homo Sapiens
tttcagaggtagaaaggatttactcttcagccatctggtagagccccaagaacaagttacatgtggacaaagggagggagaggtatcatggtgattaataaattcaaacaaagctgaatgataagaccccaggatggaatacagtctgagaaaggcctgggcaaagggaggcagagggactgaaggaagcaggtcaaggaagatacacccatggtagcctaggaaattggcagtagtgttggtgggtggggaaaaggagggtttggctgtatgcctagctttcacaaggtaggggatgaggaagatgatcatgatattgcacagaggacccaacactgaattgtgggagctagaggttgcttgaggcaaagtaaaaaggcttcggacactttcaaaaggaggctggccaaaggcgtgattagggactccagtaatggacatactagaggccctcgggcacctcaagccctgaatgg

SEQ ID NO: 447640 - DNA, 532 bp, Homo Sapiens
cgataatattttgtggttacttccgcagatccaaaacacacacagagccgtcggacgcgctggcacccactttgtctcctcgggcgttccagcacacctcgaagatgccgccagtgcctcggtagctgtggacaagatttccactctgagtattccagatatggacgcacttgtcgaaggatccactggccaagtacttcccatcagggctgaaagctacgctatagacaggctcctgatgcttcgtgagcgtgtgggtgcagacgcctcgttctatgtcccacagtcgcaccgtagaatcaaacgaagcacttgccaacatgatgttggagtttgggttgctggtggcgggcccagtggggctccacttgatggtgtagatctctttattgtgagcctgaagatcatggatgcacacctcctgtttcatgctccagatcttcaatgtcatgtcatccgagcaggatgccagcaacattccagacggatcccatttgatggcgttgacctcgtttgtgtgtccctggaaggt

SEQ ID NO: 447641 - DNA, 413 bp, Homo Sapiens
  misc_feature (241)..(330): n is a, c, g, or t
aataggtgtagccagagatctcgctcctgtgtttccccccggccagaggcccactgacagggtggggggacatttttgttcctggtgtttgtgttcccagttccacgagtgtaaagtttggattttcaacttggtttcgtatctgccaaagctttgtacattttttatgtggtgttgatttcaatcggctactgttctgttctgtattttggcatctgtgtttttaagtgagatctgtggnnnnnnnnnnnnnnnnnnnnnnnnnnnnnnnnnnnnnnnnnnnnnnnnnnnnnnnnnnnnnnnnnnnnnnnnnnnnnnnnnnnnnnnnnnggtatagttcatgtagcattgtaatcggttgttctttgaacgttcaaatgactcatcagtaaaaactgtctacagagaagtaa

SEQ ID NO: 447642 - DNA, 175 bp, Homo Sapiens
gagcttattaagttatctggcgcctcatttggtaagaggccttgcgggatgtccaaacgaacttgatgctgtgctttgacgtgggtgtcgcggattgggcagctgtacagaggcaccctcacaaagacaccccaccccaccccactcccaactaggaaacaaaaatccattgtgg

SEQ ID NO: 447643 - DNA, 489 bp, Homo Sapiens
catgttagtcagaaaaactccatttagagccatccaaactagcataagaaattccttaagcactcaaagcattatctctgttttaagtaagaaactaaatccagagcttttaacaggtacttagaaataagtattgggtaatcactaagaggacattgactgcaccaaaccaaagctatagaaagaaatgattgactttttaaaatatattcacattaactgtcctaggatacttctcttgaggctttggaaaacttcttccttgaaatttgcatatccactccagttctgtcaccaaagattttaatcttcagatcgcaatttcctctctcccagaaaaaagtactacaacaggctcaagggatatgctttggtggtcaagggattacactatggttttccttctgttcacaatggtatttacaggagaccttgtcatcagaggacgtactgaactatctttatgactttggatttgatcagaggttt

SEQ ID NO: 447644 - DNA, 489 bp, Homo Sapiens
gcggcacgaggttccaatttcttttttatttcgtcacccaaaacagacaatttattaataactcctccaaaacctctgtgggttccccttggagtgaagcgcgagcagggagccgccatagggagccaggcccgcagcgccgttcgtcctcagcacaacgagcggcagcgggcaccgaattgttctgcaactacttttcacatctgccttttgtagttgctgaacaaaattcgttcccatttgtttccggttggcaagttcgtaggcttcggcggaagtgtaaagtcaagggcaagtggcggaggctgcggccaccccggtctctgagcggcgcaccggacaggtggtcagtcccgggacgcggtgacccgacgcccgagctccaaggctcggcccacgccgggttcgccccagtcccgctggtccctcagccgacgccgccgggcctcgcaccgccccccgaccccggacccccacccacgcggccgc

SEQ ID NO: 447645 - DNA, 360 bp, Homo Sapiens
  misc_feature (88)..(96): n is a, c, g, or t
caagttcaagaatccccagtaaaaattctccacgaggtctttttccctttttacaaaaatagagtttttcttcccctcccaccccccnnnnnnnnncattttgtttctgcttccagccccactgcctgctcccccgcattccaccagggggcactgggccgggggtgcccacacccctcctcacggttcgcttttttggggatttttaaacctgttcctcctaccccaggccccacctaggtgctggggaggcctgggcaagggggtctgggagggcaccccctgggagccccccaagccatcccatcgggggtggtcgagggtgggggtgggggcacatctctgcattctttttagccg

SEQ ID NO: 447646 - DNA, 457 bp, Homo Sapiens
  misc_feature (364)..(364): n is a, c, g, or t
  misc_feature (393)..(393): n is a, c, g, or t
  misc_feature (411)..(411): n is a, c, g, or t
tttttttgcaaagaacacatgatttattcaagacaactcgtcatcaacagcactgactcaaggaacaaaacagatgaaaaaactaaagcaaacgttctgaccctctggagtgagacccgctgaattcatacagctcaatctgtaagtgtccaagatccagggggcaggttctcaagcaggaagcctcaggcactctggctctgtggggacctcccttgggcatctgcttgagaatctggggaagggacattatcagggcaggtcctttctgcaggcggtgtcctgctgggagctcagcctaaccaaggcctgggtccctgtgctcttggaccttcatctcaaggtcaaggagaggggcacttgnacccaactttggccagcgaggcaaagtantggtgatttcaagtagtntggtttccagggagggaaggtagggggcagacaagagtgagttgca

SEQ ID NO: 447647 - DNA, 348 bp, Homo Sapiens
gtttcaaggcattgaggactttgttgctaaacaagttctcagagatctgaagggcaaggccatgtactctggtatcttcattgatctttaagatttcatctataatctcggcttcactgctatctggagggaggcaaatgtgagtgatgttcagaccagcctcctcagccaaattctggttgatttcctgcatcaagttgtcgtcacctgcctggataattgcaagaaccggcttgaaggcagggtttttttcttgcaataaacttagaacttcttttgaattctgaatgacttctctgacgatggagtcccgcgccgcgggcgttcggccgccggggctgcagctga

SEQ ID NO: 447648 - DNA, 849 bp, Homo Sapiens
  misc_feature (166)..(245): n is a, c, g, or t
  misc_feature (565)..(565): n is a, c, g, or t
  misc_feature (569)..(569): n is a, c, g, or t
  misc_feature (576)..(576): n is a, c, g, or t
  misc_feature (584)..(584): n is a, c, g, or t
  misc_feature (587)..(587): n is a, c, g, or t
  misc_feature (820)..(820): n is a, c, g, or t
tttgaacagccaagaaaaaaattgcaatttattaagattcaataaagcgttgtactttcgaaagcaactttcgatgcatgttcttcaacagtcacattctatgaggaaaacattaagagccacgaacttgttgtttaatctcagagttacagacatattaagttcnnnnnnnnnnnnnnnnnnnnnnnnnnnnnnnnnnnnnnnnnnnnnnnnnnnnnnnnnnnnnnnnnnnnnnnnnnnnnnnntattcttgacttccatccccaattttaaaacaacagtttttctacaactcaatgctcgccggcagcacgggaagtggtatgtcggacgcacatacgcacacgcatgctcacacgcacacatattggatatacatacgcaggtgtatgtccatcgaatatatagaacgcatgtaatggcaatgagatgcagtcactctgaggaaggttggtttttctaaatatcctactaaacttgagaaaaaaagtcttgaacccagtttgtgcatagttcatgatcctctataaaaccagcttttgtggatctgcagtcttgcaggacntttnttttttnttttgtanttnttttgttttgataaaaccattaaaaagctaattaaaaaaatgtaatgcacaagtttcctgatcaagcaggcagggagcacaatgttcatatatatattttttaaaacatacttgaaggtatgttattccattgtctttcttccttgcaaaacaatcaaaacattgatcatttttaaaacataaagcaatttttaatatataaagcactcttcaaacatctatttcttttgagnccattatttggtaaatatgtaactgctcc

SEQ ID NO: 447649 - DNA, 219 bp, Homo Sapiens
  misc_feature (77)..(97): n is a, c, g, or t
gaggctgaggtagggtgatcgcttgggcccaggagtttgagatcagtctgggcaacgtagtgagaccttgtgtcttnnnnnnnnnnnnnnnnnnnnngattacaggtgcttaaaatatttatgaagattttatataaggcattttttaatcattttattttgcactatatttaaatgtgatcagtttgtatgtatgttataccgatgaagaatacaggc

SEQ ID NO: 447650 - DNA, 421 bp, Homo Sapiens
taacatttgtgaccagttaactttaattttcaaaataaatctgcagtattttgcatgttagtaatacagtgctggtattgacaggtaaaatcatcatctgcttacatagaaaccttcattcaggagcacaccgtaggaggggaacggatacacaataaaaagcaaacgcaggccaagcagcgagccctagagcgtaacaggctggatgtcagatttaaggattatctaatacaactgtttagctgccaatctgataaaggggaagctctcaaccaggttacaaccagaagggaaaaacgtactctgccttttcgtagagcagtggctgtcgtgccttcaacaccttggttgaatcagttcatcaacatcggaaactcaattccagttccaagacacagaatttcatcacacaacctattcg

SEQ ID NO: 447651 - DNA, 476 bp, Homo Sapiens
ttttcttaactaaatggaatttattgttttccacaattgaaaagttcagcgtagtcggggggactgggctgggtccagggactcaaacaatgacacaaagacacagtttctctccacctctttgctttgtgtgtctgctcaggccatctctccccaaaggtggtgaagatggccaccagcagactggggctcaccctagactcctttttaaggtaacaggatgactctcttttgcccaacttagatcatgccccttaccctgaaccctggcaaagaacgtggagcttccttctgtggtccaggtagaggatggttacatgtggggtctgggattcagaggtggcaccgctggcagtggttgggacatgtgagcacaagggtgaggcctacaccactctgaggccttggctgccccttctctctcccccagccctcgcctttccatgatggtaagacatgaggccactcaccagctc

SEQ ID NO: 447652 - DNA, 1572 bp, Homo Sapiens
  misc_feature (138)..(146): n is a, c, g, or t
  misc_feature (723)..(731): n is a, c, g, or t
ttgattttcttaaacaagggcttaaggggcctaggaatttctaatttttaaaattcccccttttttaattaaccagccagggagttttgaaaagtgttttccaatggctattataaatggtatgaatctaggaggagnnnnnnnnntatgcatactgggatggtttttccctttagacttccaaaaaccttaagattttataaataaaactagtcagttttatctaaagagacatgaaatccatgtgagaggggagagaaatatccagagttcagtcatccagcaagtttaggagtgtgcccctcctcaccttaactaagctttcacataaagcttaaagtcaccgaggaaagatttggtcaccaaccttataggcagcgctcttaactatgccaggaaatccccagtagagtgcattcttaaggcagaaggctagagctaattgcttatctcagcaccctaagtttacatcacagcagccactactgctcagacagttagggctaccaaatatgtagagttggcctttgtagaatcagaccttcaacacaatctaataaattagctagggagctgaaaaggtcaaatgttactggtgtattttgtctttgctctcccttgggtataaggtgtatattttattagaaagggaagaggcttacttgatcaggaatcccagtaaaagcctgatcatggttccttttgcccctcctccaaaacaannnnnnnnnctggtagtcggatttgttatgaatttctctctcccctcacccctcttaaagtatttagctgaagaagctggcagatagagagtgacagacagacaggcagcagtgtgaggccacaggagagtcattcttccggagttatcagtccatccatccatcactggagaagagctttgattgcctggttgtcagtggcttcaaaggcggtcagtccatctgggcctttcacagtcttatcagcaccctttgacagaagcaatttcacacaggaaacatgaccctcatagacagcagacagaagaggagtaatatgatgtttatctggagcattaatatctgctcctttcagcagcagaaattccaggatttcaagctgcccacaatctgctgcataatgaagaggtttccttccaccttctagtgtccggttgacatcttctcccttggccacatagtctttcacctcatccaagtctccgtttttcagggcccacatgaactccttgtcgcacatcactgcagcggggcaggccggttggccgggcagaagatgaggaggcggtggcagcagcaagcggatgccgccgggcgagagggaggcagggccgcgcgaagccggagaggagaagaagagaaggagggttaggctgccaggcgggcgaggcagttggccgcggcgaccgttcgggcgggagaaagaaagttcttttgcggccaccgggcccagcagagaggttccgcctggccgaggagaggcaggaacctttacacttccggttcactccccgctaggaccctcccccaacttcctcttcctcttctcctccgcggaacgcctctcccc

SEQ ID NO: 447653 - DNA, 580 bp, Homo Sapiens
caatttctccactttgatacaaatatgtcaatatctccctttttaacatcattcatggagacagctttcttctagagatgtgagaaatacaaatttccattcattttcatgaattcacattttagatataactgctgttttggtgtccagtgggagggagagggacaaaactaaatttctaacatagtgttttgcagagtgtggtccaaagaacctgaatcctgcaagacactctgatttggtttcattctgtgttaaaaaaacatatcatatagcccatttgaatcacagcacacattattttaattttgctataaaaaacacaattttatcccagagtttctcaaggtgactggactatggacactttaaattttgatttctattatcatagttttctgtagagcacactttgcaaacgctgttctaagatcctgttgcttcagcattactggaggctattgcttcccacattattacctttattcgtaactttatcaaaataaattctacatgtaaaagcacctatttataggttctatgttacgttgatcggcctactacgctgggatatttgcat

SEQ ID NO: 447654 - DNA, 638 bp, Homo Sapiens
  misc_feature (121)..(121): n is a, c, g, or t
  misc_feature (166)..(166): n is a, c, g, or t
  misc_feature (169)..(169): n is a, c, g, or t
  misc_feature (171)..(171): n is a, c, g, or t
  misc_feature (176)..(182): n is a, c, g, or t
  misc_feature (185)..(189): n is a, c, g, or t
  misc_feature (374)..(409): n is a, c, g, or t
atttgggggggaattcccaagcccctagttcattgccccgggttcttctttagggaaaccgggttagggccactggtcccctttacctactgggggcccccggcccccaaacgaaagggtnttagaaagttttttcgaggggcggagggggcccgacatttttttnttntntacgnnnnnnnttnnnnngcgggtgtaatccgataactttattttaattgaaaatggaggcataacatgtcctagaaaaaataaagatttaggatacaaaggagacacagcggcagggctgcccccagggatgagggaatctttggtctgggccggataatgaggacaagggcttgagtcgaggggagctggtgaaggaagannnnnnnnnnnnnnnnnnnnnnnnnnnnnnnnnnnntggcaggaaatgccacactggggagggtctccagtctcaggggcgcggggctgcctgtcctccaccttcggattccaggcagttgtgacaacaccagctatcggcagagctattaatagtgtttcagggagtgacagggagagggctctgggggctggaagtccggccctggggcagggtgttccgcttacagctagtaccaaatggagggggcagggcccctgagtca

SEQ ID NO: 447655 - DNA, 814 bp, Homo Sapiens
cgcaccttcgggggcacggtgcgtaacaggaggcttccggggctgagagcgttacaggctgcgctccggggccagataggccgggcgctcagaaggggagtatgagcctgatgtgggcagaatccagatgagctggccagtgctgtgaaggagctgagagcacccccgagagccgtgagatggcaccaaaaaccaagaaaggatgtaaaggctccattgatgattttcttggtgaccttctaggggatgatatgacactacctgagaagcctgttaaactagcttcacataccagagacaccacaggtgtatctcagatgttcccttcttcaaaggcgagaacaaagtccctcctgggtgatgatgtcttcagcaccatggcaggcctggaagaagctgatgctgaggtttcagttatctcagaggcagacccacaggctctgctccaggccatgaaggacctggacggcatggatgctgatatcttaggtctgaagaaatctaattcagcccctagcaaaaaagctgcaaaggaccctgggaaaggagagctgcccaaccaccccaagcctgcagggggtgccattcccaccaagaagtcacttccgtctcccagcagctttgggcatcagaacaggaggttttcctctgaagacttggaagacccattgggagggcttctctcctatgatgaaggaggaatcaccaagcagccgcctgtgacacagagtaaaacagcttctgacaagagccccagcacagtgagagatcaaggtccctctattcctctaacttctggggacacccccatccg

SEQ ID NO: 447656 - DNA, 609 bp, Homo Sapiens
gggggtttgtatcaaaactttactgtcagaggctctgctgggccacaggtcttcagaacaccgggctcgcccggcctcctctaaggcattcaataatattagtaattaaatagcaacgctcatcccccaaccggaatgtacaacagaggtcccattgtgccatgtggtcccaaggggtctggtcccatgaggtctggtactcaagaggcagagggggctccctgatgcagaagggttaaggccacaaaggaaaaggagaagggatggggtctggggacagctgagctggtccatcacatccaggaatctggctcagccctcggggtgactgagtgcagggcatgccatgtccccagctctgcgggtccggaggggcggcgggggccccgaggcgtggggatacgtgagggtttacggtctggctgtgtgtccatccgaccccgtgcccaggtcctcgagggttcagtgcaagccagggggctcccaggtgcatctagtggcccccccatgccagggcaggggctgccttcatcggaggagctggaaagggcttggcttcggggcccaggcagcccattggccgtccggccagagtccccaggttggcca

SEQ ID NO: 447657 - DNA, 510 bp, Homo Sapiens
ttctctatcccttcccctgatccatctcgtctctgttctccttcccttttccgttcccgaagccggaaggagccgaggtacccacggaaaaagtcgaagctgtccccggagagtgaggccttcacgaagcggtggcggaaggagccgaagttctctgatcggaggcgtgagcaagtggcatctccggaaagagccgaaacacggactcgagcttaatcccaggaggggcccgagggcgagatccggaaatctccggaaagagccgaaggccgggacggttaggattgtcggaagtgcgccgattgcttggacagggccggcggagaagatcggagcaagtccgtggaagaagccaaagactgggacggattgaattgttggaagaagccgaactcgcagaggggactgggcgcagtggcacacgaggacacacggaaacctccgaacgttgaggagataatctcggaaaagttacggaaacctgggaagtcggcgaaaccctacgttcgg

SEQ ID NO: 447658 - DNA, 343 bp, Homo Sapiens
cgagatggtgggacattctaacctggggccccttacctgagtctaaaaatgaggcctgccctcttcactctgcactatttcctccctccccgcagggggcgctcagtacccacaattggacttactggcagtgtggtcagtaccttggcgttgggcctggtgagtcccgtgaactacagaaagggtgactcaggagaggaatgtcgtggctgtgtgaacttgggccacattaccctctccaagcctctattttctcatatgtaaaatgtggcaaaaaataatacctccctatagaactgttgagcatgaattataaggggcttaatgttgcaccttgcactag

SEQ ID NO: 447659 - DNA, 928 bp, Homo Sapiens
  misc_feature (124)..(161): n is a, c, g, or t
  misc_feature (225)..(290): n is a, c, g, or t
  misc_feature (460)..(460): n is a, c, g, or t
  misc_feature (615)..(615): n is a, c, g, or t
cttttttaaaataaaaaccatggattttccaccctctttaatcccttccttttaaaaatgttctcttctctgctctacgtcctcccacttcccggttcaagtttcactggtgtcccgacccgtnnnnnnnnnnnnnnnnnnnnnnnnnnnnnnnnnnnnnngtttgcattgtttgtgtgcggcatcttcagtataaaaggccagcgcccacggtcccaggagcgnnnnnnnnnnnnnnnnnnnnnnnnnnnnnnnnnnnnnnnnnnnnnnnnnnnnnnnnnnnnnnnnnnagtgtttatatgtaagggtactggttgaccttggcggggctcagtgggtatccagtgtagacggtggaggctggcgaggcgctgatgtaggtctggtgggcaaattgggctggatactgactcgggtggatggtgggcgagggcaggacccgggggcccatgctcacggngacctggtggacgatgctggctgggtaggcagtgtgctgcacggtgtggcgcgcagagccttgcgaggccaccaggtgggccacggtgccggtggagcccagggccgccggcgcagtgtaggttgagagtggggctggggtgtgggggtgcagcngcagcggcttgccccacaagccggtgcccagtgccgggcttgggctgtggccggaaggatacgagccctggccatggtggaggattaggcctgctgcttcgtggctccaatgcggcccggtatggctgtgacctgctgaaatgatgctctgctctgaaatggggccgccgttgcgccggaggatgcccaaataaccctgaaaagaccgtgggaggctgtgctgaaactgacttagagcaagtggacggttactgccagctacactacaatcttctgctttttagtgccagaggccctgccatttggcggccat

SEQ ID NO: 447660 - DNA, 774 bp, Homo Sapiens
agacgctcagtttctcaatggagccgcggggggctcgggcggccgcccgcgaggagcccggctgaggcagccgcgcaggtcgcagggccagcgtccgcgaggacggcccggctgggcggccccgagctctgtggcgctgtggaggagcgggagcgcggccgagaaagcggggcgccgagggggtcggcggccttcgggaaatttccgccgacccttcgctcctggctctaaaagttcctgatttcctatttccttttaaatcccgagtggctgttagctcttcgcctgcactttttcttccccaggagataagggggagtgtgaggaacggagcgaataatataaaaaaggatttcatcccggaagagagcggcagtttcggagagatttttcttaaggaagcagaagcggcgtttgcggccgctgcaggcgccgggccctgccggccacactatgcgcgagccggccccaggctgctgaggcgcggggacgcggaagcggaggccgcgccccggcccgacatggcgccggagctgaccccggaggaggagcaggctaccaagcagtttctcgaagagcattaacaagtggacagttcagtacaatgtttcccccgctgtcttgcgaatgtggcttgtcaaagttcctcatggcaacggcaagtttgatgtgctccgtgccatagaatggttccactcctacagagaaactcgaaggaacggaaggcattgtaaagctgaaaacctcatgaggaacctcttcgatctgagatcc

SEQ ID NO: 447661 - DNA, 931 bp, Homo Sapiens
  misc_feature (94)..(94): n is a, c, g, or t
agcggagcggggtgaagctggcaaagggtatggtggggttggaaggggaatgggcagaaccttcagagcctgagggctcctatccaggccccanggagaagcactaggatgtctgactgaggaggctgggctggagaaccagtgggactggccagctcctttggtttgggctgggctggcccctgacctctatcctcagaaactgacctggtcatctgtggtaagaagttccctcttttgcagcagaaagaacctttcaagaaaaggtggttcgccctggattgccatgagcggaggctgctctattacaagaacccactggatgccttcgagcagggccaggtttttcttgggaacaaggagcagggatatgaagcctacgaagacctgcccaagggcatccgaggaaatcgctggaaagccggactcaccattgtcaccccagagcggagatttgtcctcacttgccccagtgagaaggaacagcaggaatggctggaaagtttgcggggtgtcctgtccagccccttgacgcccctcaaccggcttactgcatcaacagagagtggccgcagcagcaggtgacccattaactgaggacctggctgccgctgaacacctggaactccttgtgggaagaagtttgcacctcggcgctggctgcccaccatcagtgccccgcagtcagcagccattcctggcagtgaactctgccaggactgaagctgtggctttatccatcagctccctgggccttccccgcaacccacctcggggatctgaggatctggtgcatagatgaacatctatcccctcctcccccatacacacctaggcttgaaatgccctacaggcccagaactttctcacatctgaaatggaggcattgcaatgaaaaggcacccacagcatcatgcaagtggcatcttgt

SEQ ID NO: 447662 - DNA, 448 bp, Homo Sapiens
gttgtggaaatcctttattccgtccatgacaatgcagagcttgcacggccacctcccacccatcccctcccctgcacaaggccacctgctccaatctcctttcttaacagctcttggctgctacagacgcaggcagggacctttgattgtgtggaagcttcttgttgagaaatttctgaagcttgcttagccactaaggagtcagttgaaaatgtctctctaaagactaaagaagacgtgagacccctgctttgagaactctggagtaaaggaacctggcctggtatcaggagaggtggatggagttctgactgctgctcaccagccgtgcaatcctgagcaagttatcctaacacagccacggattccgactcagcggcccgctagcatggtagccccagggcggccagggtttgtctgtttgtcctttgctgtaattcccagcgcc

SEQ ID NO: 447663 - DNA, 169 bp, Homo Sapiens
aaaaaagccccattttccttttatttaaatatcctaaatatatcacgaaggaacataccctgcactttaatgggaaaaagatacaagtttataacatcttataaaaactaccatttaaaagtgatcttgtccatttgatattcccctcccccatagcaaaatattattt

SEQ ID NO: 447664 - DNA, 662 bp, Homo Sapiens
ggcagcaagcctctcacttgttgtaggactgcaagacactggaccgaaagcctccaacacaaaccctagctgccaacctgctcatttcttaggttccactggtgagagcagctttaacacacaggcccaaggcactacggtgcacctcacaggccagtaagaaacaggccctttaactggagattttaaaggttacaggttatagctttaactccttctgagacagcatccatttctcaagaggcctgagcaggaagctccgggagaaccaagcatgcggactgctcagggacgtccactgggaagcctggtgtccactcccacctgcttgggccctgcaactggggtccctggagctggccaggctgtggggcgccagagagcacagcaccctagtgaccagcatggagcttctggaccgggtgagctgtcttgagcctcaaccacccaggtcaggaggtctgggaggccacatgcctccggccctccctacccggacaagttcagggcaaagtctcagccggggggtggccccgcaggacgtcgaggtccagcatcacggaacccagcagcccacggcggaaagtctgcaggaagtcacgggctgccgcaggatagttaggctgaataacgttcacgttacccgtgcccgtgagcacctt

SEQ ID NO: 447665 - DNA, 431 bp, Homo Sapiens
tttttttccacattggaggcacaagtttattgagcacccggatatggaagatggcaccgggcacagagccgtgggactggcctgcaggccccgcaccctcaccgtgtgctgtcctgggggtgcctcacaagcacagcaccttggctccatcggctgcttgagagaggtagaaggtggcagtcccgccgtagtgctcctggatgtgccgcatggcgtggggagcagcggaggcctccagcagtgtcaccgtgcagccaccgaagccaccgcccgtcatgcggctgccataaaccccaggcacagcaagcgcagcctccaccagctggtccagctctgggcagctcacctcatagtcgtctctgagtgagcggtggctctccaccatgaggcggccaaaggctctgtagtcgccacgtctcagggcggccgct

SEQ ID NO: 447666 - DNA, 700 bp, Homo Sapiens
  misc_feature (226)..(240): n is a, c, g, or t
  misc_feature (596)..(654): n is a, c, g, or t
ggggaggaaatccaaaccctttgttaattgccagggtttccctgggaaacaagctatgtccctggttaatttccctaaggggcccggcgcccaaagaaatggttttaaaaaatttttagggggccgggggggccacaaacaatatttggccttgagttaggaagttggggaggacagttttttaattcagagagtggggtttcttttaaaggagatgcagaggtcnnnnnnnnnnnnnnngacgttagtcgagcatttaattacttgtacaagaactggaatgcagtaggtatgcaatacatgtttgtcaaatagttttagaaagtgctatgatgaagcgacataaccaaagacataacgcaattattttgatttcaagtccagcgctcttccgagtaactaggaaaaatgaggggaactgtgtaggcagaatgctgtggaggggtggaaatctgaggtccccaagagtctctaagtgtctctttagatcgaatcgaaggtcttttaaacaacagatataccagatataatgcacaactctttctccccccacccccaatacagtgggactaataacagcatctacctgacaagannnnnnnnnnnnnnnnnnnnnnnnnnnnnnnnnnnnnnnnnnnnnnnnnnnnnnnnnnnaagtatgtgctggctatcatcatcatcatcatcgtcaccatcacca

SEQ ID NO: 447667 - DNA, 487 bp, Homo Sapiens
tttttttctgttacaagatatagaccatttccatcactccgaaagttcccttgtaccctttttcagtcagttccctataccctaaggcaactactttctagtttttatcagcacagattagttctgcctattcttgaacttcatataaatagaatcacatatacatatgtacttatttgtgactaatatattgttaacaaaataacctaacaacatttttagagattcattcatgctgctgtgttatcagtattttgttatcaatgttcttatttttactgggagtacaactgataggtcatagggctgatctacttttaacttcataaaaagttttcagcctaattagtaactttttataatttaatcataaacattttaaaacaaaatatgtgtatatgtgtgattaaaataaataccaatacccatttaccgacttccaagatgaacattaacattttccctgattttcttaaatctctcttaa

SEQ ID NO: 447668 - DNA, 441 bp, Homo Sapiens
  misc_feature (409)..(409): n is a, c, g, or t
gtgagcacaaggtcttttatgaggcatcaaatatacattcttatatacaaggaggaaaaaagacaatgcctgaaccccagctcctctccatacagcccctcccactgccaccctcccccgcccccaagccccagtggccctggcccttcgtacagccagggtccatctgtctgtctatactgcagcccatggtggagaggggagagggaggcaggagctgagtgaggagctggatatgcggggcaagaagaggagctggggcttgtaaaaaatatatttataataaataaacagggctgcaaaagggctggagaggcagcggagattctgacggacagaaggactcaggcattctggctcccaaccccagctctgatggcttcaatctctgcctcaggaaggatatctngggctcatggtggccctttgggagcctctctc

SEQ ID NO: 447669 - DNA, 462 bp, Homo Sapiens
ttaaggtgacagaatgtgtacgttagcactgtaaaaagcagctaattggtagcagaacgtgctagctgagaatacgttgtattctacatcactgataatgatctgaagtgtacaagtcatcagtatcagatctatgagagtttttgtagttttgctctaacataaatttctctttgccacctccaaagttattatattaatagtaaaagtaatgctttggagagggtggaagggggtatgccctagcctccacagctcctgccacaaactgcccaggtaagcaggacctgagtgtgttgaaaggctgagttgaagagcagattgacacaggagggctggaatgaacgttggctagagcaggtgtgtccaatcttttggtttccctgggccacactggaagaagaaaattgtcttcagccacacataaaatacactaacactaacaatagctgatgagctaaa

SEQ ID NO: 447670 - DNA, 459 bp, Homo Sapiens
ttttttgttcctcagaactctcagtttattcctgaatggtgtattacattaacaagtatcacatatttaagcatactggtggtctactctcctcaaattcagttggaggcatataaacatgcagaaaagcccccagccctactttcctagcatgcagcacccacatagagcaggtatatttacaaggttaccatgccagagtgtttggcttgtcttccatcaccctgcttttcctctatcatctccttccttctatcttttatccagtgaaaatgaaaacatctccactaagaggacttcctagtatagaaatggcaagtatgtactatctaccaatttgctactagcaccaccattacctatttacatgccctttgcatttgtggccaactgatctacagcattgtgccttagtgtattcaagacacttggaatttgcagttgagatgattatttgcc

SEQ ID NO: 447671 - DNA, 457 bp, Homo Sapiens
ataggtaaacatgtatagttgtgtgcaatttaatgaacacaattaattttaccaccattttacataaaaggaaactgaagtgcatttcttagggtcccactgtaagttgagggcttgagattccaagaaaagtcttatttcagagctcagtgtcttgcccaaaacgcagcctcactgctcaatcacattcttgaggtttgattggctgaacgcacgtggaacatcaggttcatgtttccaagcaagaatcatgggttggggaaggcaagtgtttactgtggtccagctgaggactgtggtgtctgaaactctgtcacatgggaggctacaggcccggggctggcttggctcccgtgaaaacactgcagcgggcagccagtccggaaggcagcatctggcagggcctccaggccttctgagtaaggaagaccccagcttgcaaaagacatagaggcag

SEQ ID NO: 447672 - DNA, 260 bp, Homo Sapiens
tttttttaacaggaagaaatatgccttttattaggagttgcatatgtacagagaaagctgtttctcacagctcaggggaggctgtgagaaagagccactgtcatccaaggtcactgcgcgtacactggtaacaccacttagacaccgccgcacgtgattaagaaacagaaccatgacacagaaatgcagaagagacacgggtacgtgtgtggacacatcatttctaaaaacaagtcaacacaaaaatacaatgtgccaat

SEQ ID NO: 447673 - DNA, 892 bp, Homo Sapiens
  misc_feature (676)..(676): n is a, c, g, or t
cttttctttctcttcttctctcggtggatctttgcttttgctcgaaggcctatcgggtggtttaacttctaaagtaggcagaggcctgcctccagtcagtagagggcagggcgtagtgctggattcctcgacactgaaaggactctcctcaattttcccagcttctgcttccggcagaggatttttgagggtctgtaaaaataacgccgctttccttttacgttctgcttgaagctgtttctcttttgactccttagacgcctgggccagcttttcccgggcagcagctgcgaggcgatcttccagcttttgctttgcttgctttgcttctagctcctcctgggtaagttgaggcttcttctcctcaacaactacacagggtggggcaactgctgggttagtgtttgcagcactactagaactttcttggccttctttgctttcttcatcatcatcactgtcatcatctagcttaacacgatttttttccaggggaagcagatcattttctttggccttgattgcaaagcttattggagcaaaggaagctttcaccagcttcccgtccgggacggtcttactggacgatgcctccttcttcccgcctgagcctgcccgtgctcccacctcggctgcgtcttcaggcgcgccatcctccccagcatcacttggcttnctcgggagcagagtctgtgggagccctcttctggtgcagacacagcctgcatgctatcgcccccttctttctggaggaagaactgcttcttaaactcataataagcattatactggtgccacggctgcaggaactcaaatctttgatcattcttggcacgaacactggtctcgaacttcaggccgttcctggcgacatactcggccagcttgtccc

SEQ ID NO: 447674 - DNA, 457 bp, Homo Sapiens
tttaagcaataagggttttattttctcatgttaaggtgaactctgaaggttagagcagcacaaaggtggttaattcatcggctcaatgtcatcatcctggagccaggtgctttctttccatctttctggtctgcttctctcagagagttgggaatgcctcccccagagatcacatgatggctggagatgttctaggtgacatgtgcagacatgcctcttcagcagtccttggatccccttggccaggattgagctgcaaactcacacatacacctgccactggcaagaggaatgagatgaccgtgactgtcatggaccaattgtgattccttctcttgttcaatgaagaacagcagacaggtgaacaggctggccaggaagtgggtcagatggtaatacatttagtcttcttttcctctagggcttcagtttccccatctttctcgggctctcagag

SEQ ID NO: 447675 - DNA, 498 bp, Homo Sapiens
  misc_feature (22)..(22): n is a, c, g, or t
cagggaaggcataggtctctcncaggaggctgtcagcagctgggaggccggcagcaaccccactccaggcctgaagtatctgccacctttggcaggctctgggccccatggaaaggctgaggggcgctcatcccgggttgccatccccagaaccggtgtgacaggccccacaagcacgcatgtgagtcagctcatgcacaggagagcctcatggagcctgcccggccaaggtccccaaccccagacccagcagctgccactgcgaccaccctgagagctgtgactgcacccaggcctgaacacacatgcatggcctgagatctgggggtgtcctccagaatgaggtggacccagcaggggaaaaggctttgcagggagcggtcacagcaggagtgccccacgtgcactgaacctgccctgggccccacctctcttcacatgggtgatggggggggtgccccagttttatgggatctaaggtgagagcattaaagacga

SEQ ID NO: 447676 - DNA, 459 bp, Homo Sapiens
ctccacgcagcacaaaggacactcgccggcaaactttcctcgcttctgacccgggccgagccgggaactcagcgccagctctgttcctggcggggctgaggcttccctcacattccaggccacctggcaaacgtcctgaggctgccactccttctgggctcaaggctcacgggctgaggtctgtccccgcgtggagctcaaggctcacgggctgaggtctgtccccgcgtggagctcaaggctcacgggctgaggtctgtccccgcgtggagctcaaggctcacgggctgaggtctgtccccgcgtggagctcaaggctcacgggctgaggtctgtccccgcgtggaccgccgagagttcggtagatccttcccaaggctctgacttcaatactttcagtgccttgtcaattataccccttgcccctttctcttaccaaggccaccgccaagacaccct

SEQ ID NO: 447677 - DNA, 692 bp, Homo Sapiens
gcctgttgacaaactttatttctctttcagcacctggcacctcagacagactgcgaggatggaagcagcatcaggtaaagtatacctaacaaggttcacgcccagaactgtgagaagagttggatcccagctctttggaagacaatccttcctccagtggtgaacttgagctgcacacacaatgcaggagggctacagagcacagttctgaagcattatttccacactgataaattcatgatttatgaaaggaaatactgccagcgctcactccctccttctctgctacagcttgttagacacaaattgcaacaacaatcttaaatacttgcattttatttcaggccaaagcccctccactctgaactaaatgccatgacagtcccacagcataggctggtagtaaaagagcccacagacagggtaggatagccagaggagggaggagtgggcgacagggaggggaaggatcacacacacaaacctaagagtagagcaatgcagaatgcctgtggcactcggctcctaccagctctggctctcagtggagatgaagaatggcagcaggaggacagaatgcctcattgtctgaaggagagcgtgttgtttctcatctccatccccagagccctctctttcaggcaggcagaaacaaagcccttgcaccccactgcactgcggcaacacaggca

SEQ ID NO: 447678 - DNA, 499 bp, Homo Sapiens
  misc_feature (376)..(439): n is a, c, g, or t
cacagagcataatcacttaagatttttatttaaaggcaaaggatacagggcagcaagagaaagactaggtaggtaaacatcaggaatctcagaattcccaaatacaagctccccatggtccttatgcacatgtggactgcactgcaaagtgcctttggattgaatcatcatgatctatgtgaggcatccatcctggttttggaagagctcaaatcagaagttcccagcagggcttttatgttgctctggccatgtaatcaagccagacatacgtaactggttagaccagctgcaaataatcaataaaaggagtgaccagtggagcttcagactttatttatttatttacttatttatcgaaatgaagtctcttgcnnnnnnnnnnnnnnnnnnnnnnnnnnnnnnnnnnnnnnnnnnnnnnnnnnnnnnnnnnnnnnnnaagcagttctcccgctccagcctactgagtagctgagattacaggcacctgccatcatgc

SEQ ID NO: 447679 - DNA, 620 bp, Homo Sapiens
  misc_feature (92)..(152): n is a, c, g, or t
  misc_feature (190)..(208): n is a, c, g, or t
ctgatgggggtgtcatggatggacacacctctccacaattccttcaggcatggactggaactttcctcctctaggccgggccctgcctagtnnnnnnnnnnnnnnnnnnnnnnnnnnnnnnnnnnnnnnnnnnnnnnnnnnnnnnnnnnnnntgcagtgcctttcacttctttttttccccagaaatccnnnnnnnnnnnnnnnnnnnttggtagggatgagtcctgtcaagggggccacaggagaggaggggacaggctctcaggaatcctttattcttgtagtaataataatactaacaaacagttggggaactagggagaaaaccagaccattaaaactgtttgtggtcgaatctccattcaggcctctctttttctgtgacttggacaatgtggagttgaagcgggtgagagaacatggaaggcccgcccttttcagggaagaggtggtagtgaccaagacaggcagggaaaaagcaaacttctatgtggtgccttttgtatcttggacactgaggcatccgttcatacctcatcacccatttccccctgcactcccccagaaaacctggaaatgacacaagtggctaactaaggactttatttcaaacaaaaatt

SEQ ID NO: 447680 - DNA, 500 bp, Homo Sapiens
gatagttgagacagtatttattttttaagtggcactgaggtcatatactttaatccctcccaacacatgtaacagtcctctgcccatcattagcgattctgaggatgaaacgttatgcaaagtcccttgcagagtcaaatttggcctgagagataaaaagtcgagcttagcagatggcagggaataaaagggagcaggggcaggagaaggctcgtctttttaatctaagcccaaagcccaaaccaggtgccagaaagataaaataaaaactgtgcctatagtgttgaaatgctttagggatgctgaaggacagtctttagagaatcatttaaattaatgtatctattcttcatttcaaaagataaatgaaataccatcccagtgattcagttttttccagttttaagtaaatacagtaatggaaaagatgggagctctcttcctcccttcattctttgctcccacctctgaaaacccattaagtggggccagtcgcagtg

SEQ ID NO: 447681 - DNA, 992 bp, Homo Sapiens
  misc_feature (491)..(542): n is a, c, g, or t
gcggcatagaattgataatagttcaagtggccaatgattaaatattattacttccaaaaggttcaaatttcttgaagtccaacattcgttaattctctaatgacaaccgagtaaatacagattaatggaatttatttaaatggcaatgaccatacctataaaatgctcaatggcacatcattcgctaacttcaaagaataatgtaaagcccatgtaaaggcagcaacaattaccatatgcagagcagctgtcactaagccccaactactggcttcccaacttaccatcttccttgttcctttctgcaatctgctcctctgattccatttctacttcattactaataggagttttttcttctatatcatcaataaaatctggttcctgattatttgatactgatagtctcagtggagaaagctttctttgtttagtttctgggctcttcattttgttggtcgttccttcacaatccaaagtaatattctgannnnnnnnnnnnnnnnnnnnnnnnnnnnnnnnnnnnnnnnnnnnnnnnnnnngtctggtctcataaccactattgatattttccatggattcagaactacgttttagaacagggcactctgggttttctttgaggcatgcacagtccaccttgtacttacaatttccatagtcaaaatcaaaggcaatagtaatttcagttccctttggaatactgtgtatagaataaatataaagatgtatggttccatcttgaatttcatgcctcacctctgcattgggtgtacaagaccgcctgatgaatcgagcctcattcccaaaagtccttgcatcaacacacatttctagcccatgaaatttagagtagaataacacaaaagggtatggtcttttaaagaaatacccatttgcttcaaactgttctctcagcataaacttccctctgtattcaatgataagtgcatcaggaggcaaatcttttgcagatttaagaattttcttat

SEQ ID NO: 447682 - DNA, 494 bp, Homo Sapiens
tttacaaaatatttcattttattaataatttatatacaaataaattagtttaaaataattatgatacatttgtacactaaatttaaaccccacaagctttggatataatcaaaagtagctaatcagattaattttcacaggtcagatcctcaatttcatcttcgctatcagaatcttcataaaatgaaattgtggcttgaattggaaaatttttcagaagagcttctgcttcttgatataagtaatcataacattttgattttggccaaaatagtctgactgggtgcctgaattggtaaagctttcctgaggctgcggtcattccagggccatcgggcatcgcctccgcggcgtggttcggcgtctcctcttctttcttgcctccggcgtccacccagggtctccagaagcctgcgtatctgcgggataggggagcacaaggcgcgcagaggagacgtgagcccagacccgggagaatccaccgaagccgagcc

SEQ ID NO: 447683 - DNA, 477 bp, Homo Sapiens
  misc_feature (453)..(453): n is a, c, g, or t
  misc_feature (464)..(464): n is a, c, g, or t
tttcagagtttacaaaaaaatttatttgtgtctgagagccacgattgagaacattaaaaaggtcctcctgggaatgtaacttgggggaaatgtggcgagagggcaggactcggcagcccatgggcatgccacaagatgcgcccaggcgctctggggtgaactctgctgtgacttcaggccagaggtgtctgcccccgcagtgccctgacagctgagtggtcggaaggccccggctgggaaggattcatttggaatctttcttcttcttctttttcactagcgtttcttctagtgtagcgtcctctgctatctctactggtttttgcagctttttcttccctctcctctttttgggcttcagggtgaagtcccggccctcaggcggctgcacatgggtcccctggcatcctgaagcagaggccttggaactttggtcccagcaggggccttttnagctgctcttntgttgggcgcgga

SEQ ID NO: 447684 - DNA, 468 bp, Homo Sapiens
ggtcgaggagcctgggccgggccgggcggggactactccggagtcaggaggctgcagcggcggaggacgaggatctctggcagtcagcgccgctcggacgccgccggcaccatgggctgctgcaccggacgctgctcgctcatctgcctctgcgcgctgcagttggtctcatcattagagaggcagatctttgacttccttggtttccagtgggcgcctattcttggaaattttctacacataatagttgtcatattgggtttgtttgggaccattcagtacagacctcgatacataatggtgtatacagtgtggactgccctctgggtcacctggaatgtgttcattatctgcttttatttggaagtaggtggactctcaaaggacaccgatctaatgacattcaatatctctgtacatcggtcatggtggagagaacatgggcctggttgtgtcagaagagtgctg

SEQ ID NO: 447685 - DNA, 721 bp, Homo Sapiens
tccagagtggtgggagacggcaatctttacatttccctcatctttcttacttcagagttagcaaacaacaagttgaatggcaacttgacatttttgcatcaccatctgcctcataggccactctttcctttccctctgcccaccaagtcctcatatctgcagagaacccattgatcaccttgtgccctcttttggggcagcctgttgaaactgaagcacagtctgaccactcacgataaagcagatttttctctgcctctgccacaaggtttcagagtagtgtagtccaagtagagggtggggcacccttttctcgccgcaagaagcccattcctatggaagtctagcaaagcaatacgactcagcccagcactctctgccccaggactcatggctctgctgtgccttccatcctgggctcccttctctcctgtgaccttaagaactttgtctggtggctttgctggaacattgtcactgttttcactgtcatgcagggagcccagcactgtggccaggatggcagagacttccttgtcatcatggagaagtgccagcaggggactgggaaaagcactctacccagacctcacctcccttcctccttttgcccatgaacaagatgcagtggccctaggggttccactagtgtctgctttcctttattattgcactgtgtgaggtttttttgtaaatccttgtattcctattttttttaaag

SEQ ID NO: 447686 - DNA, 411 bp, Homo Sapiens
caaacatactttcaatgtgttttacttctgaaatcatttgaaccaaaatgtttcagcaacacagattcatctgcaaccacaaatcagacacatttagaatgacaaagccccaaaagaatgccattttcaaggctgaaactgtattattctgggctaaatggaatccttgttttagtgacactgtaagagtagaaattaaagacactgaaaatcttcccttggggaaccacaattatctgtgaacaatgaaagtttgtctgaataattcatcagcctcaagggtacaggcctccccttattctggaatcccaggagtttaggcaagtgtgtcatttaatgggtctcaactgtgtcctcagttgttattattccagggcctggcatttatgggcacattcctataattttact

SEQ ID NO: 447687 - DNA, 973 bp, Homo Sapiens
  misc_feature (13)..(13): n is a, c, g, or t
cacgttaaatttnagttttatttagggagctccagggaatgcggtgggaaaggagaggtgcagtgtcattgccgccctctcctcccacctagtgcattaatagtggatgggagcatctgacagaagtgagatcaggcagtgggtgtctgcaccccacagcgcatgttggctggaacagcaaagtctatctgctgaggtttaggcaagttcaggttgcccatgattttgacaaactcctcacagctgagggtgagccgagggttcagagtcctctcctcctccacggtggacactgtgaacccatggtaatcgtgagcagggtagatcagacagtctcctggaagtgtgaagatcttttcatggaccgagtggtacaaggtcttggcacagccttgctggaagtctgtccgcccacacccacggatcaacagggcatctccagtgaaggccatgctgtggtcattcaggacgaaggtgacacagcctggggtgtggccagggctggccctggtctccaacgcgaagcgcccgaagcggatggagtctccatcctcaatgtgtaagtcagcctgggccccactaaggcgggagatgacagactggcagccagggaggagggaacggagcagccccgagcctgtaatgtggtccgcgtggcagtgggtattcacagcatagagcagccgcagccccagctccttgatcagctgggcatcccgaggcgctgtttccaggactgggtcgatcagaacggcctcccgggactctctgtcacccagcaggtacgtgaaggtgcagctcacaggctcgaacatctgccgcaggaggatgggggctccagacccgccgcgctggctcagctgccgccgggcgaccctcagtacagcctccgccatcgcgcccactgcggggtcaggaatgagcggaggccgagcgtctgcaggagccgggcgctacggcactgaccccggga

SEQ ID NO: 447688 - DNA, 490 bp, Homo Sapiens
atatcagttttattttcatttagaagtatgaatcatgagcaagtagtcatgcaggaaattgtatcctctgcccacccacccacagaaagggccagtgctggaatggacagaatacagcaggaagtgcatgaaggtggaaaaggggagggagctgggagcttatctccgagagcgtttgggaggataggcgcgtggagtctgttagctggaggcttctacattcctgggcctccagaacccaaacgcctgccgctgccctgccagtgaaaccaaaccggttgccttttgaaactttccactgaggccaccttggagtcagagccagcgagctcaggtctctcctggtaaccttcacacctagaggtggggggattgggggagagttattgaaggtgaggaaaaacagccttgaaatggagcattgtccgggattaatggggactctttgggaaaaccagaatcgggaggccccagacccggttttaaaatt

SEQ ID NO: 447689 - DNA, 439 bp, Homo Sapiens
cctccacagaagaaataattttattccatttgagaaaagtaaaggatacattctttgtctgacaaaagtgattttgtcatggaactccaaggcctgcctggtgaagtgacagtgacagatgttagaggaacctgtggccctcagtgacacagagagcacagacatttggctgggaaagcacttgcatgatcgaaacatttcctattgcagagattcagaagttctttttatcctgaagatcattctggtttctaatttaagattgaaggatgatttaatttgctaatgggaacccgggccagctgttttttcacacaactgaaagggagaggaaatcgggaaatcactcttacatggtgagacctttgatacttttctctaggcctcatgagtcaaaggccatcactgtccctccaccgagcatctgggcagtgtctgc

SEQ ID NO: 447690 - DNA, 495 bp, Homo Sapiens
gacacagaataaaaaaatttaatattcaacatgcaaaacaacctttaaaagaaacatgaaatcataaagcaaagctaacagccaaccaacaaataccgcctagcaatgatttccactggatgtgggagagggttaataaagacgctgttggtaacgcgtacagaactatcactggcaatcagcatactgagctatccagtggaggccagcatcgtgtttttgctaaaatacatgttgtagaagtcataattcatagtgaagaatctcaacaggttttcttacagatttaattactctcacacaaataattcatttggaaaccataaaagatacctatttacacctaaactgcctggccttccagagcggggactaaaggggcagggcggggaagaaagcgagcgtgtcgcgggctctgtggggttgcagggtcactgttattttgatctgctgagctcaaggactggaaacggaataaaaacgcctactcgcctt

SEQ ID NO: 447691 - DNA, 557 bp, Homo Sapiens
  misc_feature (19)..(19): n is a, c, g, or t
tgttaggtgtctggatttntggcctgtttgcagcctctcctagccacagacagacactgtctcctctcagagaaaggccagtgtttcggtccaggccactggtgagtgtcggcacccttgaggtgggcatggagtgagcagaagaagcctggagaagagagaactattttacagtgttgccagttattccttttccaggcggctttgcacctccaaaggtgccgtaaggagacagaaagccgacacggattcagcatttacgcagaaagtaaagggaaattctactctaccagatgagcccctggttccactggaagcttatcagtgaagtaacactgcaggagccctggtatccttccctcagagatatcatcaggggccctcaaaccccattgtttatgccagcactgaccgcactttaagcacacacttaccaatcagaggtcgtgtaattggcctaaatctaggcccagttattactacaaatcttagtcaccatactctccagcctgggtgacagagcaagactccatctcaaaaaaaataataataataat

SEQ ID NO: 447692 - DNA, 762 bp, Homo Sapiens
tttttttagctagaaaaggtgtttcctcccattttatttcataatacattttcacagaaacatgatatatttacaaatatacaggtaagagactgctggtcagaaatcttaaaactcaaaatgtcatcaaaaattaatttacaaaagccaccaagggtccatggaggcggccaggtggatggtgtggccggcgtctgcgtgagcctgcccagaagcccacgcagcctcccggctctgcctccgctggccccgtctcaggaagcgctggtttgcaggtttttggaagctgcaagcatcgctctgactttggccatgagatcctgagtgattttgctctgcacggaagaaacgattgctgaagagatctgggcttctttttcctgagagactcccctggagcgctcctggctggagccccgactctccacaggggagacgctggctgagtgcgccgagtgggccgcgggggccgcgggccggggcgctgcctgcttgctgggtgacaccgactgagacctggccttggacttggtccgcgaccgggaccgcctcttcttcttcttctcgtggggacttctggagcgggtccgcttcctgctggccccagggctgcggctcacgcggtaggcagtgggcacacttctctcttccctccgtctctcaggggagtgggctctcctccgaggggaccgggagcgggacctcgaccgccgcactgtccgataggcactgggaagagaatcctcgtgccgaattcaccca

SEQ ID NO: 447693 - DNA, 454 bp, Homo Sapiens
aatgaaactgctgtgaatgtggattcttcccacacagaatatacattgtcctctttgactagtgacacattgtacatggtacgaatggcagcatacacagatgaaggtgggaaggatggtccagaattcacttttactaccccaaagtttgctcaaggagaaattgaagccatagtcgtgcctgtttgcttagcattcctattgacaactcttctgggagtgctgttctgctttaataagcgagacctaattaaaaaacacatctggcctaatgttccagatccttcaaagagtcatattgcccagtggtcacctcacactcctccaaggcacaattttaattcaaaagatcaaatgtattcagatggcaatttcactgatgtaagtgttgtggaaatagaagcaaatgacaaaaagccttttccagcagatctgaaatcattggacctgttca

SEQ ID NO: 447694 - DNA, 587 bp, Homo Sapiens
  misc_feature (19)..(19): n is a, c, g, or t
  misc_feature (53)..(53): n is a, c, g, or t
  misc_feature (56)..(56): n is a, c, g, or t
  misc_feature (71)..(71): n is a, c, g, or t
cggaccgctgccacccagnaagatccccccttcctcggcacccacggtgttgnagntgttcccagcgggtnaccaccatcgtgaagaccatggctgtgacacctggcactaccaccctcccagccactgtgaaggtggcctcctcgccagtcatggtgagcaaccctgccactcgcatgctgaagactgcagccgcccaggtggggacatcggtttcctccgccaccaacacgtctacccgccctatcatcacagtgcacaagtcaggcactgtgacagtggcccagcaagcccaggtggtgaccacagttgtgggcggggtcaccaagaccatcaccctggtgaagagccccatctctgtcccagggaggcagtgctctgatttccaatctgggcaaagtgatgtcggtggtccagaccaaaccagttcagacttcagcagtcacaggccaggcgtgcacgggtcctgtgactcagatcatccagaccaaagggcccctgccagcggaacaatcctgaagctggtgacctcagcagatggcaagcccaccaccatcatcactaccacgcagggggtaccgagctcg

SEQ ID NO: 447695 - DNA, 704 bp, Homo Sapiens
tcgtcaatcaaatttctcagtttctcagaaagaaaaatagaggctttccaagtctttatgctaatctctacaaagccagatggattacactgggtgtggctgacagcagtaggatgtgatgccagcaatagaagggacacaagagtatcaccagtaaaacaaagtagatacacttatgctaatttaaatcagtagttttattacaatacgcactgacacacaattggaaaaggaatgtcctgacattttctgagcatttcacggaaagcaaatgtaaccatccacgcagtagagtcatccacaccttttcctaacaaaaagcaaaagctttcacatgtgataactgaagaaagcaaagttttcttattcttgtctaaaaaacttcagtctcagaaaatagttattgaagtgagctgagaaggagcacatttccttcacaatgtccaaaatcctgcctctagattatccccctgaccttctaaatgacttttataatactgcagatggtattatgttcaggggctaaatgggatctatttataaggccaactactctatgtcactataattgaaaggaaagaataaattaagaaaattaagtcctgctaaaatgcacaaagacttgaagaaaatatctgggtgtattaaaagtgagatgctcttttcacgtaactcatttgaaaggttacaattaccataaaccc

SEQ ID NO: 447696 - DNA, 469 bp, Homo Sapiens
tttttttctactaaaaataatttaattagaaacggagttttggcaagggaggcagaagcggctccttttctccccttggccgcccactcagcaaccaacaaggaggaaagcccccgcagtgctcggccagtgccgcgccatcgccaccagggagcgccccgcgcgcggtccacgtggcagaggtcgcggcctcgcggcgcggggaggagccgcacgccacagtggcaggtcccaggccgtcactccgagctctcgccttccgggccgctgtccggcgtgggcgggaggaggggtctccggcgcgagcgcttgacccggcgcgagggctgcagcagcctccgcttcagcacagcagccactgtgtcctggctgtccgctgtgggcccccagtagatgctctccccgcgtcggaagtttctgtgcagccgtgtgcagagcgtggccagggtgagcagcaccagcaggaagg

SEQ ID NO: 447697 - DNA, 1905 bp, Homo Sapiens
taagagaagatggcctttattgcagcacgaactgagggggactgcatgtccacagctctccaggagctgccaaaggcaacgggcccgccctgcccctgcaacaggccctccaggggctagagcatggctcccctcaggaagggtaacgcgtgcttgtaaacaagggcccagacaacacagagaggagaggcagcatcatcatgtgcagctttgctacaagaaagatagttcttaatttcaaagaggagacaccgctacacctagccctgccctcccatgcactggaaggctctggaagtagctctcgcctgcctgggcagttaggtccacccactgcccgtgagctgggcccaggcacactgcagccacacaaaaacgctggcagctgactcctaatttcagaaacacaattagaaaagaactggaattttacatttttctcccatacattaaaaaataagaaaaagccaacattttgactgtagaccctggtaggtggcatctgactttaacctgaagttctcattggaatccttttctgtctggcgctccaccggcccacaatcagcccccagccccaggcgccccttgccgaaggatcctggcccatctcacacaagggcgggaccccgtggagtgcccggcgagcagggcaaccactgggaagacagatactgatttccctgttggggtctgtgaccctcagcaaacgaaaaggaaacggtaacaagacggtggcctcctgccaggacctcagcaggaggtttgctggtgaaggttctgggtgagctggaatgggtgataaggcgggcttgctgggtggtggcctcaggctgttcctgggcccctgtcgcatagagccctatagggctacagtgtcggggccccacagccgtcccggggtcgtcctgatgcataagagcagagaccccggaagagaaacccgcctgccccgtgtgatacagggctcccaaacgcttcccggtggaagcctgctcccgaggacaccttgtctcgctccacggaacccttcccccagcaccccctggaaacacagcagccaggaacaaattctccatgccaggaacataagcccttggctaaactggagactcatcagtgcacagatggtggtgaggggtgagggcagggcgtggggtggtgctcagccctggggacaccatcactgtcctgctctgacccacaggtgagaggaggatgctgtgctcccggagtgtggcgccgggaggatggctctggcaggacagaggcctggggctgaggctatgcccagggccggtgtggggagggacatgggggcctttgcagaagcagctcagagaactgaggttggaatcctgccccaagcacaggttttggggacagcgagtgcctagacaaggcaggtaacgtggcagccaccgggctggtccagaaacaaggtgctgaagacgtcgttgaagaaggtggggtggtacctgcaggctcgctcacagtcggggttgaagttcacctccaggatctgcggctgcatcacccgccttccatctgggccgttgtcccacttcagcatgaggtcgacggcatacatggcccgggatgaggggtagtcgcagaggcccaggggtggtggcttggcacaggccacctggaacagctccgtgaaggcccggaagatctcagcctggacgtccgtccagggaaattctgggtattgcttctcaaactcggggatgaactcttcacagtgcacctgcttcagcaccacatccgggtcatagttcatgaccgtgaagtgcttctcgtagtcatccaggtcgttgagtgcaaaggcccggttggagaaccgcagccagaacacatcatacacgcctcgtgccgaattcgccacccaggcctcgcgcc

SEQ ID NO: 447698 - DNA, 1328 bp, Homo Sapiens
  misc_feature (1185)..(1185): n is a, c, g, or t
  misc_feature (1220)..(1220): n is a, c, g, or t
gcttgacatcaaccccgtggtgcacccccacggccacatcttcaaggtctacacggacgtgcagcaggtggccagcagcctcacccacccgcgcttcaccctcacccagagtgaggcggacgccgacatcctcttcaacttctcacacttcaaggactacaggaaactcagccaggagaggccaggcgtgctgctgaaccagttcccctgcgagaacctgctgactgtcaaggactgcctggcctccatcgcgcgccgggcaggtggccccgagggcccaccctggctgccccgaaccttcaacctgcgcactgagctgccccagtttgtcagctacttccagcagcgggaaaggtggggcgaggacaaaccactgggaatctgcaagcccgtggaaccgtgggcgcgcagcctggacacccacgtcaccaagagcctgcacagcatcatccggcaccgagagagcacccccaaggttgtgtccaagtacatcgaaagtcccgtgttgttccttcgagaagacgtgggaaaggtcaagttcgacatccgctacatcgtgctgctgcggtcagtgaggcccctacggttgttcgtgtatgatgtgttctggctgcggttctccaaccgggcctttgcactcaacgacctggatgactacgagaagcacttcacggtcatgaactatgacccggatgtggtgctgaagcaggtgcagtgtgaagagttcatccccgagtttgagaagcaatacccagaatttccctggacggacgtccaggctgagatcttccgggccttcacggagctgttccaggtggcctgtgccaagccaccacccctgggcctctgcgactacccctcatcccgggccatgtatgccgtcgacctcatgctgaagtgggacaacggcccagatggaaggcgggtgatgcagccgcagatcctggaggtgaacttcaaccccgactgtgagcgagcctgcaggtaccaccccaccttcttcaacgacgtcttcagcaccttgtttctggaccagcccggtggctgccacgttacctgccttgtctaggcactcgctgtccccaaaacctgtgcttggggcaggattccaacctcagttctctgagctgcttctgcaaaggcccccatgtccctccccacaccggccctgggcataacctcagnccccagcctctgtcctgccgaagccatcttccggnggcacactccgggagcacagcatcctcctctcacctgtggggtcagacaaggaacgtgatgggggtccccagggctgaagaaccaccccacgccctggccctaacccc

SEQ ID NO: 447699 - DNA, 1160 bp, Homo Sapiens
  misc_feature (103)..(165): n is a, c, g, or t
  misc_feature (211)..(357): n is a, c, g, or t
  misc_feature (404)..(418): n is a, c, g, or t
  misc_feature (467)..(485): n is a, c, g, or t
ggcggagggagcgagcgcgaggtaggggcgcgcatcgttggggtgtcgcggtcatgtcagcgtgggggcggcagcatgggacggggacacgggcgcgcgtatnnnnnnnnnnnnnnnnnnnnnnnnnnnnnnnnnnnnnnnnnnnnnnnnnnnnnnnnnnnnnnncagcgcggaacgggcgagggcacttggtcactaggctggcgcggannnnnnnnnnnnnnnnnnnnnnnnnnnnnnnnnnnnnnnnnnnnnnnnnnnnnnnnnnnnnnnnnnnnnnnnnnnnnnnnnnnnnnnnnnnnnnnnnnnnnnnnnnnnnnnnnnnnnnnnnnnnnnnnnnnnnnnnnnnnnnnnnnnggtgtggggcgccagtcgggaagaatgcaggggaggggtgccggaannnnnnnnnnnnnnnttgggcacgggggcggctggcgggcgccgcgggggggtgatagtgaatnnnnnnnnnnnnnnnnnnntaggcgtgcgagggggtaggggcaaggccgcggtggaggacgccggcgaggacgcgtcatacacgggcagcggtgggggccgtcgctggccgcagcagcacgatgtagcggatgtcgaacttggcctttcccacgtcttctcgaaggaacaacacgggactttcgatgtacttggacacaaccttgggggtgctctctcggtgccggatgatgctgtgcaggctcttggtgacgtgggtgtccaggctgcgcgccaggttccagggcttgcagatccagtggttgtcctcgccccacctttcccgctgctggaagtagctgacaaactggggcagctcagtgcgcaggttgaaggttcggggcagccagggtgggccctcggggccacctgcccggcgcgcgatggaggccaggcagtccttgacagtcagcaggttctcgcaggggaactggttcagcagcacgcctggcctctcctggctgagtttcctgtagtccttgaagtgtgagaagttgaagaggatgtcggcgtccgcctcactctgggtgagggtgaagcgcgggtgggtgaggctgctggccacctgctgcacgtccgtgtagaccttgaagatgtggccgtgggggtgcaccacggggttgatgtcaagcctcgtccgaattgccacccaggcc

SEQ ID NO: 447700 - DNA, 1620 bp, Homo Sapiens
ttttttttctaaagaaattatctcctaagtagattttaatataaattttgaacagttatagaaaataaagatggcctttgggtcaataacagaacataacaaaaacactaaaaatttctgtacataaacacacgcatatcacaagtctagtcagaaagaaatacatagaaaaacaagatagaattttaaaaataatttgcaagggaagttctcaatgcttcagttctaaaatattgtcttcttttagaaaaatttaagactggaataacagattgtttttcctgcaatgctgtaattactgcaaatttatcagcaaagaggtaaacagcaatgcaatttttccttaagcttgaatacataagggaacaataaagaaacctgattagacctgaactaattaaaagtcacaccagtaattttcaggccagctctggtctccaggtagaattccaggacaggtttgtatcactgggtccattcccaacaggctggataggagagtctggagtaattataaggataccaccttcttctatcctgggctgcccgactggcattgggcttcacattccaagaatacctcctgtgtgaatagtcctctccagggggaccaggaggagggagatggtgtctctggtaaacatgtggattctctgaaaattttctgactgattgttgcaaactttgggtctgggtgtggaaatgtcgaggagctgagtgacctggatctgatgtagattatacctaggtccttgtttaacaggcttattgtggactgggttgcatgagatgtgctgagtcttcaaaattcacttgacctggggtacactggaattccaattctttctgataggaccattctgaagggtcttcaatggtagttttgtcctttttaggcaatgtccccggcacctattgaataattcaattgcatcatctggcctcacgccttcttacatcaatcaaatatctgcaaatgaggtagccagtcctgtttaaaccatgggtacagtggacaccaataagtttatcattatctttattttctttcaaaaaccccattaacagcgtgtttgaatttaaaaatagtctcatcatcaggcacttgatgtccaactgtaaaaatttttaagtaaggaacagtttctggcaaatcctctggtttataatagcgttgagtatatgttaaatcaataatcagtccaagttcttcattttgttctcggattttgttaaaaagatccaaaggggaaaagcattcttctggagcaagtttcttttcaaaactcttttgcaaaggaactttgaaagcaatgaaacgagtcccaggcatccgctgtccaactgggagatagtctttccacctttcggggatgtggtttccgcccttcttcttggctgaggagcgtcctgaaaagtcgcgtctccggccccagccactgcggggatgatgccactggctcatgtgggtcccaagaagccgcccacccaatgccaagccggccaaaagcgccagtccggcgccctcaatgccaggataagaccctaaacaggaaaagactcggcagccacctacgccgcgctccagcgtctcgctattgcgcatgtgccaccgccccc

SEQ ID NO: 447701 - DNA, 446 bp, Homo Sapiens
ttttttttaaacaagtacaaatttattcttttcaaagcagaattcaagggaaagggggaaagcaccacattgagtggcaatcaaagttaaccaatttgttcccaaccctgttcctttgtcccctagacttccatgccacccttgtcacctcccccaaatcctttccccaattttcatcctgtgaccagttcttgtagccagcaagcagcataccagacttcggtcaggcctcaatactgccataggggacagcaagggcattcagcaggccccctctcaaatgtggcaactgtgggagaagatggactctgcgagctgagccctggccttgagcctttccttctcccacagccattggtgttaaaagagtaagaagtagctaaagtgttccttgttcctacggtaaccacccagctgaagaattaagtctccacagcctcaggaca

SEQ ID NO: 447702 - DNA, 471 bp, Homo Sapiens
tagaagaaataaaaatttgtctttatttaaaatgtggcaattgggaagtacagtacatgcttccctgtggcttgggggtgtgtagttggggccctaattcttgagccagtcaagagacacttgggatttagccctcaattgcagcactgaggcactggtgccgagaaacaatcctgagggggtccccaacccacctagtcactccttagtttgcagaggcactatctgcagagtcctgtgaaaggctgcagtgaagtcttgcatgagactccccatccagcggagttctccaagctgcagggtagagcgttgtgccaggagggtgtttgggctcatgaaacagtggagaggcgcagaggctcactgggaaaccttggcctcaccgggcctggattgggcatcggcagtgggcatgaagtgggggtgggattctttaggccagggtccaggacactttggggatcgtaatgc

SEQ ID NO: 447703 - DNA, 118 bp, Homo Sapiens
ccaaaacccagctcaagtttatttttaaggattagttgagcaagtttggagttggaagtgagagaatcgtgtttaaaggaaagggtgggtcttccacagaacagctttcagtctttac

SEQ ID NO: 447704 - DNA, 476 bp, Homo Sapiens
ggccgggccaccagggtgcggctttccgctctggagagtttatggcccctgtcgtgggacggctgcgcagccgccagggagggactgcagggaccgcggctgggacaggctgctgcgccaggcggccctggaccgccgcttctgcccctaagccgccctcgcagcccaggtgaccggtttgtcctacccggggagcatcgccctcctccgccgggcccgagcccggcgtgggggttgtaggccggcaccacagcgtgaggacaccgcgacctctgcccccgggagcgcgctgaatgccaggtggggctgctgtcgcaggccttggagccgcagccccgctgaatggcagggtcaggctgggcgtcggggtcctggcagagaccgcggcgagggccggagcaggtgcactggccgctgcacacgcgccgctaggctcccggacaccgctggcgcgccccctggtggcagccggctca

SEQ ID NO: 447705 - DNA, 631 bp, Homo Sapiens
ccattctcctattagtagacatttattgtttcactaatataagctattttgctctgaactttcttgcacgtgcctataacttaaaaatacacatacttttttaaaacatgcagttaaacaggaacatacacatttctttaacatgtagttaaacaggaaaagtaacacatgtgcatgaagaatacaaccaagagagccatcacgttcaagaaaagaccacaggttattccgagtgaagtaaggctttcactagaaggcacttggggaacgttccaatgacagcgacattcatcgctacagtagaaactcacacaatcgcagccctttattagtattttgttacccagtagttcctgtgtccattcatttcctcaactggagtgtgagctccaagaggaccgaaccgggcaccgacaaggtgagccaatatgaatgtggcgagtccgcaatgggggctacagcggccgacctctggggctgtgccaggccactagagtgtggtggcgcgagggaagggtcggggaaacagggcctaacctcacttttcaccccgaaagtcaagatagccacggaaatcagggatgaatggggagcacagacacctgacctcgaagtgtctcttcaccgtcac

SEQ ID NO: 447706 - DNA, 516 bp, Homo Sapiens
  misc_feature (59)..(59): n is a, c, g, or t
gctggggcaggatttaagaaatgtttaatgaagactgggaggcctggagcaacgctctntgggatgcagaaaagggtcgtgcagctcggtggcctctcctccggccccctggccctggctgtaagtttcctcggctctgcagggcgcggggcactcagggatggaggagaccacaccgcgcggctgggttcgcggaatggcggtccctgcggcctccaaaggcgggacctcagacccctcccactcctttcctgctcgacatctcaatccagctcctaatatctcaatagggtttttaaacaaatcgatcctaagggctcagttcagcccacccagggattcttggaggacgcacgccgaactcagggtagtgagaagagtttggggggccctggggcgcagggagaagaccccacactccacggccaccagctcccttccggagacggcgctcggacgtcgcgggtcacgggcggggaatttagcccaggtgctcgttgggccgcgagcggccgc

SEQ ID NO: 447707 - DNA, 458 bp, Homo Sapiens
  misc_feature (414)..(414): n is a, c, g, or t
aactgggaaatgatgttcttctggacgtataaataaccatcaggtggccaattctcatccagagtggacagggtggaatgggatcatccctgctttcaaatagggacattgacgtacagagagaggagtgggttagctggggccccagggcacagcttcaccaccctggggaggtctggggagagcatcctgtccttcaggacaccccccaccagcggctggaggtgagcacgccatgagtcgccccaggtctgggaagagtgggtgcatgggtgcttaagaggctgcattctcagcaggccctgcacctgccccgtcctccaacccctgtaggccgacgttttccttttgcttccatttgatgttcgaagccgggttcaagaccagtttttgagggcctgaattcaggctgtngttgtcaggttgttgcacgccttttcagggagaaccacgggcaa

SEQ ID NO: 447708 - DNA, 695 bp, Homo Sapiens
  misc_feature (483)..(483): n is a, c, g, or t
  misc_feature (645)..(645): n is a, c, g, or t
  misc_feature (647)..(647): n is a, c, g, or t
agatttttaaaaattttatttttaaaaacttttcattgtaaataactttcatgaaaaaggttaaattgccccacggggcgggagggtggatgtgggacgcagcccagggagtccgggtggagcaaggcacgccccacgcccccgaggagtgcaggcaggggcgtggggtaccccgcttcttggtcccagtagttccagcaagctcggcatccctcccagttaagcctcagctacagctacactcactacattagtctgtctgtcctgccccatacagcttgggctgccccggcccccaaaccaccaaacccaaacttccagctgctctcagcctcaagtcgggcttaaagattagggatttacgtcccctccccgccccttagggatggggccaggcaaagaccccagaggccttagagaggatctccttgccccaccctgtgccaccacctcattttggtctcctctctctgccccctcccncagtccatcttctgcccttccgccccatccacagcctgccccggccccagggagctctgccaggagaagcctccagggggttaatttgctgtcatctaattagcatttgttgtacctggggactctctctggatagagacctggggaagcaggggggaagcnanggtgctctgggagggcccagttctgttcctccccagcctgacccgggc

SEQ ID NO: 447709 - DNA, 769 bp, Homo Sapiens
  misc_feature (482)..(482): n is a, c, g, or t
  misc_feature (551)..(551): n is a, c, g, or t
  misc_feature (596)..(596): n is a, c, g, or t
  misc_feature (599)..(599): n is a, c, g, or t
  misc_feature (632)..(632): n is a, c, g, or t
ttttttttatcactgtaaaagagaaactttaatgtatgctaaaaattttttttaggaggtaacatcctggtgtttctcagatgcaggtaaatcatgaccttccacattctctttcaacgcagggagcacctgagatcctacagacaggaaacatggggaggataaatccaatgatgcatgcatcaggtacatgccaaagttcacctttgtttcacgactctcagaaagtttttggaaaacatgctggtttcgttgcccagtttgctggtcgatgcaaatcatctggcatctgtgacaaggccccaaaacctggaaacgcaaagagccaattgaaatctcatcccatttctcttcttcaaaagccctttttccattgataataatattggcacgaaaacgcaagctgagatccttcagtgagaataattcctcctttccattctcatcactggtgtttagttgccggtgaagttccaaaatanctggatgtgttgatcagcagatactgtgcctcattcacccagagaaagggtggccattgtacccagganagttgatctttttcatgtttcttctttgcattcccttttggagtntgnacttttggtgatcaaatgacaggacgggcaaanaatgtgacaaccagccttgaaatttttctcacaattcatagtacttactctgcagcacaaccctgttttgcgaaattggatcgtcactatttctcagaagcactcataggtccatcctttggctgtgaaccatactt

SEQ ID NO: 447710 - DNA, 498 bp, Homo Sapiens
  misc_feature (127)..(127): n is a, c, g, or t
ctgtttcattacttccgttttaaaagtttttgccagagagttttgctaaatactctcttatttgctctagtgtactagtccagtagtgtttgcatgtggatgtctgtggatgacagttattgtagcnctttggcagtgcactaaaattttgccactatgaaatgtttctttattgtgtgtgcgtgtgtgttttgaaatacgcacacagccacacccacatatatattaaaagtggttgtattcatttagtgaaaaacaaaaagtagatgtacttctgtaaatcagataaatgcttggaatttgattgtctacccaatcaacagttttccctctttgctctggaaatatttgtactcatatagcatatttcaaaaatgttgtcattcattaaggcctcttaaatagaccactattttttgtgtctggcagatgagtatgtcaaggattgagatgaacacataagtcttggaaattaaataaatttataaacataaagat

SEQ ID NO: 447711 - DNA, 486 bp, Homo Sapiens
  misc_feature (452)..(452): n is a, c, g, or t
ctaaatgaagtgcttttaattttcagaccaaacatttttaatataaaaacattttgataatatacaaacagcaatcacaacagcatccacatggcagcaaggggaccagggcacagagagggggagcgggctggggagggacagttttcagggtcccagttgcttccctggcttgaaatcaccctggtcctagcagaggacaggttaaggctgccagaggcagagggtccctgaccctggcccggagacagactgcccaggcaggccctctgataccatcttccaaccatggcagcctccaggaaaagccagatccatttaggagataacaggaaggtggctgtgattgacaggaaaggcaacatggttcctcagcatcctgctgatcacacctctgggaggggctgctggattgaagaggacctaagaatcttcctgggagcaggacaganatgggatctaagtctacctactaactaacattcc

SEQ ID NO: 447712 - DNA, 1481 bp, Homo Sapiens
  misc_feature (118)..(142): n is a, c, g, or t
ctaatgctacgatcactacagtcccaacaattgggctatgggaaatagtgcttattttaaagtgcaacgtgttgacactgtccctggcagaacctatttttgaaaaacataaagtgcnnnnnnnnnnnnnnnnnnnnnnnnnaacttgaaaaccacagaaaacaaaacagaatttctattatagtaggtactttccttgctgcagcaggaattattcagtctgaactgggcatttcaatgcgtggtatttttttcctttcatttttgcaagtaaaaaaatcatatttttatgctgttcttcagtaacacacagtctctttgaataaactatttcttttgcatatttgacacttgcatatcttttgagtctacactagtgatgtaaagaaagcgtgttcctcctccaaccctaaaacaatgctctgagttcatgctgttggctgggtgcccaccttctgaacccttcccagattgccagggggcaattagaattgagtacaagtggtgcaactcaccctgatggtatctcaaaataaaatctcaggtactatgaaataccgaagtcaatgaagacatttgagtaagggttttgcgctgggatcgtggcttatggcgcagagacttccccatgaccaatcattccctgtagctgtctaacagtggaatccatccaggaggtgatggacaggtgttcctaggggtggctgggcaacagttcaataccaaattggtcaagcccactctttcaacaccagccgcttgttccagcatccttctctagctgaagccaggaggactgtcaatgttgccctccgaggctgagatggaaagccacgagagaatggggagtatgtggcctcggtcctgtctaaagtggtggtagtggtggctgtgagttccactcatgtcatctcccaaagagggctactagagttgttacaagcgaggtgctgtgccctatcggcttggcctacttcatgcttgatggaccctgtcctggctctcaaggtcttagggacggccttctctggagtctctcttctctctgagaggctttcacgggcctctcctgtttcccagacgtttcatgactgaaaacgcctctgtgggccaggttaaggctgaactgtgtccacctccttttgggaccctcgacccagaaaggttctcccactaccaaacggcaatggtcacagttcaaaatgctcctgaaacacaatacctaccatttgtgctcaaaacccctgtgaaaacaacgggacgtatcggggagacggtgttgttctccccagatattgcagactttcacggacccctggtggggccatataccagtacaagagctatgtgaacgtgtaaaaaccgataaagaacaatatcagaccataagggaggacgaggataaagagaggctccacacagggtgatataccacgatgtattacacccgctgaaatactgacaagagataccacgaagag

SEQ ID NO: 447713 - DNA, 714 bp, Homo Sapiens
gagggggtgtcatttcatttagtttattagacaaaaatatatgatttagacaagttcgctgacgcgctatttacaatctgaaaccactctatatacagaaaaggggggaaagagacacaagcacgtgggggcatttaccgaacccgataatcgcagccactggagccgccggcagaggcctggccacctggacgcgagctcgggaccgaagaagcccctttctgcagaaagcgacggatgcgagtccttgacgtcgttgtcatatttgtcctttacaccagtctgaaatatttgtcttaattcctcggccttctccgggtcgccctcggtgtcgctgccgaagagcgctccatcttcctggtccttgctgcgcgctccccatgtcaccttgttctccttcttgaggcgccggcgcgcgttggcgaaccaggtggagacctgcgtgagggtcatcttggtgatgatggccagcatgatcttctcgcccttggtggggtagggattcttgcggtgctcgttgagccaggccttgagcgtgctggtgctctcgcgggtggcgttcttgggccggccggggtccccgtacttggaactggccgtaggggtaataagccggcgccgtgtgggctgccgaaggtggcggggtgcaccccccgggttgtccttcagttcatactgcgagcccatctgcgagaagaggctgagatccgcggc

SEQ ID NO: 447714 - DNA, 1247 bp, Homo Sapiens
tagtggggctggagaacttgttgccttatagaaagtgtggcccggaaaccagggggttttaacggtgtctttcaagataggattcaccccttgccttccaagtttccaaaatagtgtgtctcacatggcaaactatggaccacataagcggccacgaatacccattgtcttacctggatctttgcttcgtaacacggtagtctaatttttctcgtgcctgttttctggctgtagaagttaagaagagaaagaaggtgctgtcctggccctttctcatgagaaggctctcgcgctgcatcagatttttctggggctttggagacagacttgaaagcatcgctatttgatcagcccttgtcaattatctgcggtgacagtgacacactccccagacccatccaggtaggcgtgcattctctcataaacctacttcagttttcagttggacatgcaaaatactcgggaaatctgaatgtcattctcctattaagtttgtagggactgaatcttcccatattttcccactcttcaacatggcactccccacatacgcgtgcagtcagaagaatatctgactgcttccattccagaaattgaaattagttgtatttgccaatgagctcagagctatggtcccgccattcctctgacttcacagagtggagaatgctgaagatttgtagcttctggggatggtgcctctgactctgcctgatgttagaaagttgcagagaggccaagggtgttggagagagggttccctggattcatcaaatgcaggaatgaagggccacaatctatgatgggctaagcatagagcaccctctttgaggagtggatgggtgctctggagatgcaggacgaggaggacagaatcgaggccctgccatcatatgaagatgtgctggcttcctcttcaccttctgccatgattgtaagttttctgaggcctccccagccatgcttcctgtacagcctggctggagtttcccgtcgttggctgcagcccccttcctgatgaggtgggtgatctggaggtagggtccatgctggatgatgatgaggcctaatcccaggctacccacagtgagtttggtctgctgtgttttgctcaagttgtgtacagatgttttgaccttgttgctgactcctctttcttttttgtttttgtgggaggccttctgcatggtcccgggaggtcaggcagcccgggagggcctcccggagcagaggctggagtcagtccc

SEQ ID NO: 447715 - DNA, 695 bp, Homo Sapiens
tttttaaaattgtttaatgcatgtactttattagaatgatattttgaacactgagataatgtgatttcattctgctcacagttactctagtacacagatttaaaacaatggtcaaagcagcaattacattaactcactgcaggagtcattatacactcaggtagtactttggtaaattacaaaacaaatgtacacaagggcacttcagtagaaattaaatcagtttggggacacatcaggctgctaaattctgtactagaatccaacagcaaatgagtcattcttggaagtggaagaactccatgatttcacagcctagaacactaagtatgaccaccaacgcaccatttcaactatctaacaaccaatgggagagtcaattgttctcatcccaactgccaaaagcaaaaggcaggccatcacaagttggcttgttcaccttctaaagacatgactttatttctgcctaagtcatctatataagcgaatctaataaatacaataaaatgtaacccaacaaaattctcatgtcactttttacagacatgggtatatgagaaccatggaggtgctaaagaaaaatagaagcattttcttattatcatattaccatgaaattaaatttatgtctgttctaaggaaagaaactaaatgtcctgtttgatattgatgagtaggcctactcattctctacc

SEQ ID NO: 447716 - DNA, 725 bp, Homo Sapiens
  misc_feature (470)..(486): n is a, c, g, or t
aagagaatcatacagtggctttattcttactacttaaaaaaaggtgatgtgatggcagtgatggtcaacatcacacagggaagaccaggtccacgctttgtccagaatcaactgctaccacatgagtcttcttggttaagtcatttgagcccacagtgacagaataggtccctggatatacttctatgtagaggtccttagagatgttctcagcaggctgggatgcctctggagcatgctctgatatttgatagctgcctccaggaccaagggatgtcttttttctgtcttttctctgaccattccctatgtccaagcacatgtgcagcttcgactcgcctctgtgataacgatagacatgggttgcccctccttcctctggcacagatgaataatatttcccacactgacttgaagtatagtccatgaattcagccattgttctgaaggaagcactaagggttgggggnnnnnnnnnnnnnnnnnccgggagaacgcgctgcgggccggctgccggctgtttctctaggtggggcgcctcccgggcaaggacccccatgcagcctttgggacgctccagggcatgccagtccaccgccctcctcttggccctctccagcacttctagagccagctttgctgaacgctgcagggaacgtcggtccaccccattcagcgctgcggccgccaaacagttgtccatggctccccggctcactcccgct

SEQ ID NO: 447717 - DNA, 578 bp, Homo Sapiens
agaggatttcatgaggctttaatcataacctaataatactgttaaaaacaacacatctgtcacttgcagagacccacagggacacacattctcttcctctcacatagactctgaggtaggaggtacactggctaaggaataaaaaatactcagtggctgtgcaaggctcagaccaggctcacaaggctcttggttgaaaagcagccccttgagagcaagagcagaggccaggccagcttcactgagatcccagaggttctgactggggctgcccagagttgggcatccctgacttccggcatttgagatctaacccgggactggttggtgcaagtaggggatgaagctaaggtggtagctggtcttgttccaggttgcaaggatagaatgatgttcctagcacataaactgctctcggtgaagatttgtttcacgaattgaatgaatggtgtgggggaggggaggaagaattctagaggacagtccctgtggccttcagcccaggataggggagctaaggggtggggaagcccctataccaatcattttagaggtggccagtagagccagtagtgggt

SEQ ID NO: 447718 - DNA, 358 bp, Homo Sapiens
  misc_feature (303)..(303): n is a, c, g, or t
caaaataacagaggacgtcattttattggctgtccacgggaagtttcatcacacacggaggtgaagactgtgggggttgtggcacacaatatctcaacacgagacctcatcgagcggccaaacagaaggtgaagtgacacccgacacgacggaaccccagccgccctctgcagccccggtgccacctctccacagacgcctcagcccagtaagctgagtgatgacactgtccattagtctcagttcgttgcactgtcttccaacaaaacagcacttgaaaattcacaaaattaaaaaaagganaaagaaagcaggcacttccttgggaaattaggcaacaccactgtaacacagacgg

SEQ ID NO: 447719 - DNA, 1348 bp, Homo Sapiens
  misc_feature (189)..(190): n is a, c, g, or t
  misc_feature (199)..(201): n is a, c, g, or t
  misc_feature (203)..(207): n is a, c, g, or t
atttggggtggaggagattctccaaaagccaccttagttccattggacccaggggtttcttccctatgggaaaccaggcctattggacccatggttccgctttacccttgctggggccccggcgccgccaaaacgaaaatggttctagaaaagcttcctcgagggcccgagggcggccgacatgttttnnttttttgtnnncnnnnnttttttgggggacagctcggctgtttattaagtcagtagaaaaatgactgtacaggtttaaggtgcaggaatgaagatggggcagactgggccccagcatctgaggccccacccccatgccagagagctccagtccagagcctgaagtgtggtcagcacatgtgagctatctggatgtccaggaatatctaagtgtgctgcccccgtaggaggcactggaattccttgcccagcagctgggcctaaagagaagaggctgaggaagccaggccctagaaacggcccagcacggtggctaacagagccatgcggatgtacatgccgttctcagcctggcggaagtaggctgcgcggggatccgagtccacttccacgcttatctcgttgacacggggcatcgggtgcatcaccaccatcttcttcttggcccgggtcatgatgtggggagtgaggatgaactgaccaaagcaagcttcgtactcctgggtagagccaaatcgttccttctggattcgagtcatgtagagcacatcagtgtcaggcagcgcctcctcaatgctctcgaatttctcctgcttggtgccgcgggaggccacgaaggcccgcacagtgggtggcatgcgcaggctgggaggtgccacgtagcgcaggctgacacgatactgggtgagcaggcaggccagggaatgtactgtgcgtccgtgcttcaggtcacccaccatcgtgatcgtcatgccattgacagttcccagctcctcacggatggtgaagatgtccagcagggcctgggtggggtgctctccgaccccagtccccagcattgatcactggcctccggcagtgcttggcggccagctccactgctccaggctgggggtgccggagcacgacgacgtcggcatagcagctcatggtctgcacggagtcagccagggattcgcccttctggacggacgatgtggcttccgagaagctgagcacagcacctcccagccgggccatggctgctgcaaaggagctgctggtccgtgtgctcacttcatagaacatggaggccatgaccttccccttcaggatgtcgaggctccgctccttcctcgtgccgattaaacacccagcctcgtacctagccgtaaggtta

SEQ ID NO: 447720 - DNA, 1018 bp, Homo Sapiens
  misc_feature (283)..(320): n is a, c, g, or t
  misc_feature (493)..(501): n is a, c, g, or t
agtgacatcttttatttcattgtttacttcaaagttgtctttaaaactaagcacacagagaaacaaagcctagaaacggactggctgtgtgttcacagaaatacaaacaccacgcggtatgtgctagtagggctgctctgaagacaattacaaagaattggaatcacaaaatcaagtggttatcttatgaagttctagaaaaatagattttttttatattcaaatgcaagtttaaatatttccctttcagcagtcgttctagcaaaaccaatttggcagcacnnnnnnnnnnnnnnnnnnnnnnnnnnnnnnnnnnnnnncgaagaaagaaacaaacataataaaaatacacatcagcatcaaaggtcaacacaaggtcaaaggtgagagttcaagcatcagagaagctgaagagacagggatttggacgatgtacttgacgccacatcgacatgctttaggcacaacgatgaacaaacggcaggaatctagnnnnnnnnncaaaccagaaagagggagacccactgagttacacagagcaatacatccaaacaaagagagagagaacaggaacactcactgtgtgtacagccctgaaatgaggtgggcgggcaggggttgggtaatgacagggaacttttgcacatgctaacaatggacacagggaaaagtcaaaaaggacatggaggacaccaagaacacatctaattgccagagacagaagggaacctaaggcttggattttccatgaagcacccaactcctaagagaaggtctccaggggagcagagcctcagcctctctccccactccctggtcacaacccaaggggaagcagaagatgctggctggggtggggaaaatttttcagggaagaggaccagaatttctgctcaatcttatggggatggccctttgttcccagaaatccaagctcttagcttccatccaggccctgccactcaaggggaacccaggagaccctcgtgccgaattcgccacccaggcctcgctcctt

SEQ ID NO: 447721 - DNA, 419 bp, Homo Sapiens
  misc_feature (387)..(387): n is a, c, g, or t
  misc_feature (396)..(396): n is a, c, g, or t
  misc_feature (408)..(408): n is a, c, g, or t
aggtagaaaaggaggattttattgagtgcactcagacccagtggattaacatccagagactgggccaaggacaaagacagcatttaacttttacatacacttctaaagagggtgggctaacttgaaacaagcctacagtggcacaaagtgtagtgatgtgaaagcaaggatacagaaacagaacaaaagcagttaatcatactatgacaggtttataactcagacttacatatgactcttactatgtggcccagatggctgttacctaggcttgctctagtgccttgcatgggcttatcttataaccttcactatggtgcctaggtggctgcaatccaggcctgctcaggcattctcatgacctttcaatgtgctgcttaaatgganaaacagggnttcttaaggggnaagggaatttg

SEQ ID NO: 447722 - DNA, 507 bp, Homo Sapiens
  misc_feature (388)..(424): n is a, c, g, or t
ttctaaaatccatacaaacatttattctgtccctgcctggaggtgagggggaagggggtccggagagccccgcagaggaggacggggctctagcgggaagacagtgtccggaggccggtgggctccctctagacggcagaccctggggctaacgaggggccagctgggttctcagaggtcacggagtgcaggggtggggcggcgagtggtggaagccggcgcccccgaagaccggccagcccctggagcacagaggcgggtccagcccacactgcgctgagtgtggccctggcccccactggggtctgtcccacccccaccccgcaggagggaaggcagcaggcccgctcttcccggtgggaaagatgctgtgcaagtcatcaggttnnnnnnnnnnnnnnnnnnnnnnnnnnnnnnnnnnnnngactgtctcaacaacctgggactgcccacccacgcgtccgcgacgcgtggtcgacgatatcccggacttccgaccgtaccagc

SEQ ID NO: 447723 - DNA, 371 bp, Homo Sapiens
aggagagacagagtctccctctgttgcccaggctggtcaagctaccctctcacctcagcctcctaaagtgctgggatcacaggcatgagcatctggccaaaaacaggctctgtatttctgctcactttcttaccttgcttaatacacagggggtcttaattaatatcatcattaggttgctctcggcagggagtcccattacctgacacaggtcccgttctgtctgccgctggctgagccgctctgcctcccggcgcagctgctcctgttccctctcaagctgtttctgggcagcacgcagtcgctccaggtcatactggtatgtgcccttcttctgctggagctcctcccgctccttttccaggtcctgc

SEQ ID NO: 447724 - DNA, 402 bp, Homo Sapiens
caacagcttccttctcccccaagaacccagaaggcatggaacatggacgacctacagggcctgctggagaagaccaatgggtgcatgggatgaccggcagcttccctcaagtggcttcccagagactactaggagaacttggtcctatcgctgcccccacctggaagctggacttaaggatcccccaaagaacggggcaattagaaacctcccacccagcgaagggataagcttctcaactcagtcccaccactcttcatcgcaaccctctgagtctgcagcagaaacaaacatctccaagttacagaggaggggatggaatccccaaggggccgagcggtagcccttttaacttataagcctgttgattagcctatacgagttatttgcacgtcaagaaag

SEQ ID NO: 447725 - DNA, 445 bp, Homo Sapiens
  misc_feature (432)..(432): n is a, c, g, or t
aatttagaagaatcagaatttatttcactatgtgaacattaagaatttacctacatagttgaaaatattcacaaaggacttgatcattcacactcatacacagagaaagtctgctgaataaaaaaatgctcctttacccattcgacctcctctcaggggctgcagtgggtttgccaattccactgtggggcttcagtcttcatgaatgttgaatagtttggctacttcattgagatcttcatgctgctcaccgtccttaatgatcttccttgctattggcattcggttaaagatgttccatagcacaatccccacgaccactttgtccctgaggtagaagatgacacctttgccgtagtcctccccctgggacggggagcctgtggaactgccggggtgctggggagggattagtaatttctgagggcctcnggactctgtctca

SEQ ID NO: 447726 - DNA, 823 bp, Homo Sapiens
cactgggttaatttatttaataactgacaattttattattatcaccgttttaaagatgagacaattatagcatagaaaattcaagtaaatgccccataacaccaacccctcaaccctgtttcttcttatttcctggacccttggccatatgcgtggaatctgagaatggcatctagttggctttaaactcacactaatgaagctgcaatctggaggtcagcaagtttctggaaattgttgctggtgatgaattcacttaggatgggtacattctactggtctagaacatcactcccattgctgaaaaaagggcatctgacctccgttctttatccaaatcttatttgaaagcatatctttggcagtaaccagactgtctttaggtgacttttagcaagttgtcttaggaaagtgaaattgttgggttttccagcccctgtgatatgcggagcactgcgctaggtggtattcaaggcaggcctgtagtgaatgctgttggacccagccaccacccctgagcaatcatatgcagaccgctggcttcttaactgcagacacctacagactcagcctaagactttcccacgaggcaggctcgaagtgctggagctttaacacctctgggtggcggctgacagcctcaaagtcgcaattgagtctgcgcaccggccattcaggatgggacgaccttataccgcggtgaggcggcgtggcaggacgaccaatttcagattcagggcgcggatgcagcataaatgggaaggcacggtttgagaaacggtcaaacctgggactagtggaggatagtgagctgccgactccc

SEQ ID NO: 447727 - DNA, 500 bp, Homo Sapiens
  misc_feature (201)..(231): n is a, c, g, or t
  misc_feature (393)..(401): n is a, c, g, or t
tatttggttctctaaaaaaataatatattgatattctccattttactagagatatctaggcatattttgctatagttctttgaacctgtttataatagctgatttaaattcattatctagtaagtccaatgtctgggcttcttcatggatagtttctattaaactgcttgctttttctatgtactggccatactttcctgnnnnnnnnnnnnnnnnnnnnnnnnnnnnnnnaaaactgtacatttaaaataatgtggcaactgtggaaatcagatgccctcctccctgggtttattgttgctggctctttgttgttgttgttgttactgctttcaattaatttttctactttcccagaatagcatctatattccttttaattttgagggtttnnnnnnnnntgcagtgtatgtcaaatttacagtttagtaccaagccagtagatgtcagtatgatgccttaaattaagtcttctttaattaaagatatttttttaaatt

SEQ ID NO: 447728 - DNA, 549 bp, Homo Sapiens
  misc_feature (90)..(98): n is a, c, g, or t
tttttttaaggtgtacagcgtgatgatttattttgtgaactgatgacacaatcaacttaatacacatctatcacctcatacaattatccnnnnnnnnnggagatacagacacctaaggtctactctcttcgcaaatttcaagttatattaatgatagccaccatactgtatgattttaactgtagccaccatgctgtataatgttaactctggccaccatgctgtataacattaactctagccaccatgctgtttatcagaccttcagaacttcaccttgtaacgggaagttacacctttaatcagcatcgccacagtctgcattcccccagcccctggcaaccactgtcctattctgtttctgtgagttgtgacagttttagatccacatatgagtgacatgcagtatctgtctttctgtgcctgggtcgtttcacttaacataatgactttgggttcatccacgttgtcacacatgacaggatttccttcgttttcatagctgaataatattcagttgtgtacacacaccacattgtcattaaacac

SEQ ID NO: 447729 - DNA, 373 bp, Homo Sapiens
ttctgattctattacttttattaaatagtgggtttccacacatggctttttaaataatccaggcaggagaagagaggagggcacacttggaactcccctccccacaatacgtgattatttacattttagtaattggacaatcccggctcaggaggaggttgcaagaatctgcaaaagttggagggagcgccccaggagaacaaacagcaagccttatttcccctagcccatcccccaaaaaaccatccatcccatcctagtgtctggtggtgtccggtggtgtccatcttccattccttcccaaattatggaagtaaggttcttctcaccagaataagagcacttgggataacagagtagggtcccctcaccc

SEQ ID NO: 447730 - DNA, 550 bp, Homo Sapiens
ttttgatgaacaacttaatcttttatttcattctttacaacaagcagtacaacaaagacattcccctttctatattactcatattagagcacatactaacctccctggtccttttaacttaatcaaagggcggatgcactggtttctgcagcttttgccgatgcacaaacgttccattgcttaacccatcttaatgctgcaggcctcagaaaaagatacggcttatcctggaagcaggttaaggagattgtaaaacacttttctgccggtgaagtcctgcatctgccacatcagggagcaggagttaaccctagaggtctatctccaaattccatctgtcagatggacataacacacattcccacttttggaaaattgtcctttgttcatgtttcagtagatatttattcacattttatctgggccacatatcaaacaggggaagctacagctcatgttaaaaaaccttttttttgctttgcagttatgggaatcccagaaaaaaccaaaaccgataatggcccagagtattgcagcaaagccatggctg

SEQ ID NO: 447731 - DNA, 918 bp, Homo Sapiens
gggaagtatttcttctcttatccccacaggatttgcagatgaagacattgactaataggttcctaagtgaatatcccaagctcttcagattctccaggaagagatgacttggatgaaggagattctttccaacctgggctcacctgttgtgctttgccatgaatgacctattgtgtaagaatataatctacaatgagaaacaaggtgatgtacagttcatttgattatgaatattctggatacaactacctggcatatgatattggaaatcattgtcaatgaatttgcatggtgtgcagtgatgtagactatagtctgtatccagatagagaactacagagtcagtggctgcgtgcttaccttgaagcctacaaagaatatcaagggctttgggactgaagttactgaaaaggaggtagaaatactcttcattcaagtcaatcagtttgcattggcttctcatttcttttggggattgtgggctttgattcaagccaaatactccactattgagtttgatttccttgggtatgcaattgttcgttgttaaccagtactttaaaatgaagcctgaggttactgcacttaaaagtgcctgagtaaagaagagatttaattattctccagtagctgagcaatgcttgtgaatcttttcttaagaaatcccaaaaagccaatattagttaaaattctgttgtttaatttggttatcttgctttataaattatgcctctaaacaatcaaatctatttttgaaatagactgaatgatgtcaagaaatatacctactgctatccgtatgtggtggattagaaatgtgttaaatctgcaaaaggtataaagatgtcagtttaatttctttgataatttaacctatgttgtatgtgaattatttattataaacttagcacgattctg

SEQ ID NO: 447732 - DNA, 631 bp, Homo Sapiens
ggacaggggctttttccaaaaggggtaaagggcccacgcgcaaggcccaaattgggaattttaggtaaggtttcctttttattccggggataacccagaactaattggtttttacattcacatttcacaacccttgcaaaatttccattgaaaatgattttcccaatattcatatgcccaggtagttggtatcccaggaatattccataattcaatggaactgtacatcaccttgtttcctcattgtagattatattcttacacaataggtcattatggcaaagcacaacaggtgagccccaggttggaaagaatctccttcatccaagtcatctcttccctggagaatctgagagcttgggatatcacttaggaaccttttattaatgtcttcatctgcaaatcctgtgggaatgagagagaaatactttcccatctttagccaaagattagatttggggatccagccattgtgtgcatgaatagcatggattttagcaagctgacgagctattagcctgaaaatggctgggttgcagacatgctttggatccagtgcttctccttgtataaattcatagcatagtccattattgaaggtacagtagagttgtggtgcacacccatgagc

SEQ ID NO: 447733 - DNA, 1660 bp, Homo Sapiens
  misc_feature (194)..(194): n is a, c, g, or t
  misc_feature (219)..(219): n is a, c, g, or t
  misc_feature (330)..(330): n is a, c, g, or t
  misc_feature (364)..(364): n is a, c, g, or t
  misc_feature (537)..(537): n is a, c, g, or t
  misc_feature (562)..(562): n is a, c, g, or t
  misc_feature (565)..(565): n is a, c, g, or t
  misc_feature (582)..(582): n is a, c, g, or t
  misc_feature (608)..(608): n is a, c, g, or t
  misc_feature (889)..(889): n is a, c, g, or t
cggtatcatgtgattgcgcgacgaattgagatcaagtatagttaggatgtcgtatgtgtcaagctgtgccatagcattgatgctatagtatatatgagtgcaggcgatatcgtgtaactttatacatcggcgtagtgcgcagcacacagcgagcgagctaatagaatcagctgccacgatggacaacgtattcngatatactagctctctattggtctntagcattaatatcctacttcatcgttattagctttatagtaattgagtcattttcgtgactatctatgtctctctactagtatatgatacgatcgatatccgttgtagcangcagatgtatatcgtatcacgtagagcatgttgngttgaattctgctcttaataggaccctacactgtagttgtaggttgtacggctacagattaatgatagtgtatgtctctcatatgatcatgcaataatcatgaatacgtattacataaactggagaatgcagcgatgacaggtgtggtgaggggagacctaagcagtggattnctttatgtcataagatgtgctgatntantacacagtctcgggtgnagtactctataatggaatactgatgntatgattgagcgacgtgcatgtgcgcgtacggatatagttcgcctatgtggcggttgagacgtctcatatatatcgccgttacatgtgtctatgtatgagggtctcgggcgttagcagttaatcgacgttagttctttaggagaatggtgatacggtaaagtgtgtagtccagtaaacgcacatgtgtgtgatttatattttatctccaaattggtggtggtgatgcttgtgttagagagagtatgacgtagttctatggcccaatattctttcgaggagnttgataacccagggttgtaggctgtgtcgcgcttacatgaaatagcgacattgcattgggtagtctatttcgtgttgaatcgcacttagatgtttccttggtattagatggcaatagcgatagtatcatgtatagaacgtaacatttagagtggtggtgctcagccctggagcctgtaacactggagaagctctttcaatcctcatctcgatcgagtaataactcagtcttattgccataaattctcaccaggactacatcctccatggtgtttcccacgtaacagccaataagtttatttgtgattccatctgtgaagagctgcagggtcacctcctgggggtcccagtgaggccgcaggtgttgcaggaggctcagggccccctcccggcagcgatgctcctcctgatcctgaacggtgacgttcagcttgggcacctccggggagccgggagggacgtggatgtaattggccatggcccaggcgacggcggagactaccaccacgacgacggcgacggcgaccacgagaacggcgggcgccgacagactggtggatccttccgtcccggggcgccctcgcgggagggctgggggcgctgggacgggcgggcgagcggcaggagaacgtctggaggcggcactgttgccgatccgggtctggacagcagctgaactgagcccggcccgctctcggagaaaattcctgttgtcggagctggaccgcgggcggccgcagagcatgccggggctggcctgacgctggccgct

SEQ ID NO: 447734 - DNA, 522 bp, Homo Sapiens
agcagcaaataaaaatagaaaaagtctacttttatttattggtaaacataagacaaccaagtctgagcatctggtgcagttcccagtgacggcacttgccctgcacacgctcttgaagcaccaggaaaaacacacaacacagtaagaaggcaaagtggctgggagtaaggtatctgcagattcaaactttgggattgaagtagctggtaaacagaaaggcaccgaatcagggtctggagagacccggctgctggggaggaatctggcctgcccaggcagacagggacagacatcctcatttctccaacagctcctggaagccgagtcaccccaagggcttggagagctgttagtctggctttggagcagtgaaggtagcacagtgctcagcaggaaggagtcaagactttgctgtcgagcacagggaggctggtgcctgaggctcagcgtgccaggatccacgcctcctcccaggctgcgcagtgagctggaatctctccctctcctgtgggagcagctctt

SEQ ID NO: 447735 - DNA, 489 bp, Homo Sapiens
cagccccttctctttcttattcttctgcctctcgggctcagaatttgccagactctagcccgacccagaattatatttctatgcattcttcccaaaatgttcagactcaagagtcatcatctccccagtcccagaagtttttgcctgctgtccagtcatcatcttttgcatcctctactcattgtcagacattacaaaataacataacttcccctgacccaaagtcttatgctgaaagaaagcttgactcagatgtgtatccatcttcaaagcaagaagatggttttccaatgcaagagttacaggtgttgcagccacaagcatctcttgagtcatcaacccaaaggctatctgatggagaaattaatgctcaagaatcaacttataaggtgtcaaaggcagatgacagatattctcagagtgtaatcagaagtaattcccgtcttgaagatcaagttattggggttgctctgcaagcatcaaaaaaaa

SEQ ID NO: 447736 - DNA, 1973 bp, Homo Sapiens
  misc_feature (114)..(126): n is a, c, g, or t
  misc_feature (136)..(264): n is a, c, g, or t
  misc_feature (1360)..(1385): n is a, c, g, or t
ggggggaatccaagccgtggtttagggcccagttttttctgggaaccagtttggcccatttccccttccttttggggccccgcgcccaaaaaaaggttttaaaaaatttttcannnnnnnnnnnnnccccaaaggnnnnnnnnnnnnnnnnnnnnnnnnnnnnnnnnnnnnnnnnnnnnnnnnnnnnnnnnnnnnnnnnnnnnnnnnnnnnnnnnnnnnnnnnnnnnnnnnnnnnnnnnnnnnnnnnnnnnnnnnnnnnnnnnnccaatcattctgctctttattcagagtccgacacaagcccccacgtccatagccaagttttccccggtttcccagcagccagtgacttctgtagcattaggattcttatagtagttattgtctacatttctcagcagattgaatatgtactgcctcttactactggactgtttattcttaaatgtgtacagtatggatttatgtcgtctatatattatgcatttatttgtcttcttcgttgtgatggtaagctcctggagggcaagtcttgcatccactgctttgctggcaacccgactggtaagcttctggaaggcaaggcttgcatccagtgctttgctggcaacccgattgctaagtaccgtgttttaagcttagttcagtctcaagtgtttgcagccacatctgaagaccaataaagcaactgctggtttatcctttgggagctgacagaatttcttctcccaaatacatacacagtaaaatcataagcctgaattacctgtgaagttgctttcagatcatatcgttggttcactcttacagaaggatcactttaaaatatctctgcatttgtatccttgcaatgccacaactaaaagacagttatctcataggtccttgattaaattaggaggctttttattgaacacaagaaatgatacttttcaggcactgggcagataacttgctagaaaggcattttttaactgtgctaagattgagctgagtgcgtggctggagacaccacacaacacggacccttgctaaggcatctagtccacccgcttgttatgtagagggtgaaatgaagcccaaaacagtcaatcgtgaactctaagccgatcaggtgggaaagccggcatctctagaatgaaaacctaaggctgcttctcccactttgcctgagcaaatatagtgagattacacagcaaggcatgtgtaaattgccagtgcctatttctcagaaccagatttggtgatcgcaaagactgacgtggccctctaggtgtgcctatactgcaccagaagagcaagccgagaaagcagtgctcaaacctagagcattcaacctttcataccgataaaggctttnnnnnnnnnnnnnnnnnnnnnnnnnngcccaggtaagtgaaaaagccgctttcggtcaacgacttaagtctttacggctgtgagcgctatgggccgcggtagctttccgttaacttcagatccgattgtcgccccactgccaaagttaccttccaacatcgttactgttgcactttacgcagtcaagtgtccaactcctcagatgagcaagtggtcggccctaaaaagggcctttgggatcgaaacgtgcaaagctggagcggcggcctagcctccgaagccgtacagggtgcgcccctggcgcttgagcgcgtacaccacatccatggctgtgacggtcttgcgcttggcgtgctcggtgtaggtgactgcgtcccgaatcacattctccaggaacaccttcagcacaccgcgggtctcctcgtaaatgaggccagagatccgcttaacgccgccacgccgagctagacgccgaatggcaggcttggtgatgccctgaatgttgtctctcaagaccttgcggtggcgcttagcgccccctttgcctaagccttttccgccctttcctctgccggacatgaccgctggagcccgatagacagcttctgtctccc

SEQ ID NO: 447737 - DNA, 535 bp, Homo Sapiens
ttccgttgattgtcattttattttcaatttttttcactcttagaaacaaaactgtaatgaacttcttgcatgtgtctctctgcacatattcattaatttctctagggcatatacctagaattgcaattgtcacagccttgggattttaatttccaaaatctgactctgcctcttcctgcgctttcttacgctttcacttccagcaagctggaagcctttttaaacgtggaaatcagagatagtagccctaataagggtacaataataaatcattctttgcaagactacacctgttctagggtttcataaagatctctgctcctcccatggccaataactcagtggttctgatttgaaagcagcaaccctgtgactcgccacctcgcgtattccctggtgtgagtggagcctgtagttctcgtgtgtggggtggaggagccgtgctggggacccatgaggctggagaggccggcacaggccagaccataaggggccacgtgtttcagggcaatgtacgttgcgctggggcctactg

SEQ ID NO: 447738 - DNA, 160 bp, Homo Sapiens
acgcccggcgcaacggccaggagaagcactttaaggacgaggacgaggacgaggacgtggccagccccgacggcttgggccggttgaatgtagcgggcgccggtggaggaggtgacagcggaggtggccccggggccgccaccgacggtaacttcacagc

SEQ ID NO: 447739 - DNA, 312 bp, Homo Sapiens
ggaaggtattagttggtcatttattcaacaagaactttccaaggacctactctgtatacatgctaagtgcttaggggcacacaggagaaatactctgcaatgcatagtcctgctgcttccttgtggcgcctctgagtgccaccccttttgacacgcagagtcacaaaagccttcggggcagggtggaaccccaacctaggaggcagcgcaggtgctagactctcgtgctcagctctgtggcaggcagctctcccctgcgcatcatgtgatagaatttgtaaaaggatctcaaatcatatgaatcacaggttt

SEQ ID NO: 447740 - DNA, 523 bp, Homo Sapiens
ttgtttgctagttgtttattatgtctcttctaccaggctgggaacttcaggaaagccaggaccaagtcaatcttgatctaggctctgtcttcagcatctagaaccaggcttggcaccaactgagtaggtaatccgtaaataaattgctgttgacttaattgccttggactgaagtgatacattcttctgcccaattccgactggtgacatcacatctactaggaaggttgagaaatgtagtctttccatagtccctggggcttggtgacgcgatgactgagatgctggagtccccggtcagaaggacgatgccgagcgcgccgtattttctcctgcctctcctcagatcgccgccgttgttgggctgtggagacgtctcaaccaaagtggagccgacagaggccccgggagccgtggtgacagagcggccacaaccactagggggcgggaggcagagcggcccctagaccgcccctagtccgggacctctgggcggtcccgggcgggaagcgcacgcgcaaac

SEQ ID NO: 447741 - DNA, 442 bp, Homo Sapiens
taatttataatgaatagaaatttatttggctcacgattttggaggctgcaaaatacaagatcaaggaaccagcatctggtgaggaccttcttgttgcatcataaacatggtggaaggaatcacatgggcaagagagaaaagaggaccaaacacccccttcataacaaacccactcttgagataactgcattaatccattcactccgccctcatggcctaatcacctctcattgggccccagatctcaacactgttgcaatgggaatcaagtttccaacatatgaactttgggggacacattcaaaccacagcatattcatctcagcatatcccacaaacatggcctttaaccaagaaaccttaggttttgtgggtttggaaatctctagtgaccaagaggaactgcttccaccagggaatatagttatgggtctgttaaatt

SEQ ID NO: 447742 - DNA, 468 bp, Homo Sapiens
  misc_feature (452)..(452): n is a, c, g, or t
ctaatttataatgaatagaaatttatttggctcacgattttggaggctgcaaaatacaagatcaaggaaccagcatctggtgaggaccttcttgttgcatcataaacatggtggaaggaatcacatgggcaagagagaaaagaggaccaaacacccccttcataacaaacccactcttgagataactgcattaatccattcactccgccctcatggcctaatcacctctcattgggccccagatctcaacactgttgcaatggggaatcaagtttccaacatatggaactttgggggggacacatttcaaaccacaggcatatttcatcttcaggcattattccccacaaacatggggccttttaacccagggaaaccttagggtttttgtgggggtttgggggaaatcttctaggtggaccaggaggggaactgttttccaccgggggggntttagttttgggggtt

SEQ ID NO: 447743 - DNA, 1006 bp, Homo Sapiens
tagggaactggtcagcccaaggagcatccagtcagtcatggcgattcaatctggtggaagcccccagaggccccaccttccctcatacattgcggaacatgttatcaggggagacctgcatggattcccaaagagggaactaacacgccccagccacccacagagagaatacaggcagtgacgtgggacttggatgtctgagcctaatttgattgtagtttttctctcatcagttcggtgatcaagttcatcttcaaggcaagtgtaggagaagactgatcttgtcttctgtcaagcacatagttttcaagtcctccggccttagggaaggaagctggaggtccaagtgacaaaggctttgaaaacgatctaggaattcactaacaagaatagcaggctcatccaggggcaacatcccaaatcggtctggggatgggctgtctggccagaaacagaacttctcatgggcagtacacaaggctttcttcagctcagcacatcgttgcttatatctgtcaaagtcaaaagctggttgtaaactggcacagagaaaagcttgacagctagagcacttgagcatatcacattccactgtgacccagccatattttgcacagacgagtggagacagctcaaagggcttacctgcccatttcaaagaagaaaatgtttccactctgctaaagaaggcttctttgcttgtagattccaatgaaggttgttccgcttggggtgatccattaactgactgggatgtggcagacgtgtccttcgcgtccacgcctccctcttccggggcaatcccctcatctatcagctgccggattttctggggggtcccttctggggagcgaactactgcaccccaattcttttcaacccctacggcaaacgcttgtccctcacagggcgccgccatcattggtccgctgccgagttgcttccccgagagtttgaaggcaaacggaacttccgtcctgggaggttaatatccgcctcttgaggc

SEQ ID NO: 447744 - DNA, 2366 bp, Homo Sapiens
ggggggcttccaggagttgtggacccaatcccccgcttatttgggaagagggtcttccccactgtttcgcgccccagaattggtcttttccattgacaatcttgcggtgcccgggttcccttccgaatagcaactgggcacgttggcggcgggggccctaattgttgaattatttcggaagctctccgcttgtggcacttcccctggcgccgggtaaggactccccccgttaaaatggccctcttccaggagagctcccaccttccctgggatgttttggtttccaggaaacccgcctccgggggtttgccccctcccgggggcggttgtttttgtaaattggtggtagggaattcccccaaaggccctttaggttcaagtgggcccaagggatttctcccctaggggaaaaccgggctattgggccccaggtttcccctttaccctaccggggggccgggggcgcccaaatcggaattggtctaggaaaaactttttcgaagggcccgagggcggcccgacacggcccattaattgtagttgtgggttagtttttttcttagcaaatattttattaatacacactgtcatagtcctaggatagaagagtcctcagaacactgctccacattgaagatgctgaaatgggtggtcaggtccttagtcttccttctagtctgttaaccccacactcctttaacagaaccatgcttgctgcccttaccctgtccacatccctgaaaggaaacgggtctctctcagccagatgcagatagttgacactcactgcctttgctatggcagggggctccttatgattaacccagaacaggaaaaacttagtgtcagctgaccgaaaggaactcagccttaatttttcaaaaagtcactctcattccagctatctccaggaaggcgctggagtatcttcagcatgagcacagagattcccactgccgaaatattcggaatactttccttgatttctcagagagactcatggagtccgtttcagctggctggctagactgtttgtgcgccaagaggatggtcagcactgctttccagcctggctctgctggggcgctggcatctggttcagttccaccattctccctgctttctttgccaagtgtgatattcacccaagggcaccagtctctatgctgagaggtgggatcaaagaagcttcgggaagatgtgtccgaaactgctggaggagcagaggcgagctcgcttggctttccgcagagggctagatggtacctccaggccaggggtgtctcctgttcccatgcttcgggtcactgggcgagttctggtggtggggctagcagcctctggctcaggatggtcaacaggactggaagagtcccagctccgagttcgagagacaatgggaccagggctcttttcagcctgctctgagcctggggagaaagtggcatcctggctccgggtcatcatcctccgaggagattcaggcaccagaggtaagcgctctggtcgcccctcaaggcctgggattggggagctggtcaggccaaaggatgcatccaggtcagtcatggacgattcaatctgctggaagccccagagccccaccttcctcatacattgcgaacatgctatcagggagagctgcatggattccaaagaggaactacacgcccagccacacacagagagaatacaggcagtgacgtggacttggatgtctgagcctaatttgattgttgtttttctctcatcagttcggtgatcaagttcatcttcaagcaagtgtaggagaagactgatcttgtcttctgtcaagcacatagttttcaagtcctccggccttagggaaggaagctggaggtccaagtgacaaaggctttgaaaacgatctaggaattcactaacaagaatagcaggctcatccaggggcaacatcccaaatcggtatctgtcaaagtcaaaagctggttgtaaactggcacagagaaaagcttgacagctagagcacttgagcatatcacattccactgtgacccagccatattttgcacagacgagtggagacagctcaaagggcttacctgcccatttcaaagaagaaaatgtttccactctgctaaagaaggcttctttgcttgtagattccaatgaaggttgttccgcttggggtgatccattaactgactgggatgtggcagacgtgtccttcgcgtctacgcctccctcttccggggcaatcccctcatctatcagctgccggattttctggggggtcccttctggggagcgaactactgcaccccaattcttttcaacccctacggcaaacgcttgtccctcacagggcgccgccatcttggtccccc

SEQ ID NO: 447745 - DNA, 683 bp, Homo Sapiens
ttggtctttttggctggtggctgatagtctgggtctttttgccaactaggatcttcctggggtggaagttccccttgttctagtgtctccacctctccattggcccccactttaaccacctgaaacccttcaggcaaaggtagggtgtggcatatcatgggttcactttccgcaaggccctctttagacacttcattttcataagccccctgaagttcttctactgaagtggtagcaacaggtacagtcacaggaacaggtacttgaacaagctgaagttctcctatgtttatgggctgttcctccatatttacaacctgtaaagttataatctgggtatcgtccacagcagcctctgcttctggagccactgtgccctccattacttcagtcttcatctgaagaagggtggggtccagctgttccatcatcaccatctgtacactgctgttgacatcctggaccacctcacccccatccgtctggttctggggtaagtggcaggcatcttcttcctggcccccttcccggcgtctctggtaagtctttctctcctttcctttaataaaagtttcggactcctccacaatggcttcgactgcatcaccttccatttcccctgcctctccgtggctgcaaagtcagtttgaggagggaaaatagaacccagctctcaagccccc

SEQ ID NO: 447746 - DNA, 570 bp, Homo Sapiens
  misc_feature (99)..(108): n is a, c, g, or t
agaccaatacggtaggtacgaggctgcgtggtgaattcggcacgagggactagccttgcagtgttttagactgtttgaaatactgtctttagaagagannnnnnnnnncttcttaatatcaaacaaagaactgctgctattcctttgggctggcgcagcaggggccggtgaaatgcaggctgacgacggcgcgccaggggctgagctcgccccggtcggcgacgcgcacacaccttgagtgacagcgacctcttctctacaggttttccccgcgggagcgtggccctagcgggcgttcggttttctttggaaatcgcggagggggctggccgggcgcagcgatccccaccccgggactccagccccggccgtgcgcgtcgccgcggacgggctctgcgggccacggggaaggtgcgaggaggcgcgagcaggctgtgagccgctgggcgctcccgcgagcccgctcctctccgtcgggagcagggcaaaggcgccaggaacagggcagaggcacagcgcccaccgcctctgcggccgcctgatgtgcgagcagcccgcgacgaggcagtg

SEQ ID NO: 447747 - DNA, 510 bp, Homo Sapiens
tttaaatttcaaaatgcagaatttattttagcaacaattttctaactccaatgaataataaattaacaacgaaagaggagcaaaaattattccatttgcttgaaaattgttaaacatctttctataataaatcatgagtaaagtcaaaagtaaaaactgaatgtataaacaaattggagctgaaagacaaggagaacaagatttataggatgtggtcaaagcaatgaaacggaagagttccctgattccccttgcagggcgtgcgacaggggtgtggctcacctgttcagtagccccctctgcagaaaccccttgcgagagggggagcacgcagatgggcaagtgcagaggccggggtgagggctttgggctctggctctgcggtagcgtctagaggtgggtgcctgcaaccccagtgttacaaagctctttcagcttggccaccacagacagctggagtgttaaccagctcaatggaccttctgctttttcacaagggcaaaggaccag

SEQ ID NO: 447748 - DNA, 685 bp, Homo Sapiens
  misc_feature (93)..(93): n is a, c, g, or t
ttttattgagtggtggaaatggctttcagcaggatggatggggagctggaagggtggggatggatgaagtgggaaggtgatcttcccctgganttgggccgcccaggggctggactccgctctgactgccccgagcccaaaacatctctcggtgtccagacgtccctcctcttctctctttctctgctacgtcgttttgccgtcagtcggcttgcctcgtatctcctcacctgctggtatgctctggaggttggggtttggggtttatatgggggcaggatagggggcgtggtgggtcaaaaggcaactttttgggccccaaacagaaacgcctcttctcatttagggccgcgggtatccaggcttgagggtggggccttagccagggaaccgccctcttctactcagtatttccgtctcctgttcgtgtcagcaatacacagaagaaaatccattccttatctcactaaatgcagaaactactgggagtgaggctgccataaatctcttctggagaattttactggccataaagaagacagagaagaccgcttgcacctgcccgcggctccggaagcgctgcggccccgaccggaaagcccccagcatcgcccgaaggaatcgcggctggcctgcggctccggcccggcctcgggtaccacgcgcctaggggaagatcccggga

SEQ ID NO: 447749 - DNA, 664 bp, Homo Sapiens
tttgctagttcacagaaagaccatttttaatatgaaaagagaaaaacaatttgaaggccccacaatttgttgtgtaacaacataatttcaagtaaagtgaatgtgattaaaacatcttgatttcacaaagccattcagaggaggcttcgacaaacgcaaagcgacccaaaccctggagggtcacatcccggctgctacaaacctcggcggggcggccccgctcttgcggccgggacagcgcagcggcagcaggggccgcaggggacccgcagattggcacgccgctccccatccccgcagcgcgtctgcaccggagactctgcggggaattgtagccggagggcgggccgggctccgaggcgctgctcaggcattggggtttgtcctcatgagctccacgtcggcgtgcaccatctccctcaccagctcatcgaaagcgacccggggcttccagttcagcttctgtttcgctttggtgcagtcgccctgcagaaagtccacttcagttggccggtaattcttgagatccacagtcacgtgaactttgccggtctctttacatctgcccacttcattatcattctttccttcccacacaatggtttttccaagtgcaagaatgatttctcacaaattccccgacactatggaccctcccagtgct

SEQ ID NO: 447750 - DNA, 410 bp, Homo Sapiens
gcagggataaactgggtttttattaggaatttattataactaggactcattaaggtcttaggccacttccatgtcaagaaacacaggggctctttctaacccctggatcctttccttcctcctcatttgagcttcacgccctcaagtatgaccaaaggttctgtcattccactcctgcagttttcattacttcaatatgaggaaatcagctgtcacccggtttgctcgtccttacagacatctccctcctcttcctctcttcctttccagggaaaatgtcttcaagtttcctctaccaaaccaaaacttcaccccacttcttttattctttcctcctctcttctcaaaacaaaggggttgttgctgaccagcccagggtttcttatttggggccggatcattcttccttg

SEQ ID NO: 447751 - DNA, 329 bp, Homo Sapiens
gtgtgagccaccatgcccggcctgcccagtttttaattgggttatttggtttgttgctgctgagttgtttgagttctttatatattaaccccttatcagatgtataggttgcaaatatattctcccattctgtaggttgttgggctctcttgattgtttcctttgctgtgcagaagctttttagtttaatttaatgccatgtgtctatagttgcttttgttctctgtgctttcaaggtttaagccttgtctagaccaatgtcacagagcttttctcctatgtttttttcctactattttcatagtttccgatcttacatttaaatctct

SEQ ID NO: 447752 - DNA, 439 bp, Homo Sapiens
  misc_feature (393)..(393): n is a, c, g, or t
  misc_feature (412)..(412): n is a, c, g, or t
ccacttggcagtatttattagacaataaatactttaataaattgctgcataacacactgagaaaatgaaagagatgtggatatgtggcttttacaagagtgaaagataagttctctagaatatctgtgcccagtggatacaaagtgaaatctagataagggcgtggccacatcacccccttatcaaaacacacggatgcagtacccagggccagcccagtacttctaggtagggtgggtgtgagtcctactgaggaatcgcaccagggcctttcccggggcagagtgtttggtttttgtgtgttactgcacttgggggatgggagatgtttgattcgatgttgggggtttgggaagctggggctcctgggggatccatttcggggcctgggtngccagccaccttcattccnggaggcttagtttagtttaggaaggtt

SEQ ID NO: 447753 - DNA, 537 bp, Homo Sapiens
  misc_feature (463)..(463): n is a, c, g, or t
  misc_feature (508)..(508): n is a, c, g, or t
ccacttggcagtatttattagacaataaatactttaataaattgctgcataacacactgagaaaaatgaaagagatgtggatatgtggcttttacaagagtgaaagataagttctctagaatatctgtgcccagtggatacaaagtgaaatctaggataagggcgtggccacatcacccccttatcaaaacacacggatgcagtacccagggccagcccagtacttctaggtagggtgggtgtgagtcctactgagaatcgcaccaggcctttcccagggcagagtgtttggtttttgtgtgttactgcacttggggatggagatgtttgattcgatgttggggtttggaagctgggctcctggggatcattcgggcctggttgcagccacctcatccggaggctagttagttagaaggtgaaggtgacttgccattgcttccttctcttccaggcttagcgncctttccagaccagcttgctcccaggaggtcctaagcaccaggtnttcgtagccttttttttgggaagcaattg

SEQ ID NO: 447754 - DNA, 493 bp, Homo Sapiens
gccgggcagcgggagcggcggccgcgccatgtggctgctggggccgctgtgcctgctgctgagcagcgccgcggagagccagctgctccccgggaacaacttcaccaatgagtgcaacataccaggcaacttcatgtgcagcaatggacggtgcatcccgggcgcctggcagtgtgacgggctgcctgactgcttcgacaagagtgatgagaaggagtgccccaaggctaagtcgaaatgtggcccgaccttcttcccctgtgccagcggcatccattgcatcattggtcgcttccggtgcaatgggtttgaggactgtcccgatggcagcgatgaagagaactgcacagcaaaccctctgctttgctccaccgcccgctaccactgcaagaacggcctctgtattgacaagagcttcatctgcgatggacagaataactgtcaagacaacagtgatgaggaaagctgtgaaagttctcaagaaccccgcagt

SEQ ID NO: 447755 - DNA, 1208 bp, Homo Sapiens
  misc_feature (200)..(200): n is a, c, g, or t
gagaagcctttcctacttctgtaaaaagaaactctcattccaaaggaaagaatgggaggctgaagttattgaaaatgagatgggaaatgggaagatagtcactttgcaactccaaattccaggtctgatgcttagggtgttagtcattaagcaaattcttcctgataaccaattacagagaggaaaaaagagagtaagtnttttactgccccctacctcctcctcccccgtgccccgctccttacccccaaccaccagtgaaggtgttttagttctccccagccacctgagctaggggcaggagaccttcccttccaatagagttccttggtgaaggtgacttcttcatccactggatgctttcccagggcagttttgttgatcctccaagaacatcaagtcactgtgtaggaatagctcccacagaagtgccgagtgttaaaagaacccttcctcatgacctgatgggatgggcggcagtgtgtccacacttgggcctgacgttatacttggggaaagggtggtagtctgagtgtctcagagcagggcactggctaggtgtgaggtttcctactgctctgtaggctgctcatgctggagtcctgagctccaccaggagtccctctgggctgccgagcaagtggatcttccaaggggcccatcagcctgctctgcacaagagttataggaattgtagagccccagcacaacagtcaagaccagcatcgctgcagccatcatccagatcacttgccagtgctgacacagtttgggatacatgacttgtaagaaatggaccaattcttcaagtttgctgcttcttgggcccttttcctcttcctcagtttcttctacctcttcaggttcctcaggactctcactcttctgttcttcctcctcctccttcaggtcttgaagttctttggtcttctttagaccttcttggaatcccttgctgtaggcttcttcctccatcctggccttggtctcctgactaagctcctccaggcagctcagggtcagcgcaggagcagaggcttcacaatctgggtccccatttgtctttccattttccaaaagtgcaggcagtgctgaagtgacaggtaggctgcctttcccattgggtgatccgacaaggctggtaaggagggatggatgatgagctggagtaggcaggcgatcaggcataaataggaccaagacgtacc

SEQ ID NO: 447756 - DNA, 525 bp, Homo Sapiens
caagtgggctcctcgtctttatttaacatccagtaaaacgcagggatcacaggctgctcggagttctgggcgtaaccactgatccagacaggaacaaaacatgccgggcccccaggcacccctcctaccagccctctaccaggccatccccaccgaaccacgcacgcgctctcagtcaccacagacctcgttccctcctagtggttcacatgaatggcgttgtacggcagggacacgtgcctgttgtcttccacctggcgtgcgtttctgagatttgttcccactgtcctgtgcaccaggcgaccgctccttttcatttctaaacagtactcggttgcgcgtggatctatggttatttatttatctatcctcctgttgatggacgtgcgggctgtttccagtttggggctctcgtgaagaaaactgctaagaacacttatgtaccaatctttctggagacatatgttttcatttctcctgagtaaatatgcacagagtggcatcgctggggcacagggtacatgc

SEQ ID NO: 447757 - DNA, 713 bp, Homo Sapiens; identical to SEQ ID NO: 122193

SEQ ID NO: 447758 - DNA, 458 bp, Homo Sapiens
gcattgtatgtattacagaagttagaaacaaacacctggatcaattgtaaacataatcctgaattacagtattttccataggacaaaacacagcaagacattttctatttagacaggcaactttttgatatagagcttatttatactgaagaatctggaacaaaacacaggacacagtactaatctgtcaaatatactatgaaatgcatagtctccacttaaaatgctgaatgacacacacgttttgcaagcattactgctttccacaaaaactgctgaataggagttccgtccctgccaagatcagtgtttaagagatactttatgatgctgataagtattattggtggtggtgtgttcagaaagtttgtcactcatgcagatgtctgaaatcttgttccgaatccatggaacatggggtggaggccagctcccccttttttagatgatcacatagt

SEQ ID NO: 447759 - DNA, 711 bp, Homo Sapiens
  misc_feature (116)..(202): n is a, c, g, or t
  misc_feature (231)..(255): n is a, c, g, or t
  misc_feature (257)..(367): n is a, c, g, or t
gaataagacctgcaggctcctcattactgttccttctatcagcaacagagctgctactttatatctgtatatagtttgcttttttttggtaggggacagagtctcactattatccnnnnnnnnnnnnnnnnnnnnnnnnnnnnnnnnnnnnnnnnnnnnnnnnnnnnnnnnnnnnnnnnnnnnnnnnnnnnnnnnnnnnnnnccgtgggcacataccccatgcctggctannnnnnnnnnnnnnnnnnnnnnnnngnnnnnnnnnnnnnnnnnnnnnnnnnnnnnnnnnnnnnnnnnnnnnnnnnnnnnnnnnnnnnnnnnnnnnnnnnnnnnnnnnnnnnnnnnnnnnnnnnnnnnnnnnnnnnnnagccggccagagctgctgcctttgacagtccctatgagctgggaaagtcaggatggggagacagaagacttctgtgctatggagacttggaaagtgacataacatgtttggctcagactccccgcctataaaatggaactaaaacactcttgttttaggttaagaaactagaacagatctttgacatctctaatgagccctagattattcctggtgtcagggagattaggaaacaccttcatataccgtactctattcttgccaaaaacctcaatgaatgcttaaagtcagatctattcatgaaactgcttacatacttctaaataaagaggctattcccattg

SEQ ID NO: 447760 - DNA, 373 bp, Homo Sapiens
  misc_feature (353)..(353): n is a, c, g, or t
ttttttacgaaaccaggtttattaaaatttctctacaagtcagaaacggccatctcactgttcacatatatacacgtatgtacaggaagaacctagtgtttctagctttcccggcagaaggccctgccagcccagagtccttagtcggataatgtatcacagatacaacagtcgagcaaccacgagagcgttagtgcgacagaggcctctgtcctccctcttctcaaagtcccatgattctgtcaaggtaatattgccaataatcattcacatttcacgtggttttagacacgcaggttattcagacagacacaggacaacaaaacaagcctcaaagccaggacaaaacaaancaaaacagaatcgaacatag

SEQ ID NO: 447761 - DNA, 913 bp, Homo Sapiens
ccgagaacaagtgcactttattggttctgatacagaggagctgccagaaaagccagcaggcggctgcggcacccagccctgcccgaggggagcaccaggtctgcaggcaccgggcctgatccggagctgccaatcagcaggcagccctgcctgcacagtcctcttgggcagcccacagcctgtggccggcaagtccctccgtggaggcgtgggttcccaggtggccagtctttcctgcgcgaatggggcttctcacctggccacggccacagccacagtgccccagcctgcctagactccacgaggccccggtatctccaggacagctaaggctgctactcaccacgggctgtggctgccgcagagaccccaggccctcggcctctctggcctgctcgggcccacatcccgctgggcacagtccaggcagcagggcgggactggctgcccacgaccaccctgcttgcgccacgcctggtgctctgagctggccgcctggtgtgggctgagagtagagggatggagcttcctccagtggccccagcatcaacaggtgcttctcgctgtcctctgggccaggctctggcctggctcctgctccccgacacgttcaaaggcggtggcagcggcccagagagccacgagatccagtgtgcctgcgcacgcatccagcctgggcgtctgtgggtgtccactcccggttctacagtttgagtcgggcaccctcagcttgttgtggagccctctccctgaatggcttcgtgccagccttgagaggcccatggccggggcagtgactgcctgcaggtaggacctcactcggcagggtgctcttcttgccccagggtccgaggggcaggcccctagctcccaggccacctgagacctgcccactttctggttagaccgtgac

SEQ ID NO: 447762 - DNA, 851 bp, Homo Sapiens
atggacctgcttttgaaaagcactttaattagataatgtatttggactaaatcacgaggatgcccagtgagagcttctagctgatctcagaggaccagagtgactgagggtaaagtgtctcacagcccatgctgaattttctgcattttaaactgatactgcagtcattggagagagagctcctcatttctcgaatgaaagatgagatatattcatcctcatgtaccacatctgtcttagtgtttgcgtctggggtgtgttatcaaacagagcatggtctacatcccactgtgtcaaccagaagagccaagtgttatctcaattggcccagtgtttctccaggctggggactgttaagggctctaagggaatgtagacagagtctccctgttattctgacttcctgcttgatgagctttcagttcctgtttttgctattgtttcctaaatttgacctacatattacatgggtgtagtgtgttgaggcttttcaaagaagggtctagtgagctaagtttcatcttctggtactcattgatcaaactgacctttctattctcataagcgtttctacccaaagttgtgtgtggaaggagtgtatagcagagaggaaatccctttcaacagagtcagctgctaactgatttcctataagcacactggattaagggcagccacagtggtttctactgtatgtatgaaccgaatggaggaatgttttcaaagattgatttggtgtggattgcaattgtaatggaaggcataacttgggatcccgggctgtaacttgctcttttgtttcccacccccctgacatgtatgtgtgctttaataaagctttctcacttgtc

SEQ ID NO: 447763 - DNA, 643 bp, Homo Sapiens
  misc_feature (425)..(425): n is a, c, g, or t
  misc_feature (593)..(593): n is a, c, g, or t
ccttgagtaatttttattcaacagggtgttttaagtgggtagacaaacaaacatctgaatttaagattaaatacacttctctcagggaagggcatcctggacaggaagaccatcttcttggtggatcttgcctctgcagcctccagtggatggagcgatgtgtgagtgtgagcacagtgggcctggcaaggtgaggtccggcagcagttcagtgcatcgaggtttgcgtgctccagaaagccaagctcagatcagcctggatggggacctacatttccgccacagtgcttctggcagctgaaggttctgatcttcccttgtggcgcagatcctgggaggggaggatcgtggtcgctaccattcctcgttccatctaggaatgaggtctctgatcttatttagtccttccaatgtccgggaggcanagagtttggtgcagatcctgttggctttgtttcctaggtgaggagagaggcaccactgggctataagataaagggcctgccctgggccggagatgcaattggctgaagatctggctgtgtccagagcccagggtgcctcttgtccagtccagagcacagcaaggcccnggccatacctcacagtcttcggggccaggcttcctggggttgctttcttc

SEQ ID NO: 447764 - DNA, 905 bp, Homo Sapiens
ttctttaaaccttaacccagagttatttttattttccagaacgtgttaggaactagtacttaaataatctcaagtccctgaggggccagagatcccaccatgcaaaatagcaaacagacccaagacttggggagaggcggtgagtgcatcagaaatggatgggtacatctgattcccaccacgcggggctcagcttagttagcaggagaccttcagactgagaaaaaatgcaagtctttttttggcctctaatatctgggaaggatggagggagctcaggagacacagaaaagatggcgtatgaatcctgtccggcctgaacgaggctggagttgtgcctctggatagcttcaagcactgatcagattgtcagcccccgctgcttgaacagatgctttagagcctcttccagttgccggtttgttccctgaagccccttcaccacctgcgctgcccactcgaagtattcctggactcgatgttctgaccatccctctggggtgcagcgattcaggtccctcagattgtacagcttgtctgccagcttcaccagtttggccccggggctactgtggggcgcttgctccacctgcagcctctttctctccagcttgggcagagtcttgtcatctgttacctcctccaccaggcgccgcacttgtgccccaaagtgtagctccacctcatccagggtggtgtctgtgtcctccaccgtgtcatggagcagggccgcctgtaacaccacaatgtcagtgattcccgcctcgtgggtcaggatccgtgccacaccgatggggtggttgatgtagggggtcccctcggggtccttccgccgctgctgccggtgcttgcgagccgcgaagtcggcagcctccagcagctgcgccgcctcagagcccatcccc

SEQ ID NO: 447765 - DNA, 993 bp, Homo Sapiens
gttggtctgagaatgatggacatttagacactggcgccaggtttgcgcctgaccggcgccacgcaggggtgggcggagcaaagacacacaggtgggctacaggtgtcacacggcaccagccagggcccggggtggctggggtgaggatgggtgtttggccagtgaccaggagtcaggtcaagtccaggtggtcagtgccaggggctccaggaggggagggcagtgccataaccctcctggtgtccagcgtcaccaggcggtcgtcacagaaagcaacctcggcccggggcccgggtctgcagcaggtgggcagggtcagcttttcttccatggcgggtggcattgtctgggccggatactggctctcgacccctgggcatgcaaaggctaggggtggtgctgtcagtcacaccgttgccaccaaggtcccctgggtcggctgaggcttgggatccaggcagcggtggaaggtcgggctgctcaaggccggtatgtaagcttctgccctgggacccagtggtgatggccgccatctgccccattcccacagggacctagtcagaggtcgcacacacaaaaggggtacctggccctggagaaccaccagctgcccggggtctgagaacactcaccctggccgctgggccaggcctgccaggctcccggctggtccaacaccctaaacggtacagagcgctgcaggccctcacctcatgcttctgcagcgcttgagggtgaaggtgtctccaaggggacgctggccagatgcatggagaggccggccaatcttagggccacagaccccccctggacagcagagggtgttggctcctgcagtgggcccgagatactaaggcacgaagctaacctaagcccagtggggtggggcggggcaggacaggcttggagagctgcgccccaggcctgcaaagcacagtgaccgagcaatggcgacggtctgtctgggacaattcggcacaggatggaggtgcc

SEQ ID NO: 447766 - DNA, 450 bp, Homo Sapiens
cagggtaaggcacgtagtgctccgaagccatcccgggcctctggtcatttctctgtggagctggttcgcggttacgcaggctttggcctcaccttaggtgggggccgggatgtagctggggacactccgctggccgtgcgcgggctgctgaaggatggcccagcacagcgctgtggtcgtttggaggtcggggacctcgtgctccacatcaacggagagtcaacgcagggcctcacccatgcccaggccgtggagcggatccgagctggaggcccccagctccacctggttattcgtcggcctctggagacccaccctggcaagcctcgaggggtgggagagccccgaaaaggagttgatcgcagcccagatcctggagggccggaggtaacggggtctcgcagcagcagcacttccctagttcagcaccctccatcccggacgacgctc

SEQ ID NO: 447767 - DNA, 546 bp, Homo Sapiens
ctctggactaggctccgggctgccacgggtcttcttgagcgtcgtccgggatggagggtgctgaactagggaagtgctgctgctgcgagaccccgttacctccggccctccaggatctgggctgcgatcaactccttttcggggctctcccacccctcgaggcttgccagggtgggtctccagaggccgacgaataaccaggtggagctgggggcctccagctcggatccgctccacggcctgggcatgggtgaggccctgcgttgactctccgttgatgtggagcacgaggtccccgacctggggccggtgatccacaatagtggcatgaggcaggcgactgtctgtgacctctatgtccgcagagtccagcacgctaacagctgggagataaaagcagtggagagggctgttgggggacatgccatggaaactacctaggacctgttccctgagttaacattctagcctcatctacttgtcttgcccctgcagctcatatacaaactggcccaccatttacgcaccatcccctcaagtaatctt

SEQ ID NO: 447768 - DNA, 470 bp, Homo Sapiens
tttaaactgtaagagaatggttttttaatggaggtagcaggccaagtgaaaaaaagattctgccccctgccttcctgggagattgggagttggcagccatcattcccaagctgatgagtggcatatgactcaccaaggtggtacaacatgggtgggatttttcaaggacaattgccagacctaaaccatcctcctcagaaaatggctttgaagtgggactgcagcactaggagagggcaaattcaagatcaatggccaataataagtacctgaactttaggtctataagcagaagggcatggatttcacctgagccagaaggagatgtgtagcaatagaagcaagaatggcattgtttcagaggaaggaaaagcagagcttggagcaggatgcctctgactaaccacagtggggaggtgggggtggggcagactgtgccttcagctccacagctggtctacaccaacttc

SEQ ID NO: 447769 - DNA, 827 bp, Homo Sapiens
tattttgtttacttatttttactttcattttatttcagagcatttaatgcggtttacaaatcaatcacatcttccaaaaacacactgtgttgtttttctcctcaaagcagtttttcatacattgcatcattttctgttcataacagtcccaaggactggatagggtcggctttgctgtctccattttaatgacaggaacttagatgtggaggccttacgctgtccaggaaggggttttacagacgttacttcgtttggtcttctcctcccaccctgcacggcgcaaagagcccatcagtttgcggaagtctggggtggaggacagtctggagtgacaggctgctaccagaccagtcgatctggttcgggctgtgacataagctaggggtcgaagtcaggggcacccgcacaggcggacctgcctggcacctagccaagggcgaatccacctttcccggccagccaccagggccttgaattggcaaagtatcgaatcctgttgtgtgtgaagcaagctcttcatgcgacaccttcagggcgacctcgggtcaagaactactcattgtgctgcttggacgcgccggggcccgagtcttcgtggatcggccaggccaggagtgaaaggtctgggagttcttccggccaagagcacccgaagagccactgggatcagaaatgcgccccggtggaccccaaaccctgcagccgggggcggggggtgtcgtggagtgtccgctcgccccatgccgtgaccgggacaaccggtacagcaaactcacatggagccccaagactctggatccccaagactctggatccctccccgg

SEQ ID NO: 447770 - DNA, 471 bp, Homo Sapiens
gcggccgcgcacgcgcggcggggggcgtggggctgggcccagccggacgcgacctcagcctgcggcggctaactgccggtaggcgtctgtgtgcgccgccaagtcggtggggcggggacgcgaggtgtggatggggggtcgccttgacctctgcctcagccagtagcgcagtctcggcctcgccgttacggagatggtgccctgggtgcggacgatggggcagaagctgaagcagcggctgcgactggacgtgggacgcgagatctgccgccagtacccgctgttctgcttcctgctgctctgtctcagcgccgcctccctgcttcttaacaggtaacgccgcagcgcggagcctgggcggcggcttttctccgaaggtgcagacgcccggcccgtgctgcttaaccgtgcggaggccgcgtagctgcgggactggggaccagtggggagagcgagctccgcagaggagcg

SEQ ID NO: 447771 - DNA, 1119 bp, Homo Sapiens
ggttctcgaatttcgccagaatggacccaagggagaagccggttcagtggcttttgtcaggtggactgtcatcgtatgaagatgataagcaaatgattcacagtatctggatcagctaggaaatccaaagaaggaaggaacacagagccagacagaatctctcgtataagtaaggtcagagatctgcagtctgttgctttaggaggcaaaatataaggaaaaagcagttcagtaagtttccttaaatagtgcaattcatctcttcgacttctcaaagcaacatgaagctctggaccatattcttctaaagcagcttgctgtaaaaactctgtattttttacttgtgaatccttcttattaagacagatgcaaagaaacgtaatgttattctcagttcatcaacaaaggattcatcatctgtcacatccctgtaccacggataaacaaagttttccaacactaattcaagaacctctgagagagatgcatcaaccttggaagaaattttcaggtctagccatggctggtagttttcaagtagcaaagaaggcctatgtcgtttacatttcactttaccactcacagcacagctatggacccttgaggaaatcattcctgaagtcctaatctgcttgggtttgtatctttattgtgaagaatatatttggtaagagagaatcaggtcctagtgagcagtagaatgtgacaactccagccacaaatgaccagaagatcattcaaatatgaatatacctgttaagaagcagggagtcggcgactgagacagagcatgcacggaagcacgaacatgcgggtacgtggacggcagatctcgcgtcccacgtccagtcgcaagccgctgcttcagcttctgccccatcgtccgcacccatgggcaccatctccgtaacggcgaggccgagactgcgctactggctgaggcagaggtcaatgcgaccccccatccacacctcgcgtccccgccccaccgacttggcggcgcacacagacgcctaccggcagttagccgccgcaggctgaggtcgcgtccggctgggcccagccccacgccccccgccccgctctcgacgaattcgagctcggccgatttggcctgat

SEQ ID NO: 447772 - DNA, 526 bp, Homo Sapiens
ttcttgtataccattttattgtggaaggaaaagagaatcaatgaattgtacaaatgtgaaggctgtaacaagttgtagaggctttttccagacattcctatgcaatgttctccacagtaaatacctgggggcagccaagagggaagatttcagataagtgcaaacagtgattggatgttatctacctacaatccctttagacatttttgagagaactctgtttaaatgttgtttaactctcccaccccgaccaatgaatccctacggaccagcagtgccctgggagactgagtaatgaaaacatcctgtcaagcttcaagacctttgggcagatgggactctgcagacccgtgggagcacaaaggactaaaaagctgcaggtaaccgtatttggtaaccgagaccacacctggccacaggataacttgcaaaattcccagaaccctgcttctggctcttaaagccattgcacatgtggaggctaatttctgacttcaggagatatcaggatggacatgtataattc

SEQ ID NO: 447773 - DNA, 621 bp, Homo Sapiens
  misc_feature (223)..(223): n is a, c, g, or t
  misc_feature (445)..(469): n is a, c, g, or t
  misc_feature (602)..(602): n is a, c, g, or t
agagggcagcagcgtggcctgaaggccagcgagcccaaccccccagggacaggcactctctggcgaaccgtctcgcaggaggaaaagcgtaaggctgctgtggtcataaatacattttatttcattagaaatgcataattacagtgtttaagagcatttcccctagaaaagtaggtcagcaataccccatcggaaccgagagctgggctttgcaaacacctgncctcatgacactgggacagagcacacagcaaagggctcccgtactcatgacactgggacagagcacacagcaaagggactcccgtctcatgacactgggacagaggcacacagcaaagggctcccgtctcatgacactggacagagcacacagcaaagggctcccgtctcatgacactggacagagcacacaggcaaagggctcctgctactcccctgggannnnnnnnnnnnnnnnnnnnnnnnngttataaacaccatagcaaattaaaaaaagctgtttaaacagaaaaatatcatagttcttgatttcccgcgcatatgcgacgctctccgcaccgtgcctcccctcgtgctccgacaccaacagcaggactcanacgaaaggggtctccggct

SEQ ID NO: 447774 - DNA, 512 bp, Homo Sapiens
ttttaaacttcatgtaactatttttatttcagtggattccaaagcatgagttgggctgcttttgaatagtgggagacgggagtttaccccgatcacagaaaccataccaactgaaagacaaatcagcatcttgctgggacgacccctcacagagctcctaggatccttgaagtgtgaacttcagcagctgagaggtaacaattgtacacaaatcacactatcatgctccaacgaatgatgtggcccttatgaaacaagatgttagaatgaattctttatagtctcagcgcaaaaaagattcaagtactgtttaaggtttttgtttggtactactttcttctcttcaaacagtatttcctgaggttaactttcttggaagaagtggaattaatggagttctcacattcagcccttcaatttatcatcgctgaattcttgagttatgctcaaatgagtaatacaatttgtgtttagaaaacacaaagtggaaaatttagagacatttagattat

SEQ ID NO: 447775 - DNA, 389 bp, Homo Sapiens
acctgtgtgaagatctctttattccttccccttccgactccccatcaaccagggtggcgaagaggggagaaagagaagagatggaacatgcaaaggccaggagcgaagcgggagaccacccaggagacagaaggagggcagaggctgggagaagaacaggaacagacaggatggggtcctgattgttggaaaagacagggaggccaatcccagccttgcaaatagcagcagctagaggttatttccagaaaaatctgcaaagtaaatacactgatcacccaactcccatatctctttgctgctctctgtggaagactcagacaaaccccaagaatgaatggccacagggccagggcaatggtggaaagggaggggcctcacctggcctt

SEQ ID NO: 447776 - DNA, 648 bp, Homo Sapiens
  misc_feature (23)..(23): n is a, c, g, or t
  misc_feature (138)..(138): n is a, c, g, or t
  misc_feature (142)..(192): n is a, c, g, or t
cccctcccctatttccaaccccnggtcccccgggatgagcccatacccccggaactggccccaccccactgtgtccttcccacgtaagggagacctttgccaaagggcatcccaaatgggtaggcaggtgacagccgnccgnnnnnnnnnnnnnnnnnnnnnnnnnnnnnnnnnnnnnnnnnnnnnnnnnnncgttatgagtttgactctcggggagttttgttgttatgactcttgtgtcttttgtcacaaaacaatgatatttgctaaacgatatatggaatttatttttgattggtaataaaaaatcaaatatgtataaatcctggtgaatctacaacttgcctgtttgttctgtcagtattcagtatgttgttgagataaaagtggctgtggctggctgtctcttgtgatgggacaagggcaataaaggattctaggaccattcagcagtgaaatgcaatcagaaatggaatttctaaatatagtcaaggctgtcgtcacaggagtgagagggacgtggctgctggcagacatacaggacagatgtgctcagctgccataagcatgagtcctgtgaaacagatcccatagggcccttggcttgtgagtactggaagggcagtgggcttcagcaaattgcccctc

SEQ ID NO: 447777 - DNA, 321 bp, Homo Sapiens
aatcgactacatgattgttcaaagaatgcagtgaaagatgccatgtttctgcaaatctgcaagggaaatggtatggaataagccaggggagagatttcaggaccatatctccagggcaaaagatcttttcttccctctctcctttgtgaggagcctgaaaaccttccatcgggtcgccagcgagtggccagtggcgggagagctgcgtgggagctttgagagccggctgcttctccctggcggttcctttgtgatggccttgaacagagcatgaggtgtccacagatgttgtacaggtagtatccttccagttcagggggg

SEQ ID NO: 447778 - DNA, 527 bp, Homo Sapiens
  misc_feature (480)..(480): n is a, c, g, or t
  misc_feature (513)..(513): n is a, c, g, or t
ttttttttaggttttgctgctttatacacaggaatgatttattttacatactagtcagttacaacattagcctgtaaaatgaaatccattttttaaggtctcataaggcagaataaacttcataatattatgctttcacattagccagtctgataaagcataaacaacttaagactatggtaacagtttaaaataaaatttacaggaacagggcactttgaagtcagctactgtgtgtaacttcacagttaacgttacttgggacatatctcatttcatcaaaggttatcacccagtgaaggcaaatgttcctttgatgcagacgcacaaacagatttagggttccaaacactgtattctgggttgtaatacatgcaagacagaccctaagttagaaaaatcttctgaaaggaaatgaaaaacaaaaagcagccagaaatgaaagcatttccaagccttgaataggctttcatgttaatngtgttttaaatccctcattccaggtaggggttngaggccggaggttt

SEQ ID NO: 447779 - DNA, 570 bp, Homo Sapiens
  misc_feature (128)..(156): n is a, c, g, or t
tgagtccaggcccccatcctcatgggtccagccacagctcctcctgggcatccgtttcatcctcaaatgtggggaatccggcttctatgactgacatacaactcgcacattttaaagatgttttattnnnnnnnnnnnnnnnnnnnnnnnnnnnnntcccaacccaagaactcttggttctgggagactgggagcagcttaggtctgtggggagggtagaacctggaagacagaaaagtatagggagcctcaagccctgggagggagagcaagagcagcctttccctagggctgagcctctctccatggggcctgggcttatccacttggaaaagacaggttgtgggggctcagcccccagaaaaaggcagggtgagcagttctggacagccctcaggcctcttgtcaaaatcaccaaccagctgggaaggagagggtggcccagcgctggatccagcctatcagcgccgtgcccgaaggcaaggttcagcccacgatcgggagcgggggctcagatagggaggcgtaccccaaagttcagcgagggacttaagcccattgaaaagaaag

SEQ ID NO: 447780 - DNA, 796 bp, Homo Sapiens
agcggagcccggccacgacccaagcggaggccgcgccgacgcctgcgcaatgtatgcggagagccaccaccgcctccggtcccgactccgatgatggcggacggcgccgcagctggcgctggcggcagcccatccttgagagagctgcgggcacggatggttgctgcagcaaacgagattgctaaggaaaggaggaagcaagatgtggttaatcgtgttgcaacccattcctcaaatataagatcgacatttaaaccagtaatagatggatccatgcttaaaaatgacataaaacaaagattagcaagagagcgcagagaggagaaaaggagacagcaagacgccaataaagaaacacaactacttgaaaaagaaagaaagaccaagctccaatatgaaaaacagatggaggaaagacagagaaagctgaaggagcgaaaagagaaagaagaacaacggagaatagctgcagaagaaaaaagacaccagaaggatgaagcacaaaacggaaacaatttacagccattctttatcgtactttggaacggaggagacttgctgatgattatcagcaaacacaagatggtcatggggaggctctgcaatggcgaattctgagagcaaaactgccaataaacgatctgcatctactgaaaaacttgaacagggtacttctgctttaatcagacaaatgcctttgtcatctgcaggccttcaaaattccgttgccaaaaggaaaacagacaaggagagaagctcatctttaaatagaagagatagtaacctacattcgtct

SEQ ID NO: 447781 - DNA, 485 bp, Homo Sapiens
tgcggcgcttggcacttggcaccagaagggccggggacggctcagcacactgtatcttatagtcagggggcaggaggcggatatgtgagagggggatcctgcccgtgtctccgtcgtcaaactccacggtgatcaagtccccatcgtcctccaggtccagtaaccctcggaccacagtgcctgggtagagacagcggtactgctggctccagtaggctgcaatcctggtcccttgtggcaagaagcgagtggaggctggcctcacatcgatgatcgcctcctgcagcaactgctccagacagtagatgtggggccggttgccccgctcaccctccaccaccacgcggtatatgtctggcgagtgcacggtctgcacgtgcccggcgtacagcagcttgtcatccatggggatgagcacacgcaggccgtccttcagctcatccttgtcgatgatgcaggagcgaggggccggggtcagcggccgc

SEQ ID NO: 447782 - DNA, 528 bp, Homo Sapiens
gcttttatccctttcacaagtttttctgagggcaaatatcatgtcctacacacccgtcagccccagtgcaatataccgtacacagcaggtgcccaatttgctatctgacaattgcctcttcacagttatttacacactgagtgtaacacatgtaggctgtgactattactttaataaatgacaagttatatcattaaagagcagagctttgctcatactggacttagtatttgatgttagattccaggaaacaaaggatagtttgagttatccttaggaaaaaggagggacattgttaagtaaaatttgtaaaattctgaaaatctacctggcctaccactaacctttttaagagaatctccatgtctttcctggatgtatttcaggaatgctgtggtccactgcagagttgtggccttgtcagtctcggcattgcagaacggcactaagagattcaactcatcacagcaaatgcggattctgcgcctatagtcaaaacccaaagtcatcaccgagagagaccggagc

SEQ ID NO: 447783 - DNA, 779 bp, Homo Sapiens
  misc_feature (21)..(21): n is a, c, g, or t
  misc_feature (739)..(739): n is a, c, g, or t
  misc_feature (760)..(760): n is a, c, g, or t
cacagcagcacgtgactcagngtcagaacaagggggtgtgaatataacgaatgaaaataaaattcccaaactgtttttagttaacaatttaacttgttccaattgctaaaggggcaattttaaaaggtaaataagtaaaaagccgtgtactttttaagattaaagaaagtacaaaggatgtcaattttttaagttatcatgttaagaaaacatgatggaatcagagcattgagaaaatgcttactaattattactaattaattattactaattattaagatggcttcatccccaaatggtctaagaggacattcatggataagcatttgcgtctagataaatatttttacaaaatgtgctctcaaagtccctactggagtccccgtccagcttgagtcacgcccttttcgagtcagactagccgggcagagctccagggttgcagaaggcgttgcacaggtcacgaaggaatggctgttcaccccccgaggattcctgttcagtccgatcacttgatctccatcgaggggctgctctgtaaactcccctgtgcaggacaggtcaccaaggagtccggtctggtcagctattcgtcggccagttttaccgcaaaatacgctctcaaattcctttttaagagaatctccatgtctttcctggatgtatttcaggaatgctgtggtccactgcagagttgtggccttgtcagtctcggcattgcagaacggcactaagagantcaactcatcacagcaaatgnggattctgcgccttctgcc

SEQ ID NO: 447784 - DNA, 531 bp, Homo Sapiens
acactcatttgttatcttttgactttgcttgtgtattttgttcaaactttatgttgtcaagccgatcaatcatttccttgatggcttctgggtttatttaatgctttagaaaggcttccccattccgaaaagacagaataaaagcgattcacccatgttctccctttcacggtttcaacttcactgtctctcccgccgccagagcccagcaaaactttctaatccgcgaggagcccgggaccccgctgcgctgggaagccgaggcagggcgccggcctgcgggggtcttcggaaacgttcccggttcccgcggaagatcgcccggcccggagccgcgtgggctgtctgtcctcgcaggtagcagtcactcggagcagaacggtagttaggaaaaattttcaagtctccttcggctgcggggtcgcgccattccaggcggtgccaactgggagctccttcacccgccccaggccgagaaacgcgctcccagttggtcagggactaggagaggcctcgcccgccggagatgcg

SEQ ID NO: 447785 - DNA, 523 bp, Homo Sapiens
gagacttaaacaaataagcatttaatttttgtacagaaccagatgctggagggaatagctgtggatgattgtcttggcctttccttcatggtagcaaggtggctgccccagatccagccatcacacccacatttatagcaggaagatggggagtgggctgcaaaaccttccccagaaacatctctattggatttgcttagttccctctggccagagctggtcccatggtagcccctaacagcaagaaaggctgggaaatgagcaaaaaggatcatcacaattggctgggacccgttatgctccatcatctgggccccggcatgctgaggctccaaacaaaatctggtcctgttcgcaaggggtggggagcaaggagctttgggagactggttggcaacaacagcaggtgctgcagaccctggattctgccatcattccacccatgtcccttcaggaactcgggacacagatgagggaggcaggagtgggcggcccagcgcttgagccccaggggaatgactga

SEQ ID NO: 447786 - DNA, 372 bp, Homo Sapiens
  misc_feature (197)..(197): n is a, c, g, or t
  misc_feature (286)..(286): n is a, c, g, or t
  misc_feature (312)..(312): n is a, c, g, or t
  misc_feature (320)..(320): n is a, c, g, or t
  misc_feature (327)..(327): n is a, c, g, or t
tttttttgggtttgacccatttttatagaaagccagctaccagaagtaatgagtccccagggccaaccacattggaggcctgggtgagggaccacccagcagggagcaagggagggatgcagacaaaggtagcagagaccctggcaacctccttccagtactcagcagtcacagctcagctggggagggacccagcnaacacactgggtccccagcacagtcttaaattaacccttcattaaaaaaaccaaaaagctcttaatacttcttcatcattctaacccanattaaaattcataaaacctaccccanaaacttanaattcanctttcatccttcataataaaataataaataataaaccacaaaatt

SEQ ID NO: 447787 - DNA, 895 bp, Homo Sapiens
  misc_feature (304)..(313): n is a, c, g, or t
caccttatttaatgatggtacaatttaaaatcttagtcaacttctgtagaaagttttctctatgaaagtaaagctgtttgaaaaattattatttttttacagatctttctataaaaaataaacatcttttgattgcttggatttaggaattcaatttttgtttcagtgaccaatgtcaagttgcaggctttgtgtgttgcatatttaatatttctactaccaccgtatgtcaactgggtaaagccttccagagctctctaaatacctgaaagacttaagcctttttttaagtaattaatacttnnnnnnnnnngatcctggcatctatttatgcaactaaatacttttcagaaatggtatataaaaggctacagtttaatatctgtatttttataaaagtatgatgaagggtttggggtgtttttatttgtagcagaggtaagaatatgtattcatataatctgcctacttttgagttctcatattaacatttagataacatatgaagtatggcccccttggatccttgtttttaagttactttcgatgtgtatacgaacaaagaccagggagaaacagaacttttaaaactataggctgctgtgttggggccagaaataaggtgacaagtaaagacttttataatacctaccttcaaaattagaatcagcagcactgtacaaataaagtgcctgtgcttcacctcacaccaagaatcttgcctaaccctgtcagagtgcctaatatcctgtggtgattatgtataatgaaacagtcttattttgtgctctttggtttcttaaaaggaaagcttgttttctttcctttatcattacagaggtatgtctttggttcttaaactatctgtctaaaataaagctgtaaaaaattaaaa

SEQ ID NO: 447788 - DNA, 462 bp, Homo Sapiens
  misc_feature (442)..(442): n is a, c, g, or t
  misc_feature (450)..(450): n is a, c, g, or t
ggaaggaaacagatatccaatttttaattaattaaaactttacaatgtattacataatccatggaaggagagaaaggggatgaaactgaaggaaccaggactctggaggatgcaggatgctgtttctctggatgagatgtactctgccactgtgctctctgggcactttcagatgatggggtctgagatgtgtcctcaggctgcatcagctgtcttcagtctccagaacagaaagagcctgacccaggggcatcttggtggccaccagaaccaggtttctgggagagagttcaggactgaagatgggcaggagctcagcatggaaaccctgttcctgaaggtacagcagccggtccagtagaataagcgtctccaccagtggggcaagcagtagagccaggctgaagaaggccaccacacggttctctggccagtggcttangcagccanattaatgcactg

SEQ ID NO: 447789 - DNA, 438 bp, Homo Sapiens
  misc_feature (414)..(414): n is a, c, g, or t
cagatatccaatttttaattaattaaaactttacaatgtattacataatccatggaaggagagaaaggggatgaaactgaaggaaccaggactctggaggatgcaggatgctgtttctctggatgagatgtactctgccactgtgctctctgggcactttcagatgatggggtctgagatgtgtcctcaggctgcatcagctgtcttcagtctccagaacagaaagagcctgacccaggggcatcttgggtgggccaccaggaaccagggtttctggggaggagagttcagggacttgaaggatggggcagggagcttcagcatgggaaacctgggggaggaaaggggcctgtttccttgaaaggttaccagccagccggtcccagttaggattaaggcgttttccacccagtngggggcaagcagttagagccaggg

SEQ ID NO: 447790 - DNA, 676 bp, Homo Sapiens
gctggtacggtccggaattagggatatcgtcgaccacgcgtccgagaaagtggtgacaccgccggggtgcggagggagtccctgagaacttctcccaacagccccaggccaatcttccctcagcccactcccctcttcgccagctcccaggtccccactcctgtaccgggggtggggtggggagccaggcccgtctcccgctgggacacacacaggggccgggagcggggacgggacccccgtaggcgggggggacgaaccgacagacagacggctgggcgcccgccccagcgggcaggcaggcaggaggaggcggaggcgggggtacgacggggagcactgggtctggggagtttcctctcaactatcgggggagaaactccccgcagccggaggaaagacccatgacagtgttttcctcccgggggccgtgctcccccgccccgcgtagcggcggtcgccgcaccggcgctccacctctaccatctcctctttctccagcacctcgggccccggtgtccccggccagcactatgcccatcttactgttcctgatagacacgtctgcctctatgaaccagcgcagccatctgggcaccacctacctggaacacggccaaaggcgcggtagagaccttcatgaaggtaccgactgaccgagcccgggcggcgaccc

SEQ ID NO: 447791 - DNA, 1244 bp, Homo Sapiens; identical to SEQ ID NO: 68923
  misc_feature (117)..(130): n is a, c, g, or t
  misc_feature (428)..(436): n is a, c, g, or t
  misc_feature (921)..(954): n is a, c, g, or t

SEQ ID NO: 447792 - DNA, 250 bp, Homo Sapiens
gaacatgcctttaatgcagccttgaacaggaattggccaagccttgccaacttgataaggagcaaaaaaggctctaaaggtgtatggctccccagatttctggagggcatccaaatgaatgagaacagggctgcaggtagtcacctgcagcatcctcctgggcacgatgacagagggaagtgtctctaccaagatccatcatgggggacaggttcccatagccccggacccacaacctaaaaacctggtt

SEQ ID NO: 447793 - DNA, 443 bp, Homo Sapiens
ctatttaagcaccagcccagggtgaggtggaggcgtccgaaaccctaaagggacttctcaatggggttcaaggtttcagtgagggacgcagggagggggaaactgcctcagatctgcaatctgactttgggaaggccacccccaggcctgtctgtgatgttgaaggccggagacccccaacaaatgccgctggtttgctctgaattccccaaaggcccagaacgtggcagttggggattgccgggtcctccattccccgcccggacacaatggccgccggcgccctgcacaaagactgggtgagggtgaggcgctgggcctctcctcaggtcaggaagaggggtcgaggcctgctcgacggccccacagctgagaccacgttttcctggggacaggcccaaagtggctttctggcgcccccgggagggctccggggccggggg

SEQ ID NO: 447794 - DNA, 465 bp, Homo Sapiens
gccagccctgccagccagggagcactgacggggtctgagggaggagggcgacaggtggacaggcccacagccccacactgcacaggaagggtcacgggacacttggacaggcaccctctctgttgaatcgttttggtttttgactgtttgccagtcaccctcccgttcactttcagacctaacccaaagttggctttgtgtcttgtgcgtggcagaactagactgactgagtctatgtctctagcacatctttccctcctgcctcagtttcctcacctgaccacttgggttcacataattcctgccccagcaacatcattggactgttttgaggaccagttctagaagcgaaattggaagtaatgagactaatgtgtgctgaccattaactgtgccaagcactgcagtaagtacttatcttgtataaactcctttaatcttcataacagtcctattttagagatt

SEQ ID NO: 447795 - DNA, 504 bp, Homo Sapiens
ttttttttagtctttagttcctttttcaacttcttctttacctccacggaggaaggcagcttggttttctcctcatacaccttgtggagaggttcgggagtgggaggagacactgacggagaagagatataaggaaagttggggggcatatttgaaggtgttcccagttttgctttacgtacaacctcatcaatggaggcatccattgtccatgagttatcggaacttgaggttccaccggaaagaggcagaggagtggatcctgactttgtgaaattgttcgcggaagtggaagctttgggagtagtacactccgggcctgaaattctcttagggctagtaaaaatgtctccttcagattccgatccagaagaaaattcgaaaggatctggctctcgctcagcacaggctcgtgcaatcacagcatcgatagaggcctcaatcgttttatctgctaccacagcctttttcggctgattctcactgttcagtttcccagcatca

SEQ ID NO: 447796 - DNA, 773 bp, Homo Sapiens
cgtgggcaacgggaccccgaaccgcggggccctgcgcgcgctcaggtgcacgccacacgcagacggcatcggacatgactgtgcgatcacgcacgccccggtgcccctgcggggaattcgggggcgcctccggacccgcgcgcgtgcactgcacccaccgtcggccccgcgcgcacccccgcccggagcgctcgcctgcgcgcgctcacgctctggcacacctgcatgcgcggacacgcacgcgcggacatacaggcgcgtgaggagtgcagccgagtcgcgccgcggccgggcgcggcccctttattcgcttcaggaggcagaaaactttctcagcgcgacgaccacgagcgccagcaccacgcaggtggccagcagggcggcgatcacgatggccgcgatagcgccgggccccagcgacccgccgccctggtccagccgctcctgcgcggtgctgtcctcgggtcctggcgcgacggtgggggctgggggaccggtgtccacgggctcccggccggggctggtgctctccacggggccttctcccgacggcagctcggccggctcgttccacagcgtgggcacgggctcctgtggaacatcgtctgcaaagccaaggagaggtgctggggccccaggtgacggggccgacagggacgtcaccccccacctctaggttaagcaagttgccggtagcgctgtgtgaggggtctgggctcagcgctgcactagccctcacatttcccaggctaagaagctgaagcccgtccgct

SEQ ID NO: 447797 - DNA, 438 bp, Homo Sapiens
  misc_feature (44)..(142): n is a, c, g, or t
  misc_feature (170)..(194): n is a, c, g, or t
gagatatttgccaggcggcttccctttcttagcttggggacctnnnnnnnnnnnnnnnnnnnnnnnnnnnnnnnnnnnnnnnnnnnnnnnnnnnnnnnnnnnnnnnnnnnnnnnnnnnnnnnnnnnnnnnnnnnnnnnnnnnctgggcaacagagcaagactctgcctcnnnnnnnnnnnnnnnnnnnnnnnnnggcaagagagttaaatgagaagagaaacagaagctgctaagagctttttattcccggcatctttagcttcagggagaattatggatggaactgtgtcccctaaaaagatatgtcaaagccctgatgcctggaacctgggaatctgaccttatttggaaatagagtctttttggatgtcatcaagttaagatgaggtcatactccattagaataggccttcgtttaatagactgggatattataa

SEQ ID NO: 447798 - DNA, 445 bp, Homo Sapiens
tttttcccaaacagtgtttttaattgaaaataaagctaaagcatgcttttcaacagtgcaaatttccataattttgatttactggttccatcatcacaacacagtacaccagcatggcccttacccagggctagaccctagcatttgcatgttgaactactttgattttaagtgcaaatatagatagtcacctctgattgtcacttgcagtagaaactctcctgctttatacacaggatggtctgaaaacacaagttttagagagatgcagaaaaagtttaaggtcataaaatccaagtgcctgagttctggtcccaaaaagccctgaaaaaactgttatttttcatttggggtattgcaactctgacccctcattttctttttcttggttgtatttactgatttgtcactatcaagagttcggccatgaaatattctgctatta

SEQ ID NO: 447799 - DNA, 510 bp, Homo Sapiens
  misc_feature (495)..(495): n is a, c, g, or t
tttagcatttcttaactgaaaatatattttcacagaaacaacaaagcaaaggggataaaaacaatagcgaccagaaaagctaacttaggtgaatggtgccactcaaaggtctttccgagggaagctcagtcctggcttgcgagagtcagccttggctcacctcataacggggctccaagctaaggcgtcaaggaagcagtcccactgcttctcgctgtcagcaagaccacaaggcagatgcccactgctgtcctctttccttgtctactttctcatctaagtgtcgtaagacagccctgcactggtccctgagtaacagagcagctgtcatgagcacaggctcattttatccgagagcattcttatctttgagagaaatgagaatatgacaaggagaactaaacagcagcaggcctagcctcagcagcctttctgagtgatgtctagtcctgacgactttgtgatttccaaagtcgtgaacacctccccacatgntgggtgaattccaat

SEQ ID NO: 447800 - DNA, 1273 bp, Homo Sapiens
  misc_feature (452)..(491): n is a, c, g, or t
  misc_feature (502)..(511): n is a, c, g, or t
  misc_feature (582)..(590): n is a, c, g, or t
  misc_feature (630)..(641): n is a, c, g, or t
  misc_feature (754)..(809): n is a, c, g, or t
ggcaagaaaggcgggtatattggttcgcagaaaacaaacgggcgggcgggagggtgtggccggcgcacttcggggttgatatattaatgcggcgggaaaagtggagggggaatgttatcggtgagggggcgccgtgttttttacccaccggcggtggaggaaaatttaattaacgcggggtggcctccccacaatatggaaaaaccgcgcgttcccgcggccctggtgcggttctctgcgcccccgcgcgtataggaaggggcgcgccatacccggggccgcgtggggggcatttggatgggggacgcgccacacctctcttcccctgcgggcgcaagcggggaaaggccgggcgggggcgcggaaatgagaaggggtaagcggcccggcggaaacgggccccccgcgtgaagaggggggcgacaaagaggaacgggtccgggaacccctcnnnnnnnnnnnnnnnnnnnnnnnnnnnnnnnnnnnnnnnnaggtttttgtnnnnnnnnnnaaactaaggaccttgttctcgtggtacggggtggggggggaaggaaaggtatccccatttgtctggttctnnnnnnnnnccgggcgcccaaaaaagaaggttcggggaaattttcttannnnnnnnnnnnccccacacaaaaacgcggcgcccagatcgggggggttggaaaaggggtctttcggggtccgtatattatcggtgtttgggcgttggcgtttgtgggattttttgtgcgggtcnnnnnnnnnnnnnnnnnnnnnnnnnnnnnnnnnnnnnnnnnnnnnnnnnnnnnnnnatgaggggaaaggcattttattaagaaagctttggccaagcccccgccgggaggagcccatcctggggcaccggccgaggggggagcagccctgctgggggcctataaatacatctcctcaggccactagagtcgcccctggaggtcccgcggcgtgtggggcagtgggaggccatcaaaaccagctgacagctgaggggcctgggcccggggcgccagggaagggaaggggtgggacggactaagcccctgaggagcggagaccagccctcctccccaggctggggtcaaccagatgcccgggagcctggccagtggaagtagccccgggctctattgggacggccaagggagggagcctccagccagaggcaccaggccctagcgggggagaggcagcccgggcagaagtgcctctggctgcaaccaatgagaaggtagccctaaccaagtccactcctggc

SEQ ID NO: 447801 - DNA, 326 bp, Homo Sapiens
cctgttactggtttttaataaatacagtgtagcctgagcgtgtagaccatcacattcacattaatctgccattcattcactaactcccacagggcaacttttagtcctgaaagctccattcatgttaagtgcactaaacaggtgtggtttttaatttttcataccatatttttactgtaccttttctgtgattagatgtttagatacacagatgctactgcgttacaactgcctacagtattcagtacagtaacatgctgtacaggtttacagcctagaagccataggctatcccgttcagtctaggtgtgctgtagggctacacc

SEQ ID NO: 447802 - DNA, 501 bp, Homo Sapiens
tttctttattttagacagtctcgaaacaaaacaaacaaaatcagagtcctctgcactgggaggaggcatgtggggggacccatgcctgcacttggtagtgaagaagaaagggagacaccaggcccatgtacccttgggcatactaagaaactggcatgtgtgggcagcagccctctctctgcgcatgcccaaaggtggaggtctttttggaaaatgttgaaaggacaggtgggtaggggtgtggatgacaaatggaatctggagcatgatatgggagagaccacagcagaaggaagatccccgccggggggagctccatggtgtgcattttggctttcagggtataaagggggaaacaatagggaaagacttggtgcaaaagggaaggaacagaaacagacagatgagaaaaggaagatgacagcattgcaagtgtttctttcaatccttgccaggccaggctttgtttagctaccctggtctcttcctgcataccccagc

SEQ ID NO: 447803 - DNA, 426 bp, Homo Sapiens
tttgccagtcacatgcttacctgcatttttaaagacagctttcaggtatttggggactacattattaccaaaccttggctttgggagattatacaggtccgaggaactcgtgtctactgcagacgaatgcaattaccccaccttcctccatacagaattgttaggaaatgtccactcctttgggggtgatttttctcctcaagttgtagccaacattttgtccgtaactgatttcagggcaaacatttctgacatcttcctccagctcagtctgccatgccttggcaatccagtttcctgtcatatgcgagccatccaagttgatgccaagtaagatttgcccagctcaaagtgaaagtgtttgcgtcttggtatccggaatcctcagccccagtagcaaagctttagtcattcaccttcatccaa

SEQ ID NO: 447804 - DNA, 240 bp, Homo Sapiens
gtaacagaaaaaagagtgaaatatattagctatcttttattctgagccaaaacttgacagatgtgggaaatcttcatatagtgtatgaaaatttcattgtacagggaaattattttcctctgtgtcttttcttttactataaagtgattcagaattttactgttactataaaattatgcaaagtattgtgacaaaactgcatcaatttgttgactattaaagtgctccttgaacattaaa

SEQ ID NO: 447805 - DNA, 334 bp, Homo Sapiens
  misc_feature (287)..(287): n is a, c, g, or t
cattttgccattttatccatttattatgtacaatattaaggcacaagtttaagcagcaaaggagaggaaaatctttggctgaccaacagcatcaatatttgctgtgggggacaggcagtgttcttggaatccccacactggtacacagacccatttggctgtatggccatgtacatcacccctcaatacagactgggcaatatgaagacgtcaaacgttacagccagataccagtctgctgggaagagccggcacgagcacggcacacttccaccaagcacagcgancacacacacacaagcaggttggagggcagcggcagcaggacagctga

SEQ ID NO: 447806 - DNA, 877 bp, Homo Sapiens
  misc_feature (813)..(831): n is a, c, g, or t
tttatactcgatattgagattggggagaaacccagctacatgagtaatggggggacttcggagccttaaagttcgttgtgcctatctcccaccttgaatgaagaagaggagtggacttgtgccgacttccaagtgcaaactttcgccaacctggttggcttgtccagcaaactctgagggccacggcgagtgtgaggtccacggaaactgttgacagtgatacaggtccttcaagaggagcgatcctgttaatccttatcacataggttctggctatgtctttgcaccagccaccagcgccaacgacagtgagatatccagtgatgcgctgacggatgattccatgtccatgacggacagcagtgtagatggaattcctccttatcgtgtgggcagtaagaaacagctccagagagaaatgcatcgcagtgtgaaggccaatggccaagtgtctctacctcatttcccgagaacccaccgcctgcccaaggagatgacccccgtggaacccgccacctttgcagctgagctgatctcgaggctggaaaagctgaagctggagttggagagccgccacagcctggaggagcgcctgcagcagatccgagaggatgaagagagagagggctccgagctcacactcaattcgcgggagggggcgcccacgcagcaccccctctccctactgccctccggcagctacgaggaagacccgcagacgatactggacgatcacctgtccagggtcctcaagacccctggctgccagtctccgggcgtaggccgctatagccctcgctcccgctccccggnnnnnnnnnnnnnnnnnnnttcgcagtaccactacctgctcccgcccggtggcaagctgcctccc

SEQ ID NO: 447807 - DNA, 1473 bp, Homo Sapiens
  misc_feature (1337)..(1337): n is a, c, g, or t
tatgatatggcaaaaatatttattaaaatgattttttttaagtttgaactttattggaaggagtccctctaattcacactttcatcctagataaatgggtaagaaccacatatggaatataaagcattgattttttaaaaaccacatagtagcacagtgaaagaaatgcaattctccagggtcttagagaattcaaagtggcatcttaggtggtctaagaaaccaattacagtctcatggttttccttttggttcaagattagaagagtcaggttaccactacctgtttttagaggtagaatatgaactttctactagtccacagtttactggtcaggtggccccaacagtcttttatctcagcccatctgcctctaggggtggccagatgatctctatgtcccaggcagcaaggcttcctgctgatctctacttcagatccatgaaccggatatccatgatgagaaggaagttcttaggcagtgggcgaggggctggagacagaacagtaaacacctgatgctccaggtccacactggtcaccacaatgaagccagctacacttgtctcggacagggttctcttctgtaccctccggcagtgctaacactcagtaggtggtgcaccatatctcgcccaggagtgacaggtactagcttgagctgattatcctcttgaggacatgcccaaagggtaaacaggagttctggggatggtgggtgcccccaactttgtagattttcacatctgaaaatttgacattgaaggcatgggatagaaacagcctcggaatccataaaaatactcacggatacgctcatccctacattcccgccggaagtccttggagcgctccaccacacccccagatttagggagcagcacagtgcgtacaaagtgggggaggtcccgtttcagttcattgtacagtcgttcttgatccagaacaacaacgaacatccacctcaaaagctgaaggctgcatgcaccagagcctggtaaccagagcccttgacccagccacaggtgttaatgacacagccactcacagatggccttcggttcacctcaacacctttggttgaacacatctgctaaacgagatgtaatcttattataaagcttgatgttagtgccaggagtggtggaaccaaaatgatacaccagaggggcctggatagagaaaccctcttcgacatctgcaggccgctcgatgtagagggcccccatggtaccagggatggacacagaaccctggcccacatccagctccacataagtgggacggcggcccaaacgcactgcgtagttgagcagaaggcgacacactgtagacnttggccacatcagtggggcccactaccatcactcggggacctcgctcttcttccttttccgcttgcctccgcatctgttccaaggctgtgtgagtgttgaggtaaagcaacataggagtgtccttggagacataag

SEQ ID NO: 447808 - DNA, 505 bp, Homo Sapiens
aagctcggcacccattatttgcaggacggtggggggatatatgaatgtcacaggaggagacaccattctgtctttgtttcaaagaaagtgatgtgccatattgttaatatacaagagaaatattgaaaatatattgaaaagagcaattttaaattatttttggcttatgttgcaatatttattttcttgtattagaaaagattcctttgtagagaaaaaaatgtatttttcattaacgcaaagacctatttctcctttttgtacattgtccatgtgcgcaacccttaacgagcaatagaatgtatggtcacctgggtgtggccagtgcccgctgtgccctgcatgattctgtgttgccgctgctgcatagttcccagccccatcctgtcctgctcactcatgggggcttccagaccccggccccaccagggcttgtgtcatagggagccctttgcactcctcgtgtgttggcaaacgcagttaataaagcaatgttttctgtgct

SEQ ID NO: 447809 - DNA, 181 bp, Homo Sapiens
ttgagacagatacctcccatcaagaagcaaacacggagggattctttcacagtcagatgtacctattgaacaaaaacggggtcacacttgcttttttcactaatgaaactttcctttttctactttgcatacttatgtattgtctaagttcttaataatgagcgtttggtactttttaaat

SEQ ID NO: 447810 - DNA, 548 bp, Homo Sapiens
ctcatttccaatggcagctttttaattggctatttttttcaggctttcagatgacaaattatacaggacagttacaaaacgtcaaactctgtaggcaaagattacatagaaagtgaagtcctctgcctgcctcctcccctctctgggggaaactcgtgcccgactgaagcggggtcccagtgccttcctccgtcggtacaaacttgtctgccctttcttctgtttattcgtgggaatcgggctaaattgtgtgaagcttctgcagctgtctttctcccgctgagacaggtggtgtccatctttcccatctgaaggtgcgtatctcgtgacttttaaccgccgcctaacattccacagcctgggcctggttggtttgaccgactccctgctggcgaatgtgtgagttgtttttgcaggtgtttctgtgcttacccgagtattccctcactgtacactcctgaaggggaaaggtcaaaggtcacgcacatttggctctcgaaggatgtttgctctacggctccaccacccctcaccgagcatcctgccct

SEQ ID NO: 447811 - DNA, 407 bp, Homo Sapiens
  misc_feature (43)..(43): n is a, c, g, or t
cacgggccctggtcctcttcgcccgcctcgcacgggccttccnccgccgctgttgggcggctcatcgtccagcttcacctcgccgctgtccacgggcaggacctgcgaggagttgaccctcacgtcacgaatccaccccttgaagggctcccgctccctcaccgaggccaaggtgagcttgagctccgcggcgcgcagttccgggggcagccccccgacgaaaaggccgctgaactccgtcatgtccctgcgcttggacttgacctccacccacttggcctccacctggtcgatgaagagcgtggtgttgcggaactggcggcggatgcgcacgctgtgccaggcgccgtcgttaaccggcgtgtcggccaggagcgtcgcaggctcagcgcagaagatggagaagc

SEQ ID NO: 447812 - DNA, 516 bp, Homo Sapiens
agtagtcagcaaagttctttattgggtgttaagcccagcaaaccccagatgagccaagcttggacagcacccgcaatgcatctgcccgccctagctgggcgaggtgtgtgccaagctggcccagggaggcagagggctcccttgccaccaccatctcaatcagagcccgcagcggcgagcgactcggcctcagcgaataggcaaaggtggaccaggcagcaggcagcccatatcttgcggccaggtgtcgagtagtgccatgggccatacccccacctggcccaggctcagggtccagcagtacaatcagctcttccagcacctccagctcatccaggaggcgagacaggggttgtgacgccagactggacagttccctgctcaggagtggaagtagtgaggcctccttccatgtgtcccctgtctccagggcgcccgggcaggggggcggcccgaagcgttgcaggcagctgctgcagcacttgttgtctgggttccagtattcaaggcggccgc

SEQ ID NO: 447813 - DNA, 424 bp, Homo Sapiens
  misc_feature (178)..(186): n is a, c, g, or t
  misc_feature (276)..(276): n is a, c, g, or t
  misc_feature (287)..(287): n is a, c, g, or t
  misc_feature (332)..(332): n is a, c, g, or t
  misc_feature (346)..(347): n is a, c, g, or t
  misc_feature (393)..(393): n is a, c, g, or t
gagaaggctctggcctgagtccgagggggactgcggggtccaggggcgatgaatgctcccgcaacctccggagcttgtgcgcgtacttcagggaccggcaccacgtcaccgtcacctcctgagtagtgagttcccctctgatgaaaccactggtgtgtttactcaccatccccaccannnnnnnnnccccatcctgatggaaggaagtacataatggagagcaagtttttaaagcacggtcgtgtcgtgtgaacttgctctagccaaattaggttntatagcacttntttttggctctccattacctccaggtccccacaataaacaagagntgaccaagctgggnntcatccgccaagacccgttttgaaaaattattgtgggctttgggtnggaaactttaaagggggtgaaggtatctgct

SEQ ID NO: 447814 - DNA, 1001 bp, Homo Sapiens
  misc_feature (460)..(468): n is a, c, g, or t
  misc_feature (925)..(961): n is a, c, g, or t
cggaatagaaattaatgtacttccaagtacctggtacttaactcaattagaaaggataaggtgtccacattatgaagctccacaaattcccgaaatacacatgctgaggctctttttaagtccgaattgtctagtaattacaaaaaagtgaagagtttacagatatacaaggaaataaaggcgaattattgcaaagaaaacaagtttaatttcactttgaatgacaacgatttttctggaaagcagatacttcactcctttaagtttccacccaagccacaataatttcaaacggtcttgcggatgacccagctggtcactcttgtttatgtggggactggaggtaatgagagcccaaaaaagtgctataaacctaatttggctagagcaagttcacacgacacgaccgtgctttaaaaacttgctctccattatgtacttccttccatcaggttggggnnnnnnnnntggtggggatggtgagtaaacacaccagtggtttcatcagaggggaactcactactcaggaggtgacggtgacgtggtgccggtccctgaagtacgcgcacaagctccggaggttgcgggagcattcatcgccctggaccccgcagtccccctcggactcagggccagagccttctgcgaagcaacctagccccagggaaacggtagcggccgcagaagccccgccctctgtaacggccgcggaggagcagcaagcctccctgtgagtcggtgggagacaagacggagcggcggtaagggcggtagggaagtgaagcgcctctctccaccttgttagaagcgcgctgaaagcggcctgcctacccaccccatcgctgccgttttgcagtcgtcgctcccaccttccgctgccacctccgctctcgacgaattcgagctcggccgatttggcctgatnnnnnnnnnnnnnnnnnnnnnnnnnnnnnnnnnnnnncgccgccccgcgaaggctccgttcccctatatgatcttaa

SEQ ID NO: 447815 - DNA, 341 bp, Homo Sapiens
attcttctcaggattccactgcaatgagctggtggaggaataatttctggatcatcttagctgtggccatcattgttgtctctgtgggcctgggcctcatcctgtactgtgtctgtaagtggcagcttagacgaggtaatggccattttacctctccgaatccagctcaggtgaaccaggaaggtgtgctccatgctctgaattatagcactttatttccctcccctcattttcagccatttccagggctacagaaaacggtttatttagggtgccaattacaaatgggaaccaggacacaacagaaatttgttttctcgttgttctgaagctggaagccc

SEQ ID NO: 447816 - DNA, 751 bp, Homo Sapiens
tttgtttaactgtattttctgggtttattcccccttgttccaagctctaagcctcagcttactccacctccatagcctgcacagtttcctccactagctccagggttagtggcttcactgtctgggtcaggacagctgtggttccaggcacaaagtggtagcggccagacctcttcacgggctctgtgggtgagctcagtgtccgcagcagcttggcgccagtctttgtgatcacacatgcgtccacattgcccccggagcccaggtcacccaagatcccggcggtgacggcttccaccagcagcccctgagcagcctccagcgtcatgttcggctggaaccggtcttctagcaccgccagggccgcgtcctgaccagagcccagggctgtgaagggcagacggctgtaggagccatggggatgcacaccgtagagctgcggtccagtcaggtctacgccgcccacgatcagcgatgcacccacgtggccctggtacctgaagagcgtctggcgcaggatgcgagtgaccgtggccacgcggggctcgcggcccgtagataacgcgtgtagctccatcttggacgccaccatccgtgtgtcattctcgcgtccgcggctactccagccccacagcagtagattttgggggcgatgaaatgatcttctcgcagctcttgtccgcacgacccgattcgtagtgggctcggtatcgcgccagaatgacccgtcttggacaccaggcccgccgat

SEQ ID NO: 447817 - DNA, 701 bp, Homo Sapiens
cccccctctgttgtggtcattgttctttgtggtatgttgtagttgtgtattacgtattcagtgattatattgttgtattgtcatttcgtgtgttgttttgttgttttaactgtattttctgggtttattgcccccttgttccaagctctaagcctcagcttactccacctccatagcctgcacagtttcctccactagctccagggttagtggcttcactgtctgggtcaggacagctgtggttccaggcacaaagtggtagcggccagacctcttcacgggctctgtgggtgagctcagtgtccgcagcagcttggcgccagtctttgtgatcacacatgcgtccacattgcccccggagcccaggtcacccaagatcccggcggtgacggcttccaccagcagcccctgagcagcctccagcgtcatgttcggctggaaccggtcttctagcaccgccagggccgcgtcctgaccagagcccagggctgtgaagggcagacggctgtaggagccatggggatgcacaccgtagagctgcggtccagtcaggtctacgccgcccacgatcagcgatgcacccacgtggccctggtacctgctcgaggatgggcggggtcggccacaagctggggcctaggccccacctctctatgcccagctcctaggtgctatccccgccccttcctgtgcgctccgct

SEQ ID NO: 447818 - DNA, 783 bp, Homo Sapiens
  misc_feature (702)..(702): n is a, c, g, or t
gtggtaccggtccggaattctcgggatcgtgaagcctagcagaggactttttagctgctcactggccccgcttgtctggccgactcatccgcccgcgacccctaatcccctctgcctgccccaagatgctgaagccagccctggagccccgagggggcttctccttcgagaactgccaaagaaatgcatcattggaacgcgtcctcccggggctcaaggtccctcacgcacgcaagaccgggaccaccatcgcgggcctggtgttccaagacggggtcattctgggcgccgatacgcgagccactaacgattcggtcgtggcggacaagagctgcgagaagatccacttcatcgcccccaaaatctactgctgtggggctggagtagccgcggacgccgagatgaccacacggatggtggcgtccaagatggagctacacgcgttatctacgggccgcgagccccgcgtggccacggtcactcgcatcctgcgccagacgctcttcaggtaccagggccacgtgggtgcatcgctgatcgtgggcggcgtagacctgactggaccgcagctctacggtgtgcatccccatggctcctacagccgtctgcccttcacagccctgggctctggtccaggacgccggccctgggggtgctagaagaccggttccagccgaacatgacgctgggagctgctcaggngctgctggtggaagccgtcaccgccggggatcttggggtgacctggggctcccggggggcaatgtgggacgccatggtgtg

SEQ ID NO: 447819 - DNA, 560 bp, Homo Sapiens
  misc_feature (178)..(236): n is a, c, g, or t
  misc_feature (303)..(358): n is a, c, g, or t
cttaattgttgcaatttatttagaattaaacattaattaggctctgaagaaccttgctgattgttaactggatgattgtttcattacctattctttgattttatcaccactggcccgttatccaccctgctggttgccaactcagaggtatgtctttgttgagtgcaaaacagttgannnnnnnnnnnnnnnnnnnnnnnnnnnnnnnnnnnnnnnnnnnnnnnnnnnnnnnnnnntaaaattatactcagctaaacgtggtggctcagccaaaattcttaattcttcgtcacactagacacnnnnnnnnnnnnnnnnnnnnnnnnnnnnnnnnnnnnnnnnnnnnnnnnnnnnnnnnctatagaacatttccattacaataggaagttcgattcggcagtttagaccttgaggagttcttccagtttagggtatttcaattttttaaatcacaccacagtaggaagtacacttggcactgtaacatgtctgtatatacacacaagtatgtgctaggatcatcgggaaggtaaggctggaacaagaggaatcctgcacac

SEQ ID NO: 447820 - DNA, 1504 bp, Homo Sapiens
gggaagatctgagttcatgtagctggtgttggcttagggtctgggaggaaggcttttgggaagatgtaaataagaacaaaatctgcagccacctgggaagcctggcctcagtgtggaagagaaggcagcaggattattacagaaccttgtgaagccaacgcgggcagccgccaggagctgcagaccgagaggatctcgtcctttcttgcggcccagggagaccaggcctttcattctgggctcgagaccaacaattcgaattccgaactccccctgcgtgtgggactcaaggttgcccagggctcacctctgatgggcgggcaggtgagcgcttccaacagcttctcgaggctgcactgcagaaatgccaacgaggactggatgtcggcactgtgtccccggctctgggatgtgcccctccaccacctctccatcccagggagccacgacacgatgacgtactgcctgaacaagaagtcccccatttcgcacgaggagtcccggctgctgcagctgctgaacaaggccttgccctgcatcacgcgccctgtcgtgctgaaatggtccgtcacccaggcactggacgtcacagagcagctggatgccggggtgcggtacctggatctgcggatagcccacatgctggagggctcggagaagaacctgcactttgtccatatggtgtacacaacggcgctggtggaggacacactcacggaaatctcggagtggctggagcggcatccacgcgaggtggtcatcctggcctgcagaaacttcgaggggctgagcgaggacctgcacgagtacctggtcgcctgtatcaagaacatcttcggggacatgctgtgtcctcgtggggaggtgccgacactgcggcagctgtggtcccggggccaacaggtcatcgtctcctatgaagacgagagctccttgcgccggcaccacgagctgtggccaggagtcccctactggtggggaaacagggtgaagaccgaggccctcatccgatacctggagaccatgaagagctgcggccgcccaggagggttgttcgtggccggcatcaacctcacggagaacctgcagtacgttctggcgcacccgtccgagtccctggagaagatgacgctgcccaaccttccgcggctgagcgcgtgggtccgagagcagtgcccggggccgggttcacggtgcaccaacatcatcgcgggggacttcatcggcgcagacggcttcgtcagtgacgtcatcgcgctcaatcagaagctgctgtggtgctgacggggacccttctgaagttcgggacgcggcggctgcagtttcaccccccgaatttccgagtattgtgactttgtttgggccaaatgttggtgatcataggaccgatgataatacgttttcattttctttaaaatagagatggggtggctgggcgtggtgacttcgcctgtcttcccagagtgctgggatcacaggcgtgagccaccgcacctggcctcaa

SEQ ID NO: 447821 - DNA, 306 bp, Homo Sapiens
attttggtagttgtttttatggatgtgaaaaatattaccactgcaactagcaagaactataaatgatacattattgcaagtgttctaaaaaatcagaacaaaactaatttattatagttctgtcttcattatacaccacgtgttggtgagttaaacacaacaaaattgtcttttcttttaaaagtgtctactaaagataaaaagaataagataacaattaacatgtagtttgttacattaaaaaatctgatatacatatttctattgcctgttagcttgttctaagcctctttaactattacaacg

SEQ ID NO: 447822 - DNA, 525 bp, Homo Sapiens
tctccccaacccacccctttctctaaatgcctgtgctttccagttcttcttctacccctatggcatgagacctggaaatcatgatgagtttctccttgtttgtaaactgcctctgcaccggctgaggttgctcggccgtgggtggctcctggctggcaccctccggcgagctctgctccgcacccagaacgggggcggccacagcagagtctcgcgtttgaccagctactgcgtccaagaccgactcggtggaggtgccggcctcccgcaggggtgtgtagcccttattgctgctggatgggtcatccgactgggagctcccggagtcccgcctggtggggggcgagccctccagccgcaggggtggcgagggggaggcggccttggccagagggctggagtccgggtccgcactccccggggagggcgggggctcgggggacggcggcgcccggtagtccgggagcccgctggtgctgcggcgccgcaaggccgcgtacctgccggtcctgggcaggcggccgc

SEQ ID NO: 447823 - DNA, 533 bp, Homo Sapiens
tgttttttaaaaatcacattatctgtatttccagacataaggtaagtatttcaccaactttcatccaaactaacatcctcaattgtaatcccactaagaaccgccagggcgagacgaaagcggaatcgcttccatctttacgtggagtccgggaaatggttcagcaccatgacatccgccgaagacgtaggtgtagacgaggaacaaaagagaagacccctcgtggaggtggcctgtggggcccgccctcaccgggcgccatctgtccctgattctgctccccgcaggggccgcagcgggtgcgcccggcgatagagcgggctgtggagggagcctccatggagtctccatcaaccattccggaccaggagacggtggcaggcagtaaaaaggcctaggcagggccagcgccccgggctgctagcacaggacggcggcgcccagggacgccccagggcaggcctcagcccctccaacccgcgagagcccagctccaagggagcctgcagctccctccatcttgttgatggagg

SEQ ID NO: 447824 - DNA, 591 bp, Homo Sapiens
  misc_feature (470)..(470): n is a, c, g, or t
  misc_feature (487)..(487): n is a, c, g, or t
  misc_feature (491)..(500): n is a, c, g, or t
  misc_feature (505)..(505): n is a, c, g, or t
  misc_feature (519)..(519): n is a, c, g, or t
  misc_feature (529)..(529): n is a, c, g, or t
  misc_feature (548)..(548): n is a, c, g, or t
ttttttttcactgtaactatttttattacattacaataattaggagtagtacagttcatgacaaaaatattacaaattttagatcacttcacagcacatactcctataaacatttaaaagttaatttcaattaaaagagtggtcatttttaatgtttgatatgaccaacattcctaggtcagcgcaaccaaatgatggaaaacaactggatcacactgcatatgtcccacaaaagaaagcacaatgtacaaaatgtgcatgtttcagtttacactatacaaaaatagttaaaatacattccaggtaaacatgttacattaagaaatagtactagtaagaaattggcactcaaaggaaaaatgcaaaagtattttcaacatgaaaacacaagacagtggaattggaaactttcggataaaacactgtaacccagttagctctgtgggggtgtggggggagagatggggccnccacatatctgcagatnaccnnnnnnnnnnccccnaaattcctcctaantaccccatcnttatccccaacagggcccnttcaaactatttaacctaaaaccccggtcttaatcccaggtta

SEQ ID NO: 447825 - DNA, 403 bp, Homo Sapiens
ctctctgatggggtctaaggctggaggctggcaaacagaaaagtgcaggaagaggtgggtatgaagccacagaggacctgggtgaaatctcctggcaaatttgtgaggcaagagggtctggctttggactttgcctgaaaacacaggggaaaccctttgggatgctttaggctcccatttactcaggatgccagctaccccgggagcccttttccggacccagaggccttttgatcgctcggggggtttgggggaggaactctccagcaaccagtctttcctgggctttgctccacagcctggccataatttatcggtgggggtcccaagccgaggaggcgctgtatgtttttgttttcagggtaatttacaaggcaggctgccctggggggcaccttcccct

SEQ ID NO: 447826 - DNA, 449 bp, Homo Sapiens
cttctggaagaattatcctcctttgaggatctaacccttcttgctcccaatgcttcccagcagggcccgcaccccaggacgggtacttaccgcagtcccccacctccagctctgcacactcgcagcccagtgcccgctcttccccctcagcctcccgacgagactcagctcttcgacctccctgcgagtccctgtgcacccactttgttctgtgcctgtccctgccctgactatgtgggctcaggtagttttgtggggtgtgtggatgttgcgtgggagtgtatgtgtgccccgtgtgtcccatgtgttataaccctgatgctctggagcagaaggcgtggggtcatctgtggataaaggctggtattgaagcagggtcccccacctgtgttaggccaccacatactcttgcgtaaaagtagggtgaggtaaaccccatggccaaagct

SEQ ID NO: 447827 - DNA, 464 bp, Homo Sapiens
  misc_feature (361)..(361): n is a, c, g, or t
  misc_feature (366)..(366): n is a, c, g, or t
  misc_feature (369)..(369): n is a, c, g, or t
  misc_feature (378)..(379): n is a, c, g, or t
ttcttactcatttgtgtttattcttggacttatcctgacataatggggtttttttaattatagattcacactgcatttattcatcacccctgtcctctcatccataactcaaatttactaccagcaacacaaaatacaaagatgtgtccagtttcactacagctcttcgcgtttacaagtgtcgagcgcttgctttcggaacgcccttgtgattggccgagccaatgccagtgacatcaaccaacttacttttgattggaaggctggttgctgggactgtagcgtttgcaggaagtcacttaactgtttgggagctggaaaaccgaagctgaagttctctttttcgcccattttaaagggnggganaanaacccgggnnaaaaggggcgcactgactaggaaagatgtgtccaaagctccgcaagctgaacgtgagccaggaggcccggaccgccacgggaccg

SEQ ID NO: 447828 - DNA, 643 bp, Homo Sapiens
ttttttggtatttacctaaaactttatacactcaaattggcaccaaaacctgccccctcccgggaccccatctagaatgccctggaagagctggaggtggctgacggctgtgtgaccacccccagcacactgggcctcaagcctgccaggctgtgccaggctgcgcaccagtggccccctgaccctagcccagctgatacgtgctgctctgtcccccagccacggggcagggaaccagctggcagccagcctggctgtgcccagcagcggtctgggccctgaggacacctgaggttgagagagtggcccccatctgtggccacactgctgactgcacacacagtgtggcgtgagggacatacagccctctccctggtgccctcaggcggcagggggaacgggctgtctctgctgtcccctccagacccggcgaggcccccctccgagactgcagcctccccccagccctcctgcagctcctctccgtcccctcctgtgctggtccccctggctatgccctgtggggtggtctagtggcctagctccaactctgtccaggcaggaaggccctgcagcagtgacctcacaggagtgggcccagaagctgggcacaggaaggcccctggaaagcactgagaggaca

SEQ ID NO: 447829 - DNA, 498 bp, Homo Sapiens
tttttaatagctgaggtctttatttcaatttctatatacagtaaaagtgctgctgagaatctgcagcgaccagacagaacataaatttaaatctctctcaacaattagcagcttaagatctatcaactacagtgttaacgttcacacgttcacaagtgtcatttctttacgtttcaattcgtgcaagtgagtttttattcttacacactttgataaaacacacagtctagtagtcaatccctactgaggatatcacctagcatacacgacatacagacagcaatgttaactcttagagccacattcaaaatcccaggtttcatttggggtttgggtgtgggaaccataattttgcctgtgtcagattacaataatgtttggttttgttttagatgcatattttccaaagctgaaaggcagctcctcattggaactctctcagaactcagcattttcatctgactgtacctcaaaggaacatgaaatcagaaacaaaac

SEQ ID NO: 447830 - DNA, 507 bp, Homo Sapiens
  misc_feature (493)..(493): n is a, c, g, or t
ttctttaaagaaaacaagttttatttttatcatcagaacattctaataaaaatattatgatgagattagctacctttattctctgagccttgactctgtcccaggcctgccctggagcgcctgcacgctcagctccctgaggtaggtccggagggagaccccccgctgccccccgccctcggccaggatacctctcacctcatgtcccctcctccagacccccacagccctggatgccccatagcagccctgccacggctggcagaactgcctccaccctccaccaacccccaagacaggcaggaaccgtctcaggctggcacacagcaggtggtgcgggggtagagggaagaggcgcacccttctgcactcaaccgctccagcgggcagagctgagggccactgccccccccaggctggcaccaccatggtctagaccccaagtggcctgaatgctgtggatcacttccttctccccttccacagtgtttgnggagttggggagga

SEQ ID NO: 447831 - DNA, 1129 bp, Homo Sapiens
ctcttgaacgtcttgtgattttcaagcatgatccaccacgcctggcttaggctaggttttagtattgtgtgtcccccccagttatagagactgacacggttgaatttgcccttatcccagaatgcttggaaccacaagtgtttcagatttcaggtttagggatacttaacctgtaccaagttccaattcatggagaggggccatgattctgctgtgcttgagcagagagatctccttgccagagcctcacccaagagaaagaggtgggtacctgcatgcccccaggtgcctaccctgggaggtgggcacctgcatgcccccaggtgcctaccctgggaggtgggctcagaagttagagagcaagggcacagagtcaccaaaacctgtcccaacaatccccagacaatatgcttcctgctgagtccattttaaatcacacaacactagccgtggcacaggcccggctgcgaggcccatgatgcttgggagctgttgtggagaactcaacctcatccagaggccagagggctgacaagagcagctgggcaggagggcctgctgtgggcagggtgggaaagccgccacatctctacttcccaagaaaggccactaggtgcaggaaaagggggcgaagggtctcaggactagtgaaagtctgcattgaaggctctgccgatgaccagccgcctcacctcgctggtcccagcccctatctcatacagcttggcatctcgaagaaagcggcccatgggaaagtcattgatgtagccattgccaccaaaacactgaatgccgtccagggctaccctgtgttgcgcacacgtgcagcctgagttaaaggaaatccacaaccctgcgcagttcctatagcacgtgcaatgggccctcatcgcaggggctggggaacttgtagacctaatggcgagcatgcacttgaggcggggaccacggtcggccaggttcccctgcatcactggaagtgccgtctcctggccaaggccccttcagtcgggtgcgactgggtggcccagcacgcttggtttgccaaatgcccggcacaacggccggagcaggctaagtggacctatctggacgatttgcactgataaaaccacggtagccccgtcgc

SEQ ID NO: 447832 - DNA, 413 bp, Homo Sapiens
gctctatttaccgggtgatttatttaaaacaaccctgtcagaggcagcgactctcactccactcagcagagggagcccacgcctgagaccacccaggcgtgcgtgcttgtgacaccgtttccagtgaattcggggaaacacacccctggagaaccccgtcctgctcctggcagactttggcccagctggcctgggctacgccatggaggctcacgtggggccaccgtggagataagagtcctttggacacagagccacgttctgtggcctggagagccagcagagccacgtgctgccagcctgaccctactgctcagaatgtgggaacaggctgggcgctttttacacacgcagcgtctgaggcctactccagaccctccgaggcagaggggatctccatagaacccctgggt

SEQ ID NO: 447833 - DNA, 1753 bp, Homo Sapiens
  misc_feature (1046)..(1411): n is a, c, g, or t
  misc_feature (1423)..(1433): n is a, c, g, or t
tatatgcgggtgcgcccaggtggattttacagcccccccgttaaaagtttttcccctggccgggatgtaatggcaattccccctcccttattttcacagggtggtacacctttgtggggttcctagaatccggggtcgggttgacagagtccaagcccccacgaaaagttcccatcaaccgaaccaaaagttgggtgtcatcccatgcctgtgtggggttcttgttgaataaaaagccccccaataatattgtaggcaaattttccgggtaatgagaattatttctttccaccatgttaatttctggtttgatttcttcctcttcattccccctgggacatccataaaccttaagggttgcaagctgggcccgttttgccaggacgaccccttataaacttgccgtatgtttccatttccagcaagttccaccaattcaaagatccttgcagggtccctcagagccgagagatctatttcatccaggcttcgagccggggagtcgctcgccatgtctactttcttcgctggagaaatggaccaaaaccaccccgaagcttttcccttggaaattccaccttggtctatttcactcgcgtcctcatgcgggtgtcgcgccagaggccccgggcccagcctcccccgcccaccccagccccacagcgccggatcccgatcctccgcgcgtcggtccgccgggtccgggagcccagcctgcgcggatctccaagccccgagcagcggtgcgtgtgggctgagcgccccgatcggctaagggcgctggggctgcgtgggtgtatttaaatgggacatgcttctttgcttgtgcgtggatggcggctgcattggctgttataatgagacacatcaactcctccactcagcagggggagggtgggggtggagaaccacgcagaactgtctatcaccgcttcctgggaggagtgaagggggagtggggaggcggaggaggcgtggtcttggactggggagaggccgcgcttcctgacccggtccctctgcaccagcgtggaggggggaggggnnnnnnnnnnnnnnnnnnnnnnnnnnnnnnnnnnnnnnnnnnnnnnnnnnnnnnnnnnnnnnnnnnnnnnnnnnnnnnnnnnnnnnnnnnnnnnnnnnnnnnnnnnnnnnnnnnnnnnnnnnnnnnnnnnnnnnnnnnnnnnnnnnnnnnnnnnnnnnnnnnnnnnnnnnnnnnnnnnnnnnnnnnnnnnnnnnnnnnnnnnnnnnnnnnnnnnnnnnnnnnnnnnnnnnnnnnnnnnnnnnnnnnnnnnnnnnnnnnnnnnnnnnnnnnnnnnnnnnnnnnnnnnnnnnnnnnnnnnnnnnnnnnnnnnnnnnnnnnnnnnnnnnnnnnnnnnnnnnnnnnnnnnnnnnnnnnnnnnnnnnnnnnatttggcggatnnnnnnnnnnnttggctacacaaatgcacctcatttccccaaaaattttatcgcgcaatcttcctcaaaataccaacacccttaaacttttaggtgcggttgccgcctcgtcccaccatacttttctacccgcctgcctgcgcttcatttccccaacgtgcaaccgccctttccacataatcccctctattaccgcacctctgcgaccacgttttccgccccctcccctagtctctttgtatatgccccgccgtccactatatcatattcccccctgttccccgctcatgatccctttatccttaaccgcccccccgccttcacttactcc

SEQ ID NO: 447834 - DNA, 470 bp, Homo Sapiens
aaatctggggtattagtctgtgctttgggagaaatgcactagctctgcaattcccagctgggcaagtgtgtctctagtatctccacgcaactgatacactggtccctgtaaggcaaacagcatgttagcccgacaggaagagggggcccactttcacattcccggtgacactgaccgtccccagctgccccctcgccacctctgcctgcactgccttctgtcaccgtgggaaaaggaggctgatggttctctacaccatccaccttgagaatccctgcgtgggagagcatcagggcccaccaggggagtggggatggggctcaggggctgttcatgcccatctgagcaaaccccttctctcttccatccacttttgcctcctaggaaagaaaaagtcagtggccctttcttcctcagatatcaagaaactccaagtgtttaaaccgtatgctggagtcagtggttgggac

SEQ ID NO: 447835 - DNA, 402 bp, Homo Sapiens
  misc_feature (81)..(81): n is a, c, g, or t
ctctgctgccccggaaagccgagccccaggagagcgaggagaccaagcagaaggtggagagggtggacgtgaacgtgcagnatcgatgacagctactacgtggacgtgggcggctcgcagaagcgctggcagtgccccacctgcgagaagtcctacacctccaagtacaacctggtcacccacatcctgggccacagtgggatcaagccgcacgcgtgcacgcactgcgggaagctcttcaagcagctcagccacctgcatacccacatgctgacccaccagggcacgcggccccacaagtgccaggtgtgccacaaggccttcacccagaccagccacctgaagcgccacatgatgcagcacagcgaggtgaagccgcacaactgccgcgtgtgcggccgc

SEQ ID NO: 447836 - DNA, 640 bp, Homo Sapiens
  misc_feature (219)..(227): n is a, c, g, or t
tttttggaggatttttattgttgttattttattatgtctatgtgtctctcttgtccctttctgtcttttttggcgagtgtctgctgctgtctcttgctagataatatacacagttacctccctgcttctgtttatttaaggttacaaatatgcacatctgtcatgtatgcaatgccagctgtataacctcctggtttggtcataaaggaaaatacacannnnnnnnnctttcttgacataccttgatgggctgtagtgcccatcgctcaaggctcaaagtttgattgtctaattaacttcatattagcagaaacacagttcggggccagtgctttcgagataatgtatgtataagtgaagtgattccaaagatttctaaataatttttgtgctgattgcctgagaggtgcggcattccccgccctattgctttctagcatttcttattgaaaaaaatatatatattttaaaatgggtaggacacaggcaatgggacagccttctggcagggaggacattttcaaccatgttgtatgttgtaccttattgggctggcattccaaaatttactgaggtttccatttttatcttaatatggctggaaacaaggcacattatcttgactgaaaagcatccttga

SEQ ID NO: 447837 - DNA, 430 bp, Homo Sapiens
cagttttagctattgaaaatgggattgggttcttggtttgactctcaaatgttaaaaaatgctactgattttgtattctgaaactttactgaagttatttatcagttccaggagctttttgggggagtctttagggctttttgagtataaaattatatcatccgggaagggagacagcttacctactttttatctaattgggtggcctttcactccattctttggtctgatggctctggctagcacttccactaccatgctgaatatgagcagggaaagggggcatccttgtcttgttctaaatctccaggaaaatgcttccagtttttgccctttcagagggatgttcactacaggttggccataaatggctcttattatttggaggtatgttactttaattcttagattctgaagagtttttatcatg

SEQ ID NO: 447838 - DNA, 481 bp, Homo Sapiens
gaacagtgcctaaatctttattttcataacctacattttttttcaaattagacagttttacactgaatgacacaaaaggaaacttaaattaccaatagtttacatgtaagcttgattccagtcttaatgaagcagaacaaaaacgaaaccctcgaggagcgaccacatgacccccgcgctgtgagctgctggcggccagcgccctcgcctcgattgtctgcagccctgtagtgggccgcgaggcacgcaagccgcaactacagctcgccagcggggcacacagacaggcatgcaccaccactacccgtcgcccggatacactgaactggttttgaagcctgaactgcagagatcctaatatagcaacgcaggacgtttacggccacccgccagtgacagccggtgatgtgatgacaggagggcctgggtgaaaatgtcaagacactcactctcattgtacgacgactccacttgaaatttt

SEQ ID NO: 447839 - DNA, 1210 bp, Homo Sapiens
ctgtgaaacccaaactctcaatactcagaaagctgggaggcaacctcgaggcctgggcctacgagctgcatcttcgctacggaagggccagggcgccatcagccattcccaaaacacaaggcctgcccgtccgccagtgagtccttggtttttaataatgagaagtcctttcccccaaggtgtgagcattgcagcgcagtgtgtgtgtgtggttagagccagcttagtccttcactttgtcgaccgaagtgggagctcaacagctgcatgaggagggcagcgcgtgcattagccagtcgccactgggagggctctgctgccctccggtcaattacactgtagttactgcctagccagcagcagtcttctgcatcaagaactgaaaccttgctcggaggtgatttttatagcatcctttttaattaaaggtgaaatacagattgctatataatgttctgcaatgacctgatactagcttcaagagtttctgctcagaagaaaatgagagttatcataataggaagctgtggcggtccatgccaactgtgctgtgtcacatacagcgatgagagtggctttcatacgtttttgtttttaagttaacaccctcctttacccccagcagtatctcaggttatagaatcagagatgcagcagtgacaaatggcattttaacttgtaaaatcgtgtgatgatgcttatcatttggaaatagaagaataaaaaccgggtcccgtttcaccagacatgaatttcaagtggagtcgtcgttctctgagagtgagtgtcttgacattttcacccaggccctcctgtcatcacatcaccggctgtcactggcgggtggccgtaaacgtcctgcgttgctatattaggatctctgcagttcaggcttcaaaaccagttcagtgtatccgggcgacgggtagtggtggtgcatgcctgtctgcgtgcccagctggcgagccagtagattagcaggaatctgtcgaatggccattcgacgagcaccatatagcagggacggcgagacaaatcgagagcgagggcgctggccgccagctagatcacagcgcgggggtcatgtgctcgcgtcctacgagggtattcagctttttgttatgcttcaattaagacgggaatcaagccttacacgtagaactattggtaatctaagtttccatcttaccacgtaggggtaaacatgtga

SEQ ID NO: 447840 - DNA, 303 bp, Homo Sapiens
ccacgtgcagcctattaagacaattttctgtttgaacttcacaggactttcagcttcttgggttgggacacattgtctatttgttgcgtgtgtggagaacagtggacagcaaagatcaaaacccttaggggagaggggcaagagagaggatatgagtggggattctctgctcccctgaacagtattccaggattccttcaccaattgaagttcaagtttggtcctctgagcaaaaagtttagagaagttcctttatgcgtttatttaaatttagaataaacatctctgtagcaataaaaaaaa

SEQ ID NO: 447841 - DNA, 1240 bp, Homo Sapiens
  misc_feature (922)..(943): n is a, c, g, or t
  misc_feature (952)..(1157): n is a, c, g, or t
agcggagggccggaagtacggttttcggagggatcagactcagactcacgtcgcactcctcgcagttggactggtgggaactgggaacactggagacctgatttctaactgacgctaccgtcgcggccgccggcaagttcctttactgtgttttcttggttcagccttgaagtgagtcgtggacgatcctctctcagcgtccagcctagacggcggtgttgctccggcagcgttcctgggagccgagggccagagactaagtaacagtcctgggttctgagcctgccatccaaggaactcaggaggaggagttgacagtctcttcgttcctaaccagtgtgggacgacttcagcatgtctcaggccaccaagaggaagcatgtggtgaaggaggtgctaggggagcacatagtgccctccgaccagcagcagattgtcagggtactcaggaccccaggaacaatctgcatgagtaaccttctgccttcacttccctcttgtgtagcatcaattccgtagtccaccctacacccctctgtctccctccattctgttccgctagtaaaaccctaaccctgggtaaacccaatcattcacctctgtgcccaaacccaagtcaccatcattaggtgagaaaacagccagcctggccaccagttgtaccttacgtttatcattacaaacctcagatggacactaagcactgcccagcagatctactctgggatgtctgtttcaaaacttctgtcttatctatcaattcccccttgtggtagttaccacaacacatgcctcattaagaaacagcaaccatcagagggaatgcctgcctccctgttaccagctctgcagatgtgcacatatcttcctgtcgtaagccaatgggacttaaaccttacctcttgtgttttggagactatcnnnnnnnnnnnnnnnnnnnnnngagagagtnnnnnnnnnnnnnnnnnnnnnnnnnnnnnnnnnnnnnnnnnnnnnnnnnnnnnnnnnnnnnnnnnnnnnnnnnnnnnnnnnnnnnnnnnnnnnnnnnnnnnnnnnnnnnnnnnnnnnnnnnnnnnnnnnnnnnnnnnnnnnnnnnnnnnnnnnnnnnnnnnnnnnnnnnnnnnnnnnnnnnnnnnnnnnnnnnnnnnnnnnnnnnngaccttaaatggagcctcctggcctcaaccctcccaaaactggctggggagttaacaaggcgtgttggccaaccatggcctgt

SEQ ID NO: 447842 - DNA, 572 bp, Homo Sapiens
ttattctctacctgctttaggtagtccagaccacccttccttcttgattctttggacggcagtgtggaagagatgccatcctcaatccgtaggtcatttctttccagattagaagcattccttgtataatctcggttcatttttttgttctgctctagtttttgagtgagttcttttatcaatttctcattttctttctccttttcattcaagtattttctctcacttacaaagctcagagttaatgatttcagcttttctaactctgacgctaaactctgctcagttttatccaggcggtcctcagaagattctagttctttcactttgactctgagcatttccagctcagaggagattttcttggtcagatttctctcctcattcaggctcagacacagctgggtacagtcattcttactcctgctgaaggcctcttctagcttctctaattcagccattcgtttctgaagccgctcaatctcagatttcagctcccgggtgaggttttcttcctcttcaagtttctccttcatcagacgacacagatcctctgctctcttaatttcctc

SEQ ID NO: 447843 - DNA, 636 bp, Homo Sapiens
  misc_feature (28)..(28): n is a, c, g, or t
  misc_feature (72)..(72): n is a, c, g, or t
aaggtgactgatccccagactacggcgncgggcttccattcattgggcaagggcggggcagaccattcgtgncagctgcagaaggagaccggagccaccattcaagctctccaagttccaaaggacttctaccccggaaccacagagcgggtatgcctagtacaggggcacggcagaggccttgaatgctgtgcacagctttattgccgagaaggtccgagaaatcccacaagcgatgaccaagcctgaggtggtcaacatccttcaaccccaaaccacgatgaaccccgacagagccaagcaggccaagctgatcgtccccaacagcacggcgggcctgatcatcggcaagggaggcgccacggtgaaagccgtgatggaacagtcaggagcatgggtgcagctgtcccagaagccggagggcatcaacctgcaggagcgcgtggtgacggtcagcggcgagcccgagcaggtgcacaaggccgtgagcgccatcgtgcagaaggtacaagaagacccccagagcagcagctgcctcaacatcagctacgccaacgtggcaggccccgtggccaactccaaccccaccggctctccgtacgccagccccgcggatgtgctgccagccgcggccgc

SEQ ID NO: 447844 - DNA, 587 bp, Homo Sapiens
ctgttcctggaagagggggtctctaccccaagagaggcttctcagatctcacacaagagggaattcaaggccagtcacagagcacagtgaaagaggcacgtttattagaaatgactctgttacagagcagaaagcaagcagaggacacaccaacttctttttccatttttcttacacagaagtcttgtctgcaaagcgaagtgaagctgtgcatatgtgcagctgagcagagagcatgacaaggtttatcattctattggtttaaagaaaaccatccttgacattttagtgtgtcagtcatcatagcatgactcttactatcttgaaagcatagacctaattatgggtattggacgtctggactttctgttcttggagtttgctttgcaggcatcaccaagctgcttccttagctgtaaacatcttaggaccatggcttgtgtgtggcaaggagtgtgccttgctagtttaagacggtgctgattttaaaatggtgtcaccctggctcctctggactcctgcctcgctaacagtccagtgactgtccatggggctgctaatcaagtccacagcaggaagcagcctct

SEQ ID NO: 447845 - DNA, 1422 bp, Homo Sapiens
  misc_feature (57)..(60): n is a, c, g, or t
  misc_feature (65)..(65): n is a, c, g, or t
  misc_feature (68)..(71): n is a, c, g, or t
  misc_feature (79)..(92): n is a, c, g, or t
  misc_feature (100)..(100): n is a, c, g, or t
  misc_feature (102)..(103): n is a, c, g, or t
  misc_feature (105)..(108): n is a, c, g, or t
  misc_feature (110)..(139): n is a, c, g, or t
  misc_feature (141)..(145): n is a, c, g, or t
  misc_feature (147)..(179): n is a, c, g, or t
  misc_feature (181)..(201): n is a, c, g, or t
  misc_feature (203)..(211): n is a, c, g, or t
  misc_feature (213)..(213): n is a, c, g, or t
  misc_feature (215)..(222): n is a, c, g, or t
ctctttggggggcgggcccccccgacaaaaaaggttttttaaaattttttggtgggnnnnggggnggnnnnaaattttnnnnnnnnnnnnnntttttttntnnannnntnnnnnnnnnnnnnnnnnnnnnnnnnnnnnntnnnnntnnnnnnnnnnnnnnnnnnnnnnnnnnnnnnnnntnnnnnnnnnnnnnnnnnnnnntnnnnnnnnntntnnnnnnnnttggtacccatatgcttatgtttattgtacagtcacaagttacatgttgtaaatcaagcagaacactgtaccagttttcactaactcaaatcaagttagcaaattacaaattttagaacagattcattttctgtctcacccaatgtgggtgaccacaaagatatttactttctatgttattaggtagcaaattaatttgatatactacacagcttccaagttaccttaggatatttcaaagtgtttcaaaactggtaaagaataattcatttccagcctgaaatacaatgcagaatggaccatttaggggtaaataacctcacttaatcactctttcctgctaacaaaaataatacaaatatttgtttatattaggcttactaaattaatgacaactttgaaattatctagatttggttacattgttatattgcacttgagaacaatgacaaaaaacatcaaagattcagtacctctcccaagaagttcattatatatcagaaattaaaatgaaatataagcatatattgcatgctgcatatttctatcgttcaaaccagccaaccaacaaactaaaaggaatactctccaaaacactgagtattaagtaatttcatctgccttttttgatcctacaatcatttttcaaattttaggtgtttttctttaaattattcatcaaactactacatatacaagctatccaagaatgcaaacaaggtgacattgagatgggtagtggctgcacataggtattccaagaacgactcattcttctccaccaagctcatcattacattttgcaacttaggaagatctgccaacttacaaattctgtttgccttacaaaaatcgctgatctattatatacaatacttttatcacacaaatctctcccttagggtcatgattcactatcaaaaatctttcacagccctcttaagccagtaaagtctcttttattaatacttgagttttctttatggaaatgtaagtgttaatgagaattaactatgaataagtagtttcataacacaggtagaatgatggcaataatattttgactaattgttttacctttcagattcagaattacagtgataatcgttaagagaaaagagaaacagaaaaaatgactcacatgtatttttctcaaaatatcaattctgaaataaatacctatataaaaatcaatatccc

SEQ ID NO: 447846 - DNA, 1019 bp, Homo Sapiens
gttctcatgtgtgtttattgagcgcccacggagtccgtggtactatgctcaaggttcagagccacagtccagtcaaaaggagaccagaactagtacagagaatgtttcatagctgcttaacatctggtaaggggtggggaaggggcgaactaatcacaaaacaaattcctattcaaaagcaacagaatctcctctgagagtaatatatattctaggcacacgcgctcgcatcagcacacacacacccctctgtagagaacacctaggtctacccacattggttgtatatgctcgctatatacgaggtgtttgtggagtcacatctcaacgtatgactagctcacgattcacacatgcacgctacacgcgacaccacctgcacacacagataatctggcttatgctatcaaagatgctatgtctccaggcttctagtggaagcaactctgtcctagacacccgcagcatgcaaatactcagaagacccggagagtcccaggttaaggaggagacggggagacgcgaatacgtttccaccctcggggcccagccacagacacgccaggacagcacttacgtaggcaacacaaagcctatcgacgaagggctaccaggacagagcggagagagctaggaggccgttctgtccagtggcagagcccacagggagacccatagggaggttcaccaagtcttcaaagggcagaagtggaaaactcgtgggtgaacaaagtgtgtagatccatgcaaaacgcgttattcttagaggacggcacagggagatcagaaggtgagaggtccgtgtttcatcgttagctctcgtgggagactttccacaacgatgtatgcgtaaccgccattatgggtaagtcgattgagactacacagaactgttatcaacaacaagcatagtccctgtaaagaatccgaagtcttaatgtggaacatacgaagatctcggcaacatttagagcattatggcttacattgaatatggaccccgtaaatttcctagacca

SEQ ID NO: 447847 - DNA, 498 bp, Homo Sapiens
tttatatcagatatgattttattaatagccaaataaacaaaaattcagaaatacaaagttccgtgaaagagttgtttacatgcactgtcaactgttctctcattcttatgttctctccctccaggattttacctcctccattccaccaacacagctcttatgaggggtcaccaatgagctccacattgctaaattggtgaatacttctcagtcctcactttagttgacccattagcagcatgtgacctattggctttcacatggcccatcacccctcttcctcaaaacactgccttcatttggcttccagggcatccctcttgattttcctaactcaatgagagctcctccttagtctcctgcactgtttttcctcatatcctatctctaaccactgagagaaccccaaagttctcctctgacatcttctctatttgaatgcacttcctcagctatctcctctagttcaacagctttaaatttactaacttctacatt

SEQ ID NO: 447848 - DNA, 713 bp, Homo Sapiens
gctcaagcaatcctcctgcttcagtctcccaagtagctgggactacaggcatgagccaccaccatgcctggcccctaatttcagtattgctgtgtctcaaggatagggaggtctgagcagaaggagagagatagggaggcagctggtcagtgcagttgtcaagacacataaaaacatttatcgactcagtttgctgtcttatataggggtggttcatggtgccccccaagcaattatgacagtaatatcaaagatcactaatcacagatcactataactgatttaataacggaaacattccaagaattaccaaaatgtgagagagacatgaagtgagcacatactgttagaaagatggtgctgacagacttgctccatgcagggctgccacaaacctccactttgtaagaaacatatgatacctttcgcagggaacagctgattctgtttttccttcccagccaatggtgatcaatagcttcaggacgctggtgagtcactgcggaggagccgaacactgaccgcgccgtccccgccaggctcccgcgcggccggcaccgcggccctgagcgcaggcggccccgggtctcaggcctcaggcggaccgcgccccgggctcgcagccctcccgccccggctgccgggctacggggcagatggactcggagcgccccgccggtgagtagctacgacccccgaggccacctcccgcg

SEQ ID NO: 447849 - DNA, 272 bp, Homo Sapiens
tacaagccagaagggattgggggactatatttaacattattaaagaaaatcttcaaccaagaatttcatatacagctaaactaagctttctaaatgaaggagaaatgagatcatttacagacaagcaaattctgaggtaattcattgccaccacatctgccttacaagagattttagaaaggaggactaaatatagaaaggaaagaccactacacgctaatgcaaaaacatacttaaacacacagaccggtggcgctataaagcaaccacac

SEQ ID NO: 447850 - DNA, 490 bp, Homo Sapiens
  misc_feature (412)..(412): n is a, c, g, or t
tttttgtcttgctattagattggacatgggagtgaagagaagggatgaatggagaataactcctgggtttctagcttgagcaactggatagatttaactggagagaaggaatagaaagcaacctgccattttggaaatgttaagtttgcaatgtcaatgagaccttgagacctctaaatggagttaagcaggtaaccggatatgcaggtctgatgttcagagaggtctgaattgtatataaattttggaagttaccagcatacaggcagtattttaaactacaggagaagatgctattacataggaaaataatgtagaggaagatgagagccaagccgaagtcatacagacatcaaactataaaggtcagggagggagaaaagaccctgaaaaggtggcggaaagggagcanactgtgagaggggaagaaaaccagagaatgtggtgtaagtaaagccaagagaagagaggagggactgagaagtcatat

SEQ ID NO: 447851 - DNA, 595 bp, Homo Sapiens
tttttttacagagttcagaacttgtggtttattgacacttctgcatggtgggtccttgggagactgcctttctggcatcttgggacttgtccctaagaatagggaagacagtcatcctgtcctggagcaaagctcccccttgcacaggaacacaactcccatgcaggagaagcccaccgagacgaacgcagataaacccttcgcaaggcctgcactgcaccggaatggcagagctccgtgcatttggcaaagctatggagccttggcagaatgcacaggactctgggggctgccccccttgagctacagaggcagaatcgaaccaaaaacactgcttcctttaacacagcccaactggcttacatttagcttgggacgaggctaggcctaagaagggccagagctgtcctcccagccctgggaacatggctgagacggcccggtgcccacgctgggctcaccataggagaggcggaaaactcttccagaaagatctcaccaaaatcatgcctccctaacaaaacaaatcctgcttttctaaaaacctcaatgggcctatccgagcccactgcagtcctagtttcttcaaagctgt

SEQ ID NO: 447852 - DNA, 523 bp, Homo Sapiens
  misc_feature (491)..(491): n is a, c, g, or t
ttttttttcagaacttgtggtttattgacacttctgcatggtgggtccttgggagactgcctttctggcatcttgggacttgtcctaagaatagggaagacagtcatcctgtcctggagcaaagctccccttgcacaggaacacaactcccatgcaggagaagcccaccgagacgaacgcagataaacccttcgcaaggcctgcactgcaccggaatgggcagagctccgtgcatttgggcaaagctatgggagccttggcaggaatgcacaggactctgggggctgccccccttgaggctacagagggcagaattcgaaccaaaaacactgctttccttttaacacagcccaactgggctttacatttagctttggggacgaggtttagggcttaaggaaggggccagagcttttccttcccagccctgggggaacacgggtttaggacgggcccggttgcccacgttggggttcaccttagggagaggnagagggagaggggaggggggccccttatttgg

SEQ ID NO: 447853 - DNA, 371 bp, Homo Sapiens
  misc_feature (105)..(118): n is a, c, g, or t
  misc_feature (321)..(321): n is a, c, g, or t
  misc_feature (329)..(329): n is a, c, g, or t
  misc_feature (356)..(356): n is a, c, g, or t
tatttatcgtttagtctgtatttcaaactgatctttgtgtacaggtttatctgttggtctgagaattcacagcttactacaaggaagctgagaattgcttggtgnnnnnnnnnnnnnngactcctctgtcctgggaaacgtggctttgcctcccagacacgtgtcagatgccagctctcctcagcggagctcccgatccctcaatttgccatctgtctgactcccgtcttcccggggcgtggggcgtgcttgtcaggcaggcgggcgggaggaaggaaggaaggagatccagggtctgtctgggtgcagaggccttccttncaactctnagggggtgttatgagagtaaacagatngtgctgataccagca

SEQ ID NO: 447854 - DNA, 483 bp, Homo Sapiens
ttcgccctcggggacttatcacatctgcacacagttgtgctttaggagctgagaggagttctgccagggaaccacaaggacctcaaagtcacagcgcagcttctcctgctgcgcccctgctgccagggggcaagtggtgaggtcgacgtggtctccagtgaccctggtcttgcggcagtctgtgctccccatctccatcgtcaggaagtacttgatgccggccacccagctggctctgcggcttgatgatgtgcgtgtctcggaagtagtagatgctgttgctgcccatgttgtagctggccacggccgcctgcgccgccttctgcacctgcgggtcgtcgggcgacaggtcccggagttctccgaccatgcgctcctgcggccgggcccgggcgtcgcgtggcagcgccaggaggcagaatgcgaccagggccaggcccagcgccagcgggaggttcgaacgcgccatggccgtcagtgccg

SEQ ID NO: 447855 - DNA, 476 bp, Homo Sapiens
gcaatattccaactttcatttaaatgaaatattcagaattttgattaaaataaataataaattacacaagtttacaagtaacagttaaatatttagggacatgtactaagttttacaaacagtacaaatatttaagagtgttgattgggagtaagggaatgtcaactgccaataaagtggaagatgaaagaataggactttacacagagcatatttagttatgggtctctgtctcctccccacacagaaaaactcccagacattcatgacttcatccaccctgcctggcagataggccatatttcctgaccccctggctcttcacctcaaaaggtttatctttccaccacactagcaaagaccctcaggacacacaactcatactgccagctaagcatctaccccgagggacaaggcaagcacacactagggcagctgggccatcctggccctaatccctccagcgtgtccacact

SEQ ID NO: 447856 - DNA, 1699 bp, Homo Sapiens
  misc_feature (922)..(935): n is a, c, g, or t
aatccattccagcgtattttcaaaacatagtcttaaacaaatgtgctttaaaagcgtaactggtaatgatctgattaatatcatagcttatttaagagagctattaaacggacagactagacatgtatttttaaaaaaacacaatttttggtcatgtgaatgattcatgttcagatttcaaaaataggaaacatcctaaagtgcatcattttatttataatctcactccttgaaattatagcaatctgcaaggtaaacagtagagcaaagaattccaaactatattgttatgtacatttagaccggtaggattatgtaccgtcttggggtatggattaaaaccaggtcacttccaacacatagctcaagcttccatacgattaaagagcaaacttaaagggcattttttttccccatccttaacattcagctgacagaagagagctgctacctcacttcagcaatggaaaatgttgctgtaaatcccattggaccagccagtttctcacgaccctttaaaactgaaaacgggtcagtatagttttacattctttttcttttccttaaaactgtgccctttcagaaggcaactttcaaaacatacgagggtgcctctgctgtgtgttcatactgtaacacgtcgtctaaggcagagctcctgaagcaccttctctggtcagccgtggcaggcgagcagatgcctgggctcggcctcgcaaagcacaaaggtggacacagaacccactgtccttggcgcaggagttaaaaaagtaacagcaaatcatgaggtgacatcaggcacactgaagagatggaggatttggtgtcttacatttcctggtccctccaaaatgtctaatatagacagttttgtgacaaagtctttgaaaaaaattataattggccacacagcatgacttcnnnnnnnnnnnnnnatacatgatctcgaaaatagtgtgatttagattctgccttgggctgagctctgagggctacatttacctgtcagtttggggattttagtgcagattttttttaaaaaaattaaactctggtaagtactcaggaggctgagaacacaggccccttctctccccgatcctctgtatgcaggctgacttaagcccctttatgtttggctagtgccacaacaaaacagccccaaacagattgccatgagcatgctagcctggcttggtgtttgacgataaaatcagactggtaagtgcagtcagtgttcaggaaagaatctccaggctcttctcccatgacctggttttaaaatcagcattcatacagctgcttaccatctctctgtcctctgcagatgacccggtcctaggcagggaccaaaattccttgtcagctgaggaagtcctgaagaaacatcctgaagatgatgactgcactggccatcgtggggcagatgcagcttccatctacctgaggggctgaagggggaaaaactttcacacccgtgaagaaggcgcagctctgtgggaaaggtcacctaaaatggcaaggggcaacaaataagggctccaatgcacgtttgcagtttaactgggtccaaaggagaacatggcccctccaccagcaagtttggctctataaaataaaagtcctgaaccttggttttttatcaccagttaagaacgaaaaaagggggcctcttgggttctcccgtttatcccagggg

SEQ ID NO: 447857 - DNA, 429 bp, Homo Sapiens
actctaaagaagcatcggcgttttggatggacgaatgctgcttcatgcgtctccatgtcaatggactattttattcaactcgggtatttatgagtgtctcctctgtgccagccacgtgtgaaagaagaactccaagttactggacaccaggacaaaccaggtagatcactgcatccggttcctcctctttctgccgactctcccgggcaaccgttctgattcctggcatggagttgggggcgagctcatcagtacccagagcgcctggtgtgcagccaaaggcccccattttattagtcggtgtgttcagtatcacgctcaagacaagggccaacctattacttcacacacctcaaatacaaaaagtgcctgggaacgtcgatgaggtattaaaggaaaccactggtcttgtcagtcatgtacacacag

SEQ ID NO: 447858 - DNA, 1121 bp, Homo Sapiens
  misc_feature (756)..(988): n is a, c, g, or t
gcatgtatatggtgggctctgttagattttgaagggaaggtgaaggttaaagaaagagagagagttggcagctctatggaggggaccaactaaatgccagagcccactgccgcttacaggctggagtaattataggcctgggcaggagggatctgggcagtatagcttgttgcctgggagaatgttgataaggatgtttcttgggcctttccccagcaggatgtgataaggaagtcaggcggttggggaggatgtttctcgcagcccaaaccccagtggactgtttccctctgaccagagtctgtgaaatggtgggggcttacaaatcggtgcagcttggactaacaggctctggtggccactttcgttttctggacatgctttggactgtgagccgagcctctatgaatcatcacttcagcctctgattggtcctgggcccaactttcacttcagcccctgattggtcttgggccaaaatttcacttcagcctctggttggtcccaggctaaggtcccgggccaagcgaagttgtgctttctccaagacagctcacagactagtgagcacattcttcctcttcccagttcacaaaacccccagattcagcctcctagttggcaaccctctttcgggtcccctctctgctggggagagctttcttcttttgcttattaaacttctgttccaacctcatcctttgtgtccacgttccttaacattcttggctctacacttgaacagccaaggatggnnnnnnnnnnnnnnnnnnnnnnnnnnnnnnnnnnnnnnnnnnnnnnnnnnnnnnnnnnnnnnnnnnnnnnnnnnnnnnnnnnnnnnnnnnnnnnnnnnnnnnnnnnnnnnnnnnnnnnnnnnnnnnnnnnnnnnnnnnnnnnnnnnnnnnnnnnnnnnnnnnnnnnnnnnnnnnnnnnnnnnnnnnnnnnnnnnnnnnnnnnnnnnnnnnnnnnnnnnnnnnnnnnnnnnnnncttcgaccccgtggagaggtgaggccggagcctcagagcctcgacacccaagcactgccaccgagggctcctgctctgccaagcctccctcgtgccgaattcaccacccggcctcgtacctagcctatcgtgt

SEQ ID NO: 447859 - DNA, 914 bp, Homo Sapiens
tttcattagaaaataaagtgtttattaagaaactatacactgaacactcctataagtctctgtggaaacacaacgccccattgtcatagcacaaggtgaggaaaatggcagaataaaagatgctgggatggatggagcctgggaggctggaaatgaggtaatgatttacaataattaaaaaacatcatcctcaagcttactccttaaagccacacttgggaggaggccctggacccaaagcatcagcagggcacaatggggaacagcctgacatggagcaatggggagcaggatgaggagagctggagggggcgagataaacacacacctggagccctggagagaacctgaactcccaggtgatactctggaggctgccccagatactgggcaagaacttggaaagcctcatgtttttaaaccccatggaggcatttgcagaatcgggctgggatcctgacacgaagaaccaccatccacaggacccaagaagtaaaacccttaagtgggaatccaaactcccagttaaatttgccaaaggcatagactctattctctactagtgtgcaacaccacccccaaacaacggtgggttaaaacaaccacctttttcccccacaagccccccacaggatgctcccagtttcatgctctccaccattaggtgggcagcctatgctgacttgatacaatggaggccccatgggccagtggagctgggagccagaagtctactccacccatgagtcagcaaatacgggagagtttcaggccctacaaatgtgcctttcctactgaagaagggaaagtcacccccttccctctcctcagtggatcagttgaaaatgggggaagcgagccccctctttgggagaggtgccatggataaatggcagggatcctctagatcactc

SEQ ID NO: 447860 - DNA, 504 bp, Homo Sapiens
tgacgctggtcatcagtttcctttgcttctggatgccttctgcaccttgctgttggggcatcctcaatgcccatctgcagctcagcccacaggcccgtcctgggcagggtgccggggcctcaccatgcccaatggcagcaagccctgctcctagtacccccggggcttcccgtttcttgcatcaaacagcccctttggagaatctgatgacaggtgtggaagctttcccgagaggcagccactttagagggtctgacgctccccactagagagtcggcccacagtgcagacaaaacgcagatcttcctctagagagaacagaaggctggagaggagacgcggagccggtccgtggagtccgccagcctgggaaacagctggtcgctggggaagctgcagcctccctgctcccctgccaggcgtcgggcgagagctgttctgttccctgacaagcgcgtgggccgccagtgctattcctgccacagtgtgggaaggcgctgggct

SEQ ID NO: 447861 - DNA, 691 bp, Homo Sapiens
tcgactctaggggacccccctcgcgaacctgttatccagctgcagctggataacatctcgtccttcctggatgaccacgaagagaacatgcatgatcttcagtaccatacccactacgcccagaaccgcactgtggagagctctgagtctctggaaggacgcatggcttctcacgagattgaaattggcaccatcttcaccaacatcaatgccaccgacaaccacgtgcacagcatgctcaagtacctggatgacgtccggctctcctgcacggtgggcttccacacccatgccgaggagctctactacctgaacaagtctgtctccatcatgctgggcaccacagacctgctccgggagcgcttccgcctgctcagtgcccggctggacctccacgtccggaacctctccatgatcgtggaggagatgaaggcagtggacacacagcatggagaaatccttcgcaatgtcaccatcctacgaggtcacactttgttttcacataatcggatatgatatgaagccagccataaagcccaggatgaccaagaatataatttgaaaatgaatttgtttcctatcgttaatggtaagcttccccttaaggccattttatgccttgagaccctagccaattgtggtacatgaaaattgtttattaataaatatatttacgtttgttaggaagatg

SEQ ID NO: 447862 - DNA, 1272 bp, Homo Sapiens
tcgcgaacgtgttatccagacagacgaggagacctgaccctccagaagatgtcaccgatgggcagaactacacacggctcttcagcggcctgcgcaccacctccaccaagactgggagaggcggtcaagaacatccaggccaccctgggggcctcctcacagcgcatcagccagaactcagagagcatgcacgacctggtactccaggtcatgggcttgcagctgcagctggataacatctcgtccttcctggatgaccacgaagagaacatgcatgatcttcagtaccatacccagtacgcccagaaccgcactgtggagaggtttgagtctctggaaggacgcatgggttctcacgagattgaaattggcaccatcttcaccaacatcaatgccaccgacaagcatgtgcacagcatgctcaagtacctggatgaggtgcggttctcctgcacgctgggtttccacacccatgcggaggagctctagtacctgaacaagtctgtctccatcatgctgggcaccacagacctgctcggggagcgcttcagcctgctcagtgcccggctggacctcaacgtccggaacctctccatgatcgtggaggagatgaaggcagtggacacacagcatggagaaatccttcgcaatgtcaccatcctacgaggtgcccccggccctccaggaccaagaggattcaaaggagatatgggcgtgaaagggcctgttggcggcagaggcccgaaaggagaccccggcagcttgggccccctgggaccccagggtcctcaggggcaacctggagaggccgggcctgtgggagaaaggggccctgttggccctcgagggttcccaggcctcaaaggctcaaagggcagctttggaactggagggccgagaggacagccaggcccaaaaggggacatagggcccccagggccagaagggccccccggggtctccagggccctcaggggctcaggggaaaccgggaatttgcagggaagacagggtcacccgggcccgccggggggccatgggggcctaagggtgaaaccagggatccaggggtcccccctggtcctcccgggggcctccagggtccaccaaggaaagtcagagctttcttcttgtaggaaaggcctgggggcaaaagcccactggttacccacaaatgcccccgaaggggccgccaaaacaaaaatcccagggccccagaaaagagctctaaccctaacaaaaaaatttgggggggcccctcgggaaattccc

SEQ ID NO: 447863 - DNA, 1174 bp, Homo Sapiens
  misc_feature (49)..(85): n is a, c, g, or t
ggaaatgtagatcactataggcgaacgcaggcttatgcggtggcggcgnnnnnnnnnnnnnnnnnnnnnnnnnnnnnnnnnnnnnatcaggccaaatcggccgagctcgaattcgtcgagagcggggtctccggcgcgccgcgggctggtgggctcagcggcggcgccggcactgggaaatgaccctgcccgggggcccaacgggcatggcgcggccggggggcgcgaggccctgcagcccggggctggagcgggccccgcgccggagtgtcggggagctgcgcctgctcttcgaggcgcgctgtgcggcggtcgctgcggccgccgccgcgggggagccccgggcccgcggggccaagcggcgtgggggacaggtccccaacgggcttccgcgggctcccccggccccggtgatccctcagctgaccgtgacagccgaggagcccgacgtgcccccgaccagccctgggccgccggagcgggagagggactgcctcccggcagcgggctcttcgcacctgcagcagccgcgccgcctttccacctcgtcggtctcctccactggctcctcgtcgctgctcgaggactcggaggacgacctgctgagcgacagtgagagccggagccgcggcaacgtgcagctggaagcgggcgaggacgtgggtcagaaaaaccactggcagaagatccggaccatggtcaatctgccggtcataagccctttcaagaagcgctacgcctgggtgcagctggcagggcacactgggagttttaaggcggcgggcaccagcgggctgatcctgaagcgctgctcggagccggagcgctactgcctggcgcggctgatggctgacgcgctgcgcggctgcgtgcctgccttccacggcgtgttggagcgcgacggcgaaagctacctgcagctgcaggacctgctcgatggcttcgacggaccttgtgtgctcgactgcaaaatgggcgtcaggacttacctagaggaggagctgaccaaggcccgtgagcggcccaagctgcggaaggacatgtacaagaaaatgctggcggtggatcctgaagctcccacggaggaggagcacgcgcagcgcgccgtcaccaagccgcgctacatgcagtggcgggaaggcatcagctccagcaccaccctcggatcccgaga

SEQ ID NO: 447864 - DNA, 540 bp, Homo Sapiens
tgcgtccagtgctgcttccagcgctggccccaggggcacgaaggctggtgtagggaggtgcgcccctccgggggcccgccagccgtcagactcgaagctgtggctgtcattgcttctacaatcagtgcatgttcttcgctgacgtcagtcggagctgtcctggcactatataaggctggcgacagccccgggacagaccctgtgttccccaaggcgtcttcagcctgccccgagggacagagactggagctcaatcttggaccgtacagacgctcgccgacaacctggccggcggcaccatgaggcaggcgggacgcgcagcgctgctggccgcgctgctgctcctggtacagctgtgccctgggagcagccagaggagccccgaggcggccggggtccaggacccgagtctgcgctggagccccggggcacggaaccagggtggcggggcccgcgcgctcctcttgctgctggcggagcgcttcccgcgccgcgcgaggcccggccgattgggactcgggacggcaggcgagcggccgc

SEQ ID NO: 447865 - DNA, 917 bp, Homo Sapiens
agagtttgcatgagatttccacagcaatctagatactgcttgtcaatatgaggatagaggcaggatctcagcgttaattcaaaagtctggcatgtcacagattccgatgatctatccacacatacatcaccaccagcaaacttctcgtgaaagtcactctgctccaaatacatccttgcaaagttaatggcaagcagtggatcatgaacatcatccagttcaagatggctttcagcaatggactgcatcttcatcaggttctccttggttgcctgttgctcagtaagaacctgtggagtggaatcttctccatgtcgaagacgggactgtacagattccagaaagagagtgtataaactttttctttctgcatctctggctcctgcctggcaggtggtgctctccgcacactgcaggttcttcagcagctgcatcgacttgccagccattatgatctgcttcaggacaggtttgaggaaggacaccatggtgtgctgcctgctggagggccctggtcactgccggaactcgcactagcgttatcactcattttttcttcattttctgtcttttctgatacgctatataacgtgtaagttgcataccagaagtctctgtgattaactggaacatttttgtttctctggatgatgaactccctggcgccatcccacaggtgcccgtgcacgatccactcgtccaccgtctgcaggtaaggccgcaccgtttccacccagagagagaaaaggagggagacggtttgctcagaggcttctccaacattgtcatattcaagaatggccttgtacagggtgttaagcaggtgagaggcccggacgacatttcgagtatcaggtggaacttctgctactccagtactaaacactttgtgcagaaccttgagctgagacattcga

SEQ ID NO: 447866 - DNA, 487 bp, Homo Sapiens
tttttttgagcaaacatctttatttaagaaatcaaatagggtaaaaattatgcaatttcacacaaggatacaagacaaagcttagaattacttgctcaaaagttactcagaatggaacaaaattgttcaagtgctcccaattagcacaggctgtattacttgcttttcaatggacatttactattttacattaagatctacttataggaacaaagagacaattcccagccccctctggtgtatcacctaaaagactgaatacaaatgttaatgtaatccaagcttttctttgacaacaatactaaaaattgccttacaattttttacaagtacgagtatcaacagtttactgtctgagggaaaggaaatataagaatataaagtgacagaagcaacacacttcactgtggcctgcaactgctcccagcgtcctattttataaacatgatttgggttctcacattatagcaggatcactattcctagc

SEQ ID NO: 447867 - DNA, 827 bp, Homo Sapiens
ctttaaacatagaaaaacagcctttggtttgaatctcaaggaagcagagagtgggatggctgtggccttgggcagaaaactcttgtagaaagaaacctccacttgcagtggagttgtatctccttctgccccttctcactaatcctaggttactcaaatagccaagggtctctgcagtagccagcagtcccccctcctaccctgtgtctgggagctgagtgtagaagggggtagtaaaggaagaccccagttcagttgtacccatcccagtcttgctggaacaagggtggaatggggtgaagggcacgtgcccgtgctcatgctgggataatttttggttatactgaaaattagaagagagaaaagagatacccgtttctccctgccactgatcctaagaacagggcccaggagcccgggaatgagagggtgaatcctgctgggagggagcagcagaaggcagcatgactgaggggctgaaacaaccccttgtcatcaggcagcaacccactagtttctcataggatggggactgaaggagcccctgagagcctaggaaggtcactatagtgaagaagtttgagaggtggaggagaaagagaagaattttgacccactcctttcccatgccctggttcccaattaggcacctgtggctcccaatctgtcagagacagagggttgcagacctagccttggcccctgagaatataaaattggggcactccaaggagagaaaagccaccacttaatagaccggtaggttgaagggactagagcgtgtggaggggtagttcaaggagagggaccagatctatcacatccta

SEQ ID NO: 447868 - DNA, 559 bp, Homo Sapiens
  misc_feature (25)..(25): n is a, c, g, or t
  misc_feature (53)..(53): n is a, c, g, or t
  misc_feature (77)..(79): n is a, c, g, or t
  misc_feature (87)..(88): n is a, c, g, or t
  misc_feature (102)..(103): n is a, c, g, or t
  misc_feature (134)..(135): n is a, c, g, or t
  misc_feature (170)..(171): n is a, c, g, or t
  misc_feature (189)..(190): n is a, c, g, or t
  misc_feature (215)..(216): n is a, c, g, or t
  misc_feature (236)..(236): n is a, c, g, or t
  misc_feature (244)..(245): n is a, c, g, or t
tataaattttacttttatttctgtngacatggcccctttatttttggtcacantcgtataattattttattttatgnnnacaggttnnctgagggcacttgnnatagttttatttgttttccagaaagaaaggnnaacgatgcaatgggccaccccattcccttatctgnnagtgtgttattaccatannacctcattcgcactttggatcttannaggtttaaattcttttctangtttcacnnagcaaagaagaagtaccttgaaaaaacataccttttcatgtaccttgtaatacacattcaaagaacttaccaaaatatctgctgtacacttaactataaggcaatgagtgaaacagtccagccgaattgtgccactttgctgattgaggtatacttgctcttctggcaaaagatggcctattctactgctggcactaagacttgaggagaaacgaaagacagaatgaactgtaaaaggtctacactaacgtaggaaatacataaatctaaaaaggttttaatgaatacgtacggatctttattctcctgcgacc

SEQ ID NO: 447869 - DNA, 298 bp, Homo Sapiens
ttttttgggttcaaaccactttattgacgggaatggggtggcaaagcagcaaggacgatgacatccgacgtcctcggctgggagctacaagaacgagagtgatagatcagcgggtgtgcgcgcgcccgcccgccagccccctcccagctccgctcgggcaggctcagactccagttcgcatcacccgcgtcagcagtctaacacgtgctttaattggaatgtcatcacagcaggccggcccccctacgccttcctgctcccgagccacgacctccggggcccacccagccagacgacc

SEQ ID NO: 447870 - DNA, 1053 bp, Homo Sapiens
  misc_feature (907)..(939): n is a, c, g, or t
agaggggggctccctggcgttagaagtgtgatagaaccgtgcgtttagtttttgcgcagtggactcaagggagacgcaaaatggtacatcgttataaagtataaggaagaattataagccgagccgcgcatattggttaaatttcatgaatgatatgaggtgggcggtacgttaggggatgagagaaaaaatatgggtgtgtgtaggaatacgggggtgtttaggggtgggagaggggagggaaaggaaactgtaagggttaaggaaaagtgggggggcaaaagggtggaattaagaggttccgcggctacggggagaaatagataaggggtgttcttaaaaagaacaaacgggtggatgaagggggagcgtatggtcagggataggtgaagccgaggaggtgactcttataggcgaaagttgtcacaaacaacgtgaatgttactctattaagtgatggccacgagaagaaatgatcggtgatattagtaagggcgcgggtttgtggggaggggtctcctgagggggtgaggatctcccagaaataaaggcccctataagggggtccctgatttgggtttgttttggggataggccgttcgtgtttttcgccgccgaggggttttatttgttgtggggggagaatggactccggcccggttttcgttaagaccacgaggtattttgttaagaggaggacggattaagagccaagggtcgcactgcgccgttattggggcaccagccgccacaaaaggggggggtgtttaaaaaaaatgtttttcggggagacaagagggggcgcgcgaggaggttagtatgatttttggtggggtattatagacggggggttgtagtatttgtgttgtagggggaagtaatgtggttttagatattggtcgatgannnnnnnnnnnnnnnnnnnnnnnnnnnnnnnnnaagggttcaaaccactttattgacgggaatggggtggcaaagcagcaaggacgatgacatccgacgtcctcggctgggagctgacctcccggaacctgcaggcgctgaaagccc

SEQ ID NO: 447871 - DNA, 476 bp, Homo Sapiens
  misc_feature (451)..(451): n is a, c, g, or t
aaagggaacacgctatgggatagagactagagaaagcagtgggacaaactgctgaccagcaaaaaagccgtataaactttcttttctgtgttgaatcttcagtcacaactagcaatcaccgtatcccagctttgttcttactcctaaacatttctatcccagaagcaactcttgtgctgtcatctctctggtgagaagtgctaaaaatgaaacaagacaagacccctgggccccaaggacctggattcctggccgagggaaagtgggccagcaccacagccctggtcccccagcaagaagcaaaggggctcttgggccaccgtggcgtctgtgctgcctccacctagcactccagcgggcacagccctgagggtgccgccctgggccagcctggatcccggggtcccactcaacgccattgcgaaggagtttccttgggatgttctggttncaaagacaggtcagtcggtcccgta

SEQ ID NO: 447872 - DNA, 519 bp, Homo Sapiens
  misc_feature (400)..(400): n is a, c, g, or t
  misc_feature (441)..(441): n is a, c, g, or t
  misc_feature (447)..(447): n is a, c, g, or t
  misc_feature (462)..(462): n is a, c, g, or t
  misc_feature (470)..(470): n is a, c, g, or t
  misc_feature (491)..(491): n is a, c, g, or t
ttttttttaaagggaacacgctatgggatagagactagagaaagcagtgggacaaactgctgaccagcaaaaaagccgtataaactttcttttctgtgttgaatcttcagtcacaactagcaatcaccgtatcccagctttgttcttactcctaaacatttctatcccagaagcaactcttgtgctgtcatctctctggtgagaagtgctaaaaatgaaacaagacaagacccctggggccccaagggacctgggattcctgggccgaggggaaagtggggccagcaccacagccctgggtcccccaggcaaggaaggcaaagggggctcttggggccaccgtgggcgttcttgtggcttggcctccaccttaggcacttccagcggggcacagccttgnaggggttgtccgccctgggggccagctggggttccccgggntcccantttaaacggccattncgaaggantttcctttggggatttttttnggtttcccaaagacaaggttaattcggt

SEQ ID NO: 447873 - DNA, 456 bp, Homo Sapiens
  misc_feature (403)..(416): n is a, c, g, or t
aaatcctttcccaaaggatttattaaaacacagaaaaccaaaacatacacacagagtacaaagtaaaggtgattgtgttggctacagcctctgtccagcctcccgtgggcgaagacaggacaagccacggctcacaggggagcctggcttccaaagctggacccgcccccgccggggccaccctggctgggactcctggcgcgccctgcacccagcccagggccctccctttgccagcctggggctgtgcctggggaaaggggtcggcccccttttagctgggcctgggccggtggagtctgctccctccacacccctgaactcagaccccacgggccagtggggaccctcccttcctctccaggggtgcttgggctccaatcgctgcttgaggagttcaggnnnnnnnnnnnnnnccaacgggccctttctgggttatcgcacctaaaaaatacc

SEQ ID NO: 447874 - DNA, 700 bp, Homo Sapiens
  misc_feature (68)..(85): n is a, c, g, or t
ttttatgttccaataaaactttatttatgaacacaaatctgaatgtcatatagttcacatgtttcaannnnnnnnnnnnnnnnnnaaccatttgaaaacataagacccacttttcggctcatggggcgtgcacacacaggctgcaggccacagtttgctgacctatactcaagggaaatccctctaccctgaagcataaagaaaacaaatttccccctaaaaataaggcattacagaaaatacaggacacctttatttagattagtgcatatatttaatagtgtgatattagaaataccttgtcaacacatagggaaaaataatatattttaagcaataaaaccaagattaaaatagtccatgatagctttgtcacacaaaaaacaatggtagtcactctcctccccgcgcacaaaaggtggcatcactggcttgttgagtggtacattttcttaccttgctgcatgtttttcagatagttccttagtcatacacatgcttagccttgtaatgccatgggtatgaatcctccttcattgaatgtaaaccagcaactaaagtgcttgttagcctgtgagccctacaaacacccactcccatattctagggcctgtttttctctgtccagagctcttagcgtgctttatctcccaaagatcctcaatgataagcagtccaccatgaagaatgctggttggtc

SEQ ID NO: 447875 - DNA, 545 bp, Homo Sapiens
  misc_feature (223)..(232): n is a, c, g, or t
ttttttttcacgttcaattaaagtaatttattgtattcttccagatcagacataaagagcatcttgggaattgataccacaacacaatgttatacaccattttcacaaccaggcttgcattgaattcttttttaaagaacatagtaattttaaaaaatctaaatatttacatattaataaaacatatatacagaagattgagacattatccatagatatggannnnnnnnnngctaagaaagcctataaaaaggtttctgaataaagactgaacagtagtcacagtaagtaaacacaattttaatttacaaaatatgattttgctgttgcagttttgatacgtatttccagtgtgtagatccgttcatcgcacacatctttgggttgaacaagctccacccgtcctcaaggtgctgaacaccccaagctgtggccccgccttggaaggcagtgcttctgaaggttcccagcagatctcttaacagaccacagttggaagttagcgtttctgccttgaccagcaacatactcatcctattttaaca

SEQ ID NO: 447876 - DNA, 906 bp, Homo Sapiens
ttccaatttgataagtatttattgagcacctgctgtatgccaggcactgtgcttaatcctgagatccaacagcaaggaagaagagacactgtcgctgccccagtaggactccagccgagtaaggggaagggaagggaagggaaagacatgaataatcacacaaatgaatgtcaaatgatgcagcaaagggaaggcacatgatgcccaagtgtaaataaccagggggcctaacctgggggaggaggagccacgaaaggcttccctaaggagcatggataagtctaccaggcagagggaacagcgtgtgcaaaggccctgtggtaagtagaaaaattaggagagagacatacagccagtagagctggagtgcccagctggggttgggggtagggggagatagtacagagtggggttggagggggagcttgtacccagatgatgtagggcttttgagaacctattacatgtatgttgatccttactctgggcaatgtgaagctgttgaggggttttaagctgctgaatgacatggtctttttgtctttggtcttctttcacttggcatagccatttaccctgccttgccactcatggggacgtggccaaagttttcacaaatgtttaacatgtccacagccagggaccaaggggcgagggaagaattaagtgagatgtttttttctcacatgcagttgagagcagggcttttgccgccctcatataagcagtgtcaagatcattcatatcctccttgtcaatggaagagatggaggggtaggctaacagcctcaaagggacttatgcagagacactagggagtaaaagccagagaatacagagaggacgtttttacctttagggcctgcgtctctggctttggccatcagggtcaaagagtaggagtcc

SEQ ID NO: 447877 - DNA, 835 bp, Homo Sapiens
  misc_feature (173)..(174): n is a, c, g, or t
  misc_feature (180)..(181): n is a, c, g, or t
  misc_feature (183)..(183): n is a, c, g, or t
  misc_feature (188)..(189): n is a, c, g, or t
gggcggttttttaattgggggagaatccacaggccctagttcaatggccagggttttcctttgggaaacaggttatggcccgtgttcccttacccttctggggcccgggcgcccaaaggaatggttttagaaagctttttcgagggccgaaggcggccgacagtgtttgtttnngggggnngnggggnnggttagtcacacaattttaattgtgaattatagtgaatggtaaacagtaaaagagtaattacatgaaaagctccatattttgcatgtttcaactgttcttcattgtctttacttgtaaggtgttgaaggtgggatccactcctgaatcttctttctagtggtagaataaggtacatattgttctggggtgccagtcacgttgaatttatggttcgtccaaatgaatttacgagcagtaagtggttttgttgttggaggatcatcagtcatactgtgaagccaacgatgccattcaggaggcaccatgcttccatccacatcccagaatgtgtttttgccattcatttcagtagtatatacaacccatcggtgacggccaaaaaattgcttgttgtcttcatagtatttgtttccatatttgtcttcccccactaatgtaccaaccttcgcatcatttgtcctgaaaaaaacccgtagatagcctcggagaccgccgtggccggtgatctgctgcagcccgcgtttcaggacctgcactaactccatcttgcctcgctggccccgcctcccgggtgcgccgagcaaaacccaccggatggaagctgccactcagccgcaggaagcccatcccgagaattccggaccg

SEQ ID NO: 447878 - DNA, 507 bp, Homo Sapiens; identical to SEQ ID NO: 123763
  misc_feature (31)..(31): n is a, c, g, or t

SEQ ID NO: 447879 - DNA, 484 bp, Homo Sapiens
gggagatgaagttttcagtgagctgagatttgcaccactggcactgcagcctgggacacagagtgaaactctctctaaacaatactaatacagaaaaacaaaaaagactccttagattcaaactggattccggcctcggttccactggtcataattcaactacttttcatctctaagtctctgtttctttaacttcaaagggaagttagccttttccttttggaggtgctgaggattaaatgagataatacgtggaaagcattaggtatgtagcacagttagcagatggtggttggctccctctgcttttccatcagtctgtggcctagtttaaatggtgggaggaagggtgtgagatttaaggctggttgtaagggatcagtcagtgtagttggaaaaattgtaagatgaagttataggatatagacccaaaccttcctggaaggccagaaagtttgcatagcttcaataaaggatttggctg

SEQ ID NO: 447880 - DNA, 446 bp, Homo Sapiens
gttgtctgggacctgcctccaccccatccaggaatgagaatggcagccaatctctgtggcctagctccagccaaaaaggagggcacgaccagaaaggaactccctttgcacgtaggcttgccccatcaccctttgagccctcccaacacagcacactagtcagcccactgccacgacctccctgccagccagaagcatccgtactgcacgctgtctgagaatgctgggcctggattgcagacagtgccgctgctgatcgcatcaaaaacaaagtcaaaggccatctcacattttgcaaatccccagctcatgaacgtgaagctgataggaaatcaccccagggaacccgaaaaagaaacttgattcctctattgctggccttacttgatgtcttttataaaacttgggactacaatactaacctttttttctgaatctgctgttct

SEQ ID NO: 447881 - DNA, 742 bp, Homo Sapiens
  misc_feature (608)..(608): n is a, c, g, or t
gcggccgcagtcgtgcacgtcagttggcagggtcactgtccacagcaccccggttagacgctcatctgggccagcaccacaaagcctgctgagcgcacggcgtgtgtcagccttgcccacacccgccagccggcgctgctctggccttccaccgatgacccccaaaacgatgcccagggccgtgggctctcccctgtgtgtgccagctcggagacgttcctctgagccccgcaagaactctgcaatgagaactgaaccaacaagggagagcaacagaaagacagattccaggctggtggatgtgtcccctgacaggggttctcctccttcccgtgtgcctcaggcacttaacttttctccagaggaaagcgattctactttctccaaaagtactgccacagaagtagctcgggaggaagccaagccgggtggagatgcagcccctagtgaggctcttcttgtagatatcaaactggaaccactcgcggtcactccagatgctgcaagccagcccctcattgaccttcctctcatcgacttctgcgataccccagaagcacacgtggctgtaggatctgaaagcaggcctctgatcgacctcatgacanacactccagacatgaataaaaatgtggccaaaccttcaccggtggtgggacagctcatagacctgagctccgctctgatccagctgagcactgaagctgacaaggagaacgtggattccccacttctcaagttc

SEQ ID NO: 447882 - DNA, 448 bp, Homo Sapiens; identical to SEQ ID NO: 61263

SEQ ID NO: 447883 - DNA, 890 bp, Homo Sapiens
  misc_feature (702)..(739): n is a, c, g, or t
cggagtggattggattttgtattttgaggctcattcagtgtgagactcggggaagtatcctatgttctagtttgtggctctttcatgcgccagacctggagaggagctgatgttctagtcttgaagctcttgcagctgcagacctggagaggactgatgttctagattgagggtcgttcagtctgaagactcggggaggagctgatgttctagattaagggtcatgcagctgtagactcagggaggagctgaggttctagtttgagggtcgtgcagctgaagactcagggaggagctgatgttctagattgagggcccttacagctgcagacctgaagaggtgctgatgttcgagattgagggtcgtgcagctgaatacttggagaggagctgatgttatagtttgagggccctacagctgaagacccggagagtatctgatcttcgagattgagggtcgtgcagctgaagactccgggaggagctgagttggtaatttgagggtcttgcagctgctgacttggggaggagctgatgttctagtttgagggccctacagttggaaatctgtacaggagctgatgttctagtttgagggtcatgcaggtgaagaatcggggaggagctgatattctagtttgagggccctgcagctagagatgcagacaggagctgatgttgttcgttttgagggtgtttcannnnnnnnnnnnnnnnnnnnnnnnnnnnnnnnnnnnnnggtcttgcagctgcagacctgtagaggaacatttttcctgtgaggtttcggtgctgatacttctattctgtgagttctggcaattgtgtccgttcacccagcctggtgatgcagcaggtgtcacagaaggacctgtcccagctggtcctgc

SEQ ID NO: 447884 - DNA, 1105 bp, Homo Sapiens
ctcttccaaataagaaattttcaaagttgagaaagcgcgagctgccggcgattctcgggacgcgggctcggctacgaagcaacaattttaatctcccaccccctgcgggcggatcgcaggcccgattgttcctttctcaccagcctgctcgactttttaagcaaacaggaggtggattactgtcgcctgcctgcgccgccacggctctgaccggattggagagagcttttctttgtgttctctcctcccggggagaggccgcgccgcgcctccgcgtctgcccgcgccgggcttcgggggcctggggagcctgaggcggccaggaagtggggcgaggcagggcggccacacggcccgagctgggagtcccacagtcccgcagcggcgacgccgccacccgccgagtgccgaggcccggggcccactcccagcccagctccaggagaggccgcgccggaggaccgcgaggacggcgccgcagcgccaggtcgggctgagctaagggaggaaatggagcgaaaagtggcggcgggcagagggccccgggcgggcggagaatcgctgacgagggcatttcggaaggaactgaacctaggagcacagggctccctcccgggaaggcagggcgtgaccctggagccgccggtccctcttgccgcggccccaggcgtggctggcgcgctccaggatctggagcttctacaagtttgctttgtttcctgcttttgcatctaaaaacccgctctctcctcgcccgcctgccggagaccaggactctggcccgtctgcctccctccggcgtcgtctccgggagcgcgggcgcggtggggcctgcaggccgggctgggaccaggcgcgccttggggcgcgagtggctcggccgtcgccgcagaacccgctccctgcgaaacagccgcacccgctccctgggagagtcatgagaactggggtcgcgcctgacccccgcgcccgaagaaaaccagcccgcggaccccgccacacgggccgtgacccgagccccgcgcgccgtcccgaacgcgcgcggtgaaaacgccccgctgcgccggccttgctcggtccccctcctccacccccacttctccgg

SEQ ID NO: 447885 - DNA, 202 bp, Homo Sapiens
ttccatgtgtacgaaatggctaagtttattcaacatctcggatattcatctggatattgggtttgttttgtgatacaatacatattcaccttaactggtgctactgcaaagaaagctttcttgacctgcatgacgtgcctcagagcttctctccaccaattggaaccacccaaagcctagtctagaccaaagtgctctggag

SEQ ID NO: 447886 - DNA, 1478 bp, Homo Sapiens
gcggccgcagggagcaccacctcagcctcaggcgctagtgaggacacaggccgtcctccggcggggagcacggtggggtcagggtgctgtgtggtcccgcaaagaggcagctgagcttgggcctcaggtcgttccacaccttgctcatctccttgtgcccttggatctgagagttgacgaaggcgcggaggatgtgggaggtgaggggcaggtagacgtggatgagctgcgtctcctggtgcaggcagtacagggagaagtagttccgcagctccatcgtctgaatcgcgttctcctgctccacgatgcgggactccagctgctccacggactccggctcgcggttctgcgcggtggcgctcatcatctgcctcttcatcaggctgtacttgtgcagggcccgctggtgcttgtgcaacacgcccttctcatgccgctcgcacaggtccttataggactgcagcagatccaagaagaggttcagcttctccaccacgtcgttctcttcctgcttaccctgttgtgcagccttgtcggcgagcagcgcgaattccacagacaggcctttcagagcctgcttcagggacccccacgtgctgctattcagagcggcccaggagggcagcggggtcgtgtcagaccctattgcacttagctccttcccgaatatgagaagatctgccgcattgtcgatggcccgcgacgcgatccgcttcggccctgtcgcgaagcttgtgaaagctattgtagatgttccggatcagctcccggctgatggcaaactgagcctggatgtcagctgggaggaagtccttggccctggtagccagcttacagttcaggaattcgtccccgacgcactgtgctgactcctttaacttgttctgcacatccgagccgctgaaggacaggaagagcttgaggaccacatcctcggagaacagggggtgtcgcgccaccaggttgacgaagcgcttcagggctctcctcctggcctcgatgaactccctgtcagctcccagcattctcttgggtggcagggcaggcaccatacggtaggggaacttgtgcaggagcatctcctggaagaccacgaagtcattgtaccgtctgtataccgaggacttgaagcgctggctggaaacctcatactccacatgcttcaggaagaggcccttcttctccggaatgagctccacctgcacggtgtccctggccagcagctcctgcagggtgtgggacagcagcagcgggttcccctgcggcatctgcattcgactgggggctgggacctgctgcacgatggcctggggctcgatggcctggggtgtcggcagatctgacgccgggggatccgcctcctcgtcagcctccgcctcagctgccgccccgactgcagccgcgggcagcgggtccatcgcgcggccagtcatgtgagcccgcgctcccacgtgacttcctcccgcgccacccggccg

SEQ ID NO: 447887 - DNA, 534 bp, Homo Sapiens
cacgcctggagcggatccgaaactactgagaggggccatggctggccgtgggcgcaggccgatccttacattcgaggccggcccagctctgtagcttccccctctgggcctctcacccgcgcaggacctcggtgggagcgcgcacgtggcggggcggggggccgcgggcccgagcccggactggccaccgggggcgcccgcgagctgacgctctggcccgttgcggtctctgtggcccgcgcgaccttccggccctggagccggtggccgcggggctccagcgacgccgtgtggtccgtgctccgctctgtggctccagggggccgagaaactgctgagagtccggcccggccggcagtgctgggcgcgggccgagggccccgggaggcagcggccccgccctctttacctgcggcctcgcagagcatgctgggagccgcgggaggcagtggccccgctcccctcacctgcggtatcgcagagcatggtgggagccccgggaggcagtggccccgcccccttccctgcggccgc

SEQ ID NO: 447888 - DNA, 454 bp, Homo Sapiens
gaaggactgaatgacaaactttattagaaacgctcttcattcatcagtcaaattcacattaaggtgggggcagtggggtggggaggaagaggcagtgctgtctggggctctgatatcccactgctgtgatgatttccagttaaaaatgagtctgggcagagagtgtctgaaacatataagaggtggcagcagcagtggcggcggaggcagcagcagcattcctgcgagaggaccaggctcggagcaggtagagaatgtgtctcccatatccacccttccagtcacaaggctgcccccatggacctcaagctgataaataaacagcacatcacacacacatttgaaacaggaaacaaacttgtagaagtctcctaaagtgaaaaaataatttgctcaaataaagctttgtgacagccatgccgcaccctgaatggacgttgcccagagaccctga

SEQ ID NO: 447889 - DNA, 490 bp, Homo Sapiens
ttttttttacagtttcaatcttatatttattctcttgtggaatgctaggtttaatgttacagtatggttgtcaaagctaatgaaatgtgacaaatgtctaaatgctgcagaacagtataattttaattaaacaaaacacctgttattgtacagctgaggtctgatggttgttaaactgatgcctatgtgtatggccagccacaaaccttggggatgtttattacctgtacatatatatacaaatatatcccatacatatgtatgcacacaggcatgtattaatttatgcgtgaaacttataaaattatatatacaaacacatacatgcacatctatctacatatacctaccctcaccattgagtaatcagcctcatgcccaattattattgctgcccagtataactacatgattttagtgccaataccaggcacctttttgggtgcaggataggtacatctatgcatatagatatgcatattcatgtatg

SEQ ID NO: 447890 - DNA, 1103 bp, Homo Sapiens
tgggggcttcagcccgggaatagggggaccgggttcgtagagtcctcgccttctcgaggacacgcagatgatcaccggcccacctggtcgttggctgctccagccactctcgcagcgggccagcaacgatctcgcggccgcctcacaggggtagccaaacacgccggtggagatgcaggggaacgccaccgagcggagccggtgctccagcagcaggtccagactgctcaggtagcagctgcggagctcggcagcctgactggcgctgggctccccgtaggcgatgggccccactgtgtggatgacgtacttggccgggagccgatagccgccggtgatcttggccttgccagtcttacagctctgcagggtccggcactcgtcggtaagcagggggccggcggcccgatgaatgcagccgtccacgccaccgcctccgagcagggagctgttggcggcgttgacgatggcgtccacctccagcttggtgatgtcgctgcggagcagggagattttctcattgagctgcttgtcctttttatacctgggctcctccaccttcacagccacccctttcgccatctccttccatgtcgggatcttcttcagcctgacaaagtccttgcagaagtaatgttcctcccgctgcttgtcactcaggcccttcagaaaggatttcgcctccttccagtcggtggaggtgctcaggtccaccttcgccgccatggccaggggggcccaagtgcgcaccccggctgtccgccccaccgccgccgccccccacgccccaactcccgccgaggtccgcgcacggcggccgaacacgcccaggaacgccgggggaccgcacgtgctgctgcgggtcctcgtggcacccgccaagtgtccgggccgggggcgcggggggacgagcagctgccccgccgcgcgcagctgtgccaggcggccggacagtcggctctgtagagacatgagcgggcggcgcgggacggctctccgcccacttggactctatttacggcgctcgggagtgtctctcccttatttactctgggaccgggtggcgactgccagccagatcccgggaattccggaccggtcca

SEQ ID NO: 447891 - DNA, 486 bp, Homo Sapiens
tttttgcatttgtaatttaattttttataacaacttgagataaaatctacataccacacagttcaaacattcaaagtatacaattcagtggtttttagtatattcagagttgtgccaccattaccacaatcaactttacaacgtttacatcaccccaaaaaagaaaccccatactaattagcagtcacccctttgtcctccccaacccttcagcctaagcaaccactaatctgccttctctctatatatattcgcctgttctggacatttcatataaatgaaatcatataatatgtggcctttcatgtctggcattcttcacttgatatgttttcaaggtttttccatgttgtggtgcatatcagtacttcatctctttttttattgctgaataatattccttgtatggatatgccacgttttgtttattcacttgttagttgatagaaattagggctgtttcaattttgggctattataaataat

SEQ ID NO: 447892 - DNA, 438 bp, Homo Sapiens
ttttaatgttgaagactccactcagtcatttgagctccaggaagcctttcctggccacccattagttaagagaaaagcccctcttctgagctcccatagcacccacttcatacctatgctatagaacacaccgccaaggacggaaattatccaaaggtttgtgtccattgattgccatgccaggcatccagctcttgctgaagcacgcaggggccctgacttcctcattaggtattctcaacaccttcaccagcagctggtaggcagcagagctattgttactgagctgcccacggcaccaatggatctatgaatgaacctgaacgtcttccctggagaaaagcacttgcttgtcaagggaggaacaggggtctgaaatgctaacccctgccctatattatgggtgtgcatacggtgcaccttccaaagcccagagtg

SEQ ID NO: 447893 - DNA, 474 bp, Homo Sapiens
aacctttagtgctctcttccttttctttgccaaggagtgtctctgctgctctttatttcttaattccttgtgctgtgtctgtaacccccaaaatacctttctgatgttcacactaaactcctgttacttcagcacaggaatacaagggggacttagcagctgtgacctggtgtgacgagggctggtctttgtttaggggtccttatgagacctgaggtctgtttattctaaagacttttgctaggctttaaatcatcgaagaaaaacattttattttatcacagttttcaagtgagaaggttataggaagagtttctttggttgaatgctttgctttgtgctgcttcttatgggatgagttcacaaacagcctcatcctgtaatggcaatgcataggcagatattccttggaggaacttcccaggctctaatagggaacgtcagaaggctgccctgctgtggagtggaggagtt

SEQ ID NO: 447894 - DNA, 413 bp, Homo Sapiens
  misc_feature (388)..(388): n is a, c, g, or t
gagccactgtgctcggcctctgacactaaataatgtcagttaagggaatgagaaaaagggcaggtcacgcacctggaacctgggctgtgccaaaaggtcaaatgtgcacgtatatacagtgactaggtgacaaatgcaatggagcatcccaggctgggatgaaggccaaggccacctacctatgaggaacaaccactgcctggctggaacgttccagaacccagtggtttccatagctgccctacgacttccgagatgactaaacccaccaaggactctatcacactgcttgtcttggccactcacccaccgtggatgtgcacagaccagtggctcccacgcagcacaggccagacaaaagctggaaggtgaaggcttcttaccttanaaagacaaagtggggcaaccgtgga

SEQ ID NO: 447895 - DNA, 218 bp, Homo Sapiens
  misc_feature (179)..(179): n is a, c, g, or t
atgggcatgagccactgcgcacaggcaactttttcaagtataacaatggtaccaggattatgttttctcttaaatcccttattgtttagaggtatacactgaaatactgacagaggaaatgctatcaggcctgggatttgccaacagataatctggcaggtgggtggtgagtgggtggngaggatccataagccgcactgtgcgttgatcacttttcc

SEQ ID NO: 447896 - DNA, 464 bp, Homo Sapiens
  misc_feature (53)..(94): n is a, c, g, or t
caccactcagctaatttttgtattttcagtatagatgaggtttcaccatcagnnnnnnnnnnnnnnnnnnnnnnnnnnnnnnnnnnnnnnnnnngtgagccattgcacccggcccaccttaactttacataggacaagagtcccaaacatacaaactgatcacgaagttaacatatacacctcagacaggaaactggtagccaacagcctgcaagtcatctactagatgtttagatgtttccaaacaagcaaggtgtcatcgtgtatcaagtgtggctgtgagtgcagcagcagaggtagcagcatcacctatttccacgccagtaacagctccctgggtgcctcaataccggcacccggcagaggcatgtagaccggacgcgtgggtgacgatatcccgggattccggccggtaccagcctgctttttaacaactgttcatatcaaatgcccttggttgtgcg

SEQ ID NO: 447897 - DNA, 439 bp, Homo Sapiens
aaggtagaaaccaaaacctgctttataaggctgcgtggccaccactggcttctctgctgagatatgaggtgccagccaggcagacaggtgacagagggtgacccttcctcaccttctccccatcactaccatccctccggccctacaaatacccatctctataatgcaaccacttcaaaaaatactctgaggagggacagggtgaaaggggtagggggtcagactggtctgaacagcaggctggttcccgtgaggtagctgatgcccatgctcctgggcagaggcttttggagagaggccagttatgggctcacagccaggagggagtcacttgattgactggaaagtggaggaagcagaaagtcttgaagtctgcccagagcacttgatcacaggtaacgtctgggtagaaaggctgggctctttgctggtgtcctca

SEQ ID NO: 447898 - DNA, 1408 bp, Homo Sapiens
  misc_feature (250)..(312): n is a, c, g, or t
  misc_feature (1395)..(1395): n is a, c, g, or t
attttaaaacacctagtggtcagcggggacgcatttataaaaagattacaaaatttgtctttatgtcggatttgggaccaacacttttttatttgcgcccaaaaaatgttttagaaaaagctttccatgctttaggtaagaacttggtaaaaagaaggattgggacctcttgcccgttcaccgggtattattaaaaacgttttttaaagtgtaaaaatccccttttgtttcccccaggtgtttattaccnnnnnnnnnnnnnnnnnnnnnnnnnnnnnnnnnnnnnnnnnnnnnnnnnnnnnnnnnnnnnnnaagctttcttgggatacccatcccttagaatgatggaagttgcagaaaaaactgggaaaaaccttgacatcgtgcatggagacccaggaaattaacatggcatggcaaatcccagggaagaaaactcatgtgtaaatcaaacagagctcaaggaaaagattgaaatttcttctcttcatgtttcaaaaagaattccagaggtcaaaggaacaggtgcaggtgcaaatgtatataaaaataatgagcagcgctcatgacaaatcaggatagctacattcagtcatctttcatgtatgtctaaactcaggccaaggggcaataagtgtccactgtgctttaaaaggtctagaaatagaaaaatcaacacccaaatcttttctaattccacatggccatttgtcacgagatgactaacaatgtctgtggggtcaggtttaatacatttgcactgagctcgtaccaggcagtccataaaactgttgtcttagaatttctccagtccccacatgtggctgttttagaggcatttccaaacttaaaacccagcttctatagctctccgaccctcttttacctgcttagaaatgaatcccaccagacctccacaaatcaaactttgttacatcatcccctattgctgatcgaactcactgctccagcattccaaaaacagaaggcataaaggtgaatacaaacataagaagggagtttacatctggtcttgcagactttccatatagtctctaaagtcctgtgaatcccccagccccatatcttggcagacccacttgatgttatcatcgctgtcaaacaggatggagttggtgtatgggccgccgtcctctgggaggatggtggtgtaggaagtgaacttgactctcttcctctttgggcccgaagaattcataggttcatttttaatttctttctcattgacatagtcagagggtctgagtagttgactatgaaaagtcttctgggaactgccattcagaaggaagttcctctcctcgaactgcaggcccctgtctatcatggttgtgcactcctctgatgggagtgtaatgtccacagggttctccnccctgtgaaagta

SEQ ID NO: 447899 - DNA, 1060 bp, Homo Sapiens
gaaattatctcttggggcccccgggggccccaaattgggggaagaccctccccttggcccactgggttccctcccacgggaactttccaggcaggttccaagggggcccttcaagcaaggggggtccttggccccggagtaatcgaatggaaaaaatctccttccaagttcgggccggtttcaagaagccccccgcaaggaagtccctgaatctcagccccctttaaaacggtcgttgtggaagtgttccccctccttgaaaaggaggtaggcgtacatgtcgttcatgtccacgttgaccatttccagcaggctcttgatctccttgaagctcatcttgctgtcctggttggagccagcccggtgcagataggagtggatccagtggtctagccgctcgcgctggctcatggcgtccaggcgcgcgcggagcttggtcagaccgcgcacccagcgctgcgcttcctcagccgtgggcgccgccaggtccaggttcttgcggcggcccttgaaggcgatggtgaggcagcgcgctggcgcgaaggcacccccgaagcgccgcaggccctcggactggtggccctcgcggaccgcctcgatgtgctgcacgaagaagatgtgctgcgatggcgcacgcgggatgcgccgctggaaccacacgctcaggccgtcctcctgcagccggtacagccgctccttgtgccacgtgcgcgagcggatcttgcggagccgggagccccgcagcatggcgcgcacgtcctcgtcctccgtcaggcccatcttcttcagcgcccgcagcccgggcctcttggtgccgccatcggagggagtcggcggggacgggagagcgaccggcgccgcgacttgggctgcgacctgggcggccaccgggggctcctcgggcgggcggcggcaacgcctccagcggccgcacagcatggcttggcggggggccggggccgggcccggggtctgcacgcggggacagggcagcggggcgccgctctggcccggccccggctctgagcctcgtgccgaattcgccacccaggcctcgctt

SEQ ID NO: 447900 - DNA, 208 bp, Homo Sapiens
ccgcacccgcccgccgcgggtagcatcttctcagcgccccggcgcccaggaacgcccaggaaacccagtcctcctcctaagcaacctgcggcgcgggtacgcccgccttttgctattattataaacgtgcgtgcgactaaaccttcggatttttagactttcttctcgcttcctctgacccaggctgagggagcccccgaggctactg

SEQ ID NO: 447901 - DNA, 459 bp, Homo Sapiens
cttgtttaaaaaaattgttttcattttaatgatctgagttagtaacaaacaaatgtacaaaattgtctttcacatttccatacattgtgttatggaccaaatgaaaacgctggactacaaatgcaggtttctttatatccttaacttcaattattgtcacttataaataaaggtgatttgctaacacatgcatttgtgaacacagatgccaaaaattatacatgtaagttaatgcacaaccaagagtatacactgttcatttgtgcagttatgcgtcaaatgcgactgacacagaagcagttatcctgggatatttcactctatatgaaaagcatcttggagaaatagattggaaatacagtttaaaacaaaaattggtattctacaaatacaataaaatttgcaacttgcacatctggaagccacatttgagaaagctggcttcaataaccccggctg

SEQ ID NO: 447902 - DNA, 630 bp, Homo Sapiens
  misc_feature (166)..(166): n is a, c, g, or t
atttggtggggaattccccagccccttatttcatgaccccagggtttcccttagggaaaccagcctaggaccccggttccccctttccctaggggggcccgccccgccaaaccgaaatggtttaagaaagctttttggagggccgagggcgccgaccaagtttttngtttttttccctcccccgctttcgggtgggggttttttcacttgaaatgccctgtaattcaaaaacaggggctgtccacagcaaacagctatctggatttaagaccccaaattcacacaccacaccacaaattgtccacttacaagcaaaaaataactaacagccaagcccccaacccactctcattttattcccttggttccaggtctcctctgagcaggtcatgtctcccggtgtgtttgcgtacaggctgtggggctggggggaaggagtcttttttcctcttaccccaggcaggactggctccaggttgcacagagctccacagagaaaactgctcactgcagagaagggcatggtccagcccaagctctactctgatgagctctgagatcgggggtggtgacttcatcttctatctatggcttggaacaatgatgatgaccatgaccctccggtttcag

SEQ ID NO: 447903 - DNA, 490 bp, Homo Sapiens
gctgctccactgttcagttttgttttgtggttaagatcaagtttggtgggtggacaaaaggcactttcacaggcactctgctgtgacacttgtggaacaggtagcctgcttgccaccttggtggctgcattaaagccttctgtggtggagggtatcttatcacagtcggccttaggtcctggtaaagaaaaacctgcaatgttagcatctgatttgattttgtaaacctccattgtcttcattcttgagtagggtgggattggcagtttccctttggggactgaagagatcaactgaactgcattgccaagaatggttggtgataaattggtcatggtttttgcaagatcaacttgttctttaaatttttcactggcaacagcagaaggtttactagatgttatcttgcttacaaagtgtgctttccctgaaagagctgtgaggtcctgcttggcaggctcctctggtgtggatgatgctggggtagcag

SEQ ID NO: 447904 - DNA, 541 bp, Homo Sapiens
ttttttttcttgttcagtgatagtttattggtccttagcatgacatctcgattaccaaggtaaattcacatacacaactgcaggtaaaaacatgtaaaataatataaaaataaattgaaggctacttttatatatttactgaattaagtagtgtaataaatactatgataagcaaaaagcttcaatcgcacaattcagtttcactgaagttacagtagtgtttgtaaatacgagttttaaaatttaagttacaaatattaaagcactgaaaaactagtataaaagtgaattttggcacgtaagtgagctcttatgtcattagtatttgacatcctgggacaatgaggaagccagttctcacctacttttttgaggtacaactatccaactagatcagcaacacggctggaatacttcgtagtttacaatctttgaattgaacttttcccttttgagaagcccaaggagcaacccagagcttcttactgtgcaaaaattctccaaaatcctaatagaatttaggagggaactttttcttgcg

SEQ ID NO: 447905 - DNA, 444 bp, Homo Sapiens
cattgttaatgagtgtttattgttaataaaaccatagtacatttacagtaagtgacaacattattgtacagttaaagtatcatacaatattacagcaataaaataatgcctatttctttgtacatccagccaagcagctagtcaaaatattttccagaattgcaagcccctgggggcttttcagggtgacctgagtgccaccttctgaaatgcctggggcttttggtgaataaatagtttttaaggtgcggccagacagctgaagaagttgcacccagacagactgtgcctgatgctgccccagtgtctggtccataaatatgacaggtgtcaggggagcccagggcctgcagaattcgagggcaaggccgtgaggggacacagcagaaaaggcctcttctcctggcccttaccttccatcaatgccctgtcctttaatctcca

SEQ ID NO: 447906 - DNA, 556 bp, Homo Sapiens
  misc_feature (513)..(513): n is a, c, g, or t
  misc_feature (520)..(520): n is a, c, g, or t
tgcgtttaaaacatttgggctattccctgacgatctatacatgtaaatttgattgctaaacattgtcactttgaatgtcaaactatttttaatctattgattttgattaaaaatcataatacaaacagagctaaaatcacgctaacaaaataaactaaatatgaaaagttgcattgaaagggcatcacattattcttaataggatcgtgtagaaacattccaatggcagtgttctcaaaataaaacaaaattacattagaagacctccagcctggccacttttgggaccttacctgtaactctggctggtgggtgtctttactcttgtactacatggctcacttacatcagacatcatatttgtataccctgagaaatctgacactgaagtccttactctatgggccacttctccattagagttagtgataaaggtcattggcaccctgctgcccgacttaaactgagaacccaacgcttgtgcaaaggtctcaatctgatacgttggtccangctccanggtctttctgaggatctatctgggctagctaactcc

SEQ ID NO: 447907 - DNA, 958 bp, Homo Sapiens
  misc_feature (811)..(865): n is a, c, g, or t
aggctctccttcccgaattctacgaggtcattcccagagtggtaggccttttatagtcccctaagtgaatagtataacaatcggggcctgttatattggggaacccggggcacaaacagtggaccttccccaaaatatcaaggtccgagagcatatttctgagttgttcaccgggcccaattttggccgggtgaaaccccaattgtttcaaccatactccctttaatggcatcccttgggtgtaactgacaaatcgttgttggttatagtataggtaatgtagtccagtctacatttttatttatagtagaccacaagaaaaggacagacttgaatccagcagctatttgatttcgagctttgaattcgtttggtacccctcaggggaccccgatagcatctatgtagatatcggggtcaaaggacccttgaggggctttcctttttttctgagttagttggtttttgtttggctgatgaaatgccagggtgaaagggatagacaactggattagagcccaagtgccactccagttgcttggcagcatacccactagagggcctccgcaatactatcaaacatctgctcatggatagacaagggcagtctgattggtgagctcttcaaaaggcttgggttcactgcatcctgttagattcccaaagaatgccaagttttctccctggagtgctgggtccatcctttttcagccattcagattgctgtttcattcatcaagagtaccagatgaggtcctcctaagctggttcaagctttccctcttccaactcttgatgagaacgtgagacnnnnnnnnnnnnnnnnnnnnnnnnnnnnnnnnnnnnnnnnnnnnnnnnnnnnnnnaaaagctttggaggagcatcccccggggatgcgtcccatccctcatccccgcccttccagcccgaccggccacctgaaccaccggctaccgct

SEQ ID NO: 447908 - DNA, 535 bp, Homo Sapiens
cccatttcctatagagggacagaaattattagcatttcagactcatagactcaacttaaaaagggcgcaaccaccagctcacaagagcacatcctccgcccctcccagcgggggagcaggaggtctgcatctgtccgtggagacggaccactactacatcatgaacacccgggatgagaggagggacccggccgtgcacacaatgaacctgacaggcgcgtgtccacgctgatgtcacggggcctgtggacgggggcctgtggacgggggcgctgccccttggagtcctccctaactcagccatgcccagattcctggggtggtcggctgtaactgaggtgagtgccacaaggcctctgcgtgtgttcagagtgtccacaccagactccggccggactcatgggccctgggactccgcagccctcgaccttggcagcctccttgcctgcgggtgcttgaatgccacgcagcatccgacgcatcccacaaccttgagtctgctatgagtcaagtgtggtcgctgtagataaggagg

SEQ ID NO: 447909 - DNA, 573 bp, Homo Sapiens
gtgtattacgggcagttctttattacatgagctcaggccgtctgcacaaagccctgggagctaggcagtcagctctcatttcatggatggggaaactgagactcagagaggcactcttatatctggccccagaggctcggtacagagacgtagagagggaggcgggctgagaccccgtcctgccctgatgcaggccaggattggggcagacccctggcgagggctgtgaaggcgggagccctgtcctcatttgaggccacacatccttccacagccagacccctaagtcaggcctctggggcggctgaggcccccagacaaaggtgttcgtggagggcagaacagggcggatcaggagctggagactgtggttgggcctcctcttctccccctagcttgctgggtgcagggctgctggtctcatcctcagaggattcagctttaccccgataccataggccaaagctgctctctgcttcctctggtgtccctaacatcttggccttgatcttcttccgctgcttccggacagccaccttcatgcctcgagcagaagccggggttgtgtccgag

SEQ ID NO: 447910 - DNA, 506 bp, Homo Sapiens
ataggccaaagaaactctgtattttggactccgggggtgggggatggtctcccttgtcatcggagagcaggatccatgggccagcctcatcctcactgctctctgcttcctctggtgtccctaacatcttggccttgatcttcttccgctgcttccggacagccaccttcatggcctcgagcagaaggccggggacccggtggtctgtgagcagctcccgctggaagtaggccagttcctccttgagcaggaacactttggctttgagttcattccgctcctgaaggatctgctcaaactcctcccgactgaagcggcactgccctgcctccgaggggcgcccgagctgctgcgcggcctccgccgggtcctcagggttccctggggcgcctgcgccggcggtcgcccattcgggctcctgtccgtgctggtgcccgggccgcccggcctgcccccgcgctcgctctttagcctgcggagtcgcggcttcgccaggctgctggcgc

SEQ ID NO: 447911 - DNA, 435 bp, Homo Sapiens
ggtttcaaaaaatattttattttctggaatagccataatatctcagctctgtctttatgccctctctccacacggaggaggcagaagctatgacaacactgaggtgccacacatcacacctgcaaaacagaataatgggagcgtttaggagactgtagaaaatgctcaccagggtgcatacagacaggatgggggctgggcattgctgggctgctgctgtctgtcaaggacattcagagagatatacatgtccccggggcagggcccgcctccatcttcatctcttctctctcatgtgtcaaatgaagcagaggaaaaacagcagagagtccttcacggctgctggactaggcaatgcaactctcacaagtgatgagattgagaatgtgccttacacatcccgtaggtctggcggtcacgaatgcgagatttgct

SEQ ID NO: 447912 - DNA, 1382 bp, Homo Sapiens
  misc_feature (508)..(508): n is a, c, g, or t
  misc_feature (1189)..(1189): n is a, c, g, or t
gcggccgccatactgggggagcatgggctgctgggcggcggagccattgggatactgcgatggggggaacacggggcttgagtgcactggttgggcgccgcccggcagggccaccaagtgctgcgtggagctgcagggccccaggggctgcccagactggccctcaccgctggctgtgcccgccgccccgtactggccgcccacagggcccgacgacgtctctaggaaactggcctctgggaaggccgttgagtgcttgcgcttttccgccccagagctgctcacgccgcaagggtacagggggacactctgcaggaagggcaccggcgtgctgaaggggccttctagcattttccgcagctgcttctccttcttggccacttcgttcaggaagagcttggagttcaggtggccgatcttagtgggggaaaggctgctgctcgtgcaggtctgggtcctgtccatcaggattttcacagacttggtgttcttcatgaagctgacatcntccgtcttatcaaagagcagctgcagggagcccagcagcttcttggcctcctgcatgcgctccccgaggtgcagcgcctgcgctgcgttctcgctgcagaacttggcctgggccttgtctaggacctccactgtctgccgcaggtcctcgtccagcagctggtgcagcttctcgtactgcagccgaacttcctccttcagttggttcactttctcctccaccaggcgcttgtctgactcgagtttgtacagctggtcctcaatgtcctgctctcgctcctccagccggtcctgctgcttcatgagcatcttccggatttcattccttcggatctccacgtcgcacaccgagtgtccctgatgcgcgccgctgtagtagcagcagtactggcacacggccacctgctcggcctcgcagtggtagaggcggtaggcgttgtgctgcgggcagctccaggcccgcacgtcgtccgcctccaccaggaggtgcccgcgggcggtggagggctgctgcaggtgcgtctgcacgtgggactggcagcagggcgcctcgcagcgcaggcagaccttctgcgcgggcagcggggggccgcggcggcagaacacgcagtgcagcgccgccggcggcttctccacgtgcagggcattgaacttctcccacgatgttggtgagcttcaggtntcttctccaggcccggcttctggttgtaggcctggttgcactctgggcagcgtacgaggccgctgtccttggcccacgcctcgccgatgcagccccggcagaagttgtgtttgcacggcagctgctctggctccacgaaaacgtgcaggcagatagggcagatgagctcctcctcgaagcagttcttccaatt

SEQ ID NO: 447913 - DNA, 708 bp, Homo Sapiens
  misc_feature (33)..(33): n is a, c, g, or t
attagcaatttttattttccctttttgttgccngggaaatgcagtacttgcttccagtaattgtattgtaatgtgagaaggtggtagcactaatggttgaatacaagagttaaactaatccacaccagctcaaaaaacctgtggagatttagttgaataagaatggacgcccacagtgattctcaaccaattacaaattttcacagaacacagtaaaactaaaagggtaactatgagagtcaatacaagtatactagaggcacagggggcccggctcataaaaacagatttcagaccaagttattaacacggggggtgtttcgtttcataacagatctcttaccatcactggaagtgttccatcccctccccctacaatttgaaatggaaaacagaggtattccgagtggacagatttccatgtgtggtgggaaaagtccccagtgaattttgctctggtgagagggcagggctaagggtggggcgggggatcagggatttgcctttgagagtcttcctaaaggacctcctagaacctgataaagctcctagtctaggtctagttagtatctcagtggtgaggctaccaaatgccttcgcagtgcagagacgatggtctgagaccagggagaaggcaccgagccgttagttctctcaagcctctgtcccagcggagctagcggccttatgaccttcggttgcaatgtc

SEQ ID NO: 447914 - DNA, 452 bp, Homo Sapiens
  misc_feature (183)..(207): n is a, c, g, or t
  misc_feature (218)..(279): n is a, c, g, or t
  misc_feature (363)..(376): n is a, c, g, or t
cctgtttttgcaaataaagttttattggaacacagccataatccatcattcagatattgtttgtggctacttcccttttaaccagcagagttggtagttacgacagagacaatatggcctgcaaagcctgattctgtcaaatgactagactagatttcccatactagggagcatagcctagannnnnnnnnnnnnnnnnnnnnnnnngagacagaatnnnnnnnnnnnnnnnnnnnnnnnnnnnnnnnnnnnnnnnnnnnnnnnnnnnnnnnnnnnnnntgggctcaagtgatctcccaacctcagcctgctgagtagctgggaccacgagcatatggcaacatgtgcaactaacttttgtannnnnnnnnnnnnngttaattattattttttgagaccgagtctcgctctgtcgcccaggctgcaatgaaagacctagcctcactgtcttt

SEQ ID NO: 447915 - DNA, 475 bp, Homo Sapiens
  misc_feature (151)..(168): n is a, c, g, or t
ttttttttacaatgtgaacaacatttgtatttgagtaattttctttgtatagcctagatttttatattaagattttttgataatagcaatgattaaccaaagaaaagtgtttattggttaggccaatacccaaggggtttttttgcacctnnnnnnnnnnnnnnnnnnaactcaatatccctcttggcatccttgagtacctctggccccaagggaggattgtcagagacctggggccagccaagagcccagaagcggggaggtgggaataagtctgtgttccagtccttggaggtagaatgtgatgggtggagtggagactgtttccaagagggtaactaaatatccagatggaagtgtgcaggcttctctgtgcaactcttgggaagtaactggctgttttcagaacctgcttgaaggtgctgctgaggaagtagacgagcgacagcccgaagaccagggcgagcacccacct

SEQ ID NO: 447916 - DNA, 1046 bp, Homo Sapiens
  misc_feature (889)..(950): n is a, c, g, or t
cggtttaatctttcccgaatggacggctgaagggccaacgtctttccgtagaggtcccatctggtaacctcgggttggtgtaccgagtccaacgatgacaacctcgagtaagggggtcaaatcccaaggttttccttcacgctgcccttggttcgtctgtcccgtgcagccctggcccgtatggcttgaaagcttgggtccccaggagggcgagttgcttcagcgggggcctccttcacccagctggagcaagtccgctgcacccgtcaagcggggaagagcctcggcaggcctttcttccatagcaatactttgctatggggtcccggtaggtgttctcatgctgcacgctctgagatgaggtcctgcatttggccaggcacaactcaaagtgatcttcgactgccatgaagaggttctggaatgccacggctgcccggttgaggaagcgctccaggagaagttgcttgttgggctgcaggcagcaggagacacagtactcataggcgctgcagcagccgttgggccagcagccatcacagcagtactgcttcgtgctagggacgttgacattacagcagccatttaccagcaaatccttcctctcgcaaacgtagccgagttcatccgtgatgaggtgcttcccttgaatggagttgcggcactgattgctcggacgactgctattgcccaagttaaactgcactttccacgggatgggctgattatggtcatgaacctggaggagattcctatctctcactgccctctcctcctgcttgaaggtgctgctgaggaagtagacgagcgacagcccgaagaccagggcgagcacccacctcttccgcagaagccggcgccacaccatggccgccaggttcaccatccnnnnnnnnnnnnnnnnnnnnnnnnnnnnnnnnnnnnnnnnnnnnnnnnnnnnnnnnnnnnnncatggcccctacgcgcccggcagccccatccctccaggcaggcgccggccccgccgccctgaatttaagcatattagtcagcggaggagctcgtgc

SEQ ID NO: 447917 - DNA, 456 bp, Homo Sapiens
agtttaaagtgctttctttgcccatgtaaatgagaactcaactgctgtttacagtgtcagattaacatttgaaaggtgtgatttctccaatttaccctctttggatggtgccaggtggacgtgacatctcgtgcctgtccggtgcgggtgcgttacagatggacgtagctgccttggttttccagtcctcaagggaatactgaagatgctgactgaaggggattggatgttgattttagaagatggagaactccagccacctttgtaaagcactagtgtttgtcatttatgtaagtcaggtcggctcaggtcttgatagtccgtcttggtgtgaggcatgcctgtcacgatgacctagctaacactgtgcatcttattgtgaggccagcttgtcccctcgaaccctctttggccaggtaaacattgtattgtatcagcgccagctacagattgaaa

SEQ ID NO: 447918 - DNA, 933 bp, Homo Sapiens
acccctccgcattgcagcctgcatgttcccgcttctcaaggtaacgtgaggaggcttgcaactcagcactaagtagttgaaaatgaaaagccgccgctgtcgtgaaattcattagcagccagagtatgtgtacaaggcagcggagtgctgggagtctgaagtggtgtgatgaattgaacctcatcggatgctgctgtggctgggccaagtgatagcacctaatcaattcctcacacgtcaagtgacacctcagacatgggatagatttcccccatcacatcacagggcaggtgctccctccctgctggagagcacaggcactgcagaagcagcgcacagtgccaggggcgagtgaggcagcagctcccagccttttcaggcacggagattgcctttcaacatccaacatttcccagaacccatgtgccatcctacttgtattactggtggccagaaagccacaagcgcaatcatgcttttcaatgaccctatttttattcacgagaacagcacatacatgtgtttgaaaattatgtgaggtgctcactctgcagacagtactcacattcctatagattccacccctgcccaccttgcagcccctggagtctatagcagatgggagtggggcactccgagagtggcaggcctggagatcacatcttccattgttccttcaatcaacactaactcccatttgggccttaggtgccttgctaagcaccacaaaacagcaactaactgaaagagatctggagtgccagcccgctcctactgagggcctcctctctgtcaggcaccttgcaaagcattttgtgtgaagtgactcatttaacctcaccacaacgccacaacgcagggattatgcaggtaacctatttcccagatgaggaagataaggcccaaggaggtgaaatgcctttcccagagtta

SEQ ID NO: 447919 - DNA, 571 bp, Homo Sapiens
ggagatgcagatgcagaagacagccaaattcattcacctctgcgtgggcctgtgagggcccacagagatgcattttcattcacgaccaggatttcctcggccggagcagccgcttttcccagccgaagctcactgtgtttactacataggatgtgagtgtatagaaagactctctctaacgttagctacgcgtgcagaaatgtggggcgcttacaagtgtgggcagccgcagcctgttcctcacccctgtcctaacgggacatactccgcgcatgcacatttaggatcaccgtgtcttctcgttggactgatctgtcgttaggaccctggacccaagtaattgtctttgctctgaagttttgacagtaacaaaggcattccagctctttctttttcactcctgtcggtgtaacgtgccgtttttcatcctttgacttttagcccgcctgtgccctgtctgaagggagttgtctgtggacagcacggagtggtgggtgtttgtaatccactctgccagcctcagtcttctaactgttgcgtatggaccaattacatctgccctttctcttcc

SEQ ID NO: 447920 - DNA, 610 bp, Homo Sapiens
  misc_feature (259)..(270): n is a, c, g, or t
actgttttcagtcactgcaaattttcttccctcctctgggatctaaggatccagggaggaggctgccacagtgaagcagaaaagctacattctgcccagggaggaagagaaaaagcaatttctcgctccccttcccaagtccttcctgtccaccaccacctcggatgtccccgcacacagccttccggtgagcggccgtgccgtcccctcctctctctaaggcattggggagcagagggcccataggcagcaccctgcnnnnnnnnnnnntgatctacgtgtgaggagagggcaaggggctggatgcaggcagagaatgactttaagaaaagattctatgatcccttcctttagtatggagctcgattttccagctggcgcttggtgagaaagtacttgaagaactcatagacagaccaagaaatggcggtggagggcatctggtagatgacacgcgcctggatgcctttgaagtagccggccaggccgttgagctggtacaccgtccggaaggcattggccatacccgacagccggccgctgatgttggccagcgagagggccacgttctcctgagtgttcagaagggtcttacagacgtccagggggg

SEQ ID NO: 447921 - DNA, 972 bp, Homo Sapiens
  misc_feature (99)..(99): n is a, c, g, or t
  misc_feature (190)..(190): n is a, c, g, or t
  misc_feature (278)..(278): n is a, c, g, or t
ttccatttttccttggaaggtttaattggacctgttactggtgggccagagccaaattcccataaacgaagccaggtttcccttatggagcaaagtagnaagggggagcttctgagtttgttgaggaaagaatgccgtggagtgggggaccttggagtaaaaggatggaaagggtagatctctccttttntcccctccatttcccataaggatactggattaaccaatgggggctatctgctcagcattccctcttccaaattggagccagagagggngaaatgatgcaaatcagaggaggaaacacctcacagctcctctgtttctccatccaaggggatgccaatatccacgttgtagtctacaggctccccagagctcagccagggaataggggttcgattgaaagaaggcctgttggagaggttttggttgtagaggaccaggggttcactcagcaagggccccaggtcaaacttgggcatctggaaggtcatgcgtttggaggccttctcatatccaccatagggcattgccgtcctgttgaaggacttatatttgggaagttcagctttggccccataggccagcaggtcaatgccaagttccattttttgctgggggtcaacccccatggctcgctcccatggggaaatataggtcttgaacacagtgatatgttttccttctccgcctgcctggtctcctgatcctgtctcaccaacccctgctgtgccagcagctcctcctctgccagcctggcccgcgggaccacctgtacccccagctccagacccagagcccagatggtgctgctgatcagagccatactgtccggcagagccactgccccctgcctggctgccgcctctgccgttgctcttgctgtatgagaatccctgaccagctgtgcccagctgtccccccactgttggaaggaacttctgtccaaggaatccggaccggtccagc

SEQ ID NO: 447922 - DNA, 695 bp, Homo Sapiens
caataaaatagtaaagaaatattttatttacctaaggtgttagtataccattaaaattagggaaggaagaaaattttgtacatgggcatagcttcaaaaattctgaagggtatttctgggtatttagataggacttttaagattgaggcctgtgcggttttttaatgggtctaaaattaagacaattcatgtcctttccttgatagtatttgcacaaatcatcattaccagtcacgactgtggtcagatgctgactcccaagtaagtcgaagagggaggcaaacagaaggaaaagagaaatcttcctgagatatctgggtaagacatgaagaggacagagaattgaggttaaggatttgcgtatatgtacctaataagatacaagtgatttcattcaccagaaatctgggcgcggggcggggaatatgtatctatatggtagacttttctgggaatgagacgtgagacctcccccttaagaacatggtcaggtacaacaggtcactaaattgcctcctaatgttcaaatgaatgaatggtgaactagaggaagttttgctgagcaggaatgggtttaagagggtaattgagctagggccaggggaggcgaggtgatggattggatatctagtaggcaaaaagaagttgaggtgactgagccttgagaggggaggacaagaggaaaaccttcattg

SEQ ID NO: 447923 - DNA, 333 bp, Homo Sapiens
caccgaaatagtattaatactttatttaaaatatatacaaaattattactttgaaacatatatattactgtccaacatacatcatataacactgattgatgtaaattttggtaccttcatttattcagttgtgatttcccttttgttcaaggctcctgaagaaaattatctgaaatgcccaccagaggggaggtgcccatgggcttggtccccttggtgacttggctgtgctgttgggcactactgaggccctagagccctgctccatggagctgaaggcaaatccccaccttgctgggggacctggggacacagaattgatggaacccacct

SEQ ID NO: 447924 - DNA, 352 bp, Homo Sapiens
gcagaaaggaagcgagtaggttttaattcaagatacaggcccctcgcgttgatctcgtagaaggaaactcagtggactgacaagctcaagtcatgtatgaggcacgtcctgggacccccacccctcctgccataggaaggacagctttgggcagagggaaggaggtttgagatcagggttgggcccatacagattgtgtgaggtggtctcaagtacaaatacttatctgaggctcctgaacaggccagaaattggtgagtctcaagtaggtgtctggggaaagaaaaagggaaggcctgccctcgctccagggggagctggtcgccgtttggcaggcctaacagacctctaa

SEQ ID NO: 447925 - DNA, 301 bp, Homo Sapiens
agttcttaagcagacaggaggccgctcgctgttttccttgttgctgttgcactcactcatctcttgagcagtgaggtcatcttccaatatgatctccaggggatcaaaaatactgatcctgtgcaagcgcccttcaatttctatctctaccatcctttgagcttgagcgtaggtcagcgtttctcgcgtaggggagtgtttaacactgcatggggaagaaggatgcctcgctgcagagcctcgatgacatcgtcctttcctcctcatttggtaatgattaccttcggggcgccgcggccgc

SEQ ID NO: 447926 - DNA, 538 bp, Homo Sapiens
ttccttattatcagcaaccaatttattcagttattcctcttgttggcacttcaagagacacagaagaagctaagatcatcatctatgtatcaatcagacaccactgaggggtccctccctccagtttcatcccggtgcacttgccagagcactcacagactccccatccacactggtctgccctcctactggccttccaccccatctttgaggcatgagaagaccaacagcccggtaaagccacggggcttccagatcagctggagggggttgtgccgatgtgtgtacatacagagggctcagggcctttgggggtttctctgcccttcaattccgtgcagaacacctcactcagtgggaaagtgagccaagctttcggtgccaactaggaagtgatgaggatgcggcgaccccattgacccacccagcaccgatccccaacgcatggtctccagcctgagctgacatcccatctaccccggtttctccagcacccaagcctacctcctcgtcaggtgacctccccggagcaccgact

SEQ ID NO: 447927 - DNA, 534 bp, Homo Sapiens
  misc_feature (487)..(487): n is a, c, g, or t
gtaagttttatatgaagttatcttacaaaaaaatgtacaaatcatgactgtgcatagtgcttgatgaattttcacaaagtaaacatatccatgtaaccaggacaaggttctaaggtcttctactggagttttcatgaagtagggaaataggaagagccaattccatcccagggaactatgttctttagccgtagccccacaaaaggggtcttcaaagccacataaagtatatcacgtatgacatatatctttccctttcttcctctttcatgtagctgaaattgaaagatgaggctctgcttgcagagatccacacactacaggaaacagttggctttggaaatccatctttctgatacccctccagctgaacaattttctgcatgggactctgagttcctttccttcccagagagttttaccgtatgaagcctggagctctgccctggatcacagcacggcaaaagcaggaataacccctcctttnttttttaaggtgtgactcctctgtgaagtcttccttagcaagcacta

SEQ ID NO: 447928 - DNA, 568 bp, Homo Sapiens
  misc_feature (409)..(472): n is a, c, g, or t
agatatcagttggtcagccttctgttaggatgagttacagacagagtgtgaagaaaggagggttggaaaacaggttggtgaccgacaggaagtcatcgtgaaggtcctggtcgcctgtcctctccgttcttctctgtgccttgctggggatcagctccagacaatctgacacattgtcttttggctttaatatgtttgtaagattccagactcttagtaatgagccttggtatagggttctatcagttaggatggttttggctgctagaaacaacacacccaaccaaacataccttaaacaatatggggtttagtatctcacatggtggttccaaggttagttcattaatgcagtgatggcatcagaatcatgagttctttccacttttctactccactgtcctcaggnnnnnnnnnnnnnnnnnnnnnnnnnnnnnnnnnnnnnnnnnnnnnnnnnnnnnnnnnnnnnnnntctttgcttgaaccctggtggcagaagttgtggtgagccaagattgtgccatagcactccccgcttgggcaacaagagtgaaagtctaaatccaaa

SEQ ID NO: 447929 - DNA, 261 bp, Homo Sapiens
ctcaaagcaattcatttttattttttaaaaaacaccccaaaataaaaaaccactgactcatccatgccaaactgcactttccagaggaagcatgtcagcagactcaaacggacaatggacagaatcccatgacaccaaagtcattcaaacctgatgcttcagaggctgacattctgagctgaaatagccacaggtcaccacttggcctgatgtgggactctcctttctttttagtctattcatgtggtggcagaagatgtg

SEQ ID NO: 447930 - DNA, 471 bp, Homo Sapiens
tgaccacctggagccaaaagcctcttttcctaggtccagagtcctctctccctctggccagagcctcagagtgggaaagggaatccctggccctcaaggaggttttctctcagccgccccctgcaatcccccaccgcctcaccctccttcagaactgacatggctcctgcctccctaccccggccccaacctctccagcctggactgaagcataagcacactgctctttctggagttctggagaggaagtgggaagaccgccctcccccatcagaacaggggttagaggagctctcagtcaagggaaagtatgaggaggaagagggacgcgcgcggggactgggctgggacttccggcctgtgaggcagggaatgcggcttttcggccagtcgtcctcgaggcaccccaaggatttcagggtcgaaggctcattccggggttccagccagtgtccgttgcgttgcggccgc

SEQ ID NO: 447931 - DNA, 436 bp, Homo Sapiens
  misc_feature (43)..(83): n is a, c, g, or t
agtttgtcatgtttgtctttattcatctttccggatcttggtnnnnnnnnnnnnnnnnnnnnnnnnnnnnnnnnnnnnnnnnntgtcctgaccacctggagccaaaagcctcttttcctaggtccagagtcctctctccctctggccagagcctcagagtgggaaagggaatccctgggccctcaaggaggttttctctcagacaggggagggtgagggggcagctagtctccgagctgggcaggtctgacttcccaggttaccccaggtgagcttacctgactgtgggcgccggcagtgagggccagaacaacacccagtagggttaagggagggccagcagtgccagggttcaagagccccagggtgtttttttaagagattgagttcaaggcaggatggagggccaagcccagtttcttcagttgcccagctt

SEQ ID NO: 447932 - DNA, 501 bp, Homo Sapiens
  misc_feature (33)..(33): n is a, c, g, or t
  misc_feature (477)..(477): n is a, c, g, or t
caacgcaacggcacactggctggaaccccgganatgagccttcgaccctgaaatccttggggtgcctcgaggacgactggccgaaaagccgcattccctgcctcacaggccggaagtcccagcccagtccccgcgcgcgtccctcttcctcctcatactccccctctgtgccctcaggtgtggcggtcagatgtccagtttgcctggaagcacctcttgtgtccagatggtgagttcttggggagggggaggtaagagggaggctgggcactgaggaactgggcttggcctcatcctgcttgactcagtctcttacagacacctgggggctcttgatcctgggcactgctggccctcctcaccctactgggtgtttgttctgggccctcacctgccggcgcccacagtcaggtaagctcacctgggggtaaacctggggaagtcagacttgcccagttcggagattagttgcccctnaaccttcccctgttttgagagaat

SEQ ID NO: 447933 - DNA, 778 bp, Homo Sapiens
  misc_feature (753)..(753): n is a, c, g, or t
ggaaaaatgatttccactttatccctttacaacagagtaaattaagcacacagcttgattgaaaagatactaagaactaaactgaacccggtactaaccattttcaaaggctcactacacaaatcacacggtctcctgcaagtctcctgttagcataagccttgacaggtcactggaggaattaccctaaagattcacattacaatccagatacagggggctgccgtggctcgctgaaccacctgcccttattgacccagctgagattgtccacaacagtataaagaaaggactttggaatctgaccatcagtgacatgtggccagcgcccctccctcagctgctctgccttcagcatctgctgtaaggctgggcagccttttggggaacctgctgaaccctgtggtcttagctgttctaggctaccaggtggccactcgaagagaagacgactcaagtaaggcaaagtggtgctggctttgataaggcacggtgcatccacgctcaggtgctggacatccagatgtgcatctgcttggccacctggtgcacgtatccgatgtcaggtctctggtgggggtcagggcagatgcacatgctgaccagttctcgtaacttctcggagtagtgctccccggggagtggggggtagtcacactgctcgatcttctggcacagggtgtagcgattcatcttatctccatagaaggggctctggagggctgccatctcgtacagcagacagcccaaggnccagatgtcggacttgaagttgtcg

SEQ ID NO: 447934 - DNA, 527 bp, Homo Sapiens
tttattgaattatttttggtgtgtctaggccaaggaaagaggagatcgtgggtggggaaacagactgagggaatcagaagcaccactgtccatccggaattaaatccacatcccagcatcttctgcaaatatttcactaattatttcctctcggaactcctcccctcgtgctccttcctctggtgaggccggcgctcccctcccaggccgcagcggacagacagggattgggttccgtgtgcctgccacaccaggcaggctcttgcggctcccaactaggcggccttgcactccgcgtgcattggccacacatcctcgcctcctccacccgctccgccgccggttttcttggaagttaaatcttggaggatttgtccacacccgctccctgggccccagggcccggatccagcctgggtgggggggtctccgggcgggccgcagcgccctccgtgccccggggatgctggcgcacagtgcggagcggagttgcgcgtctctcgtccctttgttgacaattccctccc

SEQ ID NO: 447935 - DNA, 381 bp, Homo Sapiens
actactttattgatacattttaaagtcaagtcaaagaatcttatagatactctttaattaattctccaacatccctatctgtatagttgggacttgactaatactgaatctatattttaaagaagaaactgttataagaaggtaaatcaacttctccatgctgtgcaacaagccattgttaaatctggattggattctgggcttccagctctgaggtccatgtctaactagagctttcactccatctcatgaaattctactatcttaaaaaatctaactctgccactaaactgaccctcccatgaataatatattcataaaaacaaatttttggagcctctttggtataggaaaaattagaaaataccagcaagaaaagac

SEQ ID NO: 447936 - DNA, 429 bp, Homo Sapiens
tgtgtgtggactgtgtattattctttgttgttattcatgtttcttaaaccaaaacagaccttacaagaaaacttaccattttagtatattatgtggcttactgggtgtcttgattgagctttgagaataagacaggcatttcatacccaaacactggttgtctcttaatgacatagagtatcaaaacttattttcaaggttgtgaccaaagaaatatttctaatttatttgcttcaaacagcccatccttttagccttatcttcctcaaatgaataaaaaggcacgttaaaggcagttctaaagagcctgacctaatttcatccagtttcttcagcttcccaccagaacagaccatagccaactctaaaacaggtttcagtccattacccagatgggggaaaaatatgattaaaggggtaaaatggagg

SEQ ID NO: 447937 - DNA, 1866 bp, Homo Sapiens
  misc_feature (835)..(835): n is a, c, g, or t
  misc_feature (966)..(979): n is a, c, g, or t
ggtatcttttatgatgggggccgtcgccatttgttgttgtgtttatttatctgttattttgatgtgtgtatgtgttatcgtgttttggggccattaaaaacctaattctaggggcctatttatatttgtgttgatacctatgttgttgccccatttgttagaaaaataattaaaaggggcaaaacttggtccccaaacaacaagtagaaccgttcaaacctgggtccttcaagtcaacacattgctttcacgattcacctatgaagaaattttctgggcgtaatcggagcaagtaaggtggaataaggtgaacacaaaaatggccaagagccctttttaattatagtagactcactcagcctgaacacatgtcctccacgagaacacaagaggaaaaaggtcaaagggcgcttaattttcaatctgtgagaaaaaatttataataaggcccacagttctcggcacttctttaacacgagatttggtggcacaaaaatcttggtgaacccaaaccacaggtctcagaagtgttagaaaaattagcaagcaaaagtggttttctaagccacaactaaattgttcgcattgggaattgaggaacgtgctgagcactggagtggaatgaaaggtaatgctctaaagagaatggaacacgaagggcaggaaggggccttgtttccacaatgtaggcccaaggctccacggtggttagaaccaatgctcaatttggtaaaaggaaggtaactccaagagcttaaggctttgtgtttgtttttattttccttcattaagactgatggggctgcaactaagaagggtgaaatgtaacctgtgngggccaactcaacagcacacaatgctaactcacaatcccacacgtacaattcaatacagaaaacgtaacgtttaaaacttacagtgtagagccaatattttttagccagtgtagagagaaccacaatgcannnnnnnnnnnnnnggtgtttttaatcccaaactccaatgtgatcattccttacctacctaattcctcaagtaaggtagattttgtttttgttgagggggaaaggataggggctgtggggaggtgagttaggggacaggcaacagtgagaaagggatcttgggtatgctcaaaggtcactgtatttttctaggtttggaaaggggagtctggaaccaagatgccaatacaaagactttttccccccatatctcaagaaatggtcaaatacttccaagatgcccttgagatgcaagtgtggcaagggcaggtgcagtggctgtgggatcaatatagacgcgaagcaaagccttgaggaatggaaaggaacttgaaggatatgaagactgggtcagctttgatttgagatccttcgatgagtaagtaattagctttcagagcacctgggaaatcttgcttcttagtcctggagggaggggaaggggggtagcaacaggtagaggtctggattaggggcctgagcacctatactacctcaactagggcattccgtcagcccacacctcagtcgtcctaagggaaacaggaagagattcaagaaaagatgggtgggagctggctggaaatggccaaggtggagagactagctgacaggcagtcagtggagagaaaagcctgggcttagggttaggttctaacataaaaccaaaagttgctggaggggaggacgagaggaccccttctgtccccacttagatcccaccaaattccctttcttagacatctaagaatgatcacactggagcagtgaaactttgaaactatccagatggaaaaatccgggcctgtaccatgttttgttgagcggggggaggaatgtgggggtgagagggcgaaagggc

SEQ ID NO: 447938 - DNA, 652 bp, Homo Sapiens
  misc_feature (640)..(640): n is a, c, g, or t
cccttgcattttatttgttgaagaacctgggttgtttgacctgcagtttcccatcgtctgaaatttgctgactgtacccacatgatgtagtttaacatgttcttctgtcttctgatctcctgtaaattggatgtagaggctacatgagatacagattccattaatttagcaagataatttcatagaaggtagtgcattctcccatcaggaggcaataatgcctgggtgtttcttttgtgatgtcagcagcactgctactcaatgtcttgatctgttcattcatttgaggttacgaagtggtgatattaaaattcaatcaacccttcttaattcattagctgggatacttctataaggaaaaacctccccgtctattatttgatcccccatgatacagtacatggaaaaggcaggataaatgctcatatcttctatttacaatttttcaaaacaatgatatgggcttctatttatccttcaaaggtgaccaattaattttttagtattatggactcagagagacaagcatattcgatgcatttcaatccattcctgttattatccacactgatgctctaactgtcacatctttggccactggaagcctcttcatattggttcctcaatacttccgacatanagtagtgtcagt

SEQ ID NO: 447939 - DNA, 659 bp, Homo Sapiens
ttttcagaagccagacaattttatttggggggcaaacattgacacttttgggtgtggaccttgcatgcagacatatcaagggatgacatgtcacttcttcccaaagcgttgaggggcagccaggctccagaactgggaattcagcccctctccagcccggggactcagccattcattcctccaggatccctgggtatttctgccaaacctctggggctgaaacaggaaggcttggctccggccaggtctctccattgcctggagcaggtagtgcaacagtgacccagaggtctgggcatcctgtggtgggaggggttcgctgtcttcctcctgtgccaagggggtatcagggaaggaagatgggcaaataccctggacacgtaagtcacaaggggaagggactggcttccaggggcaagtggtaggaggctgcggaaccatttcctcagatgtgaggacctaatgacaaccttggcagccagagaaagtatcagaacctagagcacaagtctcaaccgaagtagaggcaatggtgatatggggatgggacacacactcaccgcggagagctggtcttcctgctggcctcctggcccttcagcacagcccccgtctattaacagcagcagcaccagcagtgcagcagcctgcctagaatc

SEQ ID NO: 447940 - DNA, 469 bp, Homo Sapiens
  misc_feature (456)..(456): n is a, c, g, or t
gagacggagtttcactcttattgcccaggctggagaaaaacacaaaaatgaggtctcgtctaagtttccacactcctttttgagttcctgggacaaagatgctatcctctttcagggtggctgccaactggagttggtggagaaggtaccgttcttcctcattttggactgtcctatgcattttgttcctgttcccattgacacaacttcctttgtcacttgcaccggcttatcaggggtgtcgcaggccttgtcagctggagattgtatcttcaccaccgctgccaataatgtccactcatggtttggctcaggcttccccttcttgggcagcctgatcccatagtgttcatagcatagctgagcaatctcatccgcggtccacatggtctgagctggtattgagacctctcatttctagggaggcatcacaaggcagtatagtttatgaagacncacctgccatcga

SEQ ID NO: 447941 - DNA, 907 bp, Homo Sapiens
ttctattaacgtctatcactttggcactaccaggggctattctggtgacagttgccagtccctctacagtgagatcacagctgtggatgcctggtgagattgggccacttttctgcttgccatactctgatggtgagctgcttccgttggtgacctccctggctgcattcccaggctcaagcctcatctttttggttacaggactgtcagggtcttcacattttctttcatttccaggagcttccaggttactactggcttctactgatgagttgttggcccaatttctgaagacaggacagcaaggctgatcttcaaactcaagcatcggaatgatggaggcatccccacagggtgtatggctggagaaaaacacaaaaatgaggtctcgtctaagtttccacactcctttttgagttcctgggacaaagatgctatcctctttcagggtggctgccaactggagttggtggagaaggtacctttggaaactccttctggctatgacctcagcatggctatcattgaggatgtctccgttcttcctcattttggactgtcctatgcattttgttcctgttcccattgacacaacttcctttgtcacttgcaccggcttatcaggggtgtcgcaggccttgtcagctggagattgtatcttcaccaccgctgccaataatgtccactcatggtttggctcaggcttccccttcttgggcagcctgatcccatagtgttcatagcatagctgagcaatctcatccgcggtccacatggtctgagctggtattgagacctctcatttctagggaggcatcacaaggcagtatagtttatgaagaccacctggccatcgaccttcaggaaacgcgcctagaatccatactccggaccggtaccagcctgc

SEQ ID NO: 447942 - DNA, 496 bp, Homo Sapiens
cctgggcgcagagggcgtttattggacctgtccttcccagccgctgcttgtccaggttcagcgctctccgcgggtgaggcaaggaaaccgaggagacgcccgagccgggtcaccacaaggtccgcctggacccccggccgtcacggacggtcctctggatgcagatggtccagggatctgggggtcctgggagagtggtgtgtggactgcgggcccagctggacaaaggcaggggcttcctcagaagctctgctggtcacgcaggcgtccggcccacggccttcaacagccctgcagggcgggctgaggttaaccgcgccgaggagagtccagggcgagcggtggctcttgcagcagccgggctcaggggcagctgaggggtagctgaggagtatctgaggggcagctgggctcaggggtagctgaggggcacccgccaccagagcccaccgcacaggcagttcttgatccagcgctgctcccactgcttcaccgc

SEQ ID NO: 447943 - DNA, 507 bp, Homo Sapiens
ccatactctgtatgttgagagtgagtcactaagtctagtgggcttcatctttaaatatctgattggtgatatttaaaaatcgtgagatgttttaaagctacaaatctggtattttgtgtggtagcaatgaactggcgtgaagtagccactgccactccataggaaccaagctgtccagctcttctgtgtcctgggcctcggaaggtccatgcgattcaaggcttggttggcccagactatagactgggatgaagtcagagcctgccacccatccaatctcagcaggggagaggccgggtaaggcccaaccgccccttcactcttcttagttcctccctggctcttggaggcacttgactttggaccccttccctagggcaccttccgcttctctgcaccatattctgcacgtggcctcttcaggtagaactttccgtggatacaaggtctttaagtcccagaatagcatgacatagccttggcaacagagtgagattctgtctaagg

SEQ ID NO: 447944 - DNA, 459 bp, Homo Sapiens
ttttttcactaaagaatattcatttatttataattattgctaagtaaacttctcttttaaacaggaacataaaaacacagtagggctttgcacaagtggaatctctaaacagttggtttgtatacatgtcaaaataagttagaatggaatttgtccaggagtttccaagtcacccgagaggctgtgcacctcttttgagaaggttagggaggggtacagacaggagccttgccaagaccaccccccagctcaaactgtgagttgtgctgtttcctcctcctagctttgcccaggtccaaggcacagggcagggggcgttcaagtatcgaacctcacagagggccagtgctgacggcggggctgggggagggaaaggagagccccaccctgggggccagaccttctcccttcagtttccaagaccaaggccactgcacctgcaggagggaggaggaggag

SEQ ID NO: 447945 - DNA, 1003 bp, Homo Sapiens
  misc_feature (442)..(559): n is a, c, g, or t
cgtgttagaatattttgttcttggtaagtactactttcctgtgtgttgctacatctttttttcttcatgcagtggccaagattattagttcggtggctgtgtgttgttacatcgctctttttgtatatgctctcgcgtcgtgttgattttgtggtttctcctccttcgggggggtgttaattatttttttgttgtggtggttggttgttcgtccccacataatgtgtgtgctctcctcctccgcggtagtttggggtgggtgtgcctccctcacacaaaaggagcacaccacgtagttcacgtgtgtctctctttctcgacgacgtctgtgtatattgtcgtccgccgctgtcttcgtgttgtaatttatcggtcctactaatttggggggcccctctcgcttcaccacaaaacttggtgttgtgctagtatcatttgtggnnnnnnnnnnnnnnnnnnnnnnnnnnnnnnnnnnnnnnnnnnnnnnnnnnnnnnnnnnnnnnnnnnnnnnnnnnnnnnnnnnnnnnnnnnnnnnnnnnnnnnnnnnnnnnnnnnnnnngccgccataaataggaccactttattaacgtagatgagcactgacgctgactgcaggggcgggggccgaggtccatccccaaacgtcccgtgggcaagcgcctctgcccggggtagaaagtgcggcgggaagagagctccatgggaggggctccataagagggagcacgcctgggcctccttggctgcctgagcccctctcaccccatggcctctgagggaggaaggccccccaccacgttgggctcgcctgcaagtttccttcagaaggccctgccacccagagagggcgtgggctacgggcccggagcaagacacctccaccgctggctgtgggccctgggcccctcggctgggggctgctggggggctggggagtgggagccacaaacacaggatccacgcaggaacacggacaggttcccacggcaggggtggctctgtc

SEQ ID NO: 447946 - DNA, 314 bp, Homo Sapiens
gagatggagtttcactcttgttgtccaggctggagtgagattccgtcgcaaaacaacaacaacaaacctgcccaggtgctggtgcagaggaggcattccatcaattgaaccttaaggaactctggaggcaggggatatgaatgtttactaagtgctgacatcacattaagtacagaaatcgtctggtgtcactacttcagtgtcaccgctgcaacatccagccgagggtgtcatgtcgtttgcagagcaggaaactcagcctcagaatggttgccttgtcttgctcgaggtctcaaggctggtcaagggcatgg

SEQ ID NO: 447947 - DNA, 448 bp, Homo Sapiens
gccggccgctgcttcttgtcctgggaggcggatgacggtggcattgggctgttgctgttctcgggttctcgattggtcagcggcagcagcacggggcggctgcgcctgtgggccgtgggggctgtgtcggagctgaggtgcaagggctcaggcgccagttctgtgttcatggaacacgagctggtgctggacggggctgtggtgagtgccagcttcgatgacagcgtggacatgggcatcgtgggcaccacggcgggcacgctgtggtttgtcagctgggccgagggcaccagcacacgtctcatcagtggccacaggagcaaggtgagggacttccagcctgggcagaggcggggcagccgaacctggtgccctccctgcctgccggctccatctccaccagcccagatgattccaagtcctgccgtcactggctcgcagcggccgc

SEQ ID NO: 447948 - DNA, 938 bp, Homo Sapiens
gcccatccctcactgcattggcgcattgggactgcccgggggctgtagtccacttggttcacccttgctcctgtggccactgatgatgacgtgttctggtgccctcggcccagctgacgaaccacagcgtgcccatccgttggtgcccatcgacgccacatgtccaacgctgtcatcgaagctggcactcaccacagccccgtcccagcaccagctcgtgttccatgaacacagaactggacctggcgcctgagcccttgcacctcagctccgacacagcccccacggcccacaggcgcagccgccccgtgctgctgccgctgaccaatcgagaacccgagaacagcaacagcccaatgccaccgtcatccgcctcccaggacaagaagcagcggccggcacgcgtgtcccagacacagacctggccagagctggtgccacaatagagcaggggaggtgccccgtagcagagcgaggtcagctctccagcccccactgcctctgggactggctctcgacgcacctgaaggctgatgtctgccccacgctgctgaaggagccagaaggtgacagtgccctggcccacacaggtgagctcgccggcgtcccaggggttgaaggccacaccatgcaccggctccgggaggcgggtggaggacacgaggtcataggtggccgtgccccacagggcgagggtgcggccatcgtggtcccccagtgtgacaagaagcctgtcatctggtgagaaggccagggccagcacggtggtgctatgggggaaaatgagatgctggcagaggccgccagacacgtcccagacgcggatctgacaatgggcggtcgtgctgcttcggcccgaggcagaggccaggacctgggcactgtggctgagggccagcgtggagatctccgccctcgtgccgaattcgccacccagc

SEQ ID NO: 447949 - DNA, 474 bp, Homo Sapiens
  misc_feature (200)..(212): n is a, c, g, or t
aaagtggtgatagatttcctgtagtgtgtgtaaccttttgcgtgtgtaggttaagcacaacccagaaatattaatgaattatctaaagataagtaggtagattgcaggagtagaaaactggtggctcggggccaaattcttccacagatgtgttcttttttgtcctgtgtggtatttaaaattgtttctgccagtacatnnnnnnnnnnnnngaatttccatagaaatctggacttctagtttctcttagaaacatagtaagatttgtggaatggaaatctacatttccatatgtcagtagtgtgctgcttttaggctgggcctgattctgtttttcctcagttctagccttgcttgccatacccaattacctgtgtaggatattcttcccttccatctgtgtagcataggactgcacttctttagcttctctaaattttacaatgttttctgtacagtcttatacatcttttt

SEQ ID NO: 447950 - DNA, 538 bp, Homo Sapiens; identical to SEQ ID NO: 150567
  misc_feature (35)..(35): n is a, c, g, or t

SEQ ID NO: 447951 - DNA, 462 bp, Homo Sapiens
caaaagcaattgttatgcttgtgcacatggcaggccagaggccctgattgtccctcttcccactaaggtggtcctccagtcagctccatggtagctcttttccgggattctatagcctggagtaataagtcatgccaagctctctctgctatatctcaaagtccagcaccctgcgggtcagcccctgagggccatccagcttccatctcccaacactaggttcacttcgtgtctctcatggcagggaggagatttagcattccttggagacctgaagggatgcagtgagcttaagaattttcaagagcttatcactcagtcagcccttgttcatccccgagcggatgtgtggtggtattgtggtggacctttattggggactctgctgagtaactagagtggcacttgtgctttagtccatttggctatccctttcacgctggcatttcatcaaccagagga

SEQ ID NO: 447952 - DNA, 281 bp, Homo Sapiens
gcaaatgtttcgttttattacctctcaacgttttcccttcccacatacctttattctgatgcttagaaatagtccaaattcatttaagtttcaaatacagttttggaagcaacataccaaggatattactgttttacatgcagttaagttgaaattgctaaataggctgttccttactataatgagcttaagggggaaagggtagtgctatcttaatgttctaaactattttttttcactacttcttcatcaggagggtttatttactcacttattggaaa

SEQ ID NO: 447953 - DNA, 567 bp, Homo Sapiens
  misc_feature (521)..(521): n is a, c, g, or t
  misc_feature (529)..(529): n is a, c, g, or t
  misc_feature (541)..(541): n is a, c, g, or t
tagatttttaaaaactattttaatacaagattaatagcaattttctatccaaatcagaaatgaaaaatcttaacccaaataatattcatttgacagtcacataaaattttagatttgattggtgcacacatttatcctgcatatatattatgtatatgcacagagagacctcactattatgccattgttaggggtctttttttggaagtacctcattacaaggcaatgtcaaaggttccagtaactactcaactttgaatgaagttcaaaatgtccccatgctaagctgagtctgtgccatagcaaaccatgatatagcaagtctccagaatgtgtacaaatcaatactctgtttgtataagttggtctaaaactaaacactggctaatgtctccaacaaggaggaacacattacaaatttataagttatggtttcctttactcttctgttggcaaagctaaattgtgtttttaaataaaaatcaggtctgttcgttagtaagtaaatggaaatggggttnaaatttcnggcaagttttanggtaaaacctggcatttcccaatgcg

SEQ ID NO: 447954 - DNA, 877 bp, Homo Sapiens
agcggggctagccgcgcctcgctccgccctggacgccgccggtcccggcgcggaggtgcggcggggagtgggagccggcccggctcagtctgatttacggctcgtctgaaaaccgcttcgctcccgcagcatcagcaccggaggcggcggctgcagcagcagcaacaagtcggagaagttgtcacattcaaccatttcctggaagcggcagctgagaaggaggttcaagggaaagcccggctccaggactttattgagaatctgttacagcgggtagaactggcggagaagcagcttgagtactatcagagccagacaggcctctggctttgtccgtgatctcagcgggcacgtgcttacagacatctcctcaaataggaagcccaaatgcctaagccgagggcacccgcattcggtatgtaaccaccctgatctcaaagtcccatttccacccaaagggaaggaaccacctgaaaaaggccaaggatgacagagccagcatgcagcctgccaaggccattcacgaacaggctgagtcctcaagagacctctgcagacctccaaagaaaggggagctcctggggtttggccgcaaaggcaacatcaggcccaaaatggctaaaaaatagccaacagccattgtgcaacatcatctaaaagggtgggtggtgctggaccaatcatcgctgggctttggggaacgttgttccaggagccaacagtaatgtctttctggaaacattccatagtaagacacattggaaaagccaagggcataacacaggcaagcacctcaattaaccagagcttagcaaatgggaatcttagtgaaccagaattttattataacccccttttagaagcttgcaaattacag

SEQ ID NO: 447955 - DNA, 424 bp, Homo Sapiens
  misc_feature (280)..(280): n is a, c, g, or t
  misc_feature (365)..(365): n is a, c, g, or t
  misc_feature (390)..(390): n is a, c, g, or t
  misc_feature (408)..(408): n is a, c, g, or t
agcaattgttttatgtttaatttacaaaagagaccccaaaataataataataataaactatctagggcaagggagtagggtcaggtcctccccagcccagctgtaccctccttcccctctggcagggagagaaggggcctcccagggacttcccctcccccttagaacaggggggtgcgagctggtatggatgccctcctgggcttcctgggggctctgccactccagactccagtttgtccaccccctgcagggtcctacatgcctaagagagcccttntggtagaggccagtttgctaggcagctaggcaggagacccctacaaggtccagggtaaaggccagggttgccagagccagcagantggtgaggtgggacccagcccaggnctcgttggcacctccagntgcctgcctatggtcc

SEQ ID NO: 447956 - DNA, 518 bp, Homo Sapiens
ttttttttgtatattcagagttgtgcagcgatcaccacaatcaattttagaccatttcatcaccctgaaaataaatgtcatatctttagctctcactcccagtgtatccattttccccagccgtagagcctttctgtttctgtagatttgcctgtcctggacatttgatataaatggagttgctgtatcatgttcgacttctctcacctagcatgatgttttcaagacacatccatgctgtagcatgcgtcagtgcttcattccttttaatggccaaatattccattgcatgggtatgccatgatttgtttattcagcaatttattcaacatttgggtgtttttttggctactatgaacaatactactgtgaacaatctgtgtacaagtttgcatgtgaacactttcagttctcttgggtgtatatggtagaagtgagatttctgagtcaaatggtaactttaacttttttaaaaactgccagactgtttactaaagtggctgagccagtttatattc

SEQ ID NO: 447957 - DNA, 176 bp, Homo Sapiens
attagccactattcattcagtaccttttatatgtcaaaacgtttgatatttaacctacgttatttaagggcttttgtactgctgctgtactttataggtgcatagatatggtaaaatcacaccatgcctcctgctctgcctctggataacatattcctacagcaggatctcatttc

SEQ ID NO: 447958 - DNA, 507 bp, Homo Sapiens
  misc_feature (475)..(475): n is a, c, g, or t
caccattttggacattttatttatagaaatttccagcagagccattgttaagtacctctgtcaggagatacctgtgagaacctagacgggaaaacagccacaggttgatctgcatctgttcctccccaacactccacacacaccagaacaggaatagccaggcaagcctctgggtgcccggtgatgcactgtctgaggcacagcccagcacgtgcttcctcagcacatgctacacacacagatctggacgaatgacagaaacttcacagatgtaacttcccaagtgcgacctcaaatgacaactttctcaggtggtgcctggataggaaaggcaccggaacagaatctgtagaaaaccaaaccttatcatgattcagcattcctacccgacgttaaccttcctaagacttagctggaccttatttattttgaaagcaaatcaagtgtatacagtctctttttaaaaaactgtgtnaacgttgtaaagtttttaggggctgtttataa

SEQ ID NO: 447959 - DNA, 646 bp, Homo Sapiens
gaaaaacctgcattatcgtttattgggatcctaattcggtccacagtaacaattgaaactgcctcgactaaattttaagtttctggggcagcaccacctgaaggcagtgactgcctttttaaaagacagggttctgacattcagagatttctgtttctctatccatcatttttgggcatcttgaatcacctgatttagagtcagtgacatcctgactggattggttctgctctcgctgggcgggtgagacccccagacccacgtccacagtgcacctgatgttctcccagcggtcgtcacttccccaaggaggccaggtaggcataccagaacagagctgccaggttggcgaagagcacccggaacttcagagggacgtagttgatgttgatgaactgtagtggcgtccacacccgccagttcatcctcagcgccggccagaagccccccctcatcttggcggcgaaggctgaggcgtctttcccctccagaaagttcatgatgaggaagaacaacatgaggaaggccggtgcaaagatcgaggcggtccaggagaagcctcctgagccctgccagggggacctcaggagggatccaatgttccatgaagaagtagaagaagtgactcagcggccctgtgaagacc

SEQ ID NO: 447960 - DNA, 312 bp, Homo Sapiens
aaatgccagagtgacttttaatatgccaatcaatgttaataaaacacaagtcaaagacaagtgcaaacatgttttagaccaaaattaatgagaaaacagacaatttttttcaacatctgttagccagtattattagtcaaatggctaatcacagataaaatatattttgtgaaaaacttggaatgtcagaagtcattctggcatttcaaacagctatgtacagtatcacgaagatcggtttatatacacaaatattgaagagaaaaaccgggcaaaacatttaaaaacagactaataatacaatcaagtata

SEQ ID NO: 447961 - DNA, 299 bp, Homo Sapiens
  misc_feature (1)..(1): n is a, c, g, or t
  misc_feature (204)..(204): n is a, c, g, or t
ncagccaagatttggggaattaagaaaggaaatacaaacacaactgagccaaggaaagaatctgactgataacatcactgcattcagcatccaaagaaatccattacttttacaactttgtatttctttttaaaatacaggcaggcaaagaagataacaaatatttttaaatggatgcttaacagcacagtgttaataaccatncttcagaaattgtacagtattaaacatgtcttcagccaagctccaacactcagaagacaaaagacttgaggtcaaaagctattaatccctttttt

SEQ ID NO: 447962 - DNA, 1134 bp, Homo Sapiens
  misc_feature (920)..(935): n is a, c, g, or t
cggctacaggcggtcagttcaagcaacagcagggccagcgtctaccctcagcagggaactatctaccctctaggcttgctgctagcggcccccccgggcggcccgggggcatcaatcacccgctagccccggagtgggccccccggccggggcgcccagtaaataacagagaacctcgctgggggaacaagaagcattccggggagaagggagaacacctgtcggcctaggcgcagaattgtgtccgggaagcggccatataggccacgctgcggagcccccgctgtcaacgcccttctcgagggggctctataagttctcccccgtcgtggagacgtttaaagtgccaggggcggttcttccgccagaaaaggtcgccccccgccacacatggtaacggtccctttctgggggaggagcctcccctgtcccgacgtttgtttcgctctcccacgcgtctggccactggctcctcggctgtgctgcttttgaaggcttcgacaaccggggacagcttctggtcaaatatcttgggggggagagtcagtcgggggccctccggcgggtgtacccttttcgagtcgcgccacccctgtattggtgttgatcctatcttttctatttattgcttggacagttttaaaaaaaggatcggtttttaatttacaagagttctaaatgtacagaattctcctttaaaaaaatcgttatacacaataaatacagtacaaaaaaatttatcttacagtactagttttgtctccgagatttcaaaatctggcgcgggcggctggaggcaggaagaacagagggaagactagctggggagaggttcgggggagaggaagaccccagtttcttgttttgctcagatttcaaagtcgaggggtgggcgttcgaaatctctcactcacttgtgnnnnnnnnnnnnnnnnggtcacggagctggacgtgcggatgtcacacgggtgcctgcgggcacagcacgctgggaggctgggctcccccaccccctctccggttttgtttgacagcctgttgggggcggcggagagaggctgagactgtctggaaggaccctgccagctcccagcaccctccaccatctgagaagccacacagacaagacaggca

SEQ ID NO: 447963 - DNA, 341 bp, Homo Sapiens
aaaactaaattttattgaggtattgatatagaaaagagacagggaaatactgcatagaagagggcggctccccagcaaaggccccaccctcaagcctggagacccatggccctaactgggaacaggcatttctgttttcgtacccaaaaagttgccctttggcccaccacacccccgtatcctgtacccatataaaccccaaaccccaggctccaggagcagatgaagagatgaagagaaaagcagtcaaacagcagaacggcatggcagagaaagtgagaagatgaggaacacctgaacgctgagaggagttcagctgcgggtggtaagagaggagtttg

SEQ ID NO: 447964 - DNA, 467 bp, Homo Sapiens
ttggaggagggagatctcacttttattgtaaatagcagaattctttaaaggtagctacattagcaatcagatctcatagatgctggaaacacaaacacctcctttctcattaagggtagggggatccagcataatttctctggaccaggaagatggaggagtcttacttctcttgccttccaactgcatcccccactcaatcctagattgcacaaggaagtcaacactacctcccccaacaagctccaaatccctctcttcacagcattgtcaattgaatctcttcatccaatcttggaaacagtctggaactgtcgtgttctctgttcccagcaacggtccgataaggagcatccttgctaaatgatatgtttaaagtatgtatagctacgtgtattttcaaatgcataaccaatttcttaaaagagatggtaactcatgccagaagcaaggaaaagattgaaagg

SEQ ID NO: 447965 - DNA, 341 bp, Homo Sapiens
  misc_feature (26)..(26): n is a, c, g, or t
  misc_feature (49)..(49): n is a, c, g, or t
  misc_feature (78)..(78): n is a, c, g, or t
  misc_feature (101)..(101): n is a, c, g, or t
  misc_feature (107)..(107): n is a, c, g, or t
atcagcattttcaaatttcaggctcntggccctttcaccgaaaatgcanctttccccccagtcctgtttacactggcncagttccgctaggagctttcccnacctcntcaggtgcaggcctcgctgcttcttaaggcctttctctggggtgggaggaaacggaaactgtatgattgtctttcatattcacttttatagacctataatgtctacaatgtctgagagtggcgtttgcggcatgacttttaaaaaaatgtcctgctggtattggaccctttctgtgtttgtgaaattgctattttgtattaacacagtatttgataaacatttatattaagaag

SEQ ID NO: 447966 - DNA, 1190 bp, Homo Sapiens
  misc_feature (265)..(319): n is a, c, g, or t
  misc_feature (367)..(367): n is a, c, g, or t
  misc_feature (369)..(370): n is a, c, g, or t
  misc_feature (373)..(375): n is a, c, g, or t
  misc_feature (378)..(378): n is a, c, g, or t
  misc_feature (423)..(479): n is a, c, g, or t
  misc_feature (1075)..(1089): n is a, c, g, or t
acggggcacttgcacggcatctctcggcgccgtttcgagacgcgggagaaactacttcgcggggcaggctgagagtttaggggcggaggggaaggcggtgcccaggatataccaaagtacgcggggtccgtggcgggcggtgttccgctgttggagcgacttctgtccttggccttaaggttgcccggaactctgggggggcatgaggggcaatcgtgtgggttccaggccatttcgggaagccgccgggcgttgcggatgcatnnnnnnnnnnnnnnnnnnnnnnnnnnnnnnnnnnnnnnnnnnnnnnnnnnnnnnnttccattttttggtaaaaatgccaggatttagctggggtgtgggggtncnngcnnngtnatcccaggctgattcaagggctgaggcagaatcacttgaacccannnnnnnnnnnnnnnnnnnnnnnnnnnnnnnnnnnnnnnnnnnnnnnnnnnnnnnnngggtgagactgtctcaaagagaaaaacaaaacccataagatgcacaggtatctgagaagggtctaaacaccctagaactgcaagcaaaattttgagtgtatacatgttttcctggcgaaggggtcctcattctcaaatcctgagcttttaggaaaaagtactaagccagtttcaggttacgatacaaaagccaccagatacacttagagccagtcaagtttgagaattctcaaagccatcactgaaaagttggaacacatactcacagcagagacaagtgaacatttatttttatgcctttcttcctatgtgtatttcaagtctttttcaaaacaaggccccaggactctccagattcaattatgtccttgggcttggtcgactgctgcaggagtctcagggagccttctacaaatgctagagtgactcatttaccaacattaaaccctaggatacatgcaacaaagcaggactccttcctccatggaatgtgccgatttcagatgacacagcacccaatgcagaaaacgctgggaatttttccttggaactcgactgtgatgagaggtgcttgacatgaacataagctactgtcnnnnnnnnnnnnnnngaaacagagtttcgcttgttgcccaggctggaaaaaattaaaaaagactgcctggaaatggaaaacctggtaggcagatttgaagcgtaagtaaggggggc

SEQ ID NO: 447967 - DNA, 449 bp, Homo Sapiens
gccccgggcagcggaggcgcccctggccgcgcgggcatcaaggaggaggcgcccttcagcctgctgttcctgagcagggagcggggtcccagccaaagcactcctagcctgatctccagcgccgcacccaccatgatcaaaatggaagtgaacggtcacggcaaggccatggcgctgggcgagggtcccccgctgcccgcgggcgtccaggtccccgccgggcctcagacagtgatgggcccgggcctggcgcccatgctggcccccccaccgcgccggacgcccaagcagcacaactgccagtcgtgcgggaagaccttctcctcggccagcgccctgcagatccatgagcgcacgcacaccggcgagaagccgttcggctgcaccatctgcggccgggccttcaccactaagggcaacctcaaggtgcacatggggacacacatgtg

SEQ ID NO: 447968 - DNA, 560 bp, Homo Sapiens; identical to SEQ ID NO: 126671
  misc_feature (175)..(175): n is a, c, g, or t
  misc_feature (183)..(207): n is a, c, g, or t

SEQ ID NO: 447969 - DNA, 502 bp, Homo Sapiens
gggaacaagcttacatttaatttgaaaactccaggtgaaagttaaaaccccctgtttacagaaaccgagtgaggctgtggaatagcttgtatcctactgtcgaatatggatgaacacacttgggtttcaaaaatcacgtgaattcagaggcttttttcctgacgcttcgggtactcaccacttttgcagggcccactttaaaggagtgctggtggatggtccatgaaaaagcattgaacacggtcaccttgccttcgttcaaagcacaccataacttggggggagcattttcaactttttcggctgggtcaagatgccctggagtgtaaagcagcacgtccaccgtttgtgggaacgcctcccccgccgaggggttgattttatgcttcagtgtttccagggttgtctccggaagcgtcatgggcatttcgttactcatcttatcaaagtaggataacttggaggcagcgtaaatggcgcctggtgactgcagtgtgcccac

SEQ ID NO: 447970 - DNA, 844 bp, Homo Sapiens
agtgtggataaaaattcataaagtgaaagggtgtggtttcgatcaatctgatgctgcccatcgcttgcactgggggtctttgtggatcgggcaggagttttcagtgtgttgggtgttgctccttcctatgtgtcttttgaatctgaggctgacatttgcttggaaggccagacccttgctccatcagagagggcagtggcaaaggccagtgaggcagctgtgagttggacagggttcaggtgagatggtgttgtcatttgtgcttagtgttggtggtgctcagggtggataacacgggtcgttctgcagcccgcttcagcacaaataggcagcttaaggcctggctcacaggctgtggggttgatctggctctgcagaggccctaggcagcttgttgactgctgtctgttgatgacgtgtgtgcaaagcaggctctagcaaccatgatcactgtccttgccttcctggttctttctctcggttggttgccagggcttgcagatcgcagtgaatttttccctttggggaacatcgccttgttttgtccctagagtgaacttgtggcttatggccagtgctgtttggtggtctgccttctttttaatggtattttcttcctcagagcagaagggctgcattttgcttatcagaagaaggtgcagatttaagggaattcatatgaggtggcatgtaattggcaggccaggtgtcctggttccaggttccagccaggctttgggttgccccctccatctcttgcccccctctggatttgtgcatacacgcctcatacaagtgcaaacaaggattgtgacttgctcagcttagtcatgtgatttattta

SEQ ID NO: 447971 - DNA, 1090 bp, Homo Sapiens
  misc_feature (210)..(235): n is a, c, g, or t
tttccctacggttgcagttttattacaagatttctttccaaacgcaagatcaggccaacaagctcagcgactctgacgcttcacatcttcacccactcgcaccgtgttccgaacccacccgcaccaacgtacacacaaaactcccacgcgagcgaccgcagtcccaaattgcatctccatacccactcccaccctgccccgaacgtcttnnnnnnnnnnnnnnnnnnnnnnnnnnctggtaagaaccctcaccccacattctgcccacgccgcaacgctgcagcgcacacaggacagagccgggcgtccaaagtccgttcccgcgcccccgccgacagtctcgccgcgtccccgcccgggcgccccaggcacgtagctgcccgcccggaggcggcggcagagcgcagagagcggggcgagggtccgggtctccggggtccttcttgcagcagcgctggcgagggcggacccagatggcgctcaagtacagccccaggatggctgcgcccacgtccttggagggccggcgctcctgcaccagaaagttgatcatgctctcggacttgatgagcaggttgcagcccaggaagaagacgccgaagaccacggtaagcgacagcacgcagagcacggcgatctgcgccacccgcgacacccacaggctgcgctcgtcgggcgccagccccgcggggaccccgtcgctggcggccagcggtgcgcccctgggacagcagcccagccacgtgcccagcccgtgggtgcggtttcccatggcggccccggcgccgccgcccacgccgtccacctcctccaagccgctgtggttcaggaaggtcgcgttcatcgccgcgcggcgccgggggtctcggcgcgcatgtcccgggtgcactgggctgctctgccggggtccgcgctctcagggacgctccggacccctcggaccggctcctgcggtacggggaggggacgaaggcgggaggctggctgcctgcgcgctctcgggccgcctaccctgggcaccggcgggaagcgaccgcccggaggagcgagcaacaggcggcgcaggagctggagccggagaacctccgct

SEQ ID NO: 447972 - DNA, 607 bp, Homo Sapiens
  misc_feature (303)..(398): n is a, c, g, or t
  misc_feature (462)..(462): n is a, c, g, or t
  misc_feature (585)..(585): n is a, c, g, or t
  misc_feature (591)..(591): n is a, c, g, or t
aaaatccttcctgggtgtgaacttaccattcttgttcccatacctcaccctagactctggagttacctgggagtttctggggaccctgagcttcagtctggaaatggagtgggggcctaggctcttttacccatggatcaagttctacacctggcagaaggaggcatgcgctcacctagcccaaagaggagtgaccatggtggatactgaaggtgtggtacaagtgctccccaacatctccagcaggatggtaatgtcaagcccaccagcatttcagttggcctagttacgaagagtctggannnnnnnnnnnnnnnnnnnnnnnnnnnnnnnnnnnnnnnnnnnnnnnnnnnnnnnnnnnnnnnnnnnnnnnnnnnnnnnnnnnnnnnnnnnnnnnnaaggggttgcatcagatgatccctgagacctttctatatctaaccttctaacactctgtcattntgtgtatctctgtgtttcttatggaagcctcaagtaccctggaaatgtgtcaggggtaaagagggagacataacaccatcttctccatctccatcttagtctagtcaagcccctgaaggtcanagcagntatgatagtaatttct

SEQ ID NO: 447973 - DNA, 388 bp, Homo Sapiens
aataacaaagaagatatgacaacaaaagcacaagcaacaaaagaaaaatagacaaattgggcatcattaaaattaaaaacttttctgcttcaaaggatgtcatcaagaaagtggaaagacaagccacacaatgagagaaaatatttacaaatcagataactgataagggacttgtatgcagaatatataaagaactaatcacccataataaaaggacaaatgacacaattaaaaagtgggcaaagggtctgagaagatatttctccaaagaagatatagaaatgggcaataagcccatgaaaagatgctcaacatcattagtcattaagaaaatgcaaattaaaaccacagtgagataccgcatggcactggcaaggatgcttataat

SEQ ID NO: 447974 - DNA, 933 bp, Homo Sapiens
  misc_feature (153)..(278): n is a, c, g, or t
  misc_feature (297)..(297): n is a, c, g, or t
  misc_feature (890)..(890): n is a, c, g, or t
cgttgggggcttacccaataatgggctgccctgaaaccaaataccagccttgaacattccactttctttgctaactgattgaaagtgtatttaacttgtgtaaatcacacaaactacccttatgggggtaggtgcccttatttctcccatttnnnnnnnnnnnnnnnnnnnnnnnnnnnnnnnnnnnnnnnnnnnnnnnnnnnnnnnnnnnnnnnnnnnnnnnnnnnnnnnnnnnnnnnnnnnnnnnnnnnnnnnnnnnnnnnnnnnnnnnnnnnnnnggctaaaccttcaccaccntatcatatggaaaaagaaattcaatagaaagttatatggaaaaaatacaaccctgtgttaatattagaaaatccatagtaacatgtagaatgaggaagcttcctcaagcccaactatacaggtcagatcggttgaaaaaataaaactaacaaatttttacatgtcaaaatatgcaatatttgaaaatccaaggctaatatctttaaataggcaaagatttattaataccccttgacacacaaacaggaagtgagaaaatgggcaactgacacaaatcgataattaactgtgaggacataggtggtggagtctctcctagtcctctattcttggagatctgaatgcctgccattcgcgtatgggaagaacagagacggtcatggaaaacagcatttgatctagaaaggaccataatgaggtcaaagggcggtctcagggcagtcttaagagctccccatccccaaagaactggcaaggactctccaggtgctcgtatgcgactgctgcccaactcccatcacgaactcaggagacctgtcattttctgaaattttcatgacttctaagacactagttattggggaaaacttcanattatttaaataatgagaggcgaataacattgctaaactcatg

SEQ ID NO: 447975 - DNA, 560 bp, Homo Sapiens
ttacagttttcaaatattttactgaaaatgcatattgtacaattaatgtataatgacacaccagtgtgagaaacctccataggtatcatttccacaaatatgctatgaatatagagttcctacacaaaactatacaacttaccagatgtaattcctgttacgtaccatactcacaatcgtcttgaagaatatggagaaaaagtgctgagtgacaaaaacaggagccatgtgtgattttaataaatggaaaacacggcatttcagctcagtggtaaagcagtaaaccaatcagatgcttagctatcaagtaatcatgtgagaggaaacagaattagatccttacctcatactatatgttgtcagctaacactgtagcagtggtatatgaatcacataaattacctccaacaaaatgtattccatgtattagaaaaaagggaggtatgcctaacattgtgtcacgttccaaaggtgaattttgcaggtcaaccgatatgacagttcaaggaagcatacattttattgtttcaagttgatttctaatgctcaaactatttacg

SEQ ID NO: 447976 - DNA, 504 bp, Homo Sapiens
acgttatatgcatcagaataagctgttttatttttgtattagtagcgggctaagttattaacaatcatactttcttggataagaacatttttaacaaggatatcttctaaagaatgtgtattcgtatagcataccaataccttttcacaactgtggaatcagaataatttatggcattcccgatagaggaggcagcattgtttttattgattggaataaggaaaattttgaaggatgtatatatagcttttagttccatctccgcttgctttatgattcgattatttgtttacttactttcatatgggcataacatgaatttaaatcaagcagatttaaaatttttcaacagttggaacctaagctttctgaggtgaaaaatgtttcttaaaaggtttgtaggaaagagatttaacgagtcttttcaatcgtttaataaaagtatacactgagcgccttctacagagttgggcaggtgctgccgagaagcttagcgctacgccg

SEQ ID NO: 447977 - DNA, 270 bp, Homo Sapiens
tttttgaacttttattttaggtttgggggctacatatgaaggtttgttacatagttgttacataggtaaactcatgtcctgagggtctgttgtacacattatttcatcacccaggtgttaagcccagtacccaacagttaaccttttccgctcctctccctcctcccattctccacgctcaaatagaccccagcgtctggttgtttccttctttgcgttcacaggttcttatcatttagctcccacttataagtgagaacatgtagtatt

SEQ ID NO: 447978 - DNA, 433 bp, Homo Sapiens
agagttttacccagcctttatttctattaacaagcatctcagttaaaagagcaaagtttttgttttgtgccttcaaaaaccggtcttttagtacgtggggatacacatctaacccactggggaagaaggtcaatgaactattctaaaagagtgggttttgtgctgtaactcccactgactggtcttggattcaaggggtccttccactttacaatgaactgcgccattatctgtcctttgagcaataactgaaggaagctccatttctgatggaaccattcatgggaaacctttggattccctctttccatcttttctcgggctgaaggattgtgtcctggtcactgtcaaactcagactcggataccatcagggctgggagttgtgctctgtgcttcggtgcttgataccatatttggggcctcagttccat

SEQ ID NO: 447979 - DNA, 482 bp, Homo Sapiens
gcttttagaaaaatgatcttttatgtgatccatgatttattcatagaaaagcactgtgaattcacacacttgctaaaaaagggcaactgtgatacagaaatgagagtggcttctctcttttttttaaccaacccattgggctgagacgtaggggcccttggctggacagtaagacttgagtagccacaaatggcaaatacaacttcttggtcagtttggagtaaaaaaggtgacagtttgtcgaagaaagaaaaagtaaagcagatggagaagttcttagttcacattctagctataccaccccttccctatcaaaccccacccccaactcaggaactaagacatgaaacagtaaacaccaagacactggttccaactgacttttctgagtgcccttgctacctcctataacaattccaggctgagcacaggggtcaggaaggtagcaggaacatgatacactatggaggtcagccagggct

SEQ ID NO: 447980 - DNA, 389 bp, Homo Sapiens
atttagcagaaatctttgcttttttctttaacaaaatgttgactggaactccaatacataaactagatgacaatggagctcttctggtttaatccaatttggggaaggaagagatatgcatgggaaggaaaagttcaacccatcagtttaagtgatccaggactttttggaacacaggcactcacagtttgaaaaccaccattgcagggcatcaaggacaaggctggctagggatggagagtctctgacattctacaacagcctaggagccaccaaagaccttcgagaaagccctgctaccacagattctgcctccctctacccagggactaaggtccctggtacacagaaagaacaaggacctgcagtgaagaagtaagggtctggtc

SEQ ID NO: 447981 - DNA, 1558 bp, Homo Sapiens
  misc_feature (45)..(53): n is a, c, g, or t
  misc_feature (349)..(360): n is a, c, g, or t
  misc_feature (646)..(706): n is a, c, g, or t
ggtttagaacgacaccggcaagtgtccccccccgcgtgtgatatnnnnnnnnngatttctctctgatcaatcacaagcataacaagaccctcacgcgctatggagcgcacccacacaaattgtgtcctctcacccacgccaccggcactcggcgcacacatacatgacgcgcccgtcgcgtttgtgtggcacacaccccccacgtatagagtaccctcctgttagaaagttatctgtgaattagtatgtcccgcctccagtaagagagtctccctgaaatatatatctctcgcgctaagagtaggagatgtttttttcgcgacacaccactattggtgttctctctcgnnnnnnnnnnnnaacatattgatatggagggccgtctctcttcttctcacaaagagattgttccctcccatgtttacactgcgctgtgtgtttcccgcttcctctaccgccgctttgtgtatataaaccgcgcgggccgccctcgctgccctacgttttatataaaaaacagcccctccactatatttagtggggcacccccctttgttgatacacacaaaaacgcggtggtggcggcggcataatgtgtgtgggcgccccccgggggaaaatttctgggggcgcgcgcgcccccccnnnnnnnnnnnnnnnnnnnnnnnnnnnnnnnnnnnnnnnnnnnnnnnnnnnnnnnnnnnnnaacatttattctgtgtttattctgacattttgaacacaaactagacagcacagacatggggcccgatcccagcctgcacagaagcctctctgcgtcgcgacagtgcagcgtgcggcctctggctgcagcgccggctttcagaaggctggggccaatgccaggggaaccccaggctcagcagggagggagcaggatctgggacagaagatccgaaaagtgaggcctcagggcctctgcgggacccacctgctggaatttccaccaccacctgcttctacaaagactgatagaaacaaagacgcagtagtgtggggggtctggtcccagagccccttccccacccacgccccgtctgctttgatcctgatgatggtcgcacctcgccctggcggtttctccaggggctttggtgccttgctgtgctcagtggctccctccactcagcatccagaggctgcttcccaggatccacctgagcgctgcaccctgcacagcccccacatccctccaggcgggctctgcactgctgctgctgggaggaagggaaagtctgtcttctttagcatcagctcgggaagctgcctttgcctcaaatggccaagctgtgaggtatccctgtttcatcatccggttccctggtgggggctcagcaaatttcccatgaagatgaactgctgaacttcgaggcaaattacagcctatccagggggcaggctcagaccggacgcggtgtgggggaccagactgcctccagaaacatcccccagctggcaggagatcaaactcctcctggtgtccaatcagccgatgagtccagaagtcatagactgcagacgatgtgcgtaacaggcc

SEQ ID NO: 447982 - DNA, 499 bp, Homo Sapiens
ttttttttgatgcaaatgtttttatttgccacttaaactacagtttccctgtgctatcctgatggtgtgggggtgtggaacaggctgctggaaccatggtttacagtagtagcaggtagatgattagtagcatgagtggtgaaatgctgcatctaagtgcctgtcactttgctcccaggggaatatcatgcagcccaggaatagtgttagactgggaaggactgtggcaggaacagtcactgtctctcctcattttggtgaggaatgggtcccacataatggagagctcaacagaagcatccagtcttgttctgaatggagcaggtcagtggcagcagcctcttgctttcatttacccctttgggctgcttgccctaaagtcttctcttccttcacctccccagggcttttggcaagagggaagacactgccattcctggctctttccctggatcagtgtctgatctggtggaggtagcttgtggggcctgacttcctc

SEQ ID NO: 447983 - DNA, 591 bp, Homo Sapiens
  misc_feature (571)..(571): n is a, c, g, or t
gaatgtaaaaataattttaatgcattttatttaatccaatacattaaaaatgttacctaacatgcaaacaatatacaaattattttatacgacgtctttggaatcctgtattttacacgtaaagcgcatctcactccggactagccaggtttcaagcacgtgatagccgcacaaggctggaacccaggcctggggaattaattcttgtcctcggtgctcaaaccattcttcccttcaagcctggcctaatccccagtctctctcatctcttcgaatacgctccgcggttatgcccctcacctcactgcactgcaaatatttcgtccactgagtatttgctgatcgtcactcagtgccgggtgacccagcttgaccagcacccgcagccgccctgccactgttgggccgggtatggtgtgtctggcttccctctgttctgggccggctccgaaacgcgctcaagagaaatcggaatcagacacggggcagttcagctttggaaatgaggagctcgaggctcctgggagtccgttgcgggcaggtggcgccgctgttgtgtcgggagagccangagcgacagactcaaactca

SEQ ID NO: 447984 - DNA, 364 bp, Homo Sapiens
gatttttctggcgagttaagtccagcaggttctgcgtggctgcccccagggggccccacccgggccttccagtgatctggaccaggaagacggattgctgctgggtcatgatttccacatcatgagcgaagttctttgttttttgtgtgcatgcaaaatattgtttctttaaatttaatatcttttcctaacttttctactaacctagaaggtatgtgtgattattatcttttttattcttatcactgtacttgttagtatctgatattaggtattcccaaatagaacataatttattttgttaatgttctctatttcttcttgattatttattagctttggatgttaaaaattagccaaaagt

SEQ ID NO: 447985 - DNA, 446 bp, Homo Sapiens
tttttggtttaggccccatggcctacagtcctttattagagcgagagtcccgaggcccagcccccatatatgatgggtccacttgagtctccttaggcgccccatgagggagtaacagcttgggtagagagctagggaccttgcccagcctgaccctggggcaggcaagcggccccccagcccccaccaccaccccaggagagggcggggtgagaaccggagtcaaatcttgggccgggtccaagcgcctgagcgcccggtttacgcaggaaatagtccagttctcagaagtggtctaaccagccccagccccagcccggcaccacctggagggttcaagtacatggaggagaggagtaaggcggacttaggccctggtatggagaaagggtgaagggagagagaggacctgcgctcaggagggagcgtggtctagtggcgggaac

SEQ ID NO: 447986 - DNA, 694 bp, Homo Sapiens
  misc_feature (16)..(16): n is a, c, g, or t
  misc_feature (27)..(27): n is a, c, g, or t
  misc_feature (106)..(106): n is a, c, g, or t
  misc_feature (189)..(189): n is a, c, g, or t
tggaatgatcggcagnctgatctcggnaatttcaatattttgctgcaagtgaaggagtcccatttcgagttctgcaatcttcttttcaactgaggaagccatttantcaccatccctgtctgccttgccagactctctaatgtaggacttaaaaaaaggagccactgcattgctaatgaaagaatgcanagtttcgtagggcgagtcttcactgagtgtaaggacccggagctgagaagacacgggtttatctgcatcaatcacgggagtacgtttaatgaatgccaagctattggatttaaccccataatgaatgtctatgttgatgttataggaaatgaatctttttcttcttctccttcatcaccgacgtcctctttgagcgtggagcgctccaccagcaccgtgtggacctgcgggtccgaaaggaacttgcgcatctgctccagggcgctcttctcctccagcgccgcctccagcgcggccggcgcctcgccgccgtcctccagcagcagcggcaccagcttgcgcaggtgcttctgcagcaccgacacgtccgccacattctgcacggccgacacttccaatccggccgagccgtcctcgccgccgccgcccccgggctccgacatggtgtcgcgctcgggaccttccaggagcgatgagaaggcggccgcgactcaacgagacatca

SEQ ID NO: 447987 - DNA, 1227 bp, Homo Sapiens
  misc_feature (153)..(206): n is a, c, g, or t
aaggcctgggtggcgaattcggcacgaggagggcactcaccaggctgcaagaacagtgctggggtgagtacccccacgtcggggtccatgtgcccgcctcaggcacaggcagaggtgggccccaccatgactgagaaggcagagatggtgtgnnnnnnnnnnnnnnnnnnnnnnnnnnnnnnnnnnnnnnnnnnnnnnnnnnnnnngcaggtggaggaggtgggccaccgaggaggctcctcgccccccaggctgccacctggtgtaccagtgatcagcctgggccacagcaggcccccaggggtagccatgcccaccacagagctgggcactctgcggcccccgctgctgcaactctccaccctgggaactgccccgcccactttggccctgcactaccaccctcaccccttcctcaacagtgtctacattgggccagcaggaccttttagcatcttccctagcagccggttgaagcggagaccaagccactgtgagctggacctggctgatgggcatcagccccagacggtggcccgcgcgcgtgttcccccaccagccgggagcgctggcggcagcagaacgttaacggcgttttcgccgagttgaggaagctgctgccgacgcacccgcccgaccggaagctgagcaagaacgaggtgctccgcctagccatgaagtacatcggcttcctggtgcggctgttgcgcgacccaagccgcagctctggccgcaggccccacccctcccgggcctcgcaaacggccggtgcaccgggtcccagacgacggcgcccgccggggatccggacgcagggccgaggcggcagcgcgctcgcagcccgcgcccccggccgaccccgacggcagccccggtggagcggcccggcccatcaagatggagcaaaccgctttgagcccagaggtgcggtgaccgcacgcggcagcacctctgagccggagggcaccagggactcggcccagggcccgtcaaggaacgggcagtggacgtgctgcgcatgttcgggagcgaactccccccgaagaaggaccagtgaagacgtcaggggcaaggtctcgggggtccggaagggtgatcatcgacccccaagggacccgcagacccttaaaaaaatcacccacaaccctctggaagtggccttgcccggtccccttcccaggggcgaggtcggcaaagcaacatggcagagcagtcataggaaaaaaa

SEQ ID NO: 447988 - DNA, 357 bp, Homo Sapiens
  misc_feature (268)..(276): n is a, c, g, or t
cctccttgatttcctggcagaagatatcttactttttcagcaaacttttcttttaacactaaagcagcctagggcaatgccagatacttagagcttttctcttgattataagtagaaatgggggtgtctgggctagaggtggagggtggatgtgctgtcgtcacagtctagctggcagcaagcaaggcaaaagcagagactgctctagaagcggttccaagcagcagagacgtcaggaaaggcacttcttagtaccaacctctcacannnnnnnnncagaggcggccccactgtcgaccaagtgcccaaggcattgtgggagtcatgattccaagatgcccgcgacggaaaatggaa

SEQ ID NO: 447989 - DNA, 1577 bp, Homo Sapiens
  misc_feature (619)..(689): n is a, c, g, or t
  misc_feature (1104)..(1117): n is a, c, g, or t
  misc_feature (1119)..(1409): n is a, c, g, or t
  misc_feature (1425)..(1426): n is a, c, g, or t
  misc_feature (1446)..(1447): n is a, c, g, or t
  misc_feature (1450)..(1450): n is a, c, g, or t
atggggtttttacatagggggatcttggggaaatgtgtgtctcatgtgcactagtaaatgtgtgtcattccctgtgattttacaaccctctggggtccaatttccccaggctctttgggtttccaaaagtgccctcagtgttttctacaatgcacgccttattgtgaatactttgtttcttttgatcctcatcatagatatctggcaaattagcaaagtgttaaaaggatctttggatacagcgcattgcgcctgtgaaagtagttgcagtgtgtgtaagagcccttgagacgtccggaatttggctggttgccaatagccccaaaagcgtgaattcgcgaactagccaaggctagattcccatgcaattccattgtacaacactccttaccacgcaggtgtgagtggctcacggggtaaacgggcctgcccaaagcctatcgggaggccaacagcaagtagatcgtctgaacccatggagttttgagacaagccctggcaacatatgtgagatcccatttttacataaaatcaataattagccgggtgtcggtggcaaacgcctgtagtctcagctatctcaggtggctcgacggtgggaggatcgtttagagccctnnnnnnnnnnnnnnnnnnnnnnnnnnnnnnnnnnnnnnnnnnnnnnnnnnnnnnnnnnnnnnnnnnnnnnntctgagaacctaaaacgactgaaaaagaaaaatcaccttagctttttctcttagaatcttctctaaaatgtattctttgtggcattcatgaaataggattcatgatgatgcctgttgatcttagggacactacctcacctgccagtatctttggggactgtgtccttcaaggacatgtccccagactgctgtgcagtgtcattttttgtgtttggtttggtggtggcttcttcccccttgctaggctatcaacctcttatcaccacttgttggtgtcagaactaactgcttctggtctggagagggactgaccgatgcctttgggtagagagaattatgaaagaaattttggtatttttctactttatattttctgaggtttctgtaataagcatatttcacttttccaataagnnnnnnnnnnnnnncnnnnnnnnnnnnnnnnnnnnnnnnnnnnnnnnnnnnnnnnnnnnnnnnnnnnnnnnnnnnnnnnnnnnnnnnnnnnnnnnnnnnnnnnnnnnnnnnnnnnnnnnnnnnnnnnnnnnnnnnnnnnnnnnnnnnnnnnnnnnnnnnnnnnnnnnnnnnnnnnnnnnnnnnnnnnnnnnnnnnnnnnnnnnnnnnnnnnnnnnnnnnnnnnnnnnnnnnnnnnnnnnnnnnnnnnnnnnnnnnnnnnnnnnnnnnnnnnnnnnnnnnnnnnnnnnnnnnnnnnnnnnnnnnnnnccaaaaaacttaaaannccaccccacccaaccaaaannaanccttgtcggccgccttcgcccctcgaaaaactttctaaaccattccttttggcgcccggggccccgtaaggtaagggaaactggtcctaacctggtttccaaggaaaacccgggctcataactaagg

SEQ ID NO: 447990 - DNA, 647 bp, Homo Sapiens
ttcgtccccggcgtccgggcgccctgcatggatcccccaccccagctcctgctccccggcggcggccggtgggcagaaagaccgaaacccactcacggccgcctgccgaatcgcggctctgctgtttgtggggcgtgctagaaacgtgttcctaaaaagaatggcgtccatttacataatgctttgtttgcgtttcgcaagtttctttcggttaaagccacagaaaccccccctcctgcccttgtgtcgtttccaccgcggcacccttttccgacattagaaacaatagtgtacgcctgtggaggcctcgtttgttcaggggctgccggccagggcttcaggacgtttctgcggctttccccgcgcggcctgggctcccgcggctgcttttcgggcccatgggcgcagccactgcgccaggctcaaggggggcggccccgtcagggcccgccatcttggaaggccttttttgccggttcttcccgctgaggaagtgtcgctcaagacgctggcctatgagttgtgatttctgccttttccccttcctccttgggctaagccagaccagaaagggccccgtgcgcaacgtgcttcacaatctctcagggaaagcggctaacgtggcgctactccgcctcccctgttcc

SEQ ID NO: 447991 - DNA, 855 bp, Homo Sapiens
  misc_feature (46)..(46): n is a, c, g, or t
actcacatccatgttgaaaggatctttgaactcacgaagctagatnctgtgctaaggttctgtgaaatgtgcaccaccgatgttatcatcagtgtttgttgaaagaaccccgatatattccactgttaacttccatgacgctgagagataaggatgttcctccaagcttaaacaccaaaatattgctttttccagtaggggagtcttgtccaattccataagcaagaagagctgcagacggttcgtgaattaatcgcaaaacattaaatccagcagctctagctgcttctccaagagcatttttttgcttttctccaaaatcaaacgggacagtaataactacatcatttgcatctgagcccaatacagaatgtgccgtttctttcattttactaaatatcagtctggcaacatcttctgggttaacaaattttgtttcttctccagtatctatttcatatcgtaatttcccatttttttcaatgactaaacatttactttccgcgatgtatttctgagcttgtggatcactggagcttctgcccaggatctgctttactttcattactgtatttgaaatatttcttattctactttgttttgctgccaatccaacaatctcttcattttctgagtaagcaacaacagctggagtaactcggtcaccggcatcatttgcaaccacaccagcccggccatccttatagacggccacacaggctgaggtgcagcccaggtgaactccgatggccgccatgaggcagcagggacggcagcggcaggaatgagggggtcccccaacagcaacagctaccggccgcccaacggccccatcagatcaacggattgcgacgt

SEQ ID NO: 447992 - DNA, 1074 bp, Homo Sapiens
ggaagggaatttcattccccagggagtccctcacaaggtccccgtggttttcttggttatcccggtcccatggaattcttaagctgaccaatccctcattcggatgcccttaacctgttttccaaagatagggctgatgatccagctgcctgagtcctttttgatttagaaatgccgtttcccctcttcccctggggcgtcagaggccactaagttctgattcacagtgctttgcccaagcagcattcctccattaagttgtctgggtcagtcactatctgatttcggagaagctgatccaacgtatcataaaatggacagtgtggtggctcaccccatacttgtggcatgggcaaacataggcctttaaatataatgccttcagaactttaaacttggagcggcactgacgttcggtgcggcggaagccctccctggtgcattcgcttagacacagcctgatagacatctgcattgtgatgcacagtctggaggcgctgaatatactctgcctcgcctagtatggagagaagagttcgtgtctcctgtctggaccaccggatgcccgcactgctattggcactggccattgtgggttggaaaggagggctaggcagcttctggacagcaaggtgcaagtctgaaggtgtggggaagctctgtgtgctctcaggatatctccaggatcttccctctcagggataattgctgagaagccaggtccaaggaccgcatttctggcttctgcccaggatctgctttactttcattactgtatttgaaatatttcttattctactttgttttgctgccaatccaacaatctcttcattttctgagtaagcaacaacagctggagtaactcggtcaccggcatcatttgcaaccacaccagcccggccatccttatagacggccacacaggctgaggtgcagcccaggtgaactccgatggccgccatgaggcagcagggacggcagcggcaggaatgagggggtcccccaacagcaacagctaccggccgcccaacggccccatcaggcaccgcggagcttcacgttcccgccagcccc

SEQ ID NO: 447993 - DNA, 476 bp, Homo Sapiens
  misc_feature (225)..(225): n is a, c, g, or t
  misc_feature (365)..(365): n is a, c, g, or t
ttttttttctgaggacacagaaaaggagccagggattcagaaggcaggtttgggaactagacttctaccagtttaggaagcagagccttttgtaattggttcctagcttttggtattcgaaatcaacctctgaagcaatttttcaaggcctagctgaaaagcaccagttgcctcttccactgctgttgccaaacgtctgactgcgatgacagcatccctgcggantcattggcagtatcttgctgagcactggcctcctcaccaatagcaatcagcctgtccagtttttcttcctcccgctttgagagttctcgtgccaatcgcctgttttttgccaactcggctgcgatagtcctggccactgnaccgccttctttcgccttgcccaccttgggaggggggcttcactgggtcaaggggcctattccccaccagaaacaaaaccaggttttcgaagagggagattggagtttgag

SEQ ID NO: 447994 - DNA, 1250 bp, Homo Sapiens
agctttcttgccccccacctctgctgcctctctgccgcctgctaacgcctctttgtctatcaagctcacctccctcccgcacaagggcgcccgcccatccttcacggtgcaccaccagcccctgccccggctggccctggcacaggccgcgcccgggatcccacaggccagcgccacggggccgtccacggtgtgggtgtccctcggcatgccgcctccctatgccgcgcacctttcgggggttaagccgcgataaagaccttgcttagctagcagtgcgtattgtgtaaggtaactaggatttctacctcaaccgcgagacctatgcaaggacggtgtggaccaactcgcgcccgcggcatggtgcccgccggcctgccgggctcccacccctggacggcagaggcaaggacggacgggagctccactgtgaatcggcggcacgcgccgcaggaggctgggactggtccagtttgtactgtcgatagttttagataaagtatttatcattttttaaaaagtataaacaattctgacttattttattccatctaagtggtaaaaggcaacttattgagaaatataaatatctatatatgagagctctatataaagacacgtgtctgcagggcgggcccgcagtcggatttcgccacagcctgccccggtgctatctcgtccccaggcccgcgcctgcctccacccgcttggtgctgactagacgctgacaacgccgaaccccgttctcggaaacgccgcccggccggcttcccccgacgcgctgctcccgtaccaaaggcaggcccgtcgccaccacattcctcggagggcctccccgcggcctgagccccttcctgagcgccctggggcttggccctggagctcttcacctttaccccggcactgttgaacccccagactgttcaccctccggggcgtgggttgcgcccttgcatgtgaaggggcctgcgcggtgacgcagctggccatgtgctgcgcgatggtgctgtgaggacggcgcgggcacgttgaacaagtgcatttacttttgtatttctcggctgtccatggctcgcagcatgccctgcgatgcggggcaggcctgtcgtgggtcccttggtgtttctgtacaggagagagtcacactaatgagtggcagtattttatagagatgtgatgagaatttataaatttcatagatttgacagcttttatttttagatggtataatgcacagtgaagaggaaaga

SEQ ID NO: 447995 - DNA, 497 bp, Homo Sapiens
  misc_feature (71)..(71): n is a, c, g, or t
  misc_feature (83)..(83): n is a, c, g, or t
aaaaacatcacttctttatttcaaaggaaaaataaaagaccctcccaaccctgtccaaaaaaacccaatantaataataacantaataaaaaatcctattagaaaccataaggaagcactgagagtttgagtattacattcttcaagtatgctgttcggattttttatttttaggttggtaactatacacatataaaaaaaccttaaaagtgcggccaagggattttgcttaaaattaagtatttagagggctacttaaaaatactgtagtaggactgtgcagtgatcctttgggggatgatgctttcacttttgtatcctcgtcaaggttaaggggcaggttcaaaagtgatcatacttccaggattagcgtaagtggccaacttgggtgagaaagccagagagatccatgtgttcttccacggacaacgaaaatccaccccgaatccaaaaattcagacatggaatgtggtaggatttcacagtaaagttagtct

SEQ ID NO: 447996 - DNA, 529 bp, Homo Sapiens
tcatggaattatgttgttgtttattttcaaaatgtgcttaagatacaaatgagctgtacaaatattcatgaaagtcaattaataatatctaagactcaaataaaataacctgccaggaaaggagttcataatcctgcccgccccccaccacccccattcttttcccctccaaaggccctctgcattcgcctccccacctctaccacccacacacctttccggtccaagctttctttcacataaaccaactttgttctccccccaacccccaccctccgactttgtcacttctccatccttttaaaaagaagtcagaattgacaagccaaattcttttatgaagaaagccaacagcgtgatttatccaaaacagtggcaagaaggtgattattagctaaaaagatatatttaagacaacaattgtttaagcctttcgttagtttactcttaacaggggtttgtgccaacgcagcttcattcaaattcacactgtgtgggcgctcggcttcaagagcgtctgtaaatgctg

SEQ ID NO: 447997 - DNA, 284 bp, Homo Sapiens
tatgcaaaacgagcccagtcacttgcgcggccagagaggggcaggtgctgggcggcggctgacgggcgcagcaccctaggcccagtgtctggctccagccccgcatccggcgccggccccgcatccagctctggccctgcgacaatagagtccggaagtgcaggcaaagcggctcccgggagcgccgcgcggtcctgcgcgggatcagcgagggccgcgccccggcgggcgggcggcatggctgcagtgctggctctcagggtggtcgcggggttggcggccgc

SEQ ID NO: 447998 - DNA, 498 bp, Homo Sapiens
ctgggtgcaacaggaaggttttatttaggtggccactggcccagcggattaacatccaaaggctgagcccggaacaaagacagggcttgacttttatacatgcatcaggcaggggcaagtcgggtttttggcgcaaaacctgcgaggtgagaaagcagtcttacagaagcaaaacaaaggcagttaatcataccgtgacaggttttacaacaggatttgcaacatgagcctaccttacttaaacatgtcttgtgaccttgccatgctacagaaagaaaaacaagaacttacaaaatctttacagacttgcagaaatagttacaaaaatagttgtgagagcagaacaaagaataatgttatggggagagaatttcaaacagggaaactgataaggagaacttgtttttctcatccctgctcctggagcccactccttcggagcccctgcctggccttgcagataattatcatagctccagcaggacttttggagtgagt

SEQ ID NO: 447999 - DNA, 425 bp, Homo Sapiens
  misc_feature (369)..(369): n is a, c, g, or t
  misc_feature (400)..(400): n is a, c, g, or t
gggtgcaacaggaaggttttatttaggtggccactggccagcggattaacatccaaaggctgagcccggaacaaagacagggcttgacttttatacatgcatcaggcaggggcaagtcgggtttttggcgcaaaacctgcgaggtgagaaagcagtcttacagaagcagaacaaaggcagttaatcataccgtgacaggttttacaacaggatttgcaacatgagcctaccttacttaaacatgtcttgtgaccttgccatgctacagaaagaaaaacaagaacttacaaaatctttacagacttgcaggaaatagttacaaaattagttgtgagagcagaacaagggataatgttatgggggagaganttttcaaacagggggaactgtttagggggancttgttttttcttcatccccgctcc

SEQ ID NO: 448000 - DNA, 537 bp, Homo Sapiens
  misc_feature (335)..(473): n is a, c, g, or t
ctagaaactcttttatgttcttcccacctcatggcctcagaacatgctagaaatttttattcctctctgcctttactcacatcatttccctacatggaatgccctacatgcttatccattcctacatcttcacctaaccaacttttactcattctatggcacccaatgagtttcaatcacctctcctgtgaatctatttcatctccccaacttcaaacacaactaagccttcctttcttcaggcttctgttacactgttgtcaagctttattttagtatttatcttatacagcagagatgagtttgtatacccacttcttactaagaagtgttgnnnnnnnnnnnnnnnnnnnnnnnnnnnnnnnnnnnnnnnnnnnnnnnnnnnnnnnnnnnnnnnnnnnnnnnnnnnnnnnnnnnnnnnnnnnnnnnnnnnnnnnnnnnnnnnnnnnnnnnnnnnnnnnnnnnnnnnnnnngaaggaaatcccaggactagatgactggtaaattctaccaaatatttaaagaagaatgaacaca

SEQ ID NO: 448001 - DNA, 1087 bp, Homo Sapiens
  misc_feature (899)..(959): n is a, c, g, or t
actgttaatgtcaattcagtttaaagcactttattaaccacacatacatattttccagtgtctaattctcatcgtgttcttttccattccagacttccctgtctctttcccagagctctgttcctcttctcactgtttctggaaggcagttgcactcaaaagtgaagtcaccagtctgccgacaggtgcctccattgacacaaggcgagggtgcacagggcacatacaggctgtcacagtactggcctgtgaagccctgaaggcactggcactggtaggaaccaggcaggttgaggcagatgccaccatgctggcagtgtcctggaatgtcacactcattgacatcagtctcacacttctgccctgtgaagcctgtgaggcatttgcaggagaactggttggccacagtggtacaggtacttccatttgcacagggatgagacaggcaggcatcggtccattggcactccttacctgtaaacccgacctgacaggtgcactcataggtatcccggctgagcatatggcatgtgccgccattcaggcaaggtcgagacacaaagcatggatgagatgtcgagtactggcagtcctctcctgtaaaccctgaggcacatcggcacgtggctttccccagcatggcctgggccacacaagtcccaccattctggcagcggttcttctcacaggggtctcgatgttgacaatattcccccaagaagccttctggacatttgcagtatcctgtgccattgtggtaggtaacacacattccttcatttacacagggttcatagccatctcgacactgcaatgcatgcgcggggttcgcgcagcacagccagagcgccagcagcgcccacagcagagcggggcgcagggcgggtatcttctcggtnnnnnnnnnnnnnnnnnnnnnnnnnnnnnnnnnnnnnnnnnnnnnnnnnnnnnnnnnnnnntgggcagatccacatggggagggggtcccgatagaggagccccactctctcctcccctcctcctgcttcaaaggctcaggcctggcgctacggtccgaagcacaggcgcaaagcctcgactccccgcg

SEQ ID NO: 448002 - DNA, 482 bp, Homo Sapiens
tctcagtggcctcacctctggagggctgggcaacagcactggtcagaagttccgacagctgaccaccctcttcggctgagctagaggtcttggctgggctctaggggagcctcgagctgccccacggagaccagggtgctgagctgtcccgaggcaccgctttccggtgggaaggtgaccaagtctgagttcttgttctcactctgatcactgtgctgcttcttgtggcatctcagagagtcatccctgacgaaggaggcgccgcaggtctcacagcggaaggccctctgcgtcacgatcttggccacgtgctgggagctgccctctctgagcccttccttgcccagaggggcccggttctccgtcttggcctcgtccctgtgcaccttgtcgacgtgcttggccaggctgctgggccgcttcgtgtcgaagctgcagaagtcacacttgaagggacggtccttacagtggactctgctgtg

SEQ ID NO: 448003 - DNA, 373 bp, Homo Sapiens
tccaggtctgtaacagttattcacattttacaggagaagaaattgagtttccaagggcttgattagcctgatgctggtaatggcagagcagagacttgcacttgctctttacagattatgtccttgttcctcggttcaacccattttggctggagaaggaaaatgagtataaagaaggacctaggatggtgccctgctcacgaccagcatgggaacacagttaatcaaggctgaatctcacggacaggggcaggatccaggatggagcctcctgttagctaccaatttgtcttctgcaattcagcagctgtaaagtcaggaggtgggatcagcagcacaatgtctttcaaactcggttcctgggcatcctggc

SEQ ID NO: 448004 - DNA, 555 bp, Homo Sapiens
tttttcttacacatacgcacacatagacctaggagtggaattgctttgtagtaagatatgcatacatttgcctttaatagataatgccacactgttttccaaagtatgtgggcctctttatactcccaccagcagaggatgagggttccaacagttccacatattcattaacactgatatgatcagttgtttttttaggttttagctgttctcctagaatgtatagtgggatctccttgctgtttccaggcatgtccctgatgacaggtgaggctgagcacttttcctgttcattgtcatctgttgtgaaatgccctgtcaatctcttcctctcactattctattgaactgactgtccttttgtgatttactgatttatttgctggagttgtttgtgtattccagataggagcactttaccagttagacacgctgcaataccttctcccacctgtggcttgggctttcactctgcagtgacaacttttgataaccccgaggatggttgtcatctgtcctggaggagtcaaaatcagactccagctccttcccaat

SEQ ID NO: 448005 - DNA, 362 bp, Homo Sapiens
cagtatgcatcatagatggaggtggtttcagtatgtgggtgtgtgtgatgtgtacctgggtaagagacttgctttccaggttcgcactttcaggtgtagctgggggcagtaagtcgaattgttttagtaggtcctcaaaaggaataaccacacagctgtttgtttaaatgctactgtacctatcaaaactattgtttaaaaagtatttttatacactgctaatctaaaattgtatttcatattgtgcctgtcataacaatagcaaatgtaaaaagttctctttcccaccacttgtttataaacctcatagttgatatttttagtgttcctactctgaaagtgggtccgagctaaagtcgact

SEQ ID NO: 448006 - DNA, 1476 bp, Homo Sapiens
ctagctcagcgtgacacttgattcgtgggtgatcgtatcctattcgggggcagctgtactagtaagacattgctgtgctcaacaaggtgatctcccgcctgggctagcccgtcggtggctctttcgagaaaaggtgttccaacacacgctgaatgatgtggggcaccacaactggtgtgcgccccacagagtgtgtgtggctgaagaaaatgtaaggcgcgccgccgctgttaccgactgttcaacaaagcgggtgttatacacacgagacccccctgttcgcgacggtatatgttgtgtaaaaaaatgcggtggacagccaccaacaactgtttgcagcattccacaggatgagtgcgcctgtcccatgctctgggaaccagcgccaggatgtgtcaaaagctaaacgtcccgggagtaagagtgcaaaattccaaggtcatgggtttgtaactgttcggctatttccattaatggccaagcgaggtcaactcgttttttcccatggcgcattaaaagtaactccacagttcttctccaacataatttacagccaccattcttccacaagctccaagatactttgcaaatggccaaccttcatcagacggaaaactctgtagcaccagcggctcggggttgaaggccagggtcagcagcagctgcatgcgctccgagtccttgaggttgcgaagcaggaagctgcccgagtccttggtctccgcgtagcggcgcaccaggcggtcgagaaggcgctgcgaggggcattgcaccaggtccgttcagcccttcaccgcttcgggcgtgagcagacgcacgtcgcctttgaggcgctcgaactcggtccggggcatggcctgcagcaggtcgcatcggggccggccggtggcccgcttgcagatgctctggtcgagctgcgccagctcgcgctgcgagccgaggcgcttgagcaccactcggtcggcggccgccctcgcggggctcgccgtactgcgcgaagtacacgttcttcacgttgaggaagtccagcaggcgcaagcggccccacgcctcgaataccacctgcccgttgaggaagcggcggcaccagctcgtgccgaagcacgccgggcacttattgagctgcaggaagcgccggtcggtcagttcgttgcgctgccaagaggcgagcagcgacggcgagtgcagcaccatcagcaccaacaggctgcccagcgccgccagcttcagcgagcgggacaggcggcccagcttcgggggcaccaggcgccacataccgcccgcccgcccgcaacgggagggcgagggcacccccggggcgcccccgccgcgccaagacccggagagctaccggcaggaaccccgggcgagagaaggagctagcgcgcgggctggggcggagggcggagtaggtgtgtgagagaggaagacgtggagcgggaaggcgcgggcctgagcgggctgcgacttcccgct

SEQ ID NO: 448007 - DNA, 621 bp, Homo Sapiens
atataaatatgctaaaggagggaatgaaaattgaagcaactcatgtaaagaaaaaacaacttcaccactaccttcctgcagaaattcttcaaaagaagaaaaagcaaagtctctctgatgtcaatcgaagctcgggcggacttcaatccaaaagattgtctctggatagcagttgtctggatagctccagagacactgataatggaacaccttttaattctccagcgtccaagtctgatagcccttctgtaggagaaacagaaaggaatagtgctgagcctgctgctgtaattgtggagaagccactgagtgtaccaccagcccaaggactttccattccagtgattggcgcaaaagttgactctacagtaaaaactgtatcaccccccactgtgtgtaccattcctaccgtagtaggacgaaatgtcattcctagaatcacaacacctcacaaccctgcccagggacaaccgcatctgaatggaatgtcaaatataactaagactgttacacctaagagatcccattccccatccatagatgggactcctaagaggttgaaagacgtagaaaagtttattcgacttgaatcaacatttaaggacccccgcactgctgaag

SEQ ID NO: 448008 - DNA, 2068 bp, Homo Sapiens
ttttcctgagaggtaaaaatttattgatttctatcatatcagcatgttatgatatggtcacgcctgctcatacagctgacttcttagagccaaaagagaattttttttccttttaaaaatacatttgttcagcaggaaaaaacattttaaaaacaagcattttcatattaagtggaaattaaaaacaatggctttccccccgccaactcatgaggaatagggctggtcagcaatagatctctgagtgcttccaatttgttttcaggcctctgtccccagtctgttccttgtcttccacagaaagtagttccagggggaaaaagaaattaggaatctcaccaaaacagcagcctaaatacagataggaaaaataagaggtagacacgactgtaacgatttaactcatttggtagactgtgcaagatattttaatatttaaatttttcagtgggatttaaacaattgtttaaacatcaataaaacaattgatgttttaaatgctaacatcttagagatgcctataccacagtttacttagctttgagaattgaaaagtataaagacaactttagaaatatgcaagcttcccatgtatttcagtaaatgttttctttctgtcacattcttctaaatcaaaagttcgctgtgtaggactgacattaatgcttttcctaccctttaaagccctggccagggtcagtgataggaatttcctgagttcagcaagtagattaactatgagaagtttattcaacactaatagttaagaaaaaaaggatggggcagtggtgtgctggatacagcccctactgattcccaagacccagtggtcacattttagaattttgcctgcagttgttaagcattggttatgaaaacttgaatcatatagatttacaattaatgttaaagctaaaagtggtttcggcttaatgagttctaatatgtaccatggtaagaaacagttttaacagtagatcacgtatcagattgaatgataataaatttattgggaaatgagttagatttggacagtctgccatttttcaaatcacagttgaaagacaatcaatcataggttgactgtaggagttgagcaaaaagcaattaagtatccttttaaaaaagcattttagttctttcctgagcaactaagtatactgtgagaatcaactggctatatgggatttacaataaagtatttgtatcttattatttgttaattgtgttatatgttcttgctatcagcaaaatttataacaaacatgtatagttgaatacataattttctcccagaagagtgaactgctaaacatttaccagcacaccactggattgggagaatggggagaaagggggaaatatttttaaaccaaagaaggaagtctgatgttttttcatttggtttttcagtttgccttcagcatccaactgccacagtgtgctttaagtacttgcctgcagatattaatgcccaaatagctctggtaaaacacacatgccccatccccactgctaagaattaaaagcactttaattgaaaaaaatcaactttattttttctaggtttaaaaaaaatagaaccagctattaatttttgttgagaaaatgcttcttttggtgttcacatctaaatttctgaaaaggtgatctggttaccaaaatcatcccaaatgcattcataaaccagatccacgtgtgatcagccctttacaaaaattaattacagttgccacagcctttacattcattcttatcacacgttacaacatgcagataacacaaagaaaggtcaacaagctgaagtaaacattacagcatcaggaaaatgaaaacccatctgtataaaataaatacaattttataataactgtaaagaaaatgaaagcacttaataaaaataatggcagttgaaagtataactgtctcatcacccgatcataaaataagttactgtaaaatgcatagactccttacacgtaaagaatttgtgcatcacagtcatgtgttcaacagttttacacaataaaaataaagccattcaagatatgtgtcatactttgcaact

SEQ ID NO: 448009 - DNA, 323 bp, Homo Sapiens
attggcttgagccatcatgcccagccaagaaccttgtctcttgtgatgcaccccagaacaaaacatcactgcaaaaacacaccaaggcatgagttttagtcctaagtcccatttatccaccatacactatgtgccaggcacaagggctaagtgcttctatggacgagcttcccttaatctcagcagtaacaaccccagggcaatggggcctgttgaccgatccatttgccactgaaggagagtaaggctcagagagggtaattggcttgtgccatgttcagccagctaaggaggggcagaaccagggatgcaaaccccagccg

SEQ ID NO: 448010 - DNA, 454 bp, Homo Sapiens
cctcatgatctgcccaccttggcctcccaaggtgacatgaagctgtgcaggtggggttgaaagccatgagctgagttgataaggaaaggcaatgagtgcggacagagaaaaaagtggctggaggactaagcccacgttcagagaacagaaagttctggagacacaagaggaggaaagcataatgtgattagggaggcaacaagaaaattacaacaaatatatgtgttaagcttaacgggatgtcctaaaagccaagaaaatagatgagaaagtgagcaactgtgccacatgctactgataggaatggaaagatgacaggaaattaaacattgaatttcacatggatccatcactggtaaatgaaaaagaaaggatcagtggaatgttgggtatgagagcttgattcaagcaagagttcaagcaacgactgaaggcaaagaattgaacataaagt

SEQ ID NO: 448011 - DNA, 255 bp, Homo Sapiens
tctaaggcaactcaggtgtttatttctggctagcatagggagggaccagttactactgccagaggctcagggatcagagggaggcagcatgcttagaggagcgtgaccacactttgggggctgagttcttcattagctgtgctacggtcacctgggctttggggcacctgtctggatgggatgttgctcaacgggaggaaaggtgctaccttctttgttctcttgtttaggcacaccatagctgagcaacacctg

SEQ ID NO: 448012 - DNA, 397 bp, Homo Sapiens
  misc_feature (27)..(27): n is a, c, g, or t
  misc_feature (126)..(126): n is a, c, g, or t
  misc_feature (128)..(128): n is a, c, g, or t
  misc_feature (132)..(177): n is a, c, g, or t
  misc_feature (189)..(204): n is a, c, g, or t
cctaaactttataataggaaaaggggnaattgtgagttataatggttttaccaaaggttactggccaagtttcattatctctgcaagggaaataaaaagggggacgcccctctggttgtttttttntntttnnnnnnnnnnnnnnnnnnnnnnnnnnnnnnnnnnnnnnnnnnnnnnagactttgtttnnnnnnnnnnnnnnnnttgtctagtttccctcacagacttaatgctgtgacaaaagaacaattcatacagaggggctaacaagccaaaccagcagccttcagtgggagggaacttggaaagttggaatgttcaaggaaaatgacaaaatacaagtttacaaaaattgttttttcaaaaaatgctcaaatggccaggcacagtggctcat

SEQ ID NO: 448013 - DNA, 292 bp, Homo Sapiens
aaaaaggtaaaaaccaaaattcaagtataaactaaacactggcttggtgtggaagtggttggcccagcccaaaaggtgcctcgggctcaaactgaccgggggtggaagggcggctgtgcacagagctgtaccatggcaggaaccctgccgcccagcctaggagggtgcctggcctgcatttcccttttttcccaccttaaaaaacagggatggatttggggaggggcggttagacaggagcatggccaacagccccaaagctgggtgcagataccggccagtgccctgaggg

SEQ ID NO: 448014 - DNA, 529 bp, Homo Sapiens
gtcacattgggtcctcagttttcttatcagtaaaataaaaaattaaataaatatcatttatttgtgaggcctgttagtcaaagaaaatcttacaggaagccctttgtatacaattgataagaatgattcttatttgaataaaatggggaaaacagtggagtcctgaaaattcttatctcctccctttccttgctaatcctctagatacttggataatactggacaggaggacttcccaggcccctttctgttttcagtcaagtatttcaactacagtactctcttctttgaagtaaaattaacctttagaagttgtgtaatacatcttttgcctcttctgtggaatgactttatattttgcttttcccctattttaagacttcttaaaatatatccttatgtcttagccaggcatgggggcacacatctgtcgtcccagctactcaagagactaggagttcaaggctgcagtgagctatgatcacatcactgtactttggcctgggtaacagagtgagaccctacctct

SEQ ID NO: 448015 - DNA, 1576 bp, Homo Sapiens
  misc_feature (64)..(64): n is a, c, g, or t
  misc_feature (262)..(262): n is a, c, g, or t
  misc_feature (331)..(341): n is a, c, g, or t
  misc_feature (809)..(826): n is a, c, g, or t
ttttgtcccttttttgtgaactgaccattttcattttaggcatgaagtccttagaggttccatnccatgtggtagatatacccagaatcgactttagtattttgaccactcactttgtaaaaaacactcacttgaccatgagccaagaagctccttttaaccattcttaatgtcttagaaacagatgctctgacaacactcagtagatcagagttaagcttggactctggatcggcacagatctgagtttaaatcttggttntgcctcgtactataacctcggaagttttagttaacttttcagaacctcggtttccatatctgtaacagnnnnnnnnnnntactgcttctctcatagtgttataaaaaaaatttactgagatgatggactaaggcatttacgagcattatctgacacctgggagagggtgaggctcatataagcgcacaataaattacaagtattattattgtccccttctgtggtcaaccacctgttgtttctgccattacatcatcttctggagaaagctccctagttttccttgagaacaccttttcctccattgcatataatccctgtgaaactacctattactggccaaggaatggtagcaggacctcagatagcccaacagatacttgctcctcagaatctgaaccttgagcagagtcatccaaaactgaggggaaaacacggagaaattaacaacaacaaaacggctgtagttcatgtgtcgccatcaaagaactcagacaagattggccattagctcctgtagctagttcctgtcttttccaaaacctgnnnnnnnnnnnnnnnnnnggtagatgctgtggctctcttatggcctccaataaacataagtgaggcagagttggtttctattgtttgcaaccaacgaacttaatggattctgtattagaaagaactggtatatttctttaagcaaagactaggactctatggggctcaacaaactctgtaatcgcctttccactcccctggacaaaataaatatattgtctactgctgaaacgcaaattatccccaaaccaagtagctttaaacaataaacgtttactatctcacagttcatgtgtgtctgacgttccagagcagcttctctgagtggttctggcttagggtctcccatagaggtcacaagcgagatcagctaggattgcggtcatgtgaatgcttggctggaattgaaggaccagctttcaagattgcacactcccatggctattggtgggaggcctccatcccttgtcatgtggagcactccataaggctgcttgagtattttcatgacctggaagctggcttcccccaaagtaagcgatcaaagaaaacaagacagaagccacgatgtattttatgacttaccctcagaagtcaaactctcatttcttcaatagtgtagtggttacacaagtcaggcctattcaatgtgggaaggaaccacacaagggtgtgaatagaagaaggcagggatggttgggggccaacttagaggctggctgccatgcaggggaagcctagaagcctggtaggggttcatgtaccctg

SEQ ID NO: 448016 - DNA, 436 bp, Homo Sapiens
  misc_feature (356)..(381): n is a, c, g, or t
acattattaattatagagtttatttggacacaaagcatgagaatagccacctggaaacctcaactccaaatgaatggggtcagcgttcccaagtagagacattaacatttcacacacacaaggaaatacagagaagctttcccagaaccaccacattttccattcaagtccagtgcataggctgcggcagtttgactggtgatggagtgatacacttcaaggaaggttacattatcactccataagaagggacaatgatgccaggaggtcttatctctggggctgcttagttttcctaattatttacacgaaaactttttaaaattgatattaggaaactaaattgtatagcacannnnnnnnnnnnnnnnnnnnnnnnnnggggaaggcgtcctgctccggtcgcccaggctggaaatgcagtgaatgtgatccc

SEQ ID NO: 448017 - DNA, 518 bp, Homo Sapiens
ttgaggaaaaagaatgggtgactttaatcagtctataaggaaataaacatctttagaggccgtgtgggggtgggggagccctgcagcagaggaggcatgccacttcaagcacagccgaagcagagaaacctctcagagaaaccactagaagggtggacggagtgggaggtgggacttacagtcagctttccctgactgggcaaaagggagcagttgcagtattaaaagtggttcctgagtccaccacagcggccagctccagtcaggcagcgggatgggctcccacgccccatggcaggcctgtgtgcaccacagggcagccccctcccttcttggtcctcttctatcctcctgccttacaagagaagcacgtccctgagcacatatggcccagcccttgcccaagctgagccagacaggtaagcagagactttcactgcagtgatgcttctggctcagccccaggagctacccgctgccatgtcttccaggctgcactagaggaaggcagtggagca

SEQ ID NO: 448018 - DNA, 353 bp, Homo Sapiens
ttctctgggggaagtgtgcatctctttttccttcccccctgcttttgggtccctctgactgtgtgttcctacctacttccgggcacaggcagcatggcggacacttcctgtgggggcaacgtacgtgctctgcctggtttttaccgcaattttccaatctgacatattttttcgttcacacaggcggggaccaacccagccccttttgtctgccttctgcctctgcttcgctgtgttccggcagtccctaagtcccttctcacacgatttcctcaggagaaatgaggttttactttaatctcttctggtttcggtcatgcacgcttcgttgtattttcgtatctgtctgcctt

SEQ ID NO: 448019 - DNA, 637 bp, Homo Sapiens
  misc_feature (432)..(432): n is a, c, g, or t
  misc_feature (521)..(521): n is a, c, g, or t
ttgcagttctgccgttttatttttcctgggatattcaaggggatgtgggaacagccacaggtgtggtgaggggaagcccccatctcccctccccagccgctgggaaaggggagaggcccaggcgccctggtcctgggttggtccagccactgtggtccctgggcccagtgggcagagggctgaggatggagcccctgggagggtggggcgggctcctaggcagggttcgggattcttcataaaaagccacgaagcttgatccccacgaagcccagccccgcggggtggggaagggggggacgcagagcccagatgagggacccggcccggcctggcccgtgggggaaagaatggcagagatggtgcccatgggggagaggtggggacaaagcgtcggaccaggtgggcaggggatccaggtgaggggcgcanggcggagaggcacggccccctgcccagcccgggcgccttcgcgtggatcaggaggtaaaaaaccccaagagtgtgcgggccccggcccnggccgtcggtgccgtgggcgggccacgggcggcccggtcacaggacctcgagcttgtgtcagtccggtgagaaccgcgcccggccggctgccggccggccggacagctggctggcc

SEQ ID NO: 448020 - DNA, 490 bp, Homo Sapiens
  misc_feature (465)..(465): n is a, c, g, or t
  misc_feature (471)..(471): n is a, c, g, or t
tttttttacattcaagttctattttacttggttcgaaagctcttgccccctggaaattattccggtccaggggcgttcccggccggccctcaggggtggggccgaatgcagaggccctggggtagggggcgcggggcgcggcggcgggtgggcaagcgggacgcctggccggtgcagacgcgcggggacgagatgggcgtgccgggtgcgaaagcaggagcggaggcgggggtgcccaatttctctcacttggtgccccctcccctggctccgaagtagggctggggactccaggagggcccttgcgtttggcctccacccctctcccgcataccccaccctccagagagctctgggcgcggaccagggtgcacttgggggacaggtggaggccgggccgccgggcttgcgcctccacgcccgcagtacggcgtgcggccagagcgggtgtgcggggacctctcnggacangtcaagccccctcgggtgg

SEQ ID NO: 448021 - DNA, 430 bp, Homo Sapiens
tccatttacaaatatgtttaatagcagcatttctttaaagaaaaacaaagttcaaatgcccaataataattatgtttaacacttggtacacatataaatagacaaaaggctgcggagaacactggatttaaataaaggtgttatgggtataattaactataatttattttatgaataaataggaaaaaagtccctggctataaaggatagtggaggtttatttcccaatattcttccatttggactgaacccctgccaactaagcagacatcccactattacaccaaaaagactgctctccctgcgagcaattacaatacatgacaccactaggcccaatggctcagagggaagagtggcctgtggctcttcaatctttatccaaacctggttctagcttcaggagcctttggtcacctgagacttttta

SEQ ID NO: 448022 - DNA, 263 bp, Homo Sapiens
ttttttttagtgtcaaaacaataaatttttatttgttcacagttaaacacaagcaactgccttgacattttagaacattctaagaaggacagcaaactcttttgattccaattcccattcactaagattgtaccattttatcctgcagttcatatttatggcatctgatgtggattgttgacatgcttttaggattgaggcgggaaagtttagaccttttgacaagagctgactttcttcaatttaactaaaagcagtccgtt

SEQ ID NO: 448023 - DNA, 374 bp, Homo Sapiens
  misc_feature (70)..(78): n is a, c, g, or t
  misc_feature (335)..(336): n is a, c, g, or t
  misc_feature (342)..(342): n is a, c, g, or t
tacttttaattttttaaaattatactaaagccttagttgttctgaaccagtgatgttttatttgttctannnnnnnnnctgtgatgctttgtaaggatttttgtttactccactgcccccagtttggctgtgaaccctcactgtctcactgcagagtcaaggcctcctcctccctgaagctccctacttgtcacatacacacctctgtggcagccacccacctgtccttccatgtaagcaggtagggcgggtctatgtctttgagatctctgaaacaaaacaaaacatgttttccttgggaattacacattttcccaagaagctggaggacattnntaaggngtttttgctttccattttccattggctataag

SEQ ID NO: 448024 - DNA, 404 bp, Homo Sapiens
  misc_feature (188)..(244): n is a, c, g, or t
ataaactggtcatcatttgattttgaaggatcttttaaattaccagatttagtattgaaacagatgatacaatttaaaaatgcaattgcaatgacagaaaaagtgtggctatgcatttatctggaagaactgaaagttacttggctctgagtacagcaccagaagccttgaggtgagagcatcccatnnnnnnnnnnnnnnnnnnnnnnnnnnnnnnnnnnnnnnnnnnnnnnnnnnnnnnnnnatgcaccctccgggtaagcactgctcttctgatggggtccatcgggagctgggccagcccagtgtcctgcctcctgagttatttcccctgcgatctgtgtccagtagcacctctattccgccttctcagaaagttcaggcttttgtgtttttacatgttt

SEQ ID NO: 448025 - DNA, 442 bp, Homo Sapiens
gcaaccgacctgctggtgaccagagaacggagattttaagaggacccgacccaaagaggaagaacatttctgggtgcgcgccccaggtctttgcttgcagacggggagggggagaggctctgagccagagacccaggagggactccgagaagccggccccagcacctggaggtttctttcgcccgccggccgcatccggggcgttctacttcacccggtggtccagtggcgcctcctgacagcaccccccgtccccctcagagagacaggcgagttctgtcccgtcaccatcctgcacaaagaagccccaccgcagccgaggacacttggcatttagtttccggcccgagggcagcggcgcccgaagccgggctgggagccgaggcggctgcttcggggcagtcgcttcctgcggggcggggagggggcgggaggcggccgc

SEQ ID NO: 448026 - DNA, 310 bp, Homo Sapiens
tatttcccattggaggctatttctttttttgtcttttaaaaattttattacacaaatatcacccattcccacgtgtcagaggaaagatgtccttgctctctctaaaaccaatagtggagaacttttggaaaacaaaacaaagtccaactagcttcctccttctctggcccaaaataacctcaatgtgtcaactgagatagcataagacttatccccttaatgcttacatttaatttaaactttttagcacaacattggagattgactctaaatcagcaacaaaaaaatatatatttacaatatttctccg

SEQ ID NO: 448027 - DNA, 1428 bp, Homo Sapiens
  misc_feature (77)..(99): n is a, c, g, or t
  misc_feature (309)..(317): n is a, c, g, or t
  misc_feature (1150)..(1150): n is a, c, g, or t
ggctggtcggatcctcgtctttattctcgggaacggaaacaaccggcggcctgaaaaggaccaaagctcatcctttnnnnnnnnnnnnnnnnnnnnnnncgtattatttggctccaaaacttccgtcatgagaataacaactctgaatggcaccttttcacacatccactgtgcccaacggccagtgcttcacccaaccgcaggccagatgccgtgactcctaacgtctttagagaacagtatcagacggcacaccaaggcgttttaagacacgggaatttgtttcctatggacatttcttttttaccnnnnnnnnntataataacttagtttgcattttacagcatttcccatcggccagggcatccttggctggaagctcatggggttgagtgtggtcgagaacgtccacagcttcgggtaccagggtcaggcctgggcccagggcatgcggccttcccagcgcgcggccctcaccgcacggccccaccaggacctgcagcgcccaccgcagcctgtgactcatcaggagaggaagggcagcggcccacggagtcagtccgtgccaacctcacaagggttcagccccctctcctgggcatccctgtacatcctctggaagtccttgaagcgtggggcacagccgagccgcgcctccccgaagtgcatgtggccagtgaagaggaagtcgccatgccccggccgcacgccacactccagcagcgtcctgacgcgcccctgccagtggccgtcaccctcgggcaccggctcgaagaccctgcttttctgccgatagagtctgctcacgcgcaggtggatggctgagtcctgccgctcaggctcgtgggtaacttgctggatggagcctcgaacggcgaagtcgctggtgcagacggctaggagcacctcggtgtcactgcagggacggcacggcgcagacagctcgtgcaggtccgacgccctgtgcctcctaaccagctcgtactggaagcctgtggtcctccggccgatatcctgctgcggcgtggcctccacgaacaggccgccctgctccaggccaaaacactgcacccggccgggcctgccgtccccgtccggtaccagcagtctcagttctccagttttttccaaataaatattggcccccganggagtccgtgaaggacctgatgcacacggtcagttgccgggcagtcgagatggtgttgggccgcaggttaatgatgagagcacctgttgggtacatccattccacggcacccgccgcacagcgcagatacacctgctccacctccttcctgtgtgcctcgttcgtcagcccgctccccttccagctgcaccggtcgctggagtactgcgcgcccgcgccgcccagcagcccggccaggagcaggagcagcagcgggagcggcggcgggggcgatcccg

SEQ ID NO: 448028 - DNA, 1055 bp, Homo Sapiens
  misc_feature (101)..(101): n is a, c, g, or t
  misc_feature (219)..(241): n is a, c, g, or t
  misc_feature (451)..(459): n is a, c, g, or t
gtggaaatgcagcagagggctgagggaagtcgccgggggacaagcgtgtctgccgaggcaggtggcgcctggggtacgtccagcgaggccctgaacacggngcgtgggcaccggacctggcgaaagacagactccggcttctggctggtcggatcctcgtctttattctcgggaacggaaacaaccggcggcctgaaaaggaccaaagctcatcctttnnnnnnnnnnnnnnnnnnnnnnncgtattatttggctccaaaacttccgtcatgagaataacaactctgaatggcaccttttcacacatccactgtgcccaacggccagtgcttcacccaaccgcaggccagatgccgtgactcctaacgtctttagagaacagtatcagacggcacaccaaggcgttttaagacacgggaatttgtttcctatggacatttcttttttaccnnnnnnnnntataataacttagtttgcattttacagcatttccaatcggccagggcatccttggctggaagctcatggggttgagtgtggcgagaacgtccacagcttcggtaccagggtcaggcctgggcccagggcatgcggctcccagcgcgcggccctcaccgcacggccccaccaggaccgcagcgcccaccgcagcctgtgactcatcaggagaggaagggcagcggcccacggagtcagtccgtgccaacctcacaagggttcagccccctctcctgggcatccctgtacatcctctggaagtccttgaagcgtggggcacagccgagccgcgcctccccgaagtgcatgtggccagtgaaagaggaagtcgccatgccccggggggcacgccacacttcagcagcgttcctggacgcgccccctggcagtgggccttcccccttcgggccaccgggcttgaaaaacccctgcttttttctgcccaaaagaagtcctggctcaacccccccacggtgggaattggcttgaaattcccctgcccgcccttcaagggcctccggggggggttaaacccttggccctggggaatgggaaaa

SEQ ID NO: 448029 - DNA, 464 bp, Homo Sapiens
  misc_feature (71)..(71): n is a, c, g, or t
  misc_feature (79)..(79): n is a, c, g, or t
  misc_feature (88)..(88): n is a, c, g, or t
  misc_feature (112)..(112): n is a, c, g, or t
ttttgcccacccggggtggaaccccccatccttaaagggaaaggaaaagggaattgggtgtgaaagaggangaagttangagaagggnaaatgccagtgaattacctatccngtggcccatccaggaagtttgtccctgttaacccaaatggttactgcactaccagggttactggtttattttccagggagctgataaagcaggagaactgttgctgcatgttttctatttggactccgtcacaatatggtaggatatccctcaccaactcccgacactcagcagacttgtttttatatttttttctttcttgtacattcttactacgtattttttgacttaagaatgacatctttagacgcatttcagagccaatgatgatatttgctttagataattattatattattataaatatagccatattattttgaattcaaataaatttctatactggtaaaaa

SEQ ID NO: 448030 - DNA, 390 bp, Homo Sapiens
ggcttcttcctccaggggggccacagggtggggtgggagtcttctgggcctggcccagcttccctcaaggcgtccgaggccatcagttgtctgagctcagaacccagcagacctgcctggctctgcagcttggtcagactaagacccttccaaggccgtaggattgcacctccaggcccagtggagcctggcagctttccagccaggttctggatcctgacgagctgctgagacagcatcaaggtggggcaggtggggcggggcaaattgggcagcacagggctgtgtgggcatcacggctctgggtcacacgcctctggggacgtacgtcccatgtcgggagagccgtcaaaacgtccccggtattaagagaagagtggggggcagggc

SEQ ID NO: 448031 - DNA, 1020 bp, Homo Sapiens
gtttacatcatattttattttattacagtcaataaatatacttttatatatgaaatcattatagaatacatattttaaggcactaagtctcaaaagtgaaggcacctgttatactttgctctctaatttgacacattaaaacatgagaggtaaatctgccaatttattttgagtttgcaagcttacaatttaatagaataaatcaggtagcttcagaaatcaactaagaaaattaacaggctagagtctgaactaataatcttgacatggtttgattatcacttggtttattctgattactcatttaccttttcatttatgaatctaaactgacaattccacctttagaggtataatagagctattaaccgatgagacacatctactcattctctgtaactctggacatcgcatcttgctttaaaatgcaaatcagtcatgtcttgagcctcttactgagcagtgaatgtgtatccgtgcacattccatttctctttctgctgggattttctttggagtcagtggtgctgtccctaagcagttctatgtgggcttctttcagcatctttgttttgcatggagtattctcagaggtcacactttcggttttggttcccatagcttcttctaaaactgttagaatcctatcaagttggtccaccatgaactttgcatcttcttcagtgaagcacataggtggttttattttaagtacatttctatgaggtccatcggcactgagaagcactcgtttttcttttccatcttgtcagatgatgtgctgagcctcagctgtggcccgggtcttttccgatggtccttccactaaatcattccataaaaggcaatgccctatatccctatcaagtggttagcctctgttttcatcaatccgtgaagaatcccactctctggcttcctgaagttcccttcattattcaggacccaccacacacaacggtctccagttaatatcccccactcgagcttgctctgttcccccacccgggcggccacccc

SEQ ID NO: 448032 - DNA, 1136 bp, Homo Sapiens
  misc_feature (27)..(27): n is a, c, g, or t
  misc_feature (38)..(38): n is a, c, g, or t
  misc_feature (47)..(47): n is a, c, g, or t
  misc_feature (62)..(62): n is a, c, g, or t
  misc_feature (455)..(503): n is a, c, g, or t
ggcaaaaaagttgtgaagctgcctcanccctcttaccnacctcccanaaaaggtgcctcggnccctggctgcagtcctcccgggacccagggagaagcctgatggcaagtgcaccttctggggccctcacctccccctgagctccgggaggactccagcccagtgtgggaagaagccaagtctgggaatcttggttggtctggggcatttcagatcaacacactttattaaacaccaacagcgggccaggctctgcactaagaacacagagatgaataagacactgtccctgtccctagagggcttacagtctagtaggaaaaaccaggcaagtttcggctaattactgtactgttggattaaggtaaaatgttgagggggagttggtatcctagaccacctaacccagcctggggctttagacagtgcctgaactgagagctagttgtaggttnnnnnnnnnnnnnnnnnnnnnnnnnnnnnnnnnnnnnnnnnnnnnnnnngtatcccaggccaggagcagcaggttgaaggcacagaggcaagaaacagcaaggatggtgtacacggaataccaagaggtccaggcgagaagcaggggtggcaggcaataagcaggatgtgggagcactacacaaaccctacgtggggagaggggtctcccagaagaggctggtcctgcctggctacagcgttacccacgagagaatccttgctgcttgctggcagcaagccatactggggggcctgggccttcagtatcaaaaatatctcaacctaggggagggccttgttgactgtttgaacatggaaacccttggtccaacatgatttcccgtggtccactgaggaggtttaggccataatggggtaggtgcttagagaggattcaagcccagtgaacccttggcctcccagctctgaggagggccacagagccagtattccctacccccacccacagaaatgtatagcagtctctgactgttgctttcacacaccatcacggttgctgttctgtaggtgctgctcagggaaggtgggaaggacagcaggctatttcttgacctcaaataggatacactccaaagacgggatggcctggcacagaggcccagccctgattcggagagtcc

SEQ ID NO: 448033 - DNA, 574 bp, Homo Sapiens
caaattcaattagactttagattttaaaataacagaaacactttgcaggtagtcccttggtttataagtggtgtgaaattcactgtagcttctgggaactctgaatgctttgctccagagaacaattatataaatagttaactctgaggatgctgtcataaaggtctattaacagtactagttagtttaacagtactagttagtaccattaaatcagctctaattctaggctcttgggatgaaagtgtggggggaagggaagttaaagttttcatcccttttcccaggcacagacttcgtcccaagcagacatctgaagtgggcaaatggaattttggcatagtttctaccccctttcccaatacatagtcttttcctacatcctcttgttgtttctaccagtcacaaggtcttcatgcttcctccatcatgttatgccattttgatttgccttaagttctccaaatgtcccatatttcaaaatttaagccctatatcaccatccgatttcacaggcaacacaaagaatgcgaactgcttctaaggagtaagtgaatgaacatgcctaaacctt

SEQ ID NO: 448034 - DNA, 525 bp, Homo Sapiens
ttttttttggtagtcacaaagcccaactttttattgaagtataacatacacacagaaaagtgcccagatcaaaagtgtacagctccaagaatgttcacaaacggaaagcacccaggtaaccggcaaccagatcaagaaacagaacaccccagaagcaccacctcatgcccccttctggttactgtcttcttaggactgatctctacttgcaaccgcatggatgaattttgctgggttttaaactttatataaatggaatcctatggtgcatttttgccttatctcgttcaacactagggttggtgaatacactccaagttgggggtggagttgcagctcattcccattgcagtctgggattccatcgtgtgaatataccctaatgtgcttatccagccaacatgggcattgggggtgctttcctgttcagggttattatggagagtgtttttgtgaagatttagagcatgtctctggatgaacacatgtacacatttctgtagggtatacacctaggggtggaat

SEQ ID NO: 448035 - DNA, 142 bp, Homo Sapiens
tgtcgccgccaccgccggcggccttggccccagtctccggagtcgtcctgccggcgcccccggccgtcagcgccggctcttctccggccggctcgcccggcggcggtgcgggcggcgaaggcttaggggccgcggcggccgc

SEQ ID NO: 448036 - DNA, 862 bp, Homo Sapiens
gatccagcgctggagagttttttgtgttttttgtaaacgaaaaaagagctttattattttcgatgagacaatacctgttttaattgcatattttagagttgtttggcaatgcatcaaaatttcctccaaattttgtggttggtctgccaattcccaattatattcttggagaagctcattaggataatggaaatcaatcactttggttgatctatcgaaacttttcaccacatactgaagtaaaatgttcataacatcttgcagaaacgccaaagtgggcctttctccatcacacgccggcagcaggtctgttgcatggagaaacgcgtagttgacatccactttggagcagctgcagggcttctggtcgcaggcgcaggcggccttccgggcggcggcccgcgggggttggctcccgccgctctccgccggcttctcggcgtctccgtagagcagggcgcacagtttgtttccgatgccgcccgtgaacttctgagccacttggcaccaggctcgcgctgtgccgggattctcggaatccccagagccatcttccgacccgaaagaccaaaagccagagcccggagatgccatcggctttggagactggagcaggtcgcctgcgagtgcgagctgcgggcgagctgcctcgggcttggccctgcgcgcgcgtgcgtgcccgtgtggcgggaggagggcaccgcgcggggaccggcggggccgagcggcgagggcgggtgtcacgcaggaacagaaaacgtgcgtgtctgtgcgtgtgtgtatgcgagctggagacagggtttagggacgtggcaaccctttggaagccggggagctttaaaagagaccgggacatccctac

SEQ ID NO: 448037 - DNA, 756 bp, Homo Sapiens
attcttccagggtccttccgttcccacccccagggtccagaccgcccggttcttagcagcgccccagggaccacggaattccaatgtccccggagacccccgcggtctttgggggggcttttccaaccttctgtggaacgggcctgagactatttgggcgtcttcccagggtacaagaggctgtagaggtcttgagctcttgggccgtcaaggacttagcccaaaagcagggagaagcgcccgaagaagtttcctgttgcaggtggaaaaacctccttcgtcttctccgtagttccgcaaaccccagaccaccgcaaaactcgcccgccgcaggcccccgttctcttgtcctacctgtgccgggattctcggaatccccagagccatcttccgacccgaaagaccaaaagccagagcccggagatgccatcggctttggagactggagcaggtcgcctgcgagtgcgagctgcgggcgagctgcctcgggcttggccctgcgcgcgcgtgcgtgcccgtgtggcgggaggagggcaccgcgcggggaccggcggggccgagcggcgagggcgggtgtcacgcaggaacagaaaacgtgcgtgtctgtgcgtgtgtgtatgcgagctggagacagggtttagggacgtggcaaccctttggaagccggggagccttaaaagagaccgggactacctaagggtcctcggagcccggactcaggaaagcgcggagagccccagagcatttgagggaaag

SEQ ID NO: 448038 - DNA, 433 bp, Homo Sapiens
  misc_feature (130)..(186): n is a, c, g, or t
  misc_feature (258)..(258): n is a, c, g, or t
  misc_feature (294)..(294): n is a, c, g, or t
  misc_feature (317)..(363): n is a, c, g, or t
tcactgttaaaaatacatttatcattaaaatatattacacatggagacaggatgcatcatatacagtttggaagacttgctggcccagaaaatcccacttgtttcaccgaacactcattttttcagtgannnnnnnnnnnnnnnnnnnnnnnnnnnnnnnnnnnnnnnnnnnnnnnnnnnnnnnnntgatgtggtcataggtcactgcagcctcaaactcctgtgctcaagtgagccacccacgtcagcctcccaagnaactgggaccacagggcatgcatcaccacacccagnctaattttttaaaaatgtttctnnnnnnnnnnnnnnnnnnnnnnnnnnnnnnnnnnnnnnnnnnnnnnngggttttcaagtgatggcttcccaccttagttttcccaaagtggccgaggtttacagggcgtgacacttg

SEQ ID NO: 448039 - DNA, 429 bp, Homo Sapiens
tttacaagtgttctaagagctttactgactgaagaccacagggagtgatgaaaatctcagggaagggatgccatgtggacactggtgaccacaaagaacactctcccattatcttagcatcatggcaactcagctaatcctagttcaaatgtccctcttcccagacgcccctcatgacccctcctcactgggagggatgcaccccagctccgtctcccacttcagagccttctgtactctgctgactctgtccagaatcccagctatttgggttcaagcatcccagtgacctggctctatacgtcttaatgtggtatttctgatgtaggaacagtattttctaaaatgggaacagacacctaggcttcacaccttcctcactgctttctcactactcacttgggggcacaccatttctctgctcaggtg

SEQ ID NO: 448040 - DNA, 702 bp, Homo Sapiens
taaattcctaatgcctcgtcgttttattccacatggttttctaggtaaccaaattctaggaggtgcgttgcagggccatcttcgcatcccggccatgcccagcaggacggtgttctctaaacggcgctgatgcccgatttcgaccccgaggagactgcggacctcgactgcggcccccaccagggccggtccgccctcactccaccctctgaggctggggcggagtcgaccggccggccccgagaccccttgccttaccggtggagcaaggaaccggaagccgcggctcttacataaccgggatgatgtcagggcgggcgactcccggggggcgggaccagggcggaggccgcgccgggagcgcggtggggctaggcgtggggcgctcccggcatgtccctgtaccgcagcgtcgtgtggttcgccaaggggctgcgcgagtacaccaagtaaggcggcgcggcggtgcgcggggccccgggctgtcacgtggcccgcctcggcgcgggcgagcagggttggcggggacgcgcccgcggctccttcgccctctcgctgggccgactaagcgtgtccagaacgacgggtgcgcccgccgtctagcgacccacggctgggcgtggggcagtcgccagactccagccgctcaatgcccgcgaccgagactggcgcccgaggggcgggactgtggcgcgcccaagc

SEQ ID NO: 448041 - DNA, 392 bp, Homo Sapiens
aacctttaaatagtaacttttaaaaatataaaaacagttcagtacaatgacttttcattctttttttcttcgggaataactttcttctaccctcaccctcccttctggctagagccttaacaataggtggcagatggacatctgagacccagagagactctggacgccccacgcgcccagccttggagaggcacagggtgtgtcgccagcctccacatcccatgcccggtgcgctcagctggggagcaacctcactgaaggtgggtggctttccctggagcccctcccacctcctcagcagacggaatcacacattacaaaataatccataaaaatgcagtataaaaattatcttcgatatgctacatccatggagagcctgccaccaggga

SEQ ID NO: 448042 - DNA, 442 bp, Homo Sapiens
ttgttgggtaacttgtccatattaatttatttagcaaatacaacagattttgagtgtctgccacatgggtggtctccagggacagtgttgtggggagctcgcaggcagatctttaacctgggttcacaatctccagggcacctgtgcctgggcttccaggcgaccttcgaacccagatgtctcacatgtatgcagaggcgcacacaagcacacgcacatatacttatgactgcctgtttgtctggggagagacagttcctggtgcttaatcaaatcaggaactcaaaagaagttcggaagcactgctggtgttttgggtgctttcggttaccatttggtcacgtgtgtggagacctgtgggaacaggtataaaattggacgcaaggaaacatttaaatttggataataagttaatttattaactggttttttttggtggcgg

SEQ ID NO: 448043 - DNA, 412 bp, Homo Sapiens
ttcatttttatattttattgctttgaatgctcaaactatgggaaatctttggtaaaaataaagacaataaaatcttcacaataactttacacaaagcattgcataacaatgttcttcaatatccatgaaataatataagaatgttcacagtcctcagtgaggaaattaactgtgccaatattcatagttcattttaaaacaaaatattttcataaatatttaaaatacttcctaggttctcacatattaacatttgtatttcaatcggtatgttgatctttaaagtattcatattaaattaaaatcaatagaagtttttttctgttgcctaccacagcataagtcccgtcctccctgattctactaatttcacataaaactagagggaggtaactaaaataaaaatcaatac

SEQ ID NO: 448044 - DNA, 764 bp, Homo Sapiens
  misc_feature (68)..(126): n is a, c, g, or t
  misc_feature (169)..(218): n is a, c, g, or t
cggggctgagctaagccgagcccacgtgtgaacggctctcgccgctgccccgtgctccgccgctcgcnnnnnnnnnnnnnnnnnnnnnnnnnnnnnnnnnnnnnnnnnnnnnnnnnnnnnnnnnnnatctcggggctcggagccggccgccgctcctgctccgatcgcnnnnnnnnnnnnnnnnnnnnnnnnnnnnnnnnnnnnnnnnnnnnnnnnnngctcagatatggatggcaatatgggagccaatggcacctctgggcagcgccaacgactcccagcacgaccccggtaaaatgtttatcggtggactgagctggcagacctcaccagatagccttagagactattttagcaaatttggagaaattagagaatgtatggtcatgagagatcccactacgaaacgctccagaggcttcggtttcgtcacgttcgcagacccagcaagtgtagataaagtattaggtcagccccaccatgagttagattccaagacgattgaccccaaagttgcatttcctcgtcgagcgcaacccaaggtgttctagctgagcgtttaagagcatggactctggaaccagactttgaatccttgctctgcccctgcagctgtgtgaccttgagcaagctatttaaatattctgtgcctttgttttgtcatctgtacaatggagatgatgatggtatccccttcatggggttgtcataaggattatgggacttaacataataaagtgtttagaatggtgtctgcaacataa

SEQ ID NO: 448045 - DNA, 498 bp, Homo Sapiens
  misc_feature (108)..(108): n is a, c, g, or t
agccccacaccccttgttgttttgatcctgagaaataaaagggaggctgaattattcaaatttaaatgaggtttccccttcatggaagtgctgctgacccttcgtgcnagaaatggggagcacttgaggacaccaggtgggtggaggccctttgtgcgtggctggtcgtattcgggcagccctccgtcgctttttataaaactttgtgtgagaagaatatattgataatgtcagtgaaacaagcagacattgaaatggaggcacagattactccacaaggagttcttctgtatattttttctagatgcaaatacctttttaattatgttaattaatgttaagactttctaggcttatatcgaagctgtgtgtgggtcacggggtgatcactgctaactggataaagtttgtgcagcacattcctgagtgtacgatattgacctgtagcccagcgtgaaaaatttataaataaatttttcattgatctttttatattaa

SEQ ID NO: 448046 - DNA, 474 bp, Homo Sapiens
  misc_feature (443)..(443): n is a, c, g, or t
ttttttttaatataaaaagatcaatgaaaaatttatttataaatttttcacgctgggctacaggtcaatatcgtacactcaggaatgtgctgcacaaactttatccagttagcagtgatcaccccgtgacccacacacagcttcgatataagcctagaaagtcttaacattaattaacataattaaaaaggtatttgcatctaggaaaaaatatacaggaggaactccttgtggagtaatctgtgcctccatttcaatgtctgcttgtttcactgacattatcaatatattcttctcacacaaagttttataaaaaggcgacgggggggctgcccgaatacgaccagccacgcaccaaggggcctccacccacctgtgttcctcaagtggttcccctttctggcacggaggggtcagcaggcatttcctggagggggggaacncctttgaatttggatatttaggctccctttt

SEQ ID NO: 448047 - DNA, 984 bp, Homo Sapiens
cttgattctgtctttatgaaactttgctttaacccaacattgtttaaatcccgacctggtttctcgtgagcttgaagccagggtgcccacactcttaattctccaatctcaaaatactccagctttaggtcacgtaaggacagttctcaagtccgtccagagtgctgaaaggatatgtattttttcagattgaaagtgcctaaatcccaggtgtaacaggattctctccaaatctcagtgtcctggcagtaaaaggggaacaccaagggagccacgtgccaagcagctcaaaggggagatgattcagcctccacttaaagtaccatcatgatggctgtatgtgccaaggtcacccgcgcacctcgggagaaggctccagggagtatggtcagctcaagcccagctgagcgccgtatggtacgtgcatcagatgcttcaccaggaagagtcggggtcttacattccatagggagacctcaaaggaagttggcagagatctaagtaaacagagatctcaaccctctcagccagctgcagtccttcgtcccccatggacatccaagctgtaagaatccatgaggcattcagccacagcctcccttaaaaccacttttagtatcctgaaatgtgccgggcgtgtgtcattccagtgcatggttccaccagcgttattccccagaccactgaagatcactgtaaatccatcaggctcagaaaatacttgaacgaagctccatgcagctgacaggcacagccatcttgaggggcatctttttaatctccttctggccaaaagatcaggctggagggcagatctggccgtgtctccacaggtcacagggaccgccaacatcctttccgcaaggaaatccactggaaggtgccgggggtcccggggcacatctttgctcgcagctcgtcgtcgcccctcctcgtcccggccgccccgagcccgcccggcccgcgggcccatgtgctcggccg

SEQ ID NO: 448048 - DNA, 1766 bp, Homo Sapiens
  misc_feature (1545)..(1605): n is a, c, g, or t
aatatgtgtataaaaaggagtgtaggtagtgtgtaggcgaagatgtagggaaaaggaacgcggctaggccacggtgttggccgctacctcctctatgtgtgcgggctgtcaacccctccgcacctgcacgtgctacggcgggcaccgcgaaagtcggagtacgctggaatcctggaccgaccacgcgtgtccgtgggctcccgcatccacactatgccgctagggagaatacgtggttagggggttgaagggaattaggtatggtcgggacagcagtaggtaggcaaacgggggcttcgttatcccctcataaggggtagaaaaatgtggtggggggagtgtcccggcacggacatggcggctccccgcgcgccgtcgtggggccgcgagcccggtcgcactcggggcacgccgaccgaattcttggtggcggcatggggaatccaggggggtgccctggggggagactgggagggtgaggaggatggtgatgcggagaggagaccattggagctgaggcgggtgctgctctcgggggaggtgttggcgctccggtcaggggaggggtctggctgggaggtggaagcaggccgggtggccttccccctcaggatgtcgatgaccctgcggctgcgcgccaccatgagcggcgtgtcgttgtggcagttcttgaggctgctgtcagcgccgctgcggaccagcgtgcgcaccagcgggaggagcccgcggccggacgctgagtgcagggcggagctgccggagtacatttgcgcgttcacgttggcgccgtgctgcagcagcagctgcaccatgctaaggctgttgttttccacggcgtggatgagcggggagcggccgctcttaatgtccactgcgtcgatgtcggcaccgcgctctagcaagagctgcacggtttcttggcactcggtgttcactgccacgtgcagggcggtgagcccgtcataattgcgggcctccaggtccaacgtgcccggagctgcgctgtccagcagggctcgcaggcaggtcgggctgcggtgctcgcacgccaggtgagcggccgtctggccatggcggtccagcgccatggggctggcaccagctgtcaccaggagccggaccacagacggtaatgtggtgatcacagccaggtggagcggtgtctgccgtaggttgttgtagatgtcgagctcccggcccccctgctggaagaggttgaccagccggtgcacagctggcaggttaccctgcaccacagcaatatggagaggcgtgtctccgtcctcatctgcacgggtggccatggcgatgtcagcagaaagggggtgttccatggggcacatcatggggtataggggtgtaggcaggttcaccagaggaaacggggagcccatggcccgagtggggtacaaaggcagtaaggctccggggtagtaaagcgcctccggccgggccaggccgtgggggggcccggggaccgccggcaggtcgcagccgccgcgcagagggtccagggggacgacaaggcccgcagcgccgcggggnnnnnnnnnnnnnnnnnnnnnnnnnnnnnnnnnnnnnnnnnnnnnnnnnnnnnnnnnnnnngggagtccggcggccttgggccgggtgcgcaggtccacgggcccctcgtccatggcccccgcggggcatcggggcatggggccgccggggacggcggccggagagcggctgggctcggctgcacgggagggtggtcctcgtgccgaattcgccacccaggc

SEQ ID NO: 448049 - DNA, 512 bp, Homo Sapiens
tggctgttaacattgttttatttcctttatacaaaaagtagaaatgacagaaaaaacactcttgacagaaacaataccactgacctgatctcatgaaggagctgagccaaatctgcccacattatggggaaagggaggttcaatcaacattagcaaatactcatgcaattgatgaaatataaaatggtatcagtggcttggtgaatgtcctgtgggtagggtgaatcaatctactcttaaaaaacatacattttcccaatcatgcttttaaacgggcatcttttaaaaaaacaagttatatatacagatatcaccccaaaatgaatcttttacagtctactactataaatttaaggcatcctgatattctgttcttctgctggtgaggcattgttttcatggttctctttccaaagaggatagtccagaaatttccaataatttccaaagggcatcagtgagagaaaatttaaaaagtgatttacaagaagagttcttttgactctggctca

SEQ ID NO: 448050 - DNA, 1571 bp, Homo Sapiens
agcgggtgcgcctgcgcggagctcgtggccgcgcctgctcccgccgggggctccttgctcggccgggccgcggccatgggagaggccgaggtgggcggcgggggcgccgcaggcgacaagggcccgggggaggcggccaccagcccggcggaggagacagtggtgtggagccccgaggtggaggtgtgcctcttccacgccatgctgggccacaagcccgtcggtgtgaaccgacacttccacatgatttgtattcgggacaagttcagccagaacatcgggcggcaggtcccatccaaggtcatctgggaccatctgagcaccatgtacgacatgcaggcgctgcatgagtctgagattcttccattcccgaatccagagaggaacttcgtccttccagaagagatcattcaggaggtccgagaaggaaaagtgatgatagaagaggagatgaaagaggagatgaaggaagacgtggacccccacaatggggctgacgatgttttttcatcttcagggagtttggggaaagcatcagaaaaatccagcaaagacaaagagaagaactcctcagacttggggtgcaaagaaggcgcagacaagcggaagcgcagccgggtcaccgacaaagtcctgaccgcaaacagcaacccttccagtcccagtgctgccaagcggcgccgcacgtagaccctcagccctggtggcggcagagaagcgggcgaggcactgtggtcgctgaggggggttggctgggtctgagtgccaccccccaggccacagtgataccatcccagtgccatgagcccaacactgcccgccctcaggctctcaggtgaacgtggccgtcagcggggaaacgtgtgtgtcagttggaccatgtgggaccctgatggacctgaaagaccaggatcggtccagctcagatattgagggctctgaagcctagttctgtcttctctggagcagctgtggcttccccgtggctgcttggtgacatggattagcgctacgtgggctgcagcatttgggatccaggctacctagaggggcattcgggccagggaaaacctcggattagcaagcaataaaaacatgacctcactcttcctcaaaggagcccctggtcttccctgtgtgactcagttctttccatctgtttgtcccgctgcaagcctctttctgcgctgactgtgacattggaacgtggccttcctgtcaccccctccgtgccacgcactgaaggccacccccacccacctgggaaactaagaactggatattttgcctcattcacttgtactgtaacaatgtatataatttggttggtatttcactatttaatttttaagaagcctattttactagtgttttatatgaacaaagtactgcagaagttaaacctgtgttgtattttttctgagatgttttgctttaagagatactttttgctcagtttttatatgccagatacagagaatttgtagcggttatttttgtatgatctagtaacttgcaaacagaccaaatggatgagaggcggggaccgtgcagctgtcggctgatgagga

SEQ ID NO: 448051 - DNA, 981 bp, Homo Sapiens
taggttctacgtccggcccagcttgccagcacgggacctggaaggttcctgtttccggtccaggacttttgtcggtgaccccggcgcgcgcttcccgccttgtctgcgcccttcctttgcaccccccagtctgaagggagttcttctctttgtctttgctggattttgtcagatgctttccccaaactccctgaagatgaaaaaacatcgtcaagccccattgtcggggtccacgtcttccttcatgctcctcctttcatcttcctcttctatcatcactttgtcctgtggaggagacagctgacgctcaccgaaacccacggtggtggccgacgctgggggatggtcaggccagggactgctccgacgctttgctgcccacacaggcctcagcttccgtccagccactgctctcaaacaaagtcctctccaatcccggaggttccaagaccacccaagcacaggtaggacggggtctgcgctggaccctcacacctccctggaggcccggggtcctcaccctcacctccctgcccttggccagggtctggccttttctgaatcccaagcccaacctttcccgagcctcaccttctcggacctcctgaatgatctcttctggaaggacgaagttcctctctggattcgggaatggaagaatctcagactcatgcagcgcctgcatgtcgtacatggtgctcagatggtcccagatgaccttggatgggacctgccgcccgatgttctggctgaacttgtcccgaatacaaatcatgtggaagtgtcggttcacaccgacgggcttgtggcccagcatggcgtggaagaggcacacctccacctcggggctccacaccactgtctcctccgccgggctggtggccgcctcccccgggcccttgtcgcctgcggcgcccccgccgcccacctcggcctctcccatgccgcggcccggccgagcaaggagcccccggcgggagc

SEQ ID NO: 448052 - DNA, 795 bp, Homo Sapiens
ttgccaccagggctgagggtctacgtgcggcgccgcttgccagcactgggactggaagggttgctgtttgcggtcaggactttgtcggtgacccggctgcgcttccgcttgtctgcgccttctttgcaccccaagtctgaggagttcttctctttgtctttgctggatttcttctgatgctttccccatactccctgaagatgaatatacatcgtcagccccattgtgaggggtccacgtcttccttcatctcctctttcatctcctcttctatcatcacttttcctgtggaggagacagctgacgctcaccgaaaacccacggtggtggccgacgctgggggatggtcatggccagggactgctccgacgcttgctgcccacacacggcctcagcttccgctccagccacttctcggacctcctgaatgatctcttctggaaggacgaagttcctctcatggattcgggaatggaagaatctcagactcatgcagcgcctagcatgtcgtacatgagtgctcagataggtcccagatcgaccttggatgggacctgccgcccgatgttctggctgaacttgtcccgaatacaaatcatgtggaagtagtcggttcacaccgacgggcttgtggcccagcatggcagtggaagaggcacacctccacctcggggctccacaccactgtctcctaccgccgggctggtggccgcctcccccgggcccttgtcgcctgcggcgcccccgccgcccacactcggcctctcccatgccgcggcccggccgagcaaggag

SEQ ID NO: 448053 - DNA, 1126 bp, Homo Sapiens
ggagattcgaccacaaacagttttaatggtctgatccgcaccttaagaggcctagaggagctggaggcaggggagtcattgctgtcctcatctgcagcctcggccccactagagggactctggggacttcctggggaagacttgtccactggcccctcatcatcatcttcttccttcaagggctgacagacgggcactttgggggaggcaagagggctctggtgccctggagactgcttgaagaagggcacctcagcaactgggggaggcgaggcactggcagggatgtccgtggccttagggctggagcctgagccttgttgggctaggacctggggatgatgggggctgcagctctcctgcttcaaggcccccaatggtggggaagaaacaggtggctgcatgcctgggccattctcctgggccagctcaaaggaagaggggaaaggaggcggggtcagagccccctcccgagtgggagagggtgcagagggaggcagcggatctgagtggtcccctggctcagggccaaaatgagcaaacaggtccaagggagttttgccttccatgcctttttctttccaggtgcccccactgggaggagcaggagagtggggagttcctgggagggaaggttcagggctcccaaaaccattctgcattcgatgaggccccacaggcccttctttagttaccccagcagcctgggccccgtctcctgctgagcctccagccagggcctcagactgctcgggacacacagtgttcttgacaatgacactgactacagaaatgtctggcggtggcaggccatggtcagaggcctgggctggaactccagggccatccccagcagaggctgctgctgtgtcttcagattcacttcctacacctggttctggcttccctgggcctccaggcccctcattttcttctggcccagaatggatggcttcattcgcatcaatgtcagggatgtcaaaggcagcaaggaggtcatcaaaatcaggggtcttcatatcccccatatcggcagatcccagacttgttccgctcctggtgcgggccgagacccggcggtctctaccccgctccagccgctgcagccaccgccgccctccccgcg

SEQ ID NO: 448054 - DNA, 552 bp, Homo Sapiens
  misc_feature (59)..(68): n is a, c, g, or t
ttcactttgaaaaatatatatttacaggaacaattccccattctctgggactctttagnnnnnnnnnnggtccattttggggaagtaaaacaaacagtggagacgagtgtagcactgtcccccaaatcaccaacccccaggtcccaaggcctgggctgggccagcgctaacaggtgagcccaggagtcttttgaacccactctctcttgcctagaatagagacaggacaggctttatgtcccccattcctccctcccaactccagggacattgaaagggtcctttgtacccgcccgcaggaaattggggggctgggagggagggaactgaaaattcatgtttggtatcaaaaataaacacttggagtgggggaggcggcaggaagatttccccccaaatcccttccttcccacccaccccaccaaatataggaagagatgactccctctcccctattgaaaagccccatttaaaaatagattatactatcaaaatggcagcgggggagagacagggagacctggagtactggctggaggggccccccagacg

SEQ ID NO: 448055 - DNA, 474 bp, Homo Sapiens
ttttttttcccccagccctggaatccactagttctggttcattctattgcatttagctctgcgatatggcttcccaatgcaggaataaagtaggctgagacagatttccacagaggaagctttcttggtataaaccaattttcccatgtctgatgctttgagggatagaagatacgaaaataactatttctgctccttctaagtataactgatggaggtgccacacattcttagctggggagaaggggacagaggaaaagtgattctaaattgtgattcggtcttttctaactgtgagtgtgatactgggtacgtaactcagctctaactcagagcaagagtcgggtgggggattagggtaaggggcccagaaagccctgtctgcatgtggcaaacctaagcctctgtgctttgtggccatatatgcttctctctaaggggtttcaaagggctggaccaatgccaaatgcatgc

SEQ ID NO: 448056 - DNA, 362 bp, Homo Sapiens
  misc_feature (191)..(199): n is a, c, g, or t
attttaatatcttactaatctctataggggaggtgtgaaacctctgttctgtgtcgagttgcctattgttttgaggcctttatgaaaaatcagatgattcatatttaggatggtctaaagatacatttaaatccaaacaccacccacaaaaaaactcagcaggtaaaatacatagagtagccataaacttnnnnnnnnnttatctcaccaagatagcaaagtgcagaatttattggtttgtatcaacctccttgagggcagagcagtttttacagcctcctccttttttggtggtgggtttgggggcccagcccacccgccactgccacgtctgccatcctcccgcacccacgagcatcttt

SEQ ID NO: 448057 - DNA, 464 bp, Homo Sapiens
gggtaccaggcaaatcagcatttattactttcaataaacagctttaacactttgagaggactgcatctctgcagattccatctggatcacaaaacaaagacacaatttgttttaaggtctttgaagactggacacactagaagatgattcctcaatttgaggggcaaaagaatcccctacacaaaactctagcccagtgcttctcaaactttaacatgcacacaaaacacctaggggatcttgttaaaattcaggattctcattcagcagaattggtgtagggcttggaatttcgcattcctaacaagttcccagatgatggcaatgctgctggtctagtcaaagtattattcaaagtatgattagaaccttctatggcaatttgacattgatgagtggacttgtctcaaacagggtaccaactttttgcaattcgtttctttccccttatgttatgtttatct

SEQ ID NO: 448058 - DNA, 496 bp, Homo Sapiens
ttttttttgatacgcataaacttctttttgttattacatctaactgtaagtttcctaaagtccagttatcaagttgaattgtgtggatagaggagagaggccaactggattttctctcaagagttcacggcttcagtctgagaggtcctgggtttgcgctgggggagcccctttttgaatgaaggcgtgggagggctgggctccatgctgactccagttccattggtccctgcagagtgagtctggcctctttcaatggtgtttcctgggtgcctgagatggagcactctgatacctgggaaccagatgaataccacggagctgtttctgttaacgacccatactgtcatgccgcccttgggttcatgggggtcattgggacttttgggccttgtggcctattagccctgtcctcctcgtctgttccctggcaatacctcccgaagtggctggtagggctggccactggagtttgctatggctgcaggagtctctc

SEQ ID NO: 448059 - DNA, 433 bp, Homo Sapiens
  misc_feature (384)..(384): n is a, c, g, or t
  misc_feature (398)..(398): n is a, c, g, or t
tttagagatattatatttaaagaaatttattttgtctaaacaatattttgaaaaagaactatctgcagatcctggcatgagacataagtttccaaaataacagaatgactcatttacaatacaaaaccagctacgacagtgtgtgtgattctagcagctctgattttaggctaaggttggcaggtcgggagtagaggcagaagggcaggggagaaggctggcaggtcgggagtagaggaagaagggcaggggagaaggctggcagctccgtccatgctttgggggccgcggggttctccatgggtttgctctccctgctgctccgtaggcggccacagctgaaggtcagggacttccaacctcagctcagctgaaaacccttgnccagctttcaaagnctcaacttttaaggatggtagtttttgaagttccc

SEQ ID NO: 448060 - DNA, 684 bp, Homo Sapiens
  misc_feature (517)..(517): n is a, c, g, or t
ctatagatttgtaatttgtggtttggggtctggccctcatccacctctgctccgagccagtctgcccccaatcccacccaagggagaacatgtagaaagggaaaggtttctcaacttagttcagaccaaaacacattgtaaaggcaaagaaggtttttatttaagtgacaacatttgagagctaaaaaccagctcacatcaaaatcaagacccagttgtaaaaatcttttaactccataatgctgtttttgtcttgttagaaatctgatatcttacattagcgtttctaacggattttgtacaaggcagccataaggaatataataaacctttttcaccacagaaccatctgtcacagataatactgaaagttacacacttaggaacagtcagaccacagacaaggtcagactggctgccaccaccaagtaaacaactagaaaaggacagcggggtccaagggtgggggtccctgtgcacgagtcgccctcctctgggccttgccccccctcgggtncacctgcttcttcctttggccccaaagagggtggagtcaaatgcagattttcctcccaactgcctgttagtgtctcaacaaggagagcagagcccaggtcaggcctcactgcttggacttaaccctaactatgatttttacgaaggttcccccaagcccggaaggaa

SEQ ID NO: 448061 - DNA, 316 bp, Homo Sapiens
  misc_feature (72)..(81): n is a, c, g, or t
  misc_feature (118)..(132): n is a, c, g, or t
  misc_feature (204)..(218): n is a, c, g, or t
cagaagaaaaagggaggggggacggtcgaaagaaccgaagggggagcgagatcgaggaaaggggcggagaannnnnnnnnncttcttcccatttctttaaaaaaccaacacaagaaannnnnnnnnnnnnnnaccaacgtttgttcccgagtagaaacataaatagggcagaatcgaacactctgttcttctctcttccaaagnnnnnnnnnnnnnnngtaaaagtaaaggaaaggcagggtttgaggctgcgccccctcggagcccccttccgcggcgcggtgcacaagggggcagccgagacgcacgggtttgt

SEQ ID NO: 448062 - DNA, 459 bp, Homo Sapiens
ttttaagctcaaatagaaattttaataagcactacattgacagtctttgacctgggaagtcacatttcaaacaagcgaccacacccattgatcaacacaatgcctccgtcatccccgccagctcaagtctttggtagttctggggcatgcacgtttctgttgctgtaaatgtccttccttctgtctggcctgcatggatttcgctccctgactagcggcccccagcaccgtgaggggtacgcgctggcgggtgctgagtagggctcttaacagtcggcttactacttctgaaacctcaggacgtccggagcgaacacctcagcggaataagctgacatccaatccgcgcttcaaattactgaagccattctcacaagctcaaccccaggacaccaggaaaaggaggaaacaggctgggagagcttggaggagcgggcgccaggagtcagggcaggccgg

SEQ ID NO: 448063 - DNA, 470 bp, Homo Sapiens
  misc_feature (259)..(276): n is a, c, g, or t
cctggaagaatattttaaatactggttttttttctctgtaaaactgattcataaaaccatttagataagaaatgttaaaaaatgtagcaaaggaatattaaagacaagattattccctaattagagcaactatagcaaaagctagagatccagggtatcctggcaccatgtcaaagaggtgaacggtgatggttctgttgcgtgttgatcagcggtctggaggtttctggccaggacttcacagcagaatcaccaaggnnnnnnnnnnnnnnnnnnaaacaaatatcaatgaggtgcctcagctgagatgtgctaaatcaagagtaccatgtgttggcgccaatcatgtcacctgatgacctagaagtgcacttcagatgttggtgacaaccatccccaccacagacaacatttactgagcacttatgtctgcgtgaggtactgggcgctgggctaagcagcttatgttg

SEQ ID NO: 448064 - DNA, 501 bp, Homo Sapiens
  misc_feature (21)..(21): n is a, c, g, or t
ctgtgtacctttacccattcntccatgttgcaaactagcacaatatcaccgccacggtagacgcagtgaggccataagacatttccgtcagcaaaagggtcacttcttgtgcccctttagaaccacacccacccctgccttccaactattaatgctggcaggacttagccagaccgcaagggcgcctactccgaacaaggaagagggtcaggcgctgggagggcgactgcaagcggacaggcagcacctgcgaccacggtacttggggacaccacaaaagtccgcagagcaggcaccgcggcacttccgcgagcgccgcaggccctgcccctttcgccgtcgccgaccaattgccgcccgaagaccgagccgcttcagcggagggccggaagtgagccgcagcttttcctttctgccaccgccttgtccaagatggcggacctccaccgccagctgcaggagtacctggcgcaggggaaagctggcggcccggcggccgca

SEQ ID NO: 448065 - DNA, 500 bp, Homo Sapiens
  misc_feature (58)..(93): n is a, c, g, or t
aataatttatcttttattgaaattgctgaatactttatattgcgaggaaagttgattnnnnnnnnnnnnnnnnnnnnnnnnnnnnnnnnnnnntacactcatgttgaaatcaaacaagccagccaaaccggtacaggctgagggatgctgcagggcggtttgcttctcagcaatagaacaccagagtctatatacaattctacaatgcgagaaaagtcattcactaaacatggcaggaaaggcgctgccgccagaataagaacaccagcagcgcctccctcctcctccatgctgtgaccgcccggcctccctcctcctccacgccatgcccgcctggcctccctcctcctccgcgctgtacccgcccagcctccctccagcatgaggccaagtgcaatgctagggccgaggctctggcccatgatttttcatgcagtttctgtaagtcacacactgtgcaaattaaggcttcttataggtcgaatggttgatcaacactt

SEQ ID NO: 448066 - DNA, 491 bp, Homo Sapiens
ctaagctatgattttttttatcttgcccaaattcctttctaaggggtctgggtagtcatgccctacaaaccataaattctcatcagatgggttttatttaaccctatatatcgtgacttactttccaacctgactctggcataacattacgagacaaggaagaaaatcaaaatattttaccccaaaacatgtttctttgccatgttttgaaatggccctgcaaagctgtcctttgtgggggaaaatttgcatctgtaaagaatcctattaacatagctagatctttttcttccaggccctcccaatcctgaagaggttaattaagagtctagcaccttttaaaggtctgaataggaaacatttgtcatctattgtctctaagggcagccactataagacttcaaaagaatcttggtctccacaatcttttatcttaacctgaatattccctttcttgtgatctcaggtctttagacaaactcaaccaattg

SEQ ID NO: 448067 - DNA, 317 bp, Homo Sapiens
gatcttagttcatctctttaggattgggagggtcaggaagaaaaagatctagctacgataatagacattctttacagatgcaaattttccccccacaaaaaacagctttgtgcagggccttttcaaaatatggcaaagaaacatgttttggggtaaaatatttttattttcttccttgtctcataacgttatgccagccagagtcaggctggaaagtaagtcacaatatatagggttaaatgaaacctatctgatgagaatttatgatttgtagggcatgactctccagaccccttagataggaatttgggcaagat

SEQ ID NO: 448068 - DNA, 1403 bp, Homo Sapiens
ggtggggcttcgccggcgtggggcgcaaaggaacgcgtgtgtgaagaggggtttcccaccccgcgtgcctggtaaaaggactcgcgccacccgccccgggggctgtcaatgttggtattatcagaagcctcgcggctggcgatttccccgggtggactcggagtccccaggtatagggcgcctcgccagaagcttgccctttgtgtgaaatatgggtttcaaaaacagcggggttcgggggtgcccccccgcggggccggtttatttgttattggtggaaagaaatgtcccaagcgcccctaatgtccaggggcgcaggggatttctcctttagggaaagggcgcggttattgggccccggggtttccacgttaacccttggggggcacccggcggcccccacaacagaaggtgtctaagaaaaggtttttggagggggccggggccgggccggcaaggggctaatcacaggtggcgcgggccggtttttagaagacaaaatgttttattttaaaacattgaaaaaacattaaaagacaaatgtccattatgtaaccaggaatgttaaatatatggaaacggtaaatctctaaaatgtggtaggtacttccagagctaaatgttgcaagttatcctacttttttctctaatatcaacaatacctgatacgatgaaaaataacaaaaagaccttactaattatccaatcaaagtcatcatctttgggtaaatttatatcaacacaacttaaagttttgtccaagatgttcctgacacatgaagcttccagttgaatttcagaaatgttaacaaaagtatcttccttttttgcctgtgaatgtttgagtattgctgtattgttggcttatatccactacagatactggttctaggccagcccaaggatcttcaagcattgaaggcttgaaataattttccaactcattagacattcttttttctctaacacgccctgatccaaatggtgtagatgtccttggagaaccctggggttggttctgctgctgccctggggagtagccgaattgctgctgggaccccgcgggggacctggagtaggagccagggtagccgccaggggacggagacccgaaccggccccccgggaagctgccgccgtgtcgcggagagtgactgctcccgtacggcctagaccggggcccgtacggcggcgtgtggtgcggactcccgtacccgtctcgaggggagggcggccgtggtccgcccccgcccggggttccccggaagctgcttccgctaccccaacctcctccacccggaccagggtaaggaggagttgggggccgaaaattctgtcgctgcatatcaggagccaaagccgaaaacctcgcagccgcgttctcccaccggaactgtatcccc

SEQ ID NO: 448069 - DNA, 630 bp, Homo Sapiens
ttcattcccctctctttcaacctccacttctacttcaacttaaatttccttcttctccttctcttctttacccttcccggattttctccgtggctttggggtttccctttctaagtggggtttgtaggtctcatctcttggatcatctttgaatggtatctcttcttcactgattaacatcttcttcttcttcctctttttcttcttcactactaatgccacctggagactgatgctcttctccaacatcataatcaagttggtctgtatttggttctgacttgcaaatgagctgcaatgaaccggtcttggaccgagagcttcgggtgttctctgtatcacgatggcgagaaacagatgtcctactactacgccagccccggctaggtctagatgcagcaatggaaacttcctgagggagggcagaatcgtcttcttcctctttttcttccttgggatctttatcagttgttactttttctatgcataggagtcgcggactcttcttgccctgaactggagacggggacttcgcggcctgggctgctgcccggggacgtcgggaggcctggcgctggggctgctcctccgccggcggggatactcggccttcctccggcgggacacagc

SEQ ID NO: 448070 - DNA, 994 bp, Homo Sapiens
gagtgtgggagatgttttattggctttcactttcctcagggagccagcggctcccccagcaggtccccacggtggagccgagtgagctgggagggatgggtgcttgcttcgtttcaaagagatctacatatctacagagaggatggagaccagaaaggaattgggaaatggaatcatgagggccgggccctcattcccaccccacccagcccaccccccacgccaacgcatcagaaacagacttcacaggatgcacagaggaagccagaggtgtgggcgggcccggggggccggggctgcgagggacctcaagggcgaatgccactggcctgtccaaacgaggcaggagagaaagtaagaggaggaaaacaattgagaacataacgattgtgtcttcgtcagccgttcccccgacgcctctggaaactggcgatttcgtttttgagtaagggcaagaagtgtcctgctcaagccacccctccgctcagggaaggtcactgcccggccaagccttgtctttgagggcggtgccttccctgggcagagaggggctgccccggcctggggctccatggcagggcaacaaaaggaagaggcagagccccagagagggaagggggctccctggggccaggctgctgagaggaaataattgcctctttctgggtgaggaagagctgccttcctgatggctggtgtcctgggatgtggggcatttctctggggtagccattgacgtcatttccttagcagcaggagagcgggtgagaattcccaggagacctcagcctgggtgggcgcttggtggaaagtgggctcagatgaggtcttcagatggcagcagtaggctctggctgcttggggtccaccaggagctgggccaggcctcctaggtcctgctgagaagcaggtaggggaggtgacctgcaactctgtctcccttggggatctcagttcctgttgagacccacagcctgaagacctctgtcctcag

SEQ ID NO: 448071 - DNA, 459 bp, Homo Sapiens
ttacagtacttaaaaattcaaacaaggacaattcagggttgaaagaaagaaaacccgaaggagtccattgtcttcagtaaagttttaaatacaaaaaacatagaccagaaaaacagcttatggcctaatgcactagttccatgataaacacacatatatagtatgtctccatcaagtgaaacttcatcacctttttacaatttagagagggaaagcagcttttagtatggttaagccatgtatcatcaataccatgaagctagcctatcaggttgtaatagcttctataaaataccacagtggggattgcaataaagcctaggaaaatggggctacaaatcccagctatgctccaagcaagcagtggaaccaaaaataaaaataggtaaaactgaaccaagaactagatagcattcatctagattcatgattgataaggcaaagttcataggccaaggt

SEQ ID NO: 448072 - DNA, 1075 bp, Homo Sapiens
gtaaaaacttgtttttaattttgtataaaataaaggtggtccatgcccacgggggctgtaggaaatccaagcagaccagctggggtggggggatgtagcctacctcgggggactgtctgtcctcaaaacgggctgagaaggcccgtcaggggcccaggtcccacagagaggcctgggatactcccccaacccgaggggcagactgggcagtggggagcccccatcgtgccccagaggtggccacaggctgaaggaggggcctgaggcaccgcagcctgcaacccccagggctgcagtccactaactttttacagaataaaaggaacatggggatggggaaaaaagcaccaggtcaggcagggcccgagggccccagatcccaggagggccaggactcaggatgccagcaccaccctagcagctcccacagctcctggcacaggaggccgccacggattggcacaaggccgctgctggccatcacgccacatttggagaacttgtcccgacagaggtcagctcggaggagctcctcatgggcacacactgtacgaacacagatctccttgttaatgacgtacacacggcggaggctgtagaagcagacctcgttgagacactgtttgcaaggcctgtgtatggagtagaggcgggtgcacgggtactgttcctcacggcagtcaagaggcccaggctctgtgggctccagctctgcatttcctggttctggggttggggctgggatgacttcctgttggacttgctgctgggactggaactggaactgttcctcggagggccgaggagtcacctcttgataatcatagtagtctgggttgtcgatctggtcgctatagtgggtgtactggacgtggtcagggaacggcggcagcgggtccaggtcatactggccctgagccagcaagcctgcaggcaggaatagcaggaagaggtaggcagctctcatggcaacaaagaggcaggccggggtggtgtcagagaggacagctgtccgggtcactccgccgcccgctccgagtccgcccgccggagccgccccttggcccgctccccc

SEQ ID NO: 448073 - DNA, 637 bp, Homo Sapiens
aggcgggatctgggggaacccgcctgcgctttgggagccctgtcgcacccagggcgaaggcaagggcagaaggagagttggctgcgccgcggttcttcagcgccccgtcacctggcactggggcctcgcgagaggctcccgcgtggcttggcatccgaagtgagaaaagtaaacattgaaggccaaggtttagggggtgctggggtgtgaggtggcagggaaagcccagagcggagacccctgcctgggacagcttagctccatcagggtccaccgggtcagtggtgccccaggcctctggggaaggaacaggctgcagctctggtggggaaaggtgtggggtctcctcactgtgcccacgggcagtgaggggcgctttcagggcgtagtgttctgaggtcaaggccgtgggggcctccatccttcccacagcacctggccctgcgtccagttccgggtggcttccaggacacgggccacgcacagccacactgaggcctcgcagacccccgcggggcccctctctgattccaccttcacatttcaacggttaaatgtcttttctcacaacgaggaaaaaaatagagaagacaaacaacgtagcagcattcacaggaagagccgagggtgatggtgg

SEQ ID NO: 448074 - DNA, 595 bp, Homo Sapiens
ctttaaaaaaatcagtttattaatgtttaaaagttgataaagctatgtgcaaaatgatccacaaaagtcagaaacctattaaatactattctttttaaaaaaacaagacatctctcggtttaattgcactgaaaaccatactaaagagacagtaatatatttttattctttgtaatatttatacatatcttcaattactatctaatgaatagctggactgaaaagtttctggcgttccctaccagttaaagtaatgcttttaagggcacaagagggtggtattttcttaagaaatacacattcaatggtgttaacacgggttagaaaaatccaataaaatgacttctgctgaaacaaatacattcaaaaatcaagaaaagtacttttaacacaacaaaatacaaccatgttgttgcttgaaatgaatcacacaacattctgaaataaacatcaacaaaagtgccaaagacagatgtcatatttgttagactcatttgctaagaaatctccccgggtttgcaaaagttaatccaattcgttttcactttgttttgcttgctgttctcctagacacccaagatcctggctatatcat

SEQ ID NO: 448075 - DNA, 623 bp, Homo Sapiens
  misc_feature (483)..(498): n is a, c, g, or t
tttataaaaagttgttttacttttataaaatttagtacaaatcttatggaaatataaatcgttcttgaacagtgttcgttatcattacacagtaatccagtgcaaatgagtacttcattttgtccaagtataccacacattaattagcccttcatttacctgtggtttcagaacttagcattgtcttaactgctgagtcatcttcagttcacattgttctctcagaagttttttcatagttattagtaacaacatcaagaaaagctgaaatgagggattcccttccccttaccaattattcagatttctcaccattcaaaaaaacctacatacagttccatgaaagtgtccccaaaacaacaagatctgcagtcccttcacttctggaggagtaagagagaaaaagaattggtaccagattaagcctggttcatttgtctggtatggaacaggttgcactgtgccaaaattcaagagccagcnnnnnnnnnnnnnnnnaagctcatgtgccaggccactcttttctacaagcttttgctaaaatcagcattccccagcatcctactttgaccgcaattttgttggaaagaagcttaccagcattttaggggcgctcatcatag

SEQ ID NO: 448076 - DNA, 400 bp, Homo Sapiens
ggaacacttacacattgttggtgggattgtaaactagtacagccactatagaaaactgtatggaggttcttcaaaaaattaaaaatagaactaccacatgatccagcaatctcagtactggatccatatccaaaggaaataaaatcattatgttgaagaaatatctgcactcccacgcttactgcatgactatttacaatggccaagatgtggaatcagcttaagtatccaacagcggatgaatggataaagaaaatgtggtatgtaacacagtggaatacataaaactgaatgaaatcctgcactttgtgacaacatagatgaacatggaggacatcatgttacatgaaataagccagacacagaaagacaaatacgatctcactcatgtggaatcctt

SEQ ID NO: 448077 - DNA, 415 bp, Homo Sapiens
  misc_feature (69)..(69): n is a, c, g, or t
cttgggccttccctctgagggacctgggagccaggcagggttttgagcaaagcatgctgtgatccgacntcattgtgaaaaaggcctctttacagggaagctgagagcaacagggcggccagtgggaggaggggatggcaggggaagggtccaagcaggaggggtatcgaaagtgcctgtttgtgtcccaggcacacaatggcacacatacgttaccatagaatgacatcgatggtggtgataatgtcaaacgccacggtgccacatctcagggactgattctgaacaaccgtgactcccagattcaggatagcctcttgcattggggtcgtggcttcatatgagggtcactctcctcaccctgctgcctgcagagccaccaggggtcacactggcagattgcagccccagcagt

SEQ ID NO: 448078 - DNA, 1117 bp, Homo Sapiens
  misc_feature (82)..(122): n is a, c, g, or t
ggagttggcacctcctgaaggttttgggccccttcagccaaaaactgggaaagggcagttttaactgggttaaggccttgtnnnnnnnnnnnnnnnnnnnnnnnnnnnnnnnnnnnnnnnnnaattaggagggccagtacgcccatgcggaaccacctcctttgcccttgccttccggggggcccccgttgcacccccacgtcctgggcctttacattggagtcgctcatctccccatcagagaagtagccatcagtctcagtgtcaaaaatgcaggctgcccttggccttctcagccacagctgaaggtggtcccatcccagcatcaggctgggcacccggcaatctccgggttaccttgctctcgcggggtggccggagccggcccaaaggcttagggcttgctgcagggccaggcacttggacatctgagtcagcagctactgaggctgcctcgtccggggtctcaggggccagtggcggggggctttcaggggtggctaggatgggacagtccccggctgcagggctggacggcaagtgagaagatgtccgacgtggtggcttcctggttggtggcccttgaccccccttgccactgcctgcatcctggccccaggtcttcttgggggctttgtctggagtcgtccgtgaaccaggcccgtcctgcggtggtggtggtggtggtttcttcttggcaggcaggcgggtgcgttctcgggccttcctagcagggtcaccaggtcgcagcgaggggtcccgcatgaagctgagcagtgtctcctcgtcctgcagcagttcctctgacagcagccctggagcagggtcctcgcggtgcccattgttcagtggccactcgctcatggccatgttctctgctgtgatctgcaccgactgtgccagccagctgttgaagaaggtgccatcgatggggaatgaggtggacaggcctgccagctgccccaggactgagtcaggccccgccttcactttctctttcttctcagtgctgcccttggagccctcgcagcccttcctcttcgagtcactctttcttgccctttgctctcctcccagaccgcctcgtgccgaattcgccacccaggcctcgctacct

SEQ ID NO: 448079 - DNA, 471 bp, Homo Sapiens
gcgctcttgaattttctttcggatggcaggcttcctggtataaattcaaaaaacctgctagacaaactaagagagctactaacactccacacttgaaacttcttacataatatttgaacaaggagcctatattttcattttacactctagcccacaaattatgaagcccatcttgagggcagcacgtccttctggagagaagcgtataagtagtccctactctttggtggtgttggcaggagggatggacaaaacaagatagctcacctgggtctggcacagggggacagagagaagacgatgcctggtggtgtgctgggagcgtcagtgggcttcctgaaagggtgggacacacgtctgctggcgtctcacttgcctcctctctcccctcagcaggcctgtccacctcattccccatcgatggcaccttcttcaacagctggctggcacagtcggtgcagatcacagcag

SEQ ID NO: 448080 - DNA, 515 bp, Homo Sapiens
agtcaaatctgagccttctagaaatttttatttgaaaaaatcagtagatgtaacaataaccacagttaaatgaaagttaatcaaatcagttctattgaccaccaagtatctaggagcccattctcacctcaatggggggagggagagttatctaattgctattaatagtaatggaactaaaatatatctacatattatccagtgatttttttggtcttattatgtatttcctgaaataattaacttccatataagttgttttagctaaataataaagcactttaattgagcgcaacaatcagattctggtcaaccactgaacatggagaacttctgcagattttctggactgtaatgaacaaggaatattcaaaatcataataataatgggtaaactttgcctgaagcgtggacagccttcctcaaagaagtcttgggaaattctgttatgtcagaatacacatatcagacggaggaacttccagagatgttcatttagttatcataccccatgg

SEQ ID NO: 448081 - DNA, 413 bp, Homo Sapiens
aggtgggagacattgtctcggtgatcgacatgccacccacagaggatcggagctggtggcggggcaagcgaggcttccaggtcgggttcttccccagtgagtgtgtggaactcttcacagagcggccaggtccgggcctgaaggcggatgccgatggccccccatgtggcatcccggctccccagggtatctcgtctctgacctcagctgtgccacggcctcgtgggaagctggccggcctgctccgcaccttcatgcgctcccgcccttctcggcagcggctgcggcagcggggaatcctgcgacagagggtgtttggctgcgatcttggcgagcacctcagcaactcaggccaggatgtgccccaggtgctgcgctgctgctccgagttcattgaggcccacggggtggtg

SEQ ID NO: 448082 - DNA, 298 bp, Homo Sapiens
  misc_feature (21)..(21): n is a, c, g, or t
agggtgggagaactgcttganccccaggagttcataccagtctaggggcaacatggtgagaagttgtctctactaaaagtaaaaagaattagctgggcatggtggcatgcacctgaggtcaggtcccagcgacttgggaggttgagaggttggaggattgcttgagcccaggagatgaggctgcaatagcatgatcccgcccgctgcacttcagcctgggtgacagagcgagagcctgcctcaaaaaacaaatatgtttcaacttttttataataaatatgttcattttgcaactagc

SEQ ID NO: 448083 - DNA, 1288 bp, Homo Sapiens
  misc_feature (1128)..(1144): n is a, c, g, or t
atgggttgtcgtgcaggtagaggcttactaaaagtgtgaaggctttctcacagcctgggtgtgcacatttgtatggtctatcaccagtgtggattcgggtgtgctgctgaaggtgggagagctggcggaaggatttctcacagaagttacaactgtagggcttagcccctgagtgtatacggatgtgctgggccaggtaggagctgttggcgaaggtcttggagcaatgtgggcacttgtggggcttggtctcggtgtgtgacttggagtggatctgcatctccgacttggagtagaatgtcagtgagcacatccggcacctgtaggtcttgccgtctttctgatggtcatcatcatcctcaggggagaggacataagggtcattcatctcgggcagccctgattccagcatccgcttcttctttccggcccccggggtggcttaggaggccacactggccaccttccaaccaccacctccgcctccttcctcggttagggtcgatgctaccttcttggagaggtcagggacaacctgcagggcttgtgagccagggggaagagctgagacaatcatgggagccgaaatggggaaggtctgagctgatgatgctgtggtcacaagagagcctgagggggacgtgattaccaaacccggaccccttgattgactcccttctcttctccacctctgagaacaggagactccagcagtcatcagtcctgtagacggcacagggaccaccgtgatattctgggtaacggacgcttggctgtgtggggtcagctggtctgacttggactctgtgtccatactgatgcctgagggcagggacactgaggcaggcactgtcagcaaggtggggtagtgaggtggggccagaccacagcccttctctggcaacagctgatccttcatcttgttgatgaacattgtgttctcgatctgacctgagactgtggggatagaaggccagaagtacgggttagaattgaagtgagattcttccattctaccctctctctctcttcctcctgccgtcttattccttctcctttccagggctcctgaactttccggaagtggtgctgcagctcgtgctcccgcgaaccccagttcctccacgnnnnnnnnnnnnnnnnnaacaggctcagagaagagctctgcggagagaaggcgggagcgccggaaacgaaaaggggggagggagggaaatagcaatgtagggggggcgctaatggagaaagaggggcgtgcagaagccgagatcccgggaattccggaccg

SEQ ID NO: 448084 - DNA, 803 bp, Homo Sapiens
  misc_feature (660)..(676): n is a, c, g, or t
  misc_feature (792)..(792): n is a, c, g, or t
tctcttccggccccggggtggcttaggagccacactgccaccttcaccaccaccttcgcctccttcctcggttaggtcgatgctaccttcttggagaggtcagggacaacctgcagggcttgtgagccagggggaagagctgagacaaatcatgggagccgaaatgggggaaaggtctgagactgatgatgctgtggtcacacagagagcctgagggggatgtgattaccaaacccggaccagcagtcatcagtcctgtagacggcacagggaccaccgtgatattctgggtaacggacgcttggctgtgtggggtcagctggtctgacttggactctgtgtccatactgatgcctgagggcagggacactgaggcaggcactgtcagcaaggtggggtagtgaggtggggccagaccacagcccttctctggcaacagctgatccttcatcttgttgatgaacattgtgttctcgatctgacctgagactgtggggatagaaggccagaagtatgggttagaattgaagtgagattcttccattctaccctctctctctcttcctcctgccgtcttattccttctcctttccagggctcctgacctttccggaagtggtgctgcagctcgtgctcccgcgaaccccagttcctccacgnnnnnnnnnnnnnnnnnaacaggctcagagaagagctctgcggagagaaggcgggagcgccggaaacatcccgggaattccggaccggtaccagccgcccttcggacggaggggcgcggccggcgtacgtcantattaacacac

SEQ ID NO: 448085 - DNA, 292 bp, Homo Sapiens
tttttcatcaaaaaacatcttataattgcagaagtatatacaagatgatctattatcaacagtttataatggccaaagataagtcaccagaatatttgcagaaaaaagttataatggccaaagaatggaacaacttaaatacacaggggatggtaaatccatacaataaaatactgtacacaagaaagaaaacataagtggcactctacacactgctatgaaagcagatcaatataaaagcagaaaaaagccaagtatggaagtgtagactaaatataaaatactcaccgga

SEQ ID NO: 448086 - DNA, 500 bp, Homo Sapiens
  misc_feature (47)..(120): n is a, c, g, or t
tttattaaatgatgataagttaggtgggcattagataacaataattnnnnnnnnnnnnnnnnnnnnnnnnnnnnnnnnnnnnnnnnnnnnnnnnnnnnnnnnnnnnnnnnnnnnnnnnnnttctgcagattagatccaaagtcatgtaatattggtcagttccacagctggagttccaaccttcctattgctagaaggggacagcaatgccaagcaatacaggccacgtggggagggatccaggcaggaaatacagcatggcacaccttgtgtattgcacagttttgccttagctaactaaagaaagggtgtgtgttacaatacttgacagtgtcagaatcaaagggcaaagaaggagactagcccctgatgtttagctcaactcagaaagttggcagtaaggatagttgatgcagcaagtgaagaaaagggaaatggaaaaagaaatataaatctttttcccttcatcttctcatttccaaggttcaaattaactatat

SEQ ID NO: 448087 - DNA, 429 bp, Homo Sapiens
ctcagggataataaatctattttaataacgttacttttgacaacgatttgtacatgtatttaaagataacaactttcaacccccacccttaccccagactcccattacaaattgaggcatgacctgcccttgccaggaagtgagcaaagctgcaacatcaaaactctgcacatcccactctcagaggagggtgactttacactgtgttgggaaaaataactaagcatttaaatttttcattgtacacctgtacattggtttagattgaatggctcaaattaaacaaatatagagagatttcatatatacaaatattatatcatgtataggtatattatatcatctatttgaaagggataaaatttttaaactttgactttgcatgcatggcccaaatcttttctcactcccctaatcccccagtgtgaa

SEQ ID NO: 448088 - DNA, 458 bp, Homo Sapiens
  misc_feature (436)..(436): n is a, c, g, or t
tcattctttaaacataatgacatacatttattaaggactcatagtccataactaagacaaaatgagcttcagttacgttccctaactcggtccacgttcctttagaacgtctcaagcccgcatgtcactcatcgcggagtcgcagccttcccctgggttcgggcgtctgcgttaagcgccggcacatcgtggggatccccgcgtgagatttctctgcgccgtcggaatagactgttcacggattcgcgttaggattccttatgctgcagaacttcaaagaaataaatgtatcagaattgcgatgtttaagttctaatctatttaagcgggtgggtcagcagagggtcaacaggaaacttcaaggtaaatagtggcctctggaaaaggcccggtcgctcacggcttccccactgtctccccagagcagactattaanttctgcgtttcaggcagaactg

SEQ ID NO: 448089 - DNA, 1224 bp, Homo Sapiens
atattattcaggcaatttattaaacattacctatagaatattatgatctgtattttacagaagttaaaaagtgatgtattagtattcataacaactgctccatgcaggagtaatagaagtcaacattaagcccaactctattttcagaccaaccatgcagctttagatcagaggacacatgggactctgcatcttaattcctaaatttacagtcaaagacattttcagagataagtattatgaattcaataagaatctaaagtaagttcttaaggcaaatagctataaaagagaagaatccttagtctctcatcttctaaaaacagcttcacaaataatttggaaaatcagcctaaaggtaaatagaaactgcatttcccctccattcttgaagccaatctttttcaagaaatgactaagcagcacctgttgttgaagacagcaataaagcctgaacctgacactcaagctttggtacagggatccagttttctggcttggactggtcagggagtcaacttcactcagaatcttcattagtgattttaagcgattgtgcgttagcactatcttttctttcagctctgcaatcttttctgatagaggaacattttgaatatccatctctgatgcatttactatggcttttgtttttaagagatagcacaccattttgtcactggaaaggcagaagtgacctctcaaggcagccagggcagacatgggtagaatacagatggaaaccaacgggaatcccacaagaaccacagaataaaaggttgtaagtactgcctttgagtgaaccttcaatgccaactaggaagggcgcttccaaaacgacgttatttgtaactctggagaagaccacggccccgagggaccgcgacaggtcccaggcgaggtgcaccgagtcggcgagcactgcgtgacactgtgcgcactggaacacagcgcacctctcaggctgcagccaagacggcagctgcgggccggcggctggctcctcagcccccagccctgcggggccgagcggcgaggaccccttcaccacctgcgtatcccactccatggaggtcgtaaaagaagcttggtcaatcgccctctcagtgccaccacaaaagtccccccggggcggcgttgcacaacgtgagcgatgccgcagcggctgagccgccatcttcccgcagccggcgccttcctttcgaatacacgccaggccccccc

SEQ ID NO: 448090 - DNA, 411 bp, Homo Sapiens
gtcaatattgggtgatttattgagggaatttacagaccgaagtgggatcttgggtggccacaagacaggtggagctctgcattctcacaccccagatgcaaggcttagataccatagggaaagggtattcgtgctccagcaagacaaccaaaggcagccctccagaacaggcaagaacgctacgtgagtcacagcctacgatttgtggagtaacatcaaggttgacatgttcttacactaggggcagtaaataaagtagaaatcagaaggcattcacaagactggggcgaatcggaagtcaacacaggggagtggcatccaagatggagtcacttttgtctccacaggttcccactgcagacctgccgaggagtcagtccccagcctgcagctcatcagagagaggctgca

SEQ ID NO: 448091 - DNA, 974 bp, Homo Sapiens
gcacagagcttgatccctgttttccctgttcagttcagggcttcatggcatccccctgtgtccaccagggaacaccgcccccttttttctttctttcccccagcaagaaggggtggctccacatccatatgcccctggcgaggccattggcgccccacttgcagccctgcagggatgcctctcctcctcttggccggccgccctcaccagactccaggcccggcaagccctgaagcaaatggttgaggaggaaggacttccctgagtgctgctcccccaggacagcgaggaggcagactggggtgtccctggccagagggtgcttcaggcagcggttgatggcccccatcctaaggatgaggcccccagaggcattgatgcgaaccagcagcagcggctccgccctcacaggacacgtctcctgcagtgcagggggcagcggccgctgcggcaggagcttcatcttctcgcccaggctccggaggcccctcttctgcttgcatatcttccggcactcaggacagcagggcggctcacagcccgggagacggtgtgtgctgaagcaccgtatgcagaagtcgtggccacagtccagcgagatggggtcgcgcaacctctccaggcagatggagcaggtagggagctcccggggcgccatgggctggggccccaggcctagctccaacttggggaaaggtgtatgggaccaactgttgccgctgtttcccatgaagctctgttttctctcccgtttgccaagccgatgacaaaaggaagtgactgacaaggcgggccttggcatgggaggctgggatggggagagggtccggatgcagagggggaggccccgagaccttcaaccagaggtaaggatgccttttctcccggaaaggctagcaggctgcggtaggtggaaggtgaggtcgggggatggtatccccgaggagccctcgtgccgaattcgccacccaggc

SEQ ID NO: 448092 - DNA, 1250 bp, Homo Sapiens
ttcgcagatctgccattagtatttattctttgaagatactttggagattcattttcttgagtggcactgccatgctcattcagtgaaaacttgtggggtatagaaatggaatggagagtttcaaacagctttgctgaaactgtactttgggctccagacttcactgtccttaggcattgaaaccatcacctggtttgcattcttcatgactgaggttaacttaaaacaaaaatggtaggaaagctttcctatgcttcgggtaagagacaaatttgcttttgtagaattggtggctgagaaaggcagacagggcctgattaaagaagacatttgtcaccactagccaccaagttaagttgtggaacccaaaggtgacggccatggaaacgttagatcatcagctctgctaagtagttaaggggaagaaacatattcaaaccagtctccaaatgggatcctgtggttacagtggaatgaccactcctgctttagttttcctgagattgccgagaataacatggcacttatactgatgggcagatgaccagatgaacatcatcatcccaagaatatggaaccaccgtgcttgcatcaatagatttttccctgttatgtaggcattcctgccatccattggcacttggctcagcacagttaggccaacaaggacataatagacaagtccaaatcagtactagccacgacgttaagttgtggaacccattggtgacggccctggaaacgtagatcgtcagctctgctgagtcttcgttagctgtgcagccacatattcatactagtctctaaatgggatgctgtggttacagtgccatgtcccctccctggaactgtgccgccccgagaattctgagcaaaccatgaagccagcttggaaaaggtgctcccaggaacagagattgagtaaggcaccaaagcaggaagccattccacagcactgagatgatataaaagtgggaaaaatatctcttggggacatcaaaggctcggcaggcggcggggcgcgacggctccccacacttggttttcccatagcggatcaggtcctggaagatcgcgcagcccgggagcaggccgggcggcaggagctgcagcagtagggtcagcaggaaggcggcggtcagcgtgagccacaccgcgcgcagcgggttcagcgccgagtgctcggcctccgcccagggagccatggcccgcgtgcccgccttccgcgctgctggcgcccccaccgcccg

SEQ ID NO: 448093 - DNA, 493 bp, Homo Sapiens
ttttttttctgccattagtatttattctttgaagatactttggagattcattttcttgagtggcactgcatgctcattcagtgaaaacttgtggggtatagaaatggaatggagagtttcaaacagctttgctgaaactgtactttgggctccagacttcactgtccttaggcattgaaaccatcacctggtttgcattcttcatgactgaggttaacttaaaacaaaaatggtaggaaagctttcctatgcttcgggtaagagacaaatttgcttttgtagaattggtgggctgagaaaggcagacagggcctgattaaagaaggacatttgtcaccactaggccaccaagttaagttgtgggaacccaaaggtgacggccatgggaaacgtaggatccatccagcttctggctaaagtagttttagggggaaggaaacatatttcaaaccagttttccaatggggtccccgtggtttacagttgattgacc

SEQ ID NO: 448094 - DNA, 517 bp, Homo Sapiens
gcttagctttttcattttattgatgttcttttaatatatgtatttaggattaaactagtgttcaagtactaataatccagcaattctgaattggggctttattttttaaaaaatacaagcacagttagggaacagagatgaaattcttgtcaaacataaaaatatgaattgaattgcttctttttagatggatctttaacattgacttgaccatatggacaatgtctgcacgcagagccacaacattcacctctttgcaagtgggcaatctgtgtgagcaccacatagccagtagctggatccacatagtttagctggccagccgcgcaggcggcagcgtgcagctccgcgatctgtcgctccgccgcggttaactcttcgctcaccgaaggcctcgccgctctctccggcctaccgggcgtgctgggcgcggagccgccgcactttccctcgttagcaggacagagggttaagctgagctgctgtcggaacccagctcttaccatcccgtactccc

SEQ ID NO: 448095 - DNA, 508 bp, Homo Sapiens
  misc_feature (245)..(245): n is a, c, g, or t
  misc_feature (498)..(498): n is a, c, g, or t
ttttttttccgagtgaaaacagtctgtttattacagcgtctagaggtggggatgcagaatgcaggggtgcccagaggaaggggcgcctgcagcccaggggcggaccgtgacaatgcgcgcaatccaaatacagttcacccggaagacacggcagagctcccacgttacaaaggctgacacagaccagcagcgtgttgtgttgggaggggggtctgaccacgatggcgagggcagtcggcgggggntggggggcctgctgaccactgaacagactgacgcatcctgggggcagataaattaagggggaagtcttaaataagtcactgtgcgtgcctcatgggccgaggagggggtatcctagtttttagggttcctatcaattcctgagcaagagccacttcccagggcgccgcccgcccacccacagttcagcagcagcagcacaggtccccgtcagttgcccacggaaactcaggccagggttccagcaccagggtncagtttcctt

SEQ ID NO: 448096 - DNA, 958 bp, Homo Sapiens
  misc_feature (246)..(246): n is a, c, g, or t
gggtttgagagtttaatctgtgctctggcgcccacagtgctgcagcccctcatgggccagagacagggtgcacggggactcccagcccctacccggcaagagaggcatcactgaggctgcatctgccatgcgctcctggtgtgactgcaccctgtcaggccagacccggcttgagccaacttagccaagccagcgtcagtgtcaccagcctcatgggtggagccaccctcatgctgctctgcaaancctctgaacccgatatcccaggcctgggaggtgctgaaggctcaggacgcctcttattgctctgaagtctttgtgaccaagtggagtgctgtgactgtggggccaagagagaagctgccaggtacagggaaaggcgctggtagggagccagccagaaggtgcagcatcccgggatggccctagcatgagtctgctgctcaggcctgctgaaaggtcagcagagccaaggacgcaggcaggagatggctggagaccgcgctacataaccttggcgatgctgtgtggccctggccaaggtcctgcgtggccacttgaacgaggggacatccagggcgaaggcaaggtgaccttcctggggaccaagcagtgtcatcgtaagccgccgtagccgcagagcctagtgggacaggggaaggacaaggacagcagtactgggatgcgttgttgtttcacaggacttcgcgtggttacccttgcgccggagcattgacgtccctagaatgctgcgttccccaagaaggccccgtgggacgcgacttgaccaaggcatttccattgggtccaaatcaaaagtttccattgaaagcgcgcgcttggctgtgcctttgcaagggaaaccctggatttaccaagggcatttccttaggcacaaaatccgtgcattacaggccgccgcttgcaggacattggacggcacagaaggggtcgttcg

SEQ ID NO: 448097 - DNA, 1206 bp, Homo Sapiens
  misc_feature (221)..(233): n is a, c, g, or t
  misc_feature (1062)..(1098): n is a, c, g, or t
ctgcgcgcggcctcgtttggccgcacaggcgcagtggagctcgggcggagttgtgggagtggaggaggaagaggcggtagggggtacgggggctggtcccagaagatggcggaggcgggggatttctggtaggtcctactttaggacaagatgtggtaccgttgaagcgtcagtctttgattcacagacagttgagcttttcagctgggaagcctttccannnnnnnnnnnnnaacggctttctgaacctatgaaaccatggcagaaggagagacagagtcacctgggcccaaaaagtgtggcccatatatttcatctgtcactagccagagtgtgaacttgatgattcgaggagtagtgctattttttatgggagtatttctgtgcattagtgttaaatttacttcagattcagagaaatgtgacgctctttccacctgatgtgattgcaagcatcttttcttctgcatggtgggtacccccatgctgtggcacggcttcagctgtgatggggttattatacccctgcattgacagacatctaggagaaccacataaatttaaaagagagtggtccagtgtaatgcggtgtgtagcagtcttggtgggtataaatcatgccagtgctaaagtggatttcgataacaacatacagttgtctctcacactggttgccctatccatgggactgtggtggactttggatagatctagaagtggtttggcctggagtaggaattgccttcttggcaactgtggtcactcacctgttagtatataatggtgtttaccaatatacatctccagatttcctctatgttcgttcttggttaccatgtatattttttgctggaggcataacaatgggaaacattggtcgacaactggcaatgtacgaatgtaaagttatcgcagaaaaatctcatcaggaatgaagaaggcaaaaaatatcttttgtacagaaaagcaagatgaaaaggatgtgaaatggtagatataccaacaaaacttcagactgtaaaattgccaggatgcagttttccccttgattggcgtgtgtgnnnnnnnnnnnnnnnnnnnnnnnnnnnnnnnnnnnnntactgcaatctgtgattgcttcatctgtaaatcagttgtaaacctttacatatttgacttaaataactgtaagatatatatgtactacattaaaaagtgttgattaat

SEQ ID NO: 448098 - DNA, 1065 bp, Homo Sapiens
  misc_feature (16)..(16): n is a, c, g, or t
  misc_feature (30)..(30): n is a, c, g, or t
  misc_feature (970)..(1018): n is a, c, g, or t
cacttttggggacacngccaaggggtcacngtattccccaaaaacatggtattttattcctaattaaaatccctctaaaggttcccttacttttaaattatatatactgttcccaaatttagaacccaaaacaatttaatgcctgataacctcttctgctcatcacatatacttcccagtaaaacctgtcaaaacagaaaattactctttgggctgtctccagtaacgcaggtttgaaaccagaagttcattttcaccctgtatcaaaacactccaaactctatgaaacaacattaaattagaaactaaccacaaattagggcactcataactcatactgctgtgattagaaaaataaaaaggcacaacagtaagctaaagagaaaataccagctccccatatgctttttgtttgtttgtttttggctttcctcttattttatttcactaagtctacaaattgttcaaagcattcttatactctgcatgacaggaacaatatcttggcacattaacattgtgatacaatgtgtggcatgttttaaaaaattaatttaaaaatttcatctattaatcaacactttttaatgtagtacatatatatcttacagttatttaagtcaaatatgtaaaggtttacaactgatttacagatgaagcaatcacagattgcagtaatatgtgtgtgtgtatatatatatttattccatatatacacacacgccaatcaaggggaaaactgcatcctggcaattttacagtctgaagttttgttggtatatctaccatttcacatccttttcatcttgcttttctgtacaaaagatattttttgccttcttcattcctgatgagatttttctgcgataactttacattcgtacattgccagttgtcgaccaatgttcccattgttatgctccagcaaaaatcgcaggaattccggggccgctcgcatcaatatctggcnnnnnnnnnnnnnnnnnnnnnnnnnnnnnnnnnnnnnnnnnnnnnnnnnagtagcacccacctactatccgttcgggaaggtgccgcgcgcgcggg

SEQ ID NO: 448099 - DNA, 584 bp, Homo Sapiens
  misc_feature (18)..(18): n is a, c, g, or t
  misc_feature (29)..(29): n is a, c, g, or t
  misc_feature (54)..(54): n is a, c, g, or t
gaatcatcgcaaaatatncgtacatgtgncaccgtggttgacagtctgcatggnctgcacaggaatttcatcctgtaaaattgatgaggtcgacagctgctcattacacgtgaaacagacaaaacaggatgggtgccagcacacaccagggcccgcacgggaggcgaacactgcaacttcacctccatttatcttcaaaccacactgctcacacacagcatgcatgactgctctggacagaagcttaattgttcctcttcccagtgcttctttcttccgctgagcactgaacacctgcaactcttttttctcctcttcactcaaagactggcaataccgtacctcattatcatgtggtggtaactggtacaaaagctgtttaatccgatgcttctctccggggctgttaacgtaaggaactttttcctctggtaagcaagcaaaatagagctggatctgctctggtctcagggccggggggacccaggcgtactcctccaatgcacagccagagtcatcatctgatgtggaacttctctgagcagccaaaggccagtttgctcatcttgggctccatctccaaa

SEQ ID NO: 448100 - DNA, 286 bp, Homo Sapiens
tttttgaaacaaaaaccgaaaggtttaattttttctccccaaaccaagacgctgacactagcctgagttcccctaacaatgttattttctacaacagaagctgggacagaggaacaaacacagcccactcaagcagtggtggcaacattctgttagaaaggaggggagtcaaagaaaaaaacacccctccgcccatctccttatcacctccctaaagacagaggagaacatggacaccctccatcctgatagacatgccatgtggtcagtttgtgcggtaaacagg

SEQ ID NO: 448101 - DNA, 373 bp, Homo Sapiens
  misc_feature (337)..(337): n is a, c, g, or t
  misc_feature (344)..(345): n is a, c, g, or t
tctggtccacggacgccacgcgcgttttatttgtggatatacacacaaataggaagaaggaaaggagccccccagggtggattgagtccagccgcccacctccaagcccccaccgcggaggggggcgtcactgttgggtcttctctgaagaggcctggagggaggtggggtccccacgtgccctcgccgtacctggcgagcgctctgggctggtgccaccgggtgatctcctaccggggccagccgtcggccaagggcagccggcgcagggcgggcccaggccgcaaaggctctgccagggaccgggcgaggagcaagggataggggaaggtcttangaaagtnnccggggcccccgggggcccgagagaggc

SEQ ID NO: 448102 - DNA, 358 bp, Homo Sapiens
  misc_feature (178)..(266): n is a, c, g, or t
  misc_feature (270)..(270): n is a, c, g, or t
  misc_feature (272)..(272): n is a, c, g, or t
  misc_feature (276)..(276): n is a, c, g, or t
  misc_feature (290)..(290): n is a, c, g, or t
  misc_feature (337)..(337): n is a, c, g, or t
ggtggtcaagccacaattcctgcattttacatttcttctgtctttattgtattgcttcaattggcaaatcatgcttgtattcattcatggggtacaatgtggaatgaggaaatcccactacttagcatctccactacctcagagagaccaattccacgtgaggtcccagaagtgttgnnnnnnnnnnnnnnnnnnnnnnnnnnnnnnnnnnnnnnnnnnnnnnnnnnnnnnnnnnnnnnnnnnnnnnnnnnnnnnnnnnnnnnnnntttntntttnttaaaggccatttntttttaaagggaggaggattgaaggttttgacatgttagtgcacagnaagagtgaccagagtcaatga

SEQ ID NO: 448103 - DNA, 382 bp, Homo Sapiens
ctgtggaaacctggggtgccggcctgtacagattctgtcctggggggctacacagtcctctcgctttgtgttaatggggacttccccttacgccctgcgtgtacccctccccagtttaggggtctctggggcagtggccatgttctccccctgggggggctctgcacccccagtcctggggactccgtgcctggaaccctgcctcatctgttcctgccagaccctgagggtcacccttccaccctggtgtcactccccggctcagccaggccaggatggcggggtgggtcccttttgctgggctggattggtacatatgttaatagcgcaaacccgacgccacatttttataattgtgattaaactttagttggtaaccaag

SEQ ID NO: 448104 - DNA, 970 bp, Homo Sapiens
ccccaatttgttgtttctttttcctttttgcagaaaatgcaaacaaaagaaaaacgaggttttcaattgaaggtacatctcttcttcaatatgaagacattaattgaattggttggatccccatgcagtggtcagcaaagtcctttggcaactgacagaacaacatctggagactcaggagctgggttttgtttgaagaaacttccctacaggagtcatgagccaaagggaaacgagtgtgggagaagggaggggactctcagggaggagtacgaaaggagaaaagaaaagaatgtcattggtgaggaagaaaatggaacactgcttctgtttcttccctctacctccttccctttcttcctgtggttgggcaactgcagcccactgagagtgggagctgggtttactcttgttctcctgatgcatattgttttgtcttcacttctgttgaacatcacctttttatatttttattattatatatttggtttcccacggcatctcaaacatgcttctgtcactgagaaatggagattgcctgctagcaacaggtccggttgattcttcactgatggaaatgcattcctcagctgagaagccagtctctccagtacattccacagtggtcaacctctggtcccccttgaccctggtccttttccctcctctccttccccaagaaacaagagttctcatgccattgccgttggtgactgacttatctggaccctcatagaatgaatgctgttcaggatcttcttctgatggcctgccaaggtgatgcctattctcaggaggtcttctgatgtcatctgggtgaccagctggagggaggtgaagccagcagtgaggaagctgtccctgtactggaccattttgatggcgctgagccagtcatccacggtggtaaaggccgtgaagtctgggatggagcggtcgagcaggggctgggaaggcacggcggtgatcc

SEQ ID NO: 448105 - DNA, 461 bp, Homo Sapiens
aaattcattaacattcattttggtgataaaaattccttagggtgggagcaaaatcacattcccaagcaaatgttaaatcttcctgagggaaaggggtacagttaaacattaaattctcaaaataccactgagctcagagaggtgattgcaggtccctctgaggcaggctacaccccacagtgatgacagacttggcaggttctgcagtaacacggtcttcttcattcagccagcgagatcgacggtgatgcccactggggcacagaggaagggtgcccctcgctgggagggccaaggaaggctaccggaggggcaagtccagcccatcagggtcacatcatgggatcacagcagagttcagacagaacaacttaaaactctgcaaaagacactttaaaaacatgatctcttgaaaaaataaatcgcaacaattttcaacttcatgcaaatcgagggcagag

SEQ ID NO: 448106 - DNA, 1094 bp, Homo Sapiens
  misc_feature (56)..(68): n is a, c, g, or t
  misc_feature (120)..(128): n is a, c, g, or t
  misc_feature (136)..(196): n is a, c, g, or t
  misc_feature (198)..(255): n is a, c, g, or t
  misc_feature (261)..(302): n is a, c, g, or t
  misc_feature (341)..(349): n is a, c, g, or t
  misc_feature (359)..(452): n is a, c, g, or t
  misc_feature (466)..(474): n is a, c, g, or t
  misc_feature (527)..(648): n is a, c, g, or t
aaatttgtagattgtttttattttaatcaaaggatggaaatccctcctccaaaaannnnnnnnnnnnncggtttattgtccctcacccaccccactttgggggttttgtggggggccccnnnnnnnnngccctgtnnnnnnnnnnnnnnnnnnnnnnnnnnnnnnnnnnnnnnnnnnnnnnnnnnnnnnnnnnnnntnnnnnnnnnnnnnnnnnnnnnnnnnnnnnnnnnnnnnnnnnnnnnnnnnnnnnnnnnngggggnnnnnnnnnnnnnnnnnnnnnnnnnnnnnnnnnnnnnnnnnnagggggtaattattgggggggggtgttggccaaatgttnnnnnnnnnaaaaaagggnnnnnnnnnnnnnnnnnnnnnnnnnnnnnnnnnnnnnnnnnnnnnnnnnnnnnnnnnnnnnnnnnnnnnnnnnnnnnnnnnnnnnnnnnnnnnnggcccccttttttnnnnnnnnnggggtgggggcaaaattgggccccccgggggaattttttaaggggcccccccnnnnnnnnnnnnnnnnnnnnnnnnnnnnnnnnnnnnnnnnnnnnnnnnnnnnnnnnnnnnnnnnnnnnnnnnnnnnnnnnnnnnnnnnnnnnnnnnnnnnnnnnnnnnnnnnnnnnnnnnnngagatattaactctttattccgttagtgaccaatacaacagcaccacggacacagcaggggccctgcctgagaacccaggcaaggcaaagaagggggatgcaggggacctctggggcccggggcggggctggcccggcctaggtgagggggaagctttcccagcctacctccgccggcagccaggagagaaaccagtggggaagcggggctgttgggtgtacagtcaaaccacctgtcaatgcccctccttccccagagcaccagggctgcagtgaggagagggcttctagggggccggagaaagatctgtgggtggctcaggatggacactgagcttcagaagggacagcgtctgtgcgtgcgtgtacctatgcatgtgtgtgtgtgtaggggcagatgcctacactacctagcatattggatttaactgctgagccacacgacc

SEQ ID NO: 448107 - DNA, 582 bp, Homo Sapiens
  misc_feature (57)..(57): n is a, c, g, or t
  misc_feature (86)..(86): n is a, c, g, or t
atagaaatttgccttgagccaaaaattcgcacgagtggcccgccgggtccaccgttnaccccaagcccggcttcttcgctggggcntggacctgcttactcggagagtctagggacccggaacagctcttgcccgcctttctccactcttcctttcccaggagcccagtccacgtgtcggtccgtgcggaggagcccgttcgctcctcgctggccgagggctggaggacctggacatcggggaccgcagcgtctcctcaccagactccctgtctgcacacgatgtccactcccctgcattctcagatagcccctattctcagatggcctcaatgaggacagaatgaggaagggtccaatgaagactagggtcctggcgtgagcgcaaatcgtcgtcctgagcgcttagaacgcctgggtttgggactggaaggttgcgtttggggagtacggacagctaggccaccccctgccgaatagaccctcccctacccctgcccgggggcggagtaggggagaggggcctgtagaggggctggccctttaagggggtgtggtcggggggcggaggaagagcgagaca

SEQ ID NO: 448108 - DNA, 334 bp, Homo Sapiens
tgggaagcctggccccaactcaagcggaacccgcaaagccggactcccagctttttcctcgggtgggatcagattttaggccctccgctcttcctccctccaaattcaggtccctggagtccatcctcccttcgaatccggtagttcaggccctgggcctcttccttggacctaggcgtccgagcccccagccctggcattctctccgcagatggaggtggaggtggccttgctgcggggtgagctggctggggagcgagtggccgctcgccgggaggaggagcagctgcgggagctgctggagcagcaggcggcctcggagcagcgcggccgc

SEQ ID NO: 448109 - DNA, 1042 bp, Homo Sapiens
gcttggaatggcgccacgcggcccgggggaccaaaagggaggagccccagaaaattctgccccacgggaggggaggaaggaaaacccaggggggggcatttggccccctccctttttttccgggagcccaaatgtcttcctttggggattggggacaaccccgggggccgcaggtggctaggagcaccaccaacatcccatggacccaggaaggacactgctgatgaagacccggtgagccaaacagacctgttcccgctgctggcgcccgcgctgctccgaggccgcctgctgctccagcagctcccgcagctgctcctcctcccggcgagcggccactcgctccccagccagctcaccccgcagcaaggccacctccacctccatctcgatcctcagctccttcctctggcgctgtagctccttcactcgctgctccatcagggccacacgagtcaatgcctccagctgctgtccttgcaggcgccgcgccgcccctcgcaccccttcccgcgaagaggtggatgcgggaggtgtggccgccatagctatcggaggcgtagcctcgggcgcgtcgcggctgctctcagtgctgctgccttctcccacttcttcttcctctgcctgctgctcagctcccccgcggctcgaaggttccgccaggacttcggatgcctcctgttcccgggactcctcgggatggccctggggctggacctccacgtcgcattccgggaccagcggcggcggggtcccctcctcggggctgcttcgcgtccccatggccgctgggactcccagggatccaggagtcggggctctccttctctgaacaagccaggagtcggagtccttgagattccgaagtccaactgccacctccccacagcctcggccccctcacgagctcaggcttcggcgcgctccgctctgcgcgctgggcacggccgcttctgcctatgagacaggtggcaggggaagagggaggagagaggccgcccggtccccctccccagcagcccggaagtggaggggggacaac

SEQ ID NO: 448110 - DNA, 769 bp, Homo Sapiens
aaaagaagatagaagtttatttctctctcacataacagtacaaaagtaagtggataacctagggtggagagacagctctgctccagggaacccagactagccagtcagttctgctgtcttcatcaattggcgtccatctctggatccaaggctgctgctttaattcttgtcatttcccagccaaagagaaaaaagaaaagagggcatccaggacaaatggctttttctttaagaagatgacccaaaaagttgcccgcatctcttcctttcacatcccaacggcccaaacttactgggcccaatctaccggcatctacctgggaaatacagttgcacttgtgtagtcatgggctagcttaaacttcaggcaggactagaaattttatttcttttaaatgaagctgcttctgacagcttggtatatgccttttgagttactaaatacaattcaacagaaataagatggtgtctgctctctcagaaatctgttaattaaaatttgtcaaagaatgagcatgtaataccaaaatttgataaaataacatcttgttgcatgaagattatttcgtgagtttagaaattgtactcccaaaattaaagtgttcagtaaaagcttagtaagtcaagtattcccagtaacagtgttataaaagttgactctatttgtcaagttgaaaaaggtcctgtctcctcccattattcttcctcctcttctcaactcctatagggaagaaatatgttctcagatactccagtccgggcttctcgg

SEQ ID NO: 448111 - DNA, 396 bp, Homo Sapiens
ccagggggggttatgtaaaggagggcggcgtttctaaagaagatagaagtttatttctctctcacataacagtacaaaagtaaggtggataacctagggtggagagacagctctgctccagggaacccagactagccagtcagttctgctgtcttcatcaattggcgtccatctctggatccaaggctgctgcttttattctgggaaatacagttgcacttgtgtagtcatgggctagcttaaacttcaggcaggactagaaattttatttcttttaaatgaagctgcttctgacagcttggtatatgccttttgagttactaaatacaattcaacagaaataagatggtgtctgctctctcagaaatctccagtccgggctctcggatgctgccc

SEQ ID NO: 448112 - DNA, 479 bp, Homo Sapiens
agccccggccaaggatgtggctccgtccacagtaaaagaagtgggcttgttgaaggacatgtctccactatcagaaacagaaatggctctgggcaaggatgtgactccacctccagaaacagaagtagttctcatcaagaacgtatgtctgcctccagaaatggaggtggccctgactgaggatcaggtcccagccctcaaaacagaagcacccctggctaaggatggggttctgaccctggccaacaatgtgactccagccaaagatgttccaccactctcagaaacagaggcaacaccagttccaattaaagacatggaaattgcacaaacacaaaaaggaataagtgaggattcccatttagaatctctgcaggatgtggggcagtcagctgcacctactttcatgatttcaccagaaaccgtcacaggaacggggaaaaagtgcagcttgccggccgaggaggattctgtgttag

SEQ ID NO: 448113 - DNA, 465 bp, Homo Sapiens
  misc_feature (315)..(331): n is a, c, g, or t
tttgcttaggcttacttttatttatttaagaacatgggtgtctgtcttgtcttcggttagaagttagaagggggctacagcagtgtcagggcacttcacccaacctgcaggtggctgctgttgcagctacaaaggccaactgctcagaggagcccacaggcttcctaagagcccacacttcacaaggaacatgaacacctttgcagtaaaatcaggactctaaccacaagggggatgcaagtggtggcttctcaggccctgaggcaggcgtggaggggcttgtggggcaaaggcctcctgctgtgagaagctagnnnnnnnnnnnnnnnnnacccaaaccatgcagtggcgcttggtaagggggcaggtctcggtctctgttcttctcagaaaggtacagacagtgcaggtaccccccacccccatatgagaaacaaacaaacaggacagccagaggagacactg

SEQ ID NO: 448114 - DNA, 508 bp, Homo Sapiens
  misc_feature (316)..(316): n is a, c, g, or t
  misc_feature (447)..(447): n is a, c, g, or t
gagatcaaggccatggggcccgagatgagtccgttttaattgctggggaaacagggaggggccttggaaatagctccccccaccccactccccacgtgtcccatccagtttgggcaggaagccactttccctagaacagttcattgctgggatcctgtgaagaaccgctgtggagggcagcagctggacgagggcacaggacctcagagaacactgatgcgctccgccagcccctgcatgtcgtggtcctgtggtggacaggccccaccgagatccctgtccgtgggcagcccagacccaggcagcggattctctngctgcaaacttgctcccagcgcgctttcgtcactctcattgcgtgatgtatcgctctcccatcttcccctccagctctcggaggtccagccacgtttggtactcctgtaacccaggggtggctgagagatntgtccacgctgtagcgtttgcgcatcttcaccttgcagcaggtggtgatgagggcaatggc

SEQ ID NO: 448115 - DNA, 1286 bp, Homo Sapiens
  misc_feature (962)..(962): n is a, c, g, or t
  misc_feature (1203)..(1239): n is a, c, g, or t
tttttttaagtgttccacgattttaataaatgtatacagttatgcaactatcattgcaatctagtttcaaaatatgttcgacatccaaagttttatttttcatcacccaaaaaagttccttcgtgcctgtttgcatttgatcccactctcacccccaggcaaacatgaatttgcttcctctctagagatttacctttttaagaagtgtcacataaatggaataatggaattttcttgtctggcatctttcacctggcctagcgtttttgaggttcatccatgtaggcccatgtctcagcagtttcttttcatggccatttccctgctgctcatgcatccgcggttggtggacgttctggttggcgtggacaatgctgttaggaatgtttgcatgcaagtctctctggtcgtttttctcttgggtggtttccaagggcgtttggtcggggatgctgaattatagaagaagctgcaccattgtacaactcctaccaaggatttaggagaattccagcttctctacgtctttgctatcacttgccattgtcctttttattttatcctggcggccgtcacaggcttcctctgatggagatctgtctgccggcgatttggtagttctgaatcccaggagatctgcggggggagccttgggctaggccccgtcacgggagagcctcgtgttgtcgcagaccggacttgctcagccctgggacctggggcccgcggctgaccagaagtaattttgacccgacgtagtccttatggtgtagggtcgaagtttaaagactgtttttaaaaacctgaggtctcatcgacagcgtaccgcgccatctgaagggcgctgtcccgccagcttccgtctccctcccggcagccccggggcgcctgttcggcttctctgagtgttttgtgtgctccctgacgttttaaacccacctgttaatactttgtgaaaaacnaggagccacggtagcccgtaaaaactgctcacaatcaccccgccacccagagctcactagtgcgactatttttgtgcaatttcttttggcaacacgtttctcagctctcgggtgatctttaaggcagaagctggctctccgcctgtcggcgcgcgtccccggtgtttacggccggtggggccgtaccacggggacaccccccgctctcgacgaattcgagctcggccgatttggcctgatnnnnnnnnnnnnnnnnnnnnnnnnnnnnnnnnnnnnncgccgccaccgcgtaagctccagttcgccctatagtgagtgatcatc

SEQ ID NO: 448116 - DNA, 539 bp, Homo Sapiens; identical to SEQ ID NO: 59483

SEQ ID NO: 448117 - DNA, 977 bp, Homo Sapiens
tagcctgcctgggtatggacgatgccttgggcattccggtgctccctgaggtgtacagcatgaagagcatgtcctcactgcccatgctctctggggcgcaaacagggtcctccttggccatttcctgctccagcgggacgtccagatcccccatgtggaccttgttgtctgtcctgtgagccaccaggacatgctgcacggtggggcagtgcttcacagcctcatccactattttcttcagctccaccacgcgcccaccccggagtccttggttgaaggtgataaccaccttgcacttggcatcattgatcctcccagccaaggactctgcactgaagccagcatagatgactgtgtggacagctccgatcctggcacaggccagcattgctgccacagccaatggggacacgggcatgtagatggctacacggtccccacggtggactccatgcctcttcagcgtgttggccaggcggcacgtggtctccagtagttccctgtaggtgatcctcacttccgttccaggctcatcgcgctcccagatcaaagcaacgctctcgggggacttccgaacatgctggtccaagcagttgacagagacatttaactggcctcccaggaaccagccgatcttgccagtgctgaagtcgcagtcccagacggtgtggtagggggtgtcccacacgagagtgtcccgcgccagaggcccccagaaggcggccggctcccgggctgcctgtgcactcagcgcgggatacgagcctggctgtgctgctgctgctgcaactgcgggagcgctgcccgagggtcccgaggccgccctgcgcggcgcgctcaccccgcacggcggccgcgcgggctgccccgagagccctcgcaggctgcccagcagcctcccgacggccgcggccacagggtgcgcagccgcacatctaggcaggctacctgagctctctgtgctcccagagtccgct

SEQ ID NO: 448118 - DNA, 1266 bp, Homo Sapiens
  misc_feature (1180)..(1212): n is a, c, g, or t
tgagaactaacaagtatcaacagagtcagaggggacagtccttgatgagttacctctttgcagtcttttacaattggctgtatcacactgaggtcctgatgactgccactcatagcactgcttgtgcttttatttcttgtatgcccctttttaaaaggtgtctttccacctggcaaaggctcctgcgtaggtgatgttggagaactggacaatacaagtgtctacaatgcagctacttcagcttgaagtacatcaatttttccttgtccttcttttagctgtttttctgctgttgcctgcttgatatttgcttctctcaccattttatgagcttcctcaaatagactagctgtgagttcttcccaattcctgtccaagttgatctcgcacttttgaaagcctctcacattcttcatcttttaacttcagttccctctgagcttttgcgagttcttcttttaatcgttcatagcccttttctctaacttccaaaacagatgggcttcgtaaacgagacagactatcagtactcaacccgaaaatatcatcactgccatcgcaagcctctgttatagtagcaccctgtaaaaactctctctctgcattatagttgtcctttcttgtagttaatttagttaatccagctgtgactccagaggtagagcaaggggctgggtctgtaacatgaaagctgatactagatatttccgcacaatttaaacgtctgggggatgaatacacgggttgtgtaggaagttcagaaacatctaatgcatttgcctggataggtacagaggataaagctgaagggtgtggccggtagatgacacttggtgaggtagtctgctcttgagttcctgattcatacacaccaagaaggtccggagaagtaggtgaagcaaggtttacttcatggaagccttccaagggatcattagccatagcaaaagcctcatcataagataacctgaagaacccaccgcggccgctgccggcgctcaggggcgctcacagagccgcagagagcgcgtcccgaagcagcgagaaacggaggaggacggcgagccctttccgctacactccacggcggcgggctcactacgccggcagccgccgagggaacgcgggactgcgcctgcccgctctcgacgaattcgagctcggccgatttggcctgatnnnnnnnnnnnnnnnnnnnnnnnnnnnnnnnnnatgcgccgccaccgcgtgaaatccaaggtcgccctatagtgagtctatacatca

SEQ ID NO: 448119 - DNA, 455 bp, Homo Sapiens
tttcacaaaaccggagtattttattgcaccaagatcttggcaacacgtggggctccccaggcccccggaaaggaggtgcagaggatgggacacagacctttgcacacacacaggtgcggccatgcaaccaggacgcggggcaggcaagtgagaggacctgggagaggtagctgctgtacacaggccccactccctccagctccattcccaagcacaaaattcaacagacccagatcctaagtcaaccaagtgactgctatgacaaaggcttgggttattgacatttacttacatacgtgtacaagacctagagtttgaactcgttttctgggcctcatctttcccttccctatctggttgatgactttggtggagggaagggacgtgactccacccaacagtgataaacgctgcagaaagtcatctcgtgctcaccactgcccaagagttaacga

SEQ ID NO: 448120 - DNA, 483 bp, Homo Sapiens
ttttttttcatggtttataataaagattttattaaaaaagtgttaaaataaataatacatattccagaacatcactgttctgagaaatcacttccctttagaatatgagttctagatggcagatctacttacaactgctctgaggtctttcactagctgatttataatcctatatttaaaaaaatctatagtctgcagtcttttgacatacttctcaagggtggatatgtggtggaatgcagactccatcaatatgtgtggttttgtttgctttttgtagcttaactgctgtttagaaatccccagaggaatatgattgaggccagagttacattggttcataaaattcgaacagttgaagctgtttttgttaattgctgggccacaaccagaaatccggatgatgggagagaaacacttctttaggataatgattaatttccataaagatgagtgctttaacaaatttcaatatgcagttgc

SEQ ID NO: 448121 - DNA, 422 bp, Homo Sapiens
acagaaacgagggaaaacactccctgatttttaatctgacttcgggtaacagctcaatgggcgtcacacacacttccagaccctgtggtgggaaaccctgggagcgggtggaaggagaaggacagagactcagaatgggggtggagggacctgaaatccaagacctgggttgaggtggaggcggaagggggcctgtcaggggatacattccaatggctcccacaggggagcagccagaggcctgggctccgcccccccaccccaggtgcctcaaagttggtgatggggcatgtgagatgctgccatccttcatccgctccctctgggtgaaccagggggcaggggttgcaggagactaaaggggcaggccctcttttgttaccctcccagccacttttaaggtttggggaaggggagccacc

SEQ ID NO: 448122 - DNA, 439 bp, Homo Sapiens
ccgggtctcccagccccgcgtcgccccccgccgatgggcgcatcaaggctgcagccaagcgcgtcacattcccgtccgacgaggatatcgtgtctggagcagtggagcccaaagacccctggagacatgcccagaatgtgaccgtggacgaggtcatcgtcgcctacaagcaggcctgccagaagctgaactgcaggcagatccctaagctcctcaggcagctgcaggaattcacagacctcgggcaccgcctcgactgtctggacctgaaaggtgagaagcttgactacaagacctgtgaggccctggaagaggtcttcaagaggctgcagttcaaggtcgtggacctggagcagacaaacctggatgaagatggtgcctcggccctcttcgacatgatcgagtactacgagtcggccacccacctcaacatctcctt

SEQ ID NO: 448123 - DNA, 1812 bp, Homo Sapiens
  misc_feature (749)..(772): n is a, c, g, or t
  misc_feature (1788)..(1788): n is a, c, g, or t
gggttgacctcggggggtcacttctcgctttttggtgcaaccatcctggcggcctggtgtccccaacccttgtttgggggtcgtcattgtcacccagcttcttctcgtcgattttgtccgcacggaggcgtgtgttctcgggccaggtggctcgctggccccctctgtatttctccccgcgtggttcccccgggaaatggtggtgtctctcttctcgtgttaaccctgttggggccgttttcccccgaggggttgtccaagcactgttccccgttggggttgaacaccccgggttgcccccctttgggaggccagtgttagagtttccggcctgcgtggcaccagttgcgcgcctcgcgcccctccgcggccgctgtcctggtgtcccacgggggctgggtccccctgtttggcggttcctgccggagctctcccctgttttcccgcggatggctctggggttcacattgggccttggcacagttggggggccttctgtgtggccctcttcccacccttctcttctcccccgaggttgcgaggaacagggggcttagccctctgaaggggtgtcacccaggcccgcgtgattgttgttgtgccacggagggcccttttctttccgagaaggctcccctggcctctcttttcgcccaggggtggcttggggcccctcccggggagctttcccacgcgggggtttttagagggcctctcttctccctcgtgttctagaggttttttgtggnnnnnnnnnnnnnnnnnnnnnnnngccagtttgatatcccagcgcctccttgtttgcagatgttaaggaagacgtcccatttccgttcctcttctttgtgaagaaataaggacttcacaaataaggctcgaggtcaggtgccaagtctccccctgccccgtcctgtccacctgagtgccatccgagtggtcctgagaggccagccatggtgcccagcttctccgcagccagagccgacagtgtttctgcagcagacccctctgcccagtgtggttctgtcacgggggaggccccgggcccaggccccccacccttacaggcccgagaccatgactcggaaggagggtggcacatgtctgtggcgggggctggcggtggggctgacgcaggggctgacacagctggcgtccacgcctccgatggatgggaggtaggcgtggtggaggatggggagctggagggacagccgacgctggatgtgttctggagagtttatatcttctataggatctttgcatgttcgagagggctctgttgtgttccactgtagctggggattttgatcgaggtgattttttaaaatggcctttcctccatctgtgctctcagtgaagtttcccaggttgaggatgtcattgagctcttggtagtggttctgtgttaatgtaggtggtcttttctggtgtgtcctgcagctgcatggtgacctcttccaagtctttatccagctctgtgatcttcattcgcaggcgatggttttctgactgtaggccctccaggcgggatgtgctggcttggttcacactggtgaccgaggtggacgttttagaatcttctttcttctgattctgagtgaactggaatcgcctgttctgcgttgctgcatctgggtttgttctcagggtgatgagcttcggcacgaataccaggcagagggtgatggtgctgcagaagatgatgaccagagccacgatgcagaactgcacattgggctggtcccgggtcaggaaggagacagcggccccgatgatgcacatganccccacgttgtagacactcatccc

SEQ ID NO: 448124 - DNA, 1379 bp, Homo Sapiens
  misc_feature (900)..(1092): n is a, c, g, or t
  misc_feature (1104)..(1158): n is a, c, g, or t
gcttaaaaaaacaaaaaaaaattttatttgacaaaagacaaaaaagttatttacagtagtttttgctcaaataattcaatgggacaactgtgcttctcctccaggtttatcttacaaccaaacccaagcagagtctgccctacccaacaccccattttacataatggggaaatgccaaccagaattcagcagcatggctccctcaccaccctccattgctcagtgcactgtggggagggaaaatcccacctcagcccaatacacttccagagttccctactacaggcatcctgcagcagttgcaccagacctgggctcactgacagggctgggatggaagaggctgggcaaatggcagcatcagttaacctggatgaagccatgttcattcttccccactgggcctcaggagggtgaggatccctgatccccctggggcacacggggagagggcacgggaggaagaagccagagggaggcaacacagagagcccaggaaacttgcccacctagagagagcaaagctccctctccttcagcgatccgttcacactcccacagcaacagatgggcgactcagaagttggggagcctctgtgatggcttcagggatcttcccagaaagtacagaacacatgttactgtctttctcctggctagacccacccaagttagtcagtatccaggaaccttttctccttgtgcctgacctggtgatttcaggaaaactaaaggctgtcgtcctgatctatcttttggcccagtgacactactcaggacaaaaatattttggctagcaataacctaggattagtgtttcttaggatatataaagatggggcatattgttgaacactgtcagcaatgaaacagcaaaagaggctgggcgtggtggctcannnnnnnnnnnnnnnnnnnnnnnnnnnnnnnnnnnnnnnnnnnnnnnnnnnnnnnnnnnnnnnnnnnnnnnnnnnnnnnnnnnnnnnnnnnnnnnnnnnnnnnnnnnnnnnnnnnnnnnnnnnnnnnnnnnnnnnnnnnnnnnnnnnnnnnnnnnnnnnnnnnnnnnnnnnnnnnnnnnnnnnnnnnnnnnnntgactctgtctnnnnnnnnnnnnnnnnnnnnnnnnnnnnnnnnnnnnnnnnnnnnnnnnnnnnnnntgggggaaagggaggagcataagaccaatcgttatctgttcactgggcaggggcttctgtaattctaatttaaagaaaggtgaaacaaagacaatcccagctaggaggcttctaacccttttccagccccaccttctctgaaggcagttcctccgcagcagtggacaccattcttgggtaacccaaagtttcctgcccctcgttttgattcgccacccagc

SEQ ID NO: 448125 - DNA, 159 bp, Homo Sapiens
ggagcgcgggaggcagctcaggcgggctgtgctgtcagccgccgcgctcgaggccacctcgggctcggcggcgcacgtgggcttcaggcgccgtgaccccaccaggcggcacttccccgcgacggcggccggggctggctctctgggacgcgcggccgc

SEQ ID NO: 448126 - DNA, 448 bp, Homo Sapiens
ttttttttcatgccttgaggaaagctatttatttccaagatatagactgtacttttaagacaggacttttcagaagcaggaaattttagttgttgccagagaggtgtgtcaaggacacagtgaaaggagccatgcggacatggggtggaaggctttgtccaacactgttacaacacttttgtaaatgagcaaaacatctttaaaaatccttataaattctttataatatgttacacatttagagacaatatttacaataaaagattgggccgagggagggaaagaaatctactttacagtaaatctttgcataaaacaagaggactgatagacgtgggcagcggggttcaccacctacctggggcttccctgggaatgagtgagggtgtgtgggggctggcctggtgattggaagtctatttacaagcctgggggagaagagggcgct

SEQ ID NO: 448127 - DNA, 553 bp, Homo Sapiens
ttttttttctcaactctttttattaagttagaaaactgataaaagcaacacaacttttggggaaagcaccatggcacgtcctttgtgctatgtgataagtgtgctttatctcaatgaagcaaccccacgggtccaggcaccctccctgcagtccccgcggccaggctcctgagtgtgccagcagagccgtcccctgggaccacagccaagtgccttcgggcagctggcctgacacaggcggggtctgctgggtctacagggtccaaggagccccatgcagccagtgccccatggcgggcgtgtcagtgggcaaaccctgcccaaaggtcccacccccaagaggcctccaggacccgcaccaaggcatgggggacactcgtggctgcttaagtaactggtatgtgcacagccccctccgcggccctaatcttgagccagccaagcagtgttcacactgcaggtgcctgggaagccccaagtttggacaccctgcccagtccctgtcagggcaccaacacccctccctctcaaatggtggcttgggagtgagcga

SEQ ID NO: 448128 - DNA, 531 bp, Homo Sapiens
aatttggaacatacaggacaatttattgaagtcaatctcaagcaaaatctgaaatcagtggaatgtcattaaaaacctttccaaattaatcctcacggaagcaaaaaacacattggaattccaaagtatttgtaaaataaaaaaggcaacatctcagtaaatataatgtacaaaaattatatgttcctaccagcacacacatcagtaaagaagcttaaatattacaggcaaccctaaatacactataactagtcaacaataagctatctatatacaggttaaccaagctttacacgtttcacactatgcaataaaacataggccaatcaacaaaatcctcaaaatattatatatcttgaagtctatgtggcaacatcaagtcattatacagtaatgccctagtggaacacccccagggaaaattaacactaatcccttagtgtcaagagcttctagccaagtcacagaaactcaaaagagattgactttagtgaatattgatgctttgttattaaagactcaagtctcaag

SEQ ID NO: 448129 - DNA, 476 bp, Homo Sapiens
  misc_feature (446)..(446): n is a, c, g, or t
gcgcagcgcgcggcgccacagatagggtgagcgacgcagccccatgagcaggccagcggcgcggcccaccgtgtggtagcggggactcgccacgtgcttgtaccacgcgccggagggcagcggcagcaggagcagaagcagcagcagtgccagccgcggccggctcgcgggagccccccgctcccctgggcgccacgccagggcgctcgcgtcgacggccgcccggcggggcgggccacgaaccggctcggctgggtttgggcgcgcagtggagttgggacgcccaggtaccggagcgcaggaggctggaggcgagccgtgggtcccctgcaggcccagctataaccgctcggtggccccgcctcgttccgccccctcagtaccgctgggctccccagatggggggagggacggagggaggagagggaaccctggcagctggcggnggacgtgggtacttgagcacctcactgagt

SEQ ID NO: 448130 - DNA, 264 bp, Homo Sapiens
gttaaccttacagcaagtaacacatgagttttaaattagaatttggacaacggcaaatgagatgaaaggcgaacaatccgaaagccggatcactgaggagctctgggaacgcgccgcgagctgaagccacacggggaactccattttgtcgggacagggtcggtcctggccgcctccagggagtcgggtagtttccgcggcgtggcccgggcctcccctgaagtccgtccgcctctctccgcctggcccagcggcgcggccgca

SEQ ID NO: 448131 - DNA, 459 bp, Homo Sapiens
tcagatcaagtatcttttggagcacagtggaataaaattagaaatcaaataccaagagggactcttaaaactattcaagtagatggaaactaaacaacatgctcctgaatgaactttgggtaaacatgcaattaaggcggaaattgaaaacaattttgaaataaatgaaaatggagacacagcatactaaaacctctgggatacagcaaagacagtgctaagaggaaagtttatagcgttaaatgcccacattaaaaagataggaagatctcaagctaccaccatacatcaaggaactagaaaaataacaaaccacacaaaaagctagcagaagaaaagagcaaagatcagagcagacctaaatgagataaaaaaatgatacaaaggataagtgaaacaaaaagttggttctttgaaaggatacacaaaattgacagcctgctagctaagttaaccaag

SEQ ID NO: 448132 - DNA, 475 bp, Homo Sapiens
ttttagtatgactcatttctttttcttcattcctgtcgcacatcttacctcctcctcactttgtgagtcaaacttaccttcaagcaacttaggcaatctctgtgtgtcctgagaaaatgacaatgacaatagcaggattgggaaaccagaaaggcagaacttgccccactgactttattaagttcagttcatgttcagtataacagtttagagcttacagatgttgcgtcgtgaccattgacatttaccaccaacctatgaggttggcaaaacaagtaacatcatcatcatttcccacttagagctaaaaaacctaagatttcagaagattcagtggcacatccagcagcccataccaaacaacaggcggacctgtggtgagatgctggttcctgactccaaaccttaactccttccctggactgaagcctctatcagcaggggtcagagagaatgtggttatgagcatcactaa

SEQ ID NO: 448133 - DNA, 697 bp, Homo Sapiens
gggaggcctgcgccagtggccagcctcccggagccccgacgtgcgcgccgcagcgccctcgtaggctgccccgctgcaccgcattctgcgcccgccactcctccacctgctgggcctgctgcgcccgcgcctctcgcagctgcgccacgcgggcctccagggctgccagccctgctttgcctcttgctgcagctccgactccagcgtgcccagggccgcgcccttctccaccacctggtaggccatctggaggcggacaggtgggcacggcggcgctgaggcccctccaggcctccagtccctccggggccgaaggcgctaagggagtcggctgctcccctgcccgcccccttcctgaaaagcaagctcaccacagaccagccggagcccctcctcctcctcctgccacttcaccctcagtgcgaccagtgatgggacttggtctgagtcaagctctgactcctcccaggggccctggtgggtggtgggagtgacactgtttggctccggctgcagcttctttgagaacattgtccagcagctcagccttctctaagagatggttataggccggcaccagcatcacaggaaaagcgccttttgcgtacaggtcccgaaaccgcagctgccgcacgatgtggcgtttccagcgcgctgcgggggcacacgggacgcccggccccgccatggccgcgat

SEQ ID NO: 448134 - DNA, 542 bp, Homo Sapiens; identical to SEQ ID NO: 61817

SEQ ID NO: 448135 - DNA, 429 bp, Homo Sapiens
  misc_feature (381)..(381): n is a, c, g, or t
  misc_feature (399)..(399): n is a, c, g, or t
gttttcaatttaatttattctatgcagtttaaagtgaaagttaaaacatcatacaaaccacagaagcttcatagtactgaccagttttaaaacaaaaacagtgaatgatcatttacacacattcctcatctttaattttacatcttgttatatatacaaaggtactattaaaacacgtaattctaattatttataaacctattgtcaaggcaggcaaggatgggcaatgcatcataggcaggaccacaggattatttccttcaaggattcacaggcaggcagtatttgggtgaatgggttatggcatagggaccaacttgggagggatcgtgtttaaacattccccattaaaacagggtaggcacatgttacaccaacaantggaaaatgttaactttnattggacatagggttaaaatgttactcttt

SEQ ID NO: 448136 - DNA, 1487 bp, Homo Sapiens
  misc_feature (24)..(24): n is a, c, g, or t
  misc_feature (39)..(39): n is a, c, g, or t
  misc_feature (91)..(91): n is a, c, g, or t
  misc_feature (111)..(111): n is a, c, g, or t
  misc_feature (139)..(139): n is a, c, g, or t
  misc_feature (251)..(251): n is a, c, g, or t
aaacccccagtagcaaatttaccngaatattttaccaantttacccagtccctgtgacacaaactgtttcaaccctttccaagatactgtnccataaaagttcccacatcnattgtgaccctggctcccttcaaccccngagaggctcccacaggtctttgggccaacgttcaaacaatgcgaggcccatgtgaaaagtccaatgacttcatccttcagtccccatgaattattaatactggagaggttantcttagagattttgtcaatgtttgggaatgcatcaaaacagtaggtcttccttggtatcaggaaaggcaactcgcattcccgaagtcagaggagaatgaagaataacagcagcactctcatatcgagcagcaagatccacagacggtactgtccctatactttggccatatataatcacattttcagggcgaatgccatatcttgtcctaagagcaagccaagcagcttcaatgtctgcatagaggttcttctctgtgggtttcccggaactggcaccatatccagaataatcatatgagaatatattacaattaatccgtgatcctagtcctatgtaaaagctgctcatttgaccaagatcaacagcatttccatgtgagaagagtaaagtgtatttcgcattgggtgaacaacgtacaaacatacaagcaattctgttgcctttactggttctagtcatgaaacactcaatagcatctttttctctagaagaatactgccagtctgctcgttcagacagatgtaaagtccaacggcttccgctttcatcacacatcagtgtgtaagttggatcaggtggcaaaaacgctaattttgaagcaatcttccctggacaaggtggacagcagaagaggcaacatagctcactaaatgaaagattattcatgctctgcacctgagcggcccgggccgaagcgccgggcagaaggggtcgagagagaaccgcagccgacgcgctgtcctccacaaggcgagatccgcgctccgggcgccgtccgactctctccgcctgcagactggcccgacagaggagcggggaccagggctacagcccccggcgccggggcgaagaaggacggcggcgccccaggggccccgctcacgctcccgagtctcgcctcgcgccggccctgctcctccacaagagctcgcgttctgctgactaacggccccggtgcggggcgctggagcggccgccgctgcccgtcggttgctctcgggcctcacgtcccgcgcggccgtggtcgcagccgccgccgccaccgcctccctttctggcactgcagacgccacccagacctagccaggtcttccttctctttaatcctgctttctttgctcctcctcagcctgccaagcgcgaggctcgttccggtagcgggaggaagactggaggggaacggaggggacgagcacaatccccactgagccaggagttggccaccgactccgct

SEQ ID NO: 448137 - DNA, 268 bp, Homo Sapiens
aatcgagctcggcaccgtgtatctaacattacatttttaatgaaaaataactatttgccaaaacaaaaaagaatggcatcattctacatttttgcaaatatgtatagcggggctcattaggcaattgcctggactctcatcccagtccacttctatttattagctggttagcattgcagcaatcatcctcattctaatgtatccattgtccattgctgagagaaagaaatgtatgaactctacctaatgttggtgagcagtgtgcctt

SEQ ID NO: 448138 - DNA, 506 bp, Homo Sapiens
tttttagacttcataacaaaaaacatttattaagtagccacaatctaacaagccctgctcacctgcctcttctccttcctgtctgggagggggctccttggtgtgcagagccacaaggtgggggtccaagttggggagctcccagttcttccccataggccttgctgtcagtcagccatgggtcccttttggtaccagagacttgtgaccctggactcgaacctcttctgcccaagcactcgcctgctggcaactctggctggagggcttggcccagcttctggccccacagccccctgaggtccatgcagccctgtgccagccaggcctacttgagcacgagcatggcctctgtgccatccttggcggtcaagtagaggccatgtgtgaggtagtactcccgccgcaggaaggcatagaagtaatcagagatgagcaggatctggggggagagagagggtgtgaggcgctgctgggtacctccccctaaacccaggatccctgaa

SEQ ID NO: 448139 - DNA, 403 bp, Homo Sapiens
cgcggacctgtcagagatacagaggttgtgggggcgggagacagaaagagagagagatccagagaccgagtcttacgttgacacgcagagagaaagacgcagagacagacaaacaaacagataggagaggctctccaggaggccggggggcccactccgcctatcgctcccctcggctacgctgccacttcaatgccccgcaggtcgcgagctgctgttctttcgaaggcgtcggagaaccaggggcgtcccgcgccacctctgactcggagcagcgccgagcactgacgctcccgcccttgggcaaggacgccagtgcgcccgcgcgcgtccctctgcgcggcagcccgtcgcgggccctcaaggggaagcccaggccaggatggccccgggtcgcgcggtg

SEQ ID NO: 448140 - DNA, 569 bp, Homo Sapiens
cagcaacaggagcccggccaaccgcgcgacccggggccatcctggcctgggcttccccttgagggcccgcgacgggctgccgcgcagagggacgcgcgcgggcgcactggcgtccttgcccaagggcgggagcgtcagtgctcggcgctgctccgagtcagaggtggcgcgggacgcccctggttctccgacgccttcgaaagaacagcagctcgcgacctgcggggcattgaagtggcagcgtagccgaggggagcgataggcggagtgggccccccggcctcctggagagcctgagataaagaggacaaagggggacagagataaaggccaccagggcaccagccggcaggctccagaaacgctgcgtggcagtagccctcaaacgcccggccgggcatggggccagacgccccggatccgggtttgcaaacgccccaggatttgcgtacatatgctcctcccggatataaagccccaaaccacgccacttcttaggaaaaactaaaaccacactaactgtagaactccacctcctcttcctgtctttctgctttattctctccgcc

SEQ ID NO: 448141 - DNA, 384 bp, Homo Sapiens
acgtggccatgcggtggtgtgcaggcatagtgtgggtgtgtgtgtgcttctacttcaggtgtgtaaatacttggcacatacttgcctatgtgcacaggcatgtatctcaagtgtgtttatacagatgtgtctacattgtgttcataggtgggtgtgtgtacacaggtagatgcgtacacattgtgtgtaatgtggatatggggatccatacattgtatacatatacaggtgtgtgcaaaattgtgtgtgtacatatacagctgtgtacaaatggacatgtgtacatggtagtgtatgggtagagatatatcgtgtacatgtaagggtatatgtgtaagtatgtatacacatacatatgtcatctaggtgattgtgaacacagca

SEQ ID NO: 448142 - DNA, 152 bp, Homo Sapiens
atggtagaatgatgtaaaattttatttctattatccaatgccaaaggacaccccaaatggttctgaggataccttgggcaggtgccagatttggggaggcgagggggagggaatcaatgggactccagttcgatgactgcggttctttactt

SEQ ID NO: 448143 - DNA, 196 bp, Homo Sapiens
tttttgttttgttgcatttgcttttgaggtcttagtcgtaaattctttgcctaggtcagtgtctgaaagagtttctaccaggttttcttgtaggattttaatgatttcaggtctttgatttaagtttttgatccactttgagttgatttttgccccctggggaatttaaatatgtaacccaatcacttttattcct

SEQ ID NO: 448144 - DNA, 336 bp, Homo Sapiens
gtgtgagctactgcgcctggcctggttactttcatcttcataaagaagaaactgccttttggaagtagaataggtgcctctggccccccttaataattcccactttaaaatattccaaaacccccacttccataactgggctgttgtgcagtctcttccacatttggagtgaaactgggaagcacagcgggtacagctatcagtgaagctgtattgccccgaggctggagatgaagaagaaaactaaaattaccatagttttatgttctcagacagcatatatagaccatggctaaatattcaagaggaattaaaagagatggtaaacctcgtgcc

SEQ ID NO: 448145 - DNA, 582 bp, Homo Sapiens
  misc_feature (44)..(64): n is a, c, g, or t
tgggatttccctcactaagggattacgcttgcggccgcataggnnnnnnnnnnnnnnnnnnnnncacttattctttgtcttgttcttccattggaatgaagagtccaccatcttctatctcttcctcaggttggtgaaacagagtcctgagtggcttttcttgaggagaggcacaaacatctggctgggttgatttcctgggctggcttactggttttgcagattggctgcctgatggcagggaaggtatctccccttcagaattcatttgaggtttccctccttcttccttgacttcttcactaggctctcctgaaaaaggctcctttagggtaagatgatcacatctgtcttcttgggtaactggcccaggcctgagtgtcatttttttccctctctttgagccagtagcgtggagttttcctttaccaatgtgtatattaagggggtgaaaagactccaaggaaggtagggtgattccctgagagatggccacatcaacaccttctagaattggtacatttgtgttctgggtgagcattccagagctcagagatgtatcctccataccaagctgatttc

SEQ ID NO: 448146 - DNA, 624 bp, Homo Sapiens
ttttttttgcaataaatgcccatgtttattacaagatagaaacattaaagatttcttaggcaaaagggcaacaggtatgaaagtattcacagggcgccaaatttacaacagcttgctccaggcgatttacgtgaatcctggcctgtcccagcatgaggccattgacaacctggcgcctctgccaagcctgtgtccaggtgcctggcatgaccaggcgtgatgcccaccaccacagtccctgctgcatctcagaggccggggacctcccacacaaggatctcgttgcgggcggccgtgaagagcagcctggcggacggtgtaaacctgcacaggtgcactgcgttgtcgtggccggcaaagtcttgggcagtccccatggcacagtctaccagcctcagcatgcactcagcaaagccaacagccaggaggtgggtcccgggggacaggctcagggacatggcaaaaaagggcagtggtatcttctccaccacctgcttctggcagaggttgtagatgatcacctccttgtaaacaccggggcccacgtacatcaggagcgccccatcccaagggcagaaggcagcgagggagggtggcaggtggccctgagtctcccgtgggtgg

SEQ ID NO: 448147 - DNA, 433 bp, Homo Sapiens
  misc_feature (402)..(402): n is a, c, g, or t
gcaataaatgcccatgtttattacaagatagaaacattaaagatttcttaggcaaaagggcaacaggtatgaaagtattcacagggcgccaaatttacaacagcttgctccaggcgatttacgtgaatcctggcctgtcccagcatgaggccattgacaacctggcgcctctgccaagcctgtgtccaggtgcctggcatgaccaggcgttgatgcccaccaccacagtccctgctgcatctcagaggccggggacctcccacacaaggatctcgttgcgggcggctgtgaagagcagcctgggcggacggtttaaacctgcacaggtgcactgcgttgttcgtgggccggcaaagttttggggcagtccccatgggcacagttttaccagccttcagcatngcatttcaggcaaagccaacagccagggagg

SEQ ID NO: 448148 - DNA, 444 bp, Homo Sapiens
tttccaggaagacaacttttatttttcttctttacatacttattttgaaatgattacctagattaaaaggaaacaagattttaaaagcaaagtatcccttttattataatttttttcttttacataacttttaaacctagatcaagtaaccagctatctctcatcacaggaaaagggtcctgcacatttcaacaggcaaaaagtctcaggagatataaactgccccattacaatttcccgattttcttgagtatactggaaaattgatagaaagaaaggcaggaaactagccctgcagcaaggctgtaagacctcacttaggttgttggtatatagttagttgattttcttcctctgaacaggtacaagggaggtccaagtgctctatgctgatgttttctctgctcattcccaggactcccagccagtgtctgactaaaccct

SEQ ID NO: 448149 - DNA, 947 bp, Homo Sapiens
  misc_feature (64)..(64): n is a, c, g, or t
  misc_feature (219)..(219): n is a, c, g, or t
  misc_feature (271)..(271): n is a, c, g, or t
aatgggcctggtgttttaaaaaaattcccaaacctggaaaaggaaccttgaagttttgggggcnccttgggtaaattaatttgggaggaagaaaacctgaaaaggccaaagggatgggtttttaaatccccccaaattgctaaagtaattgggaataaagagatggattgggcccaaggagttttaggttcttctcacctcacccaaagacaacgtgancccataagacagggggccctgcttccttgattcatcttcccaccaaagtctnaacaggaggtttttcactatttaaaaatcttagtaaagcaattgatgacaacttcaaaaaagaaagaaacacagaacatccctaaatacaacgtcttgtttacatccaatagacttaggtctccaaagaagcctcctttttgttgtattatttcctttggctctgaaaagggacagagcctcctcttagctgaagctctccattcacagtacctcagtctttgctttttcttctaaacagactcaccctttcgcatagtttttgctttaacaaagcaggattgtcaccaaggtccacattgacatgagagtctttagatgaagcttgttttctaacttgctcctttcttctcccattccttggctttctggagtacagtgcctttgcctgtgaccacgaccgagagaggcctgttcttgagtgtggttgcagagttgactggggtacagtctggggcagaggcaggtgtgacagctttggggcgggggctcacattctccaggtgggtggtgtccacggtggtgcctaacgtcacaggccctgcctcagccttcttcaggttgtccttcacctccatgatgctgagctccaggtccacgcgcctgctctcctcgccccggcactcctcgtcaatttccttcagcttctgctcccaggctcgccaggacttccttgt

SEQ ID NO: 448150 - DNA, 564 bp, Homo Sapiens
tgtcagcaatttcttgatctcctggcaggggatgaagaagaacatgcagtactattgtgtaattactttctgtctctgggtaagaaggcctggctgttgatgggcaatgctattcctgaggtaagaccacataggctgcctttaacagaggagtatagttgtctaatcgagttgtgtgttccagatcacacacaggacatattttcataacgatcctttgggttgctaggaaagtggcccacagatgccgtaacgggcagagagaactaccagtgataagacatgaaatggttttcagtggtcctcagggccccatgcaacacttcagattattttttggcaaacccgaaccctttaccatccaaagcccccacctagctctgtccttttagtatgggcctcttcccagccatgttcccaagaattcagattcccttaatgatgtggtagtcttcatgctttgcaatgaagaggatccaaaggagtgtgtgtggtaaggttagagatctctcctttcatgcctactgcttctataggtatctgctgctagcctggcatgcaaag

SEQ ID NO: 448151 - DNA, 1024 bp, Homo Sapiens
  misc_feature (65)..(74): n is a, c, g, or t
  misc_feature (199)..(199): n is a, c, g, or t
  misc_feature (306)..(306): n is a, c, g, or t
  misc_feature (438)..(478): n is a, c, g, or t
tggacaaaaccccccgggttttatgtgggcgcccgtgggtgtctgcccatttgtcccccctacannnnnnnnnnccgcgcgcgccgcccgccaacaagagcggaaagggtgttctttaaaaacaaaatcttttcctcaaagaggggcgccacaaggaggcgcgcccccaacacccagagggacgttcggagcgcagtgntggtgagacccgccaagcggaatctgcggcgcctgctacccggggagggtgtggggtacctgggggttaattttgggaagaaagggttgtgtggaaaagggagggcnctcggcggggagacaaagggttgacttgctcttcggaaacttttggtggggaccgtttggatcccatttaaggagacggggagaattccctccctttgttttttttcttcctccggggccccataggagggnnnnnnnnnnnnnnnnnnnnnnnnnnnnnnnnnnnnnnnnngccagccagaatgaaaggaagtttctttttccttgccaattgaagacagccactggtatgacttgggtttttcgttttgcacccccttcccattggttatacaggacatgggaataactgctcgagggcttggttggcctttacttgagactgattttttccctgaggccacatgatcttcagagattgcaagacgcctcaaaacatcagccaaagccgcctttagcacagtgatttcatcttcttgttgctgaactcgtgactcaagagctgacaggcgatcttgaacatcagaagtacttgcagcagaaatactatcatcgagactgccggcgaaaccgtccatcttgcggggaaagcgccgggctccgggcttagaggggcgggcacttcattcagcggaccgacagagtggccgacgctgagcctgacccgctcgttctctaggtcgcccggctcggctaccggctcccgcctccgtcgtccgtccgttcgccctggggtagtaagccgcggccgcccgaaccacttccccgtcacgttccc

SEQ ID NO: 448152 - DNA, 465 bp, Homo Sapiens
  misc_feature (412)..(412): n is a, c, g, or t
ttttgtcttaaacaacagaaatttattgctcgcagttttgaaggctgagaagtccaagatcaagatgctgttagatctggtgtctcatgatgacctgcttcctggtttgcagatggccatcttcttcatgtatcctggatgtggactggaggtgatgaggctccattcgttgatatcggaattgtagctctgaactttgtcataggtgcagcttcctctgtagccacagtggccaccaatgacgtagataacatcatgtaagacacaggcagtagcatttcccacacctttaatcatgtttgcaataggaatccatttctcttttaaaggatcatagaactcagcctcttctgctggagccccttttctgtaaccacctaaagcatagacacagccacccaaggtgactgcnacagtggtaatacctggcattgagcattggcaaccttctgtccattcatcact

SEQ ID NO: 448153 - DNA, 559 bp, Homo Sapiens
  misc_feature (529)..(529): n is a, c, g, or t
ctctgcgggtgagcactgtgttgtactgactccctgccctacctgatgactttagcacctgggtatgaattccacacatatttggttttgagctttataaaaatggcatcatactgtatgaactgtcttgctttttcatcccacgttgtttctgagaggtgtttgtgatggagcacagggccacggtgcccatgcattcctcaatcatttctccagtcttctgaggatgggcttctgggttgtttgcagccttttgcttgtcccagtctcctagtttctccactccatccgggagcatcacgtttgcaacaggcagggcaggtggtgcatcagatgtccaggacacagtcatttgacacccaagaaaggagggcctggggcctgcatcaggccatggctgagtgggactttgccaggctgtctccgcacccagcgacaggactgtgcgtgctgctgcttcttttgtttcctccacttctgttccctcatccagagagggcggaagagctggaaacagaggctttgtcanggaataaggaagcccacctgtgtggtccca

SEQ ID NO: 448154 - DNA, 1344 bp, Homo Sapiens
  misc_feature (71)..(97): n is a, c, g, or t
  misc_feature (210)..(388): n is a, c, g, or t
tggctttctgtgctccctttctgtcactcagcacgtctttaaggctcgtccacattgtggcatgagtcacnnnnnnnnnnnnnnnnnnnnnnnnnnntggccttccgtgctcccttctgtcactcagcacgtcttcaaggctcgtccacgttgcggcgtgagtcacaatctgctttctgtctctgtggacctgtggccttctgtgctccnnnnnnnnnnnnnnnnnnnnnnnnnnnnnnnnnnnnnnnnnnnnnnnnnnnnnnnnnnnnnnnnnnnnnnnnnnnnnnnnnnnnnnnnnnnnnnnnnnnnnnnnnnnnnnnnnnnnnnnnnnnnnnnnnnnnnnnnnnnnnnnnnnnnnnnnnnnnnnnnnnnnnnnnnnnnnnnnnnncctggcctctgaatggtatggaattggatattggtggaagaagagtggataatggtgtcacaacatctttcatgaagaaccggcaggtgggacgaggcctcaccttcctgtcactggggtccttcacttcaccttcttccaggtcatcatcgtctatttccccatcatcgatttctcccatcatcgtcctctttcttttttctccttggcagcctccagggattccttttctcccacactctgaacaccagccttcccctcctccctgggagtgccttcgcccttctcctcatcatcctcagcccccgctttctcagcctcgtcctcctggacggcgggagctggctcctcaggaacctcctcatcgtagtctagctcatgctcatccagctccctggtgactgaggaggcctcatccctaaggtcgcttgtccggtcttcctccccttcgtccccctcctcctcgcagggggagctggtcgggccccggctcagctcattcacctctgagtcctggtcttgggatttaggctcacttgcccggtcctcctcgtcggagtgattatcttcctcctcctggctcggccccctggctgcactttcctcatcctccagatcagaagccctcacccccgccccagtcacaaatcctgatcggaccacgctgtccctcagaatgtcatcgtccgagagtccctgtggctgctcattcatcctctggagagtgaggatcccgttcagggctctcggccacatccatcggtacccacggttctctagcgctagggcggagaggaggccacggctcaccctggagtcggagcaggcgtggagaagacgtcgccttggccacattccgcatctgtcacaggttctggctccaggctctacacgggcggaacaaacgggctccactacccgcgggggcccctcgtgccgaattcgccacccaggcc

SEQ ID NO: 448155 - DNA, 853 bp, Homo Sapiens
  misc_feature (240)..(240): n is a, c, g, or t
gggcccttccggttttttcctttttggcccccctttagggctgggggagcctctcccattccggttctagccgggaccttcaaagccccctttttgtttttccaggggcctttggttttcctagggtaagggggttttccggggttcccctcaatctgggattcgtgaatgtcccatcttctgggggaggtctttcatgggctttcttttcatttccggtttatttctattctttctggntaatacaaagaccctcagttatttgctgttctgcctcagtcttattttggcgtctggagcgcagggatattcccttattttcagggaccgagtcttgtaatttgtgttcctctttgttggttttcatgtcgttgctgttcagctcttccgcaggttcaattctttttgcagaagtcctcaaacttctcttcatgatgaccacgggttcggatgatttgcctcttgccctgggagcaaccctctgcttcttgctggctggcagctcctccacaatttcctctggtgctggcatgcagcgcagcctcttggttcccgtgacgcttccatctttgccacctcccctcttgaagggcagtgggggcagggaagtgttgcttttgctttgtgattttacagggtctctggtgcttaccacgtctcccacgggttctactttaggggcccgaagaactcttctggatatttttagaggttttccactgtcaggtgtttgctttggagcgcttgtaaagctatcagcagcaccatttgccagttcctcagtgtggcctggtgtttgagagagctcttggaagctggccagatcttccaggggttgggccttttccctagg

SEQ ID NO: 448156 - DNA, 447 bp, Homo Sapiens; identical to SEQ ID NO: 61958

SEQ ID NO: 448157 - DNA, 467 bp, Homo Sapiens
ccaaatacataagcttttactgtttttatattaggaaatcatacaggaccaagaaccgctggggtcctggccagccagggcaggcccaggatggggctccggggccatggaggcgaaggcacagtggcaggcaagggatgaggtggtcacaggtacacgggctgctcctggcctgtaaggaggcgatatgtggcagctggcatcgttttgatatgcacctcgccataggcctgggtgagcatctcgatgatgcgggcgtgtggcgtggccaccacactctgcccattgatctcaatgatgcggtggccgacgcggatgcccccacgctctgcgatgccaccacggaggaggctgcagatgatgccgtcctccacgcagaagcccagctgctcgcgggcgtggggccggtggatgatggcggtggtgacgggagggcagtggacaatgctgagtgtcaccgacgtctg

SEQ ID NO: 448158 - DNA, 912 bp, Homo Sapiens
aattttccctaaggcagagaacttcggggagaacttttggtttagatgccacaaaacgggttaggctgttgagcaaaatggaagggaatacgggaccttctttaaagcaacacccgttcttggagtcccgtcaccgtggggagaacctgcaccagcagacgcctccgaagctcaccgcttacctgccggctatgtcggaagacgacgaggactgctaatggcaattatgacaatctcctgagccagtttggctgcatgcaggtgtcttcgtcctcctcctcacactccctgtcagcctccgacacgggcctgccccagaggtcaggcagcaacatagagcagtacattcacgatctggactcgaactcctttgaactggacttacagttttccgaagatgagaagaggttgttgttggagaagcaggctggcggaaacccttggcaccagtttgtagaaaataatttaatactaaagatgggcccagtggataagcggaagggtttatttgcaagacgacgacagctgttgctcacagaaggaccacatttatattatgtggatcctgtcaacaaagttctgaaaggtgaaattccttggtcacaagaacttcgaccagaggccaagaattttaaaactttctttgtccacacgcctaacaggacgtattatctgatggaccccagcgggaacgcacacaagtggtgcaggaagatccaggaggtttggaggcagcgataccagagccacccggacgccgctgtgcagtgacgtggcctgcggccgggctgcccttcgctgccaggacacctgccccagcgcggcttggccgccatccgggacgcttccagaccacctgccagccatcacaaggggaacgcagaggcggaaaccttgcagcatttttattta

SEQ ID NO: 448159 - DNA, 863 bp, Homo Sapiens
atagggttgacagtatgttagtataagcagatttaaagcattcttctgtttctgtgatagagaggggctacaaagcggatctggcattggaagccagcaaactcacaggccttgtcaaaggagacagggtgagagccattcaggatgtcatctcgtgcctgcacatacaggaggttcagctgtacagggtcccgggaatccacattctggtctgagtaaaagaacttcctccgcagcagcagcgtctcgtgctcctctacaccctgctccctcagtgtccgaccatggtccagccagttcaactcatcatctgtgtgcaatttctgctttagtttctccatcttcttttcatctcgcagcaatgtcttgtcctttcttaaggtccctgttatttcctcctttttctcttccatcagctctcgaaccaatgaatattcatcatgattggtgatgccaatgcgggcacagatggtcatgagcatgtcagtgacagtcttagagtcatccaccatgatcgtcttcacagttccatccagcatacggatcttcaggggtctctgtttcttcctgtactccatagtgtccccatttcggagcatgtagtagtccaaagctttcccagcctccagccatataccctttttggggtcatcatctgacagaaagagcccaaagtcgctgggaggaccagctggggcctctgggatccgctcacgaatgatgcggcaggcgtcgtacaccatggtagacggctcaaactgcatcgtcttcaccacattcccaatgctgatcttcagtgaaagtgcaaccatggtggcagcttcttttctccagcctggctatacctgcgctgcctggctctg

SEQ ID NO: 448160 - DNA, 928 bp, Homo Sapiens
tccacgtgcgaaatatagtttaatgaatcagagtctggaatcttaagccccagaaactttcaggaaaaggcaagcagattcactgacccccacgtgtatctttatgtgtaatgaaggttttatgggaactgagggaagatggggagagaaggggcaaattaaactcctaagataaatagagctgaagactgagagctaatcagaagttctcagatgaaactagattcttgatattgctacaaaaggtttctttctgatctgccatcgcagtaaccgttgtggacgatcagcctgtactgcctggccaggcacagctcctcctgccgctgccttacaatcttctgcgcttctgggggcaggccgttggggtcccgggaaaacacgaaggagtagctgtcagcacaggtgccatcgaggttcaggaggcggcaggagtactgcacggcatacgtgtcgtagtctgtgtcgacgatccagtggtcatcatttcctttctggagaaaggaggctacgccccagtacttcatcttgaacttggcagggtcctcggtgtctgtgaaggtgcccaccatgtctgcgcacacgtcccagttattcaaaagacggactcggcccttggctgtggcgctcatctggccggtctcgtccacggagaactccgcgacgatgttgtcctgcagaaagaggccctcggggtccttcttggccatggcgtaccaggtcccagagaagcgagccttgtcgaagttctccttgactcggaagctgctcactcggcagtcgcgctccgcgcggccgctgcccagcgccgccaacagcaagagcgcccacacccacttcatcttgcccaggaatccgcccaccgggaggggaaccgcgcgcaagcctggccgccgcgtccgggcgcgcgtggagcgagggaggcccc

SEQ ID NO: 448161 - DNA, 438 bp, Homo Sapiens
cggagaggtggaagaaatgaaaatattttctgtctcttgcttgcagaagcaaatcagtctttgaggacttatgttttttctgtgtgatcacagtcagacgttctctctgaaatccccttggcacatatttaggatgccagactgcttgtagttttagtggttcaggccatcactgccttttgataatgtgtctgctgctgataatgatgatgatgccaacctcagtgacgaggtgtggtttgatgcagaaaaagactgcttacagtcttgctggagagatgccaagagccctgacgagacaattagaaaacataaatctattcaaaatggtatgatgcagactcaaagtgcaacagagattcctaagaaaagagaattgaagggaagttggcgaaggtttgaggaagaagcctgggcaacagagccacagtccatctc

SEQ ID NO: 448162 - DNA, 366 bp, Homo Sapiens
caggatccgcagtcctggccccaggatcgcaatattaaaagaactattgctttttttagtgccctcatgagggagaaatgagttcccctgagaacttgggggaaatactggagatcacccctaaattcgggtctttgattggtaaatcaagccctgagacccccagctgccacacctccagtggggtgggcagtgaaggggttcagggaagggagggacagtactatttaggaaaaaagaatcagcttcagatttggagagatcagagctagaatcccagttttgccaccacttagtttaaggaatgtaatctctctgtggtgcccaacccaccctgctgggggtagtgaaggttaagtagggtga

SEQ ID NO: 448163 - DNA, 1695 bp, Homo Sapiens
  misc_feature (102)..(102): n is a, c, g, or t
  misc_feature (218)..(218): n is a, c, g, or t
  misc_feature (237)..(299): n is a, c, g, or t
tgagtctcgggggcccttggttttctgtcccctgggggatatttattatttaataaattttttatataaattcccaggggaaatagaaaatataaaatctgnggggttggggaagaaaacgtgagggactcagcaggaagccagagctggagaggtccattcaggccaacttgacctcctccttgacccctttggcttctggcttctcctccttggtnttctcctcttcggtgactnnnnnnnnnnnnnnnnnnnnnnnnnnnnnnnnnnnnnnnnnnnnnnnnnnnnnnnnnnnnnnnaagttggaagagttcttgcggcccccctctccctcctcttcagaatcggagaactcttcctcacaggcaattcgtttgtcagaggagcagatcgagatgcgcttgtcagggtcgtcttcgtcctcatcgccactctcctcagggatggcgtcctcaggaatcgcctgcatttggaccccaggtgcgtgcggcagcattctaaggttctcaaacagtcgctgtttgatcttctccagggtactcaattcgtgttctggttagtcatattggaaggactgatgtggagcttgaaatctggtccaaagtattcaaagtagtcattgtatggaagctcattagggatctccgtatccagggccacagctgtctcatatgtccagcaccgggcaacgttacgaatggtgtaaccaccgcctcccagcatcagcataggcaggttaaagctcttgacaaattccacacacttggcgtgtcctttgatagttagattgaagcaacctaaccgatccccagatagggagtctgagccacactgtaagaccaccgcactaggctggaacatctccattactttggacatgaccggcttgaaaatggcctcataggactcgtcatcaatcccgtctcggagcgggtagttaacagcataatacttgcctttgccagccccgatatcccgtaggtccccagttcctgggaagtactctccatacttatgaaaggacacagtcatgacccggtccgtggtgtagaaggcctcttccacgccgtcaccatggtgaatatcaatgtcaatgtacagcaccctctggtgatactttagcagttccaggatggccaagacgatatcattgacgtaacagaagccagatgcctcggacttctttgcatggtgcaggcccccagcccaattcacagcgatgtccgtctgctgcttattaagtttcacagcacttgccacagaaccaccagtagacaactgacagaactcaaacaggccatcgaatactggacagtcctcaccaacgttgaatctctgcatctgcttgctgtactccgacatgttatctggacggatggagcgcaagaatttaatgtagtcatcgctgtggtacttggtcatctcctcagcattggctttgtgagggcgatagatttccatttttcggtagagaccatagttgagcagcaaattatgagtcatgcggattcggtgaggcttcattgggtggccttgtccataatagtaatttccaacatccccgtcgtagtagtaacagactttcctccgggtgccctgcgtctgcgccatcttgctcgcctcccgtccctaccgtcagtcggtccgtccgccctcccgcccgcggctccgctcagcgtccgacccaggggggag

SEQ ID NO: 448164 - DNA, 2114 bp, Homo Sapiens
  misc_feature (915)..(935): n is a, c, g, or t
  misc_feature (1828)..(1828): n is a, c, g, or t
ggttcacaaaacccaactcgcgtttcttttactgtaacaatatattccacaagcggttgtgttaatctgagcggatataccaacgcggatcggtaaggacgcgtgtgaggtatgtacgacggggcgcgtgtttgcgagagtgactttctcattcgtgtgtagagagaaaaataatcagagtgttagaggagggatcgggacaaggggtctgttgtgagttagttcagcgggagcgcgtgcaatacgagagccggcttttatacacagcatattactagatgagtaccaccacgacgtgtgtatgtgctggcgcacctatgactcgtttggtagccgactagcacgatgggttgatattacgcgcatgggttgagaatcacgtcgtatgcctaactgtcttcgcgggagctaagtagtagatggttgttagcttaagattgatgtgtttccatacaagtgaccaggggaggagtctgtagggcggggttgccgctcggtgatggtagtatagtgagcatgcgacgcggaggatggtagtgccttcgggtgaggggggtgcggatcgttgatgtgtcaagatgtgttttatcgacgccgggttttacccgtctgtgtgcatgtgccggtcgtgtggggtagggggtacaagtaagctgctgcgagagagaaatctttgccgtccgctgtgtgtgctaccagccccgatgttggtatagtttttattagtttggtgggggtgcgtaaagatggcgcaaggttatcccctgtcgggggatgtgttaaaaagggaggggcaagggcgccgggggatgaaatgagacaaagggaggggggtcccagtgctgacaaagaaaaatgggggaggtggtaagttggggcccccctgcagggattactgttggggcgggccgtgcnnnnnnnnnnnnnnnnnnnnnaatatgctttttcgtgatatatctatttattatagaaatgtaccattttattacaaagaggctcacaaaaatgaaaatagtatctcaaaaaggaaactagactagcaacctccacctgcagaattaggagaagacagacagagggcaggcagtgtttcttggctcacttgaggccagtgggaaggtacgaaaacagaaccaatctaaaaatggctgatgttactttaggagcctgaaaaaaacaggagatccttgaagacccagccaccccttctagaatgttcaataagggcacctttccaaagctactaagcaggcacttggcatttcaggagtttgtcttatggttgcataaaagtatccctttcacccagacctggcaccctttatggttcaaagttaagaacgggaagaatgggtggcaaggtggctcctggaagagctcacccagcacagctgccctgagctcggggccttggtttctgtccctggggatatttatatttaataaatttttatataaatacacagagaaatagaaaatataaaatctgaggggttggggaagaaacgtgagggactcagcaggaagccagagctggagaggtccattcaggccaacttgacctcctccttgacccctttggcttctggcttctcctccttggttttctcctcttcggtgacttctttcttctcctctgggtctttctctttttcatcctctgttttgactctcttggcttttttgaagttggaagagttcttgcggcccccctctccctcctcttcagaatcggagaactcttcctcacaggcaattcgtttgtcagaggagcagatcgagatgcgcttgtcagggtcgtcttcgtcctcatcgccactctcctcangggatggcgtcctcaggaatcgcctgcatttggaccccaggtgcgtgcggcagcattctaaggttctcaaacagtcgctgtttgatcttctccaggtactcattcgtgttctggttagtcatattggaaggactgatgtggagcttgaaatctggtccaaagtattcaaagtagtcattgtatggaagctcattagggatctccgtatccagggccacagctgtctcatatgtccagcaccgggcaacgtacgacgacacccagcctcgtacctagccgtagtttt

SEQ ID NO: 448165 - DNA, 253 bp, Homo Sapiens
ttttctcttactcattcagattatttattaagagcaaaagtcgggccatcccatcgtgtgatattgcaacatgaaaagtcacatacatactaaggagaccccacagaattgagagcctttcaacagtacagagccatagattacaaagttaaaatacaaatgatcccccagatttggcaggaaacaagtacaatatgaggaggcctggaatggaagggcacttacttttcaataaggcagttacaaaatgggg

SEQ ID NO: 448166 - DNA, 377 bp, Homo Sapiens; identical to SEQ ID NO: 178307
  misc_feature (206)..(228): n is a, c, g, or t

SEQ ID NO: 448167 - DNA, 277 bp, Homo Sapiens
aacacttaaagacataaatcacaggtgcaaagccatacctgggctcaaaaacctccaagagaacgcagcctcagacccacccaggggccaggggccaggctgtttgcgagaccagcccaggcgggacccaggcttgcacgggcaggtacacgacattcttgggcatacgcagcccgcctggccggagctgtgggagtcctcagccccaagacccagcaggcgtctgaggcctgcccactaaggaggaggagtcattgctgccatcattatcaccccc

SEQ ID NO: 448168 - DNA, 1227 bp, Homo Sapiens
  misc_feature (34)..(34): n is a, c, g, or t
  misc_feature (50)..(111): n is a, c, g, or t
ggagcctgaagggtccatccatgtagaaaaaganccctcaaaaggtgccnnnnnnnnnnnnnnnnnnnnnnnnnnnnnnnnnnnnnnnnnnnnnnnnnnnnnnnnnnnnnnggtgaatagagagaatggagttaacaatgcaaaaagaagcaagtcacatgcatgcagagcccaagcctaaacatccaccttcccctgctgaggagcaccacccaatttctactcttcctgaggctgggaggtgatttctgagtgggagatggggttggtgaggtggttcctgaattccctggcacatatccttgaaataatgtcacattgcttgagctaacttgtagcttttgagtctttttatgtttgtccccacttgagattcccttgcaactaaaagagcataactggaacaactagttaagccaataccatttgttaaaaataatgcaccattctaaatttctgtttccctaaccaaatctggcaaagtctgatccattaagttttaaaacttttctaagtttaatgttgtcactgtatgtttacatattcattggtacaatttacatcaagttttgtacttatccatttttgcaaagatatgtacacaaagatacatatccaataactgagaaacaagtgaaacttctgatctatactttcaggtttgttcgatcatgatacttctgataaggatcatcaacgtaccagtttcgcctcttccagaaggacgtcgtcattttatctaagagtttactctgggttttattgcagaatacaaattccctcaatcgcttcttccttgcaggtgtctttttccataattttttcttatagccagcctttctcctcacccaaaggccacaatgaagtcgaagaaacctatcgatgacagctttcacggtctttctcttgccttttcttgcactgaagtatgttagagatctgactggcagcttcaggacacttggaagcacgggggccattctattaaggatcactgaggtatgcccacatgtcaggtttctctcagatgtggtaagtctgggagtggaggaaacaactggtgtctgaatatgactaaaacgtccagtggacaatgcagaaataagagaggcattcttgacacagttgcggtaggttgaagatgccaaaatattcaggggccgtaggattcctgaagctgctctcactgcaccagcaaaggcagaggcagccatcttcaccttcccc

SEQ ID NO: 448169 - DNA, 643 bp, Homo Sapiens
  misc_feature (18)..(18): n is a, c, g, or t
  misc_feature (26)..(26): n is a, c, g, or t
  misc_feature (43)..(43): n is a, c, g, or t
  misc_feature (52)..(52): n is a, c, g, or t
  misc_feature (81)..(81): n is a, c, g, or t
  misc_feature (122)..(122): n is a, c, g, or t
ttgatggccaggaagaanccagcacnggttaaagtaactcccngcattgccnaccagggggctgtgcacctgctgacctcnggtccacagtgagccattgcccagtgacggagcaagttgancttggttctgttgcgaagcaaatttggaacttttctgtctcagtgtgatccacttaaccccacaggatcatttggaaccttgaatagctctgcttggacaatggggttggggaatagggttgtctttcctatgaaaatgccatctgtagaccttgtgagtcagccgtccagatgtttgcaggtgaattcctctgcttgacatcctccctgtcactttggaccctatgggagtgggcatctccacgcacctgtgtatgtgaaagtcattttacatttcaaagcagtgtgtgtttcttatttttatatttttaactctttattcttggatgtataaagtgaactttttggcttctgtaagtatgctctatgcacctctaatgttttatcatgtatttatatgttgtacacagtactggctgattctgtaaatggatgtattgtacagagaacatgaacgtctcttcctaattttacatcttcagcatcattgcattaaagtggtgtaatctccttctctaaaa

SEQ ID NO: 448170 - DNA, 990 bp, Homo Sapiens
  misc_feature (509)..(518): n is a, c, g, or t
  misc_feature (944)..(945): n is a, c, g, or t
  misc_feature (977)..(977): n is a, c, g, or t
tggtcagaaaggcaggattttaaagagtaaaatattctgcctattagagacttgaaatattaacttttagaaaggtatagattgttcccttgtgaaactgagttttgtataacctctcagtttatgtaaagaagcctgtatttcaaatgtgttgctctaatttgtttattgtagtgcatttcaaaattgtacaaatgtgtaaagtttgtgcttgtggaacctgctgctctgagtagctttactttccttaatttaatcctagcaattcttaagctattgcatgccccgttcatgaaaggatactttgttgggatgatacagcttaaacagtttggctctaagtctccttacatagagcttcccttaaatttatattaattttataatatatattgaatgatagctttacaaaaaacaaatcaatgaattgatctttatgaaaatgactctttacagtaagtaaaaaagggttatcacagttttggtaacttgcatgagttcatattggnnnnnnnnnncacctttcacatgttcttaatgactttaaaactgatgcgctctaagggcacattcagttgtatgctctgaagcagtagacaccatacagcttatgctttttatctgggaaacccacgaagcgcactgcagcctcagtaggactgcagcgccttcttggcctagagatggggtagcggacgctgccatccgccaaccagcccgcatcacagcggtcatatccgagaattttccaggcagcaaatatctggcccacttttgcaatctgagcaccatcattgagacaagcttgcaccgcttcatcataggtcagtttgtgtggggtggatcagatagtaaaaacggccattgaaattgggatgtaaaacagaaaacatcatatctgcttttatctttatcccaaattccgtagttcctgactcgggcannctggggttctgggccccacaaggctctttggncttttggattggg

SEQ ID NO: 448171 - DNA, 506 bp, Homo Sapiens
ccgtccggaattcccgggatcgcttggacgcagagcccggcccgacgccgccatgagcgccgcgctcttcagcctggacggcccggcgcgcggcgcgccctggcctgcggagcctgcgcccttctacgaaccgggccgggcgggcaagccgggccgcggggccgagccaggggccctaggcgagccaggcgccgccgcccccgccatgtacgacgacgagagcgccatcgacttcagcgcctacatcgactccatggccgccgtgcccaccctggagctgtgccacgacgagctcttcgccgacctcttcaacagcaatcacaaggcgggcggcgcggggcccctggagcttcttcccggcggccccgcgcgccccttgggcccgggccctgccgctccccgcctgctcaagcgcgagcccgactggggcgacggcgacgcgcccggctcgctgttgcccgcgcaggtggccgcgtgcgcacagaccgtggtgagcttggcggccg

SEQ ID NO: 448172 - DNA, 714 bp, Homo Sapiens
  misc_feature (163)..(202): n is a, c, g, or t
  misc_feature (585)..(585): n is a, c, g, or t
aaagaaaatactttattatgtcatgaaaaaaaaggcatcaaccaactagattcatacttgtttgaaaaaaaatggaaaatttattaattagacagtatgtgggcatcctgttccacatgggaatgagaagatgctataggttctctaagtattgcacagtctnnnnnnnnnnnnnnnnnnnnnnnnnnnnnnnnnnnnnnnntcacatgatattgggaaccatctcacattatgaataatctaccaagaaacatttaaaaaagaaaaccctttgtttctacagtagctttaagtttatagttcttggaatgactgtattccattgaagacatctcagtaacaggaagctgttttagcaatcccatgtgcaaatattaataaaaaatatataaaataatgcaattcatctcttgccttcaccccggcaatcatgacatttctgagaactgttttgcttgaaaatgggttaagctgtaagttttgcctgaagctccatctctgcagcccgtttgagtgcaacatccactagaagctgaaatccactgaagtcctggttgaggtccggtggagtaggggggaggtgtntgaaagaccactctgtgtattcgtactttgtccagaatttacagtgtcctctgggtacatgagagaagtgtctgtgaagttatgggccgtctctgctgtatatctggttttgtctacacgaccgactgg

SEQ ID NO: 448173 - DNA, 699 bp, Homo Sapiens
  misc_feature (110)..(119): n is a, c, g, or t
aagtgatgttttttaaacaccagcatcaataggacagaagaagacatctgttttccaattagctgtgtcagtagattccattcattgtttgtagttcccaatcagctttnnnnnnnnnngtttttcaaatttgcatacaagtcatctaaaatcagtaacaacttgatctaatttagaaaaatgaaagagtatcgttcactaaagcagatctcttttgggtagatggaccatcacaaaaggagctcttacatgcttttcccactcccatcccaagtccaccctcccaccaattgtattgtataaatcaataaaaagcaaaggttccagaacaactgaaagaaaaataattccaaactaagcagagtgaactttccattgggaatgaagacccatgggaaaaggcagcccagcccataactcctccctgctggaacacacaccgtaggtgtaggaactgcctgggaatcccattagaacacactgtttctcaggaagagaaaaagctgcattacaagaaaagttctcaggactttaggagttcttaggactgttatttcagagctatttattactgttattacagagctcttgttatttcagagctactgtagcccttgggcacaaccaacagaaagaggcaaagactgctgtttcctttgatgaggggaaagaggtccagtcccttccaaatgccccagg

SEQ ID NO: 448174 - DNA, 480 bp, Homo Sapiens
agggtctgggaggctggttggctccacagctgtttcacagacattttgtttaattcttagagcaattttgtaaaatcagtgtcatcattccccttttaaccgttggaagacatgagtctgagttgaagttaaagagaagcttctgattctaagtcaagtctctctctgttgccttcctccgggcaggagggctgtgatgtatcctggcgagcctgggggcgatccagtcttaggaggtgggaggcctgcattgcagagagcagaggtgaatgggcctcccaggttgagcttgtgatggacaagtagactggcacgggatgaggttggcagtggggagaggtaggatgcagtgcggggaaatgggcctttccacctgagaaaggcgagtgtgtctgcgtttgataatcctttgatatttgcgtatctgttattttcaagaatcacatttcacatagaaagccatgtgacagtttttaaatt

SEQ ID NO: 448175 - DNA, 295 bp, Homo Sapiens
ctctttcttcttttttctacttgtttgtttgagctttttgttagtgtcactttcatctgaagactctgatttcagatgactccttgtcagcggtaacccttcagaaacatgggctggagctgcttcagtttgttggctcagggacgttatggatccaacacaaaagcttgggttgctcagccagtctaactctttcctggagctcccgccatcgggagcctcactaagccccgcaaaggctgggaacagcgccatgaccacaggccgtacctccgttcttctctatagggatccc

SEQ ID NO: 448176 - DNA, 493 bp, Homo Sapiens
  misc_feature (443)..(443): n is a, c, g, or t
  misc_feature (448)..(448): n is a, c, g, or t
  misc_feature (458)..(458): n is a, c, g, or t
  misc_feature (471)..(471): n is a, c, g, or t
gctcataaacaattttattttttttctcagtatgtgcccttgaagattccaaaatgttggagtttctgattctcctgggatcaaaggtaaaagcattgtatggaaacactcaaccttggctcattaccctcctgaggagctaagtctggaggcctcagagagagggagctgacattcacaacttattccaagatgggtaacacagtgaacaaagaattagtaaaacatagactcagtctgtagagggcttcaaatatacatattctatatatataaacctgttatataggatttcaacttattggtttccttgtgatttgtaattaaagtacaaattataaagatgttgcacactgctgatttccccttctcagcccccctccctccccaacataaataacattacaaaggtcaggtgatcctaagaattttgtggtggaaanatttngttttaaaancaatccccctccncccctgcaaacacctctggggg

SEQ ID NO: 448177 - DNA, 629 bp, Homo Sapiens
tgtcttctgtccatggtgctgaagtttattcactttcaaaccactttcagtaacaggtgaggttctaccttaaaatttaatgcatggggtgggagaggcgaggaagtcaccatcaaaccactttatctacagttagcataagatgtgagaagtgttgacaggaagctgcagcttagatgggatgatcacaactccatggcaacaagatgacacgaatgcagcagagaccccaggggacaggagcctcttgcagtctgtccctaggcccagccctgcttgtcctccctggctgttatcttcggtaccggaagctgttacagcccagtccgctctgggctccaatcctgtccatcctgcccccgaagcagctggatctccgcaggctccgaggggcagtgagcagcgccctcagcttgctttttaggagggcagatcgatcagaggagtcccaggggccccgcccgagggcacctccatctctctgggctgggctgacttccccggtccagggaggcacctctaaggggagggctgagcagcccccgcttcttcattcggctcactgagcacttgtgggggcacgacctcatcttctaaaggcatcttttcttccaaatgtccagcaaatt

SEQ ID NO: 448178 - DNA, 506 bp, Homo Sapiens
tgtttttaccaaagatgtttttgcttcttttattgtgctttctagagaggagccatcaaaactcgatcaggatgttttggccgctcttgaatgtgcagacgtcgacccccatcagttcccggccgtgcacagatggaagagtgctgtcctgtgctactcaccctcggacagacagaggtatgtggggcccggacagcctgtcacccgcagggcagcttttggaaacttctgcagggtccagttccacttcatgcgaacctatcagtggcttttcccaacgctggcaggcccgtcagccaggctgtggatttgggtgttgtggctctctgcacacaggacagagctctggttgggtggaaaagctgaacgggtcagctcctgacaagctgagggctagaagggtggaagcagcagggtttctactcagatcacacaggattctccgggaaacccccatgagcttgactctcccagtgcccgcggtgccagggttcagcagtgcctct

SEQ ID NO: 448179 - DNA, 1995 bp, Homo Sapiens
tctgtcttcccaggaaggcctgcaaagactagaagaatatctcacacagcaggaaataggcaaaaaggctcaacaagaaacaggagaacgggaagcctcctgccgagataaagccaccacgtctggcagcaattccatttccgtgagggcgtttctagatgaagatgacatgagcttggaagaaataataaatcggcaaaatgcagctcgaaataacagcccgcccacagtcggtgcttttggacatacgaggtgcagcgccttccccttggagcaggaggcagacctcatagaagccgccgagccgggaggtccacacagcagcagaaatgggctctgccatcctctgaatcacagcaggaccctggcgggcaagagaccaaaggccccccgtggggaggaagcccatctgccacctgtctcggatttgactgttgagtttgataaactgaatttgcaaaatataggacgtagcgtttccaagacaccagatgaaagtacaaaaactaaagatcagatcctgacttcaagaatcaatgcagtagaaagagacttgttagagccttctcccgcagaccaactcgggaatggccacaggaggacagaaagtgaaatgtcagccaggatcgctaaaatgtccttgagtcccagcagccccaggcacgaggatcagctcgaggtcaccagggaaccggccaggcggctcttcctttttggagaggagccatcaaaactcgatcaggatgttttggccgctcttgaatgtgcagacgtcgacccccatcagttcccggccgtgcacagatggaagagtgctgtcctgtgctactcaccctcggacagacagagttggcccagtcccgcggtgaaaggaaggttcaagtctcagctgccagatctcagtggccctcacagctacagtccggggagaaacagcgtggctggaagcaaccccgcaaagccaggcctgggcagtcctgggcgctacagccccgtgcacgggagccagctccgcaggatggcgcgcctggctgagcttgccgccctgtaggcttggcgctgggctctcggtttgttcttcatttttaaagaaggaagggtcatatgtttattgctaaactgtcaaaaaggaatatattctgattaaattattactcctcactttgagggtgtgagaattttagaagatttaaatgttctatataacacttagatttctgatattttggaagaagttagaagttaatgaaagcaaactcagttaccaattttctggaaaatatccatgtggtaatggtagactttttaggtggcaatttctaggtctgaaatatagcagaggaaagggcgctgaggcagttgcaggcaggcagccctgtacttaccctgtactcacctcatccgacagacgctgtggatgaggaggggcttggcggaggcgtgagccccgatgtccctttgataacctgcactcaccaagatgaactatttgccgccctgtcttttcctgggttggggggtggcctctgatggttggcagagtgcctgttggttcgcccgtgggtctcatggttcagacagagggaggtggacggcagggatcagggagccaggagcgcgcctcagacttgcagcaaccattgtgatttgggttgttcggaatatttaaattactgatcagaagatgaaagtagcttttctcttgggaagtcttgcagcccgtgggagtgataccaggagcaacacagagctcagcagcggcgcccaggtgttccctgtttcctcagcacgtgagccttcaccgcctgcttcattcaggagccagtgcagcagtgatacaagtctatacattgttgctgttttcaaaatttatccctggagggcttttgttgaatgcataaatggattataccaattaaaaggttaaccggttttatttttggggaaacttcatttttcaggttggggggatatcctccctggttaattgccaac

SEQ ID NO: 448180 - DNA, 541 bp, Homo Sapiens
  misc_feature (17)..(17): n is a, c, g, or t
  misc_feature (78)..(78): n is a, c, g, or t
  misc_feature (83)..(265): n is a, c, g, or t
  misc_feature (271)..(287): n is a, c, g, or t
cccagtgggctggcccntggtggctcaatacctgtaacccccagcaatcctgcgaagcccccaggtgggcagatcgantgacnnnnnnnnnnnnnnnnnnnnnnnnnnnnnnnnnnnnnnnnnnnnnnnnnnnnnnnnnnnnnnnnnnnnnnnnnnnnnnnnnnnnnnnnnnnnnnnnnnnnnnnnnnnnnnnnnnnnnnnnnnnnnnnnnnnnnnnnnnnnnnnnnnnnnnnnnnnnnnnnnnnnnnnnnnnnnnnnnnnnnnngggttnnnnnnnnnnnnnnnnnccagttttggaaaaccagtgatgtttaatgtttaggaagtcagtctttgggagacttcatccatgaaatctctgcttggcctggccagaaattctctctagtttagattgacttggcaccactttggggaactgtcagacacatgcagacttacatccccaccacacaatcaattcactgatgcagaggagtgagttttgtgtttcttcacattccatggttctgggctggcacttacgaacatgacaaactga

SEQ ID NO: 448181 - DNA, 1042 bp, Homo Sapiens
  misc_feature (138)..(215): n is a, c, g, or t
ttttttctcattgcacaacaccaaattttaattatgtatctcatggataattatttcctgtcagtctttcccaactaaaccgtgagttccagtatgtctggcagcacgtctgtcttgttcttggtgtattcccattannnnnnnnnnnnnnnnnnnnnnnnnnnnnnnnnnnnnnnnnnnnnnnnnnnnnnnnnnnnnnnnnnnnnnnnnnnnnnaaatggaggacactcaagcctcatgttttctctttctgacacatacctgtgctccctacgaccccaccctcaccatcacacccttaatagtggagacttagtgtggtactggcttttcaaacaggtattaatgtggccctagacaaggtcatttccttcactgaaagtcatcgcctgagtttcaggtgcacaacggggatcatacctaaaagagagagaacctccacctctcatcctcataatctacggagacagtagttaggtgcatcatgtttgtctttctagcagcgtttagctccgagaacgccaagaccccgtccgcctggttcaggggcctgctcccatccacagtacccaggcttgctccaagcctggctcacagcaggagctcagaaacgattcgttaaataaatgaagccctgttctgtgcatttcacaggtgggaagcgagggtcgtgcgaggcgggggcagcaacctgccagcctccgagcgtattcttcagatgcaggcccgcctcccacctcagcccgcgtcccagatgccagccccgaatcccgcgcccgacaggcgcttcttgcacaaggaagcatcttcgcaggtgcagcccatgccctcgtcgcccgcgtcgcaattccaggtggaaaagcaggaggtgaaggaagactccctctgtctagtggccatgggcgtggaggttccggggagctgtgtccgccagacatggaagtggggtcgacgggcggtaggggacggcgctagtcacaggcagaaagcaggagaggaaagtagggctccacctggctcagctggcgcggctcagtccgct

SEQ ID NO: 448182 - DNA, 451 bp, Homo Sapiens
aatgaactcttccctttttttgtcccagaacaagcttctcgcttacatgccctttacaaagaaaatttccctggctggctgccaacggtttctctgcccacttccattttaagcaatttttatgagtgtcccatctcttctcaaacaaaggcagatggcaaaacttgctggtttacttttaaagaaaacttgacccagactgttataagctaagaagaggctttgggaagtcacatggcctgggtttacccatcaccccctgataagcactcacagctgattcccgtgcaaaccccagcatctcacactggtttcatatgggccataggaagcaccttccaaagtttgatgtgttcttcaacatctattcccatggcagatgacccattttgacccaaagggccccacagttctctttcggctcctgctagttctgcaaagcctcagcact

SEQ ID NO: 448183 - DNA, 1107 bp, Homo Sapiens
  misc_feature (972)..(985): n is a, c, g, or t
tttttgtttatgggcgagtcgattataggtatacatctggtgaatgagagtgtgaaacgggcaacagaggtcttggtgtagccgcttccagggtgggcggtgtttccccctgcggccaatagcagttgagggcgggagggctcataaataaaataggtcccacccggatttggggctttggttttaaaatttaagagaagtagcccgtgtgtcattgtaaccccaggagccgtgatatttggagggattgggaaaacccgtcgccgaaaaaaatatgaggggaagcccacccccaggaagtgggggagtttgttcattgcttctaatccaggctccagaggtttctaaattttggaacatgccagggagagcttttattggaagcaggaaggatttgaggggcaattgcgtggctgggcttgttcttttaagctaaaaggataaggaagtgcccatttcgggaggaggtttgtttcattttttaaaaaaaagctatgaggcaaattctagaggcttatatatagaatatttatggaagtatggtaagattagaaagcttaggaaataactacctgtcaataaagggagcaagtaaagggattcgcttaagtggctgcagaggacagtaagatcttttctaaccccagtgtaggcacaaacggcgaaaaagggagcaagaagaataaaaatggtgaggtgtttaacaatagcaaaatctcccttttgtcaacctattaaaaagggcaaatatgagagcaaaattctgtccaatttcactaagaattttatcctcacttgtttacttccagcagcaaagttaaacctggattctgatcccttgtgctgacttgtgttttaaagagcaggtgcctaggagaaagacgacgggggaagaagtggggcgtgaagctcaaaagaagcctcagtcagtgcagattccagagagaacttctgataaaaatgtgaggaagnnnnnnnnnnnnnncacacgcgcgcgcatgtgtctgcctgctctaatgtcagaagcgaaggaagatttttttcccccctcgagacagtcttgctctgtagcccagagctggagtgcatggcgcatctttgctcact

SEQ ID NO: 448184 - DNA, 1167 bp, Homo Sapiens
  misc_feature (356)..(399): n is a, c, g, or t
  misc_feature (508)..(516): n is a, c, g, or t
  misc_feature (663)..(663): n is a, c, g, or t
  misc_feature (1045)..(1083): n is a, c, g, or t
gtattaggggggagggccgacggcggcgcgagcggcggggtacgagagaccgcggcgagtaggatagtagcgtgggagaggacacggcgggcggggcggggcatatagatagagcgaaccggacgcggggctttttggcggtcgtagtctgcggcgggggtgagtaggtagagagccggcgccgtgtcatacggggatgagcgggggggatagcgcggcggaagtacgtgcggcggattcgcgggcttttccgggagcgcctgggccgcgataattgggggcgcgattcgtggcggggacacggcggttgaggcgagggtttgggtggggggggttatggttattcatcgtgagannnnnnnnnnnnnnnnnnnnnnnnnnnnnnnnnnnnnnnnnnnncgccctattgatatcgatagcgggtcccggctggtgtgttggagcgcggggggcggggcgtgtttaggcgcggatggcgtgcggacgacgatcgcctccgggttaaacnnnnnnnnnagacaatgggtgagggcgggattcccaggcagcgtagcggaaaggggacaggggcggcgcggtcagtggtttcgtccgaggtgcatcgggggaggggccgcgggggctacaaagctaaggctcgcaccgggccgatcatcggggaanacccgttagtgcgcaaaataggccagggccctttgtctaaagtctgaatcagcatttggatttagccctaatagagcctgttcatccatcctcgctgttatacttgtagttttctggttgtaataggcgtgccctctgatcccacagaagaatttataaacatcttccctatcactccatcccgcctcccagcctgcactccagatggtcagccagcggagcggagcggcgcggcacgcagagagctgggagagcggccctcgtccttgtcgccgtagtcctccgccacggccgcagctacaacgccagagacggtgctggccgggaccgcgcgcctctagtcgctctgcgtcccctggcaccttctcttgcgtggcgccgnnnnnnnnnnnnnnnnnnnnnnnnnnnnnnnnnnnnnnngggcggggtcggcgccccaggaagggaaagagcgcgagggccggctagcacactaaatgtaagcgataatattatcggatgaag

SEQ ID NO: 448185 - DNA, 938 bp, Homo Sapiens
  misc_feature (54)..(98): n is a, c, g, or t
  misc_feature (575)..(575): n is a, c, g, or t
  misc_feature (729)..(838): n is a, c, g, or t
  misc_feature (847)..(894): n is a, c, g, or t
cgtatccaggctcttaaagtcactgagtgtgtggcctctagagagatgcctacnnnnnnnnnnnnnnnnnnnnnnnnnnnnnnnnnnnnnnnnnnnnngctccttgcctcttatgtgataacatatgtagagtacttagagttgctgcaacaacaactgtccaacattgggagcctctctgaacctattttggtttaggctgctgcctaggaaatagaacaataaaaaataaacagaacagatatccaacatttatccaaagcctggcacagaacagcactctgaacacatttgatggtgtttattaatattattatttacatccatctccatcggactgattacaagactatcatcgtcttgcaagcttccacctccttcatggagccttgtataggcctcccttcccaaaagccctccgtctcaccaaactggaggattccctggcctttgtggggccggagttccctcgctccagggctccagggctccttgccaaaagtccaaatgctggcgctggcaccggccccactcccagggagaacaaatggcgtctgcaagtgcacttggctcanccagtttctggcagacgacagaagcagggagacccacgggagggtaaacaaaagcgtgagggggcagcattgttttactcaggagggatgccctgttactttctatctcaaccttgctctcattcttttcatatttctatgaagcatactgtannnnnnnnnnnnnnnnnnnnnnnnnnnnnnnnnnnnnnnnnnnnnnnnnnnnnnnnnnnnnnnnnnnnnnnnnnnnnnnnnnnnnnnnnnnnnnnnnnnnnnnnnnnnnnagtcagcannnnnnnnnnnnnnnnnnnnnnnnnnnnnnnnnnnnnnnnnnnnnnnntgggttcaagcatcctccaccctaggctcccaatagctggacta

SEQ ID NO: 448186 - DNA, 1229 bp, Homo Sapiens
  misc_feature (60)..(77): n is a, c, g, or t
  misc_feature (310)..(337): n is a, c, g, or t
  misc_feature (526)..(526): n is a, c, g, or t
  misc_feature (637)..(637): n is a, c, g, or t
ttggctaaggtgtaacacttaaagcaattttctcccattgtgcgaacattttattttttnnnnnnnnnnnnnnnnnntatttttccccctaaaataggagagagccaaaactgaccaaggctattcagcagtgaaccagtgaccaaagaattaattaccctccgtttcccacatccccactctctaggggattagcttgtgcgtgtcaaaagaaggaacagctcgttctgcttcctgctgagtcggtgaattctttgctttctaaactcttccagaaaggactgtgagcaagatgaatttacttttcttnnnnnnnnnnnnnnnnnnnnnnnnnnnngagttcgggcagaggggtgacccaaaggtgcaggacggcctggccggggggcaaaggggtttggccctctcctcgaggggatacccccgggtccccgtgtctgagcactccggcagggaagctcaagggaaatccctttctgggggaccgaccttaaattcggggtcccctcagaacattggggttgtncacccccaaacaaattatttaagggggctttcttctttaaagccccagagaacaacaagcggttttttctaaacagagctgttcgcccaaatttagctgtggaggcacaanaaagaggggtgcactcagagaaattccacttttggggaacagtggtgggcgagtttaaaaccacttacctgttggaataatttctctttcccctattttccttcgagagaaacctccgtgaagggtttgggagcggttgggggaaaccctttttgtggttccgtggaaccgcgagggaaaagcacaccccactccgtggagcgcccgacattttccaccgcggattatttgggaaagaggacgcgccttctaaaaaagtggctgttgggttccctttttaagcgaaggttattcccagaaaagccttttaacgggcattccaaacggcttctcgctttcaacactacggagggagtagcccagggggatataaacccccagggcagcggtcctagggaagaggtccccttatcggggatgcctcccggggggccccacaccggaggatactgccccccaaattctcgggataagggcggcgcgtaaaaaaaggtggcgattacgaggaaagggcccaagggaagaattcgcttggtggcaccccgggtgacgcagcttcggcaagtgaggcacacttgcaccgggggggaca

SEQ ID NO: 448187 - DNA, 2089 bp, Homo Sapiens
  misc_feature (240)..(240): n is a, c, g, or t
  misc_feature (893)..(919): n is a, c, g, or t
  misc_feature (1153)..(1170): n is a, c, g, or t
  misc_feature (1879)..(1903): n is a, c, g, or t
aactggttctatacgaggggggtatgttcttcgctgcgggggcgtgagcgtccttgttacttcaccaatatgtcgtgtgcactgttgttacactcgcgaaacctggctcggttttctcccaagtcaacttttgtttttggcattcaggcagcccaggttcccctagttccctggaggctccggaaacaccaagggccaaacggccagcaacccataaccccaaaccccaggttttcctcntgtcattcctcatcctgacgctcacgggtgcaaggactctccttggccttcctcatcctgctttcaggcagcaaacagaaatggggaaatccctggtggggccaggagacagaaaggaacctccagaacctccctgggtctctcccggccacccaaataaaagaaaactttaatcagtaaaggcttctgaatacatcgtaaaagaaaacaaagcatttctgaggcgtcctttcaataaccggaggaaggcggcgtcaggagggtgcttcctcgggtcagagcagagagtttccagacgctcaaaccctccaggagttcctcgaggaaagaggagagaatgatcaaggtagtgtttaactgccacattccaaaaagtgaattctgatcagccttttggctcagctatttggcgacagtcttttaaaaaaacctctttctctgggctttaagaagaagccatttaatatttgttggggtgcaacccaatgtctgagggaacccagatttaagtcgtcaccaagaaagggatttcctttgacttccatgcaggatgctcagacagggaacaggaggtaccctccgagaagggcaaacccctttgccccacggccaggcagtcctgcactttgagtcacccatcagccagaaactcnnnnnnnnnnnnnnnnnnnnnnnnnnntaagaaaagtaaattcatcttgctcacagtcctttctggaagagtttagaaagcaaagaattcaccgactcagcaggaagcagaacgagctgttccttcttttgacacgcacaagctaatcccctagagagtggggatgtgggaaacggagggtaattaattctttggtcactggttcactgctgaatagccttggtcagttttggctctctcctattttagggggaaaaatannnnnnnnnnnnnnnnnnaaaaaataaaatgttcgcacaatgggagaaaattgctttaagtgttacaccttagccaacagagcccaaactccgtgtttccgttctttctctttcggtttctgctgagggctggtgacacactggcctcttgtcagtggctgccggcagggccaggaacagagtagaacctgcagcacagctcagtccagaaagcgctggcaggccttcttccaccggcaggccgtgcaccactggtcccggtgctcgatgccatacaccttgcggcacttcttagcctcccctcgggctttcctggcaccactctgggcccggggtggagaagtgacgatcagatgagatttcatcgcaggtgctggctgctggggctcgctgaagcttagcgaccggctccggaccggagagagagagcaggcggcggagggggcagcagcccagctgacactggtgtagatgtgtggtgagactgggatctggaaaggatggcagagccctggtatgcatgatctgcccggaatgtgccagaaggacccaggagctgacttgctgagagcccctgagggcagggaggactccgggccaggatgttctgggccggaggactgggctttgtgcagaggtggtggaagagcagacagaggcaggccagtcatgctgggggtgggagctggctcggaggtgggagtcccagggactggggtgcctgcgnnnnnnnnnnnnnnnnnnnnnnnnnattcctctttcagctgcacctctgtgtagtagaaatcctcctcccgcttgaactgatcagagtccactgtgtcccccagatggagggctttgacgtgtcgtttgatgcccacaatggagcgcagaactttgccacagtttggccacaggcacttgtacatcacccctcgtggagaattcgccaccc

SEQ ID NO: 448188 - DNA, 486 bp, Homo Sapiens
gcggccgcagcgtggagcagtcaccaccccgggagcgtccccgggccgccggccgccgtggacgcatggccgaggcttcgggccgccgcggctcgcccagggcccgcaaggcctcgcgctcccagtctgagaccagcctgctgggccgcgcctccgcggtcccttcggggccccctaagtaccccacggcggagcgggaagagcctcggcctccacggccacgccgcggcccagcgcccacgctggcggcccaggccgcagggtcctgccgtcgctggcgctccactgcggagatcgacgctgccgatgggcgccgcgtgcggccccgagcccctgcggcgcgtgttcccggccccggcccgtccccgtcagctccccagcgtcgtctgctttacggctgcgcgggcagcgactccgagtgctcggctgggcgcctggggcccctgggacgccgggggcctgcgggaggcgtcggcgggggtacgg

SEQ ID NO: 448189 - DNA, 482 bp, Homo Sapiens
gctttcaatacatgtttattgcaaaaccacaagcacagtaaccataatgtcaacataaccgtatttcctaacggaacaggagatcgccatgcctaagtgcgtgcgttttccaaagaaatggcggcttatttggaagctcacacgctgcaagtgatgacgagaagccctgttgtgaaactaggagttctaaaccattaaacatttaattacacactttggcaaagcaatgcacattaccatttctacaatggaacagcacagagattttaaatgcatctttattttttagaatcttcagtattcacaatgtgtaaaatgaagcagcattttaagtaaagctctatgccaaaacagtttcttaaaaagtctggattaaaaagaaggaaaaccacacatgaataatatttatcagtgctcacagttgacactaactatagttttttaaaagaataaaaatactcaagacttcaacatttccttac

SEQ ID NO: 448190 - DNA, 462 bp, Homo Sapiens
tttttgggttgtatgaacactggtttattaggtagataggaaaagaagaatgaagtcaatagtctttagcaagccaactagctcaaggaatagacagcccctttccattctggagacaacacagaaatctattaatattaaatattgtcatgaggtatgcacctgcccacaggggtattatgatggaaatactggggtggtctgcagggccaggtacaaatgacgggaaacaaagccagagaaactgaaatacctcttggaccccagaagacagatgtactgatttctgggatgtcaggagcccagtgcagagcagctggataggtcgctaagagctttcccttctgcttatcgggtctcacacacctgggataaaccagttatttgaaagctgacctgctaatgagaagcttctggcacttgctggtgtttcctaattgaatgggtgactgccccgcatct

SEQ ID NO: 448191 - DNA, 386 bp, Homo Sapiens
gagagagagttacagaatgggggatgggactagaggatgagtactggggcctgaggatgggtaatcgagagccaagagaatttggaacagctaagagtcaatttgcactgcaaatcagacccagggagaacatcctgactggcaagggtcccaggttattgaaagtttggcagcaccaacattcagagcagctggcctggatttgctctagcaaaagattcacaccatgtggggactgccaggtctccagggccccaagggccccactctgcctgaggcagcctgaagaaggttgagattccctggccagcagtgacctacctgttccaactacactgcacttcactggtgaaaagtcctctggcctactaggacctcatttggcc

SEQ ID NO: 448192 - DNA, 1111 bp, Homo Sapiens
ttatagctataggtgttttttaacattccgtggatttctgattatagtgagtttattgggatagggtttcataatagtctctatcttgttcttactatataggtcactcgtatagaataacctatttatgctgttagctatcctctgggataatattttcacgttgatgtttcatcccgtttttttaatatactgtggttctaaagtgttgttaatctcctaaagttcaaccctcgttactgtaaatggtttatccagcggttagtagtgtgaaatcacgattactgggtgtttgtggaatgagtgggaaagttaatgttgttggagtgggctatcctcctaaaaggacagttgcgaaattatggaatgagtaattgaagtctatatcctaatcagatatttatacatttttagagatgggaccaaaaaggatattaagaaaaatgtcttctttcctccccattcaaaagcagccattcttctactgtgaaagaaactgacatggatattttccctttcaagagatgtatgatatatttacccactgtgaggcagaggtgatagggtcagttcttgtttgcaggaaccaacatcctaaaaaagaaaatgtcaagatggggaggggtgggaaagaagggttttctattaatgtcatggaatatgccactgtagaggcagaacactcctaataataacattcaccagattactactgctgtttttttcagactaagaaaatactgacaaaattggatttttttctcctttcaattgcaggatattctgattatttaaagttagggaatcccttttttatccccccacccataaaatgggccatttgtagggatatatgcaaataaaatgttctctgtttaaaatacttacctggtttaatataacacatttatctggccaataagagcacagaaatgtagctgttatgaagactaaataataatactaaaaaaccaaagctgaagctttgtcatccctccccactaactcccactccattctttactacccacatactaatctcagtaatccccaagtccaacattttaccgacgcgtggtcgacgatatcccaaacttccgaccgtaccagc

SEQ ID NO: 448193 - DNA, 770 bp, Homo Sapiens
  misc_feature (40)..(40): n is a, c, g, or t
  misc_feature (78)..(78): n is a, c, g, or t
gttgctgagaaagtcactgctgactatgtcccgccactgnatgctctccacgttgcacagggcagggttgttgctganccgcacggcgccatgcaggatttcctgtaatttctcatgggcagctccttcagtccggttttatttgcatcatagttagataagactgctaaggcataggaattttcgtagtacatatttcttctgatgatctgcaggttttccaaaggaattcgctccactgtgttgagggcaatgaggacataaccagccacctcctggatggtctttaagaaggaaagatcataattcctctgcacataggtaatttccaaattcccaaggaccacctcacagttattgaacatcctctggaggctgagaaaatgatcttcaaaagtgcccaactgcgtgagcttgttactcgtgccttggcaaactttcttttcctccagagcccgactcgccgggcagagcgcagccagcagcgccaggagcgctgccccggccgtcccggagggtcgcatcgctgctccccgaagagctcgctccggctctcccgatcaatactggacggagtcagggggccgtgcgcggtggttgtggcgttggcggcgaggcggggactcgggcggacgccgacgaggtggcctgtcgtccggtctgggcggcggcggccgccggggctagctcgggactccggccgcctcggccgcgtcgggcgctcacaccgtgcggggggcggaggctgctgcggccgcgctgcgccgggg

SEQ ID NO: 448194 - DNA, 467 bp, Homo Sapiens
  misc_feature (121)..(129): n is a, c, g, or t
tttttctgtgaatattttatttttttaaagtcaagtttgtggaggtatagtatgcacatagtaaaaatcactcttttgaggtcacatctccattcctttctccttcccaaactccagaccnnnnnnnnnaatggcccacgcctcgtaagtcattgagctgacaagcttctttatgctctgaacattctcatgttctataaactggtttaatgtgtaaatgtttctgctgtcactgtccacatttaactactttccttagagtagtgcttctgggaggcctcagatatgacttctggtagttaaccttaaaaaccactgaatggtacagagcatacaggtcttgcagggctgtcttccgacacccagtgcaagatgcagttctgggaggacatgggtacaatgttcctaggatggagttcaaagacctctatctaaaaataacacctctgataaagtagtctgatggt

SEQ ID NO: 448195 - DNA, 880 bp, Homo Sapiens
  misc_feature (785)..(837): n is a, c, g, or t
ttttcccggaatcccagactgcacgtcataaatagtctgtgtgattatgatgttgaacacagcatgggagcggctgctttcttcgttcatgttggtagcagctaccgttcgagacttatttccctcagacatcaatgactcaatatcctcaaaactagtgacagctagttgagataaaccatctacatatggtcccaaaactttatgttctcgaactttaagagactgtctactccctttggggtctaaaagatcccgaactttctcattataaatttccatataggacacttcaactttaaaggtctgtgactcattttgctccaaagagatccttttaaataaagcacagcagagccttggaataaggcccagctgctcagcatggcccatcatggaaaaggattttcccgaacctgtctgtccatatgcaaaaatacacgcattatacccctgaaaggctttttcaagaattccttccccaaggcacttgaaaaccacttcttgaccagcgtattttgtagtgttagattcatccatggaccaaaagcaataatcaaaggcaaatacctttctccctgtttggtgttagaaggaggagggtgcaggaccgtttgattcccttccatctccaccacgcacttggtgttcagttccagttctcgtcggttcatgggccggacccggacggcaacttttaccttggtatccgacatgttggctgcgctcgcccggccgctcgccgcgcaccgctcggccttaggcggcccctcacgcgcggcgcnnnnnnnnnnnnnnnnnnnnnnnnnnnnnnnnnnnnnnnnnnnnnnnnnnnnngagctccgagaggcagcgccgaggcgcgcgggccatcccgccc

SEQ ID NO: 448196 - DNA, 132 bp, Homo Sapiens
ttttgctttttattttttatatactcatctcatttaaaatgcaatatctgggatcatttaaagtataaaattgggatcaagagaagttacctacctaaacacgagcagactaaaatcatttttcaaaagagg

SEQ ID NO: 448197 - DNA, 1858 bp, Homo Sapiens
  misc_feature (99)..(99): n is a, c, g, or t
  misc_feature (109)..(168): n is a, c, g, or t
  misc_feature (199)..(315): n is a, c, g, or t
  misc_feature (330)..(345): n is a, c, g, or t
  misc_feature (416)..(462): n is a, c, g, or t
  misc_feature (484)..(500): n is a, c, g, or t
  misc_feature (671)..(691): n is a, c, g, or t
ccgcgccggcaagatgacaacacgggcgaaggacggcgcgggggcggcgggagaaaaccgtaaaacggagggggagccgcggatcgggcgtgcgggccncgcggaggcnnnnnnnnnnnnnnnnnnnnnnnnnnnnnnnnnnnnnnnnnnnnnnnnnnnnnnnnnnnnaaaggtagataaggacgcaggaggggcggannnnnnnnnnnnnnnnnnnnnnnnnnnnnnnnnnnnnnnnnnnnnnnnnnnnnnnnnnnnnnnnnnnnnnnnnnnnnnnnnnnnnnnnnnnnnnnnnnnnnnnnnnnnnnnnnnnnncttggaggaaaagcnnnnnnnnnnnnnnnncatagggaggggggccggtatcggcggctagtcagggggctgaagcaggggaatggcatgaccgcggaggnnnnnnnnnnnnnnnnnnnnnnnnnnnnnnnnnnnnnnnnnnnnnnntgacaagagtgactcggtgtcnnnnnnnnnnnnnnnnnttaaatgagccaaccaggacaatgtttaaaagccagagccaaaaaggctccaaaataaaacaaacttgtctgctcaattaattatttgaagagaacctacagtaatacagactggagatgggaaagcacgagggatgtatgagtcgaggaaccggcaaaggggtgtggggnnnnnnnnnnnnnnnnnnnnncacacacatgcacccagctagggtagaaaataagtacttttgcttctatgggaagtgactttccagttcacttgtgtatcaaatgaacatgatgaaatcaagttgtactagccaatgtttgggagggttctgtattaaagggataaagaaaaacattagaaagagaagttacaaaaatcactgtggggaaaatgaacaccaatgacttggctgctctgaggcttgcagggagtagacagttaggcatcccaggtcatcagagaaccagtggggtcttttcctcaggggccgggttttctacacgcaagtcaaacctcttctcctctgggacacatgtttccaaaggactccagaaacacagcacagctggattcaggtactgtgtcaagatgtgccttcttcttcatctttgacagcaattaatgtactaaatgtcttgatagagaaggtcatatttgggaatattcttgggatcaataggactttggacaataagcttccccctcattgctcctcgatagattacttcaatcaaatctatgaagtcttgtttggttttgaagcttcccacaaacttagtgtgatctggagatccataatccactttcatatgctgcccattgaagaaaaagacagtagatggaatataactgatgtcaaaatactgtgtataaactgcagtttggtccacatctaccaggtatatagcagccattttacttaagtcagaagaggtcttagaaagaatatcatctagctgcagacagacaggatcttcatctctcccaaacctgagaaccaacaccttctcagcagtactttttatcgcctggtctacttcctttttgctagtcagcttgggcagtaggaagctcatcttgaaataacccaaatgtgaatcctcactgtcactccttactcgtccacgccgcctcactccctttcactttgtggctgtcagcaaccacttctcggaagagcccgggcgcggacagctcctttcatcagccccaagccggacaggaccctaagaccaagtcacccacgggctgttgcctagcaaccctcgtggccccgctagcgggaaggaaaccgaacagaaaacgcacaagcgcagaaaagaaactccgctctcgacgaattcgagctcggccgatttggcctgat

SEQ ID NO: 448198 - DNA, 420 bp, Homo Sapiens
gatcctcctgctgtgccctcctagagtgtagggatcacgggcatgagtcatcacatccagccaaaatctatcttttatctcaccgcaagcttttaattcatttccaactattaggaattagtttgtttcataagcctgagatatgtgcaggatttttgaaagatgatttctgtcagtgtggaagcatgttgcctccagcagtcgttaaaactttcaccagcttgtctaagagtttgattcaatgtctcatcgtcctccgacatgctactcttgctagtaaacaagcaaaaggaaactgctagggctcagggtttgggtgctactgagtgtttacaaatactcgagctgtagacaagcaaatgttccctgacacagaaggaagaagtgtgcaggatattcctctttatcctcagctctgct

SEQ ID NO: 448199 - DNA, 835 bp, Homo Sapiens
  misc_feature (204)..(333): n is a, c, g, or t
  misc_feature (592)..(667): n is a, c, g, or t
  misc_feature (767)..(767): n is a, c, g, or t
  misc_feature (772)..(772): n is a, c, g, or t
gtgatggaggttcactcttgtcgcccaggcacagcagtaactaactatacctgggtgctggggccagcgggacacgtgaggcatacatccaggtattgggatatttttccagtctttggtgagagaaatcagaatggtggttgcctttaggggaagagatggtggagcctgggaagaagcaggacacattcatcaaaactcatnnnnnnnnnnnnnnnnnnnnnnnnnnnnnnnnnnnnnnnnnnnnnnnnnnnnnnnnnnnnnnnnnnnnnnnnnnnnnnnnnnnnnnnnnnnnnnnnnnnnnnnnnnnnnnnnnnnnnnnnnnnnnnnnnnagagtgaaacaaataaagaaatagagaaggggccaggtgtcattctccatccatcttctctttctccccggcacttttcaagtcaattatgctacttactttcattgccgggtttctcatctgttccctcgcccatgaacgtgaactccttgagggtggcagtgtctgttggctttgttcactgctgctcccagcacctggagcctgaacagtgttcggtgaatccttaacatccaagtgtttcttggtgtcgtcgacnnnnnnnnnnnnnnnnnnnnnnnnnnnnnnnnnnnnnnnnnnnnnnnnnnnnnnnnnnnnnnnnnnnnnnnnnnnnatgaaggaggcagatggaagggtacagggatggaggggtgcatggatagagggatggagggtgcagggatggaaggagtgtgagtcccaggatatgaggntgcanggatggagggatggaggggtacagggatggagggtgcagggatggaaggatggaggggtacag

SEQ ID NO: 448200 - DNA, 511 bp, Homo Sapiens
gtaatgtatcaaagtgcaaaaggcagttttattaagaattatggggattttatttttcagaagtccacattttctgaagtgtggttattttgcctgcataatttaaaaagcatactgaaagcatttcataaacgatagcactccgtataaagtatgatcaccaagagggcagcttattcttgcttaggactaagtagaaataacattcattcaagattaactctgtcttcctgtctctgaagagtgttgggacagggagagccgccttttccagggtttgcaaaacagctccatgtgggaccaccatggagcccgtctccctgggcttcagcttcccctctccagtgggtgctcggaggggcttcttctgtgacctgggctggtgactggtgctacatagtgagaagccctgcagggcagcctcaccagcccagggtggccctgcccagccctggtcagcgacgcgtgggtcgacgatatcccggaactccggaccggtaccaggcggctt

SEQ ID NO: 448201 - DNA, 908 bp, Homo Sapiens
gaagtcttttccccactggatgtgcctgtctggtgggttttggaccttccccgactacatcttctaggagaggcctgtttggagtagtacactgagagaccctggcctcttctgctggaagactgtccaagtccttgggtttcttgagctggtgattcctctgccatcctgctctctctgcttcatctcaggcagcatggggtccacttttgtccccaaacctaatgttttaatccaaatgcaaattggttccacatttttactggagggtaatcagtttttaaaattcacacacatgtaatcgaaacgcaatactataaagttctactggtgagactcctgaactcagtctgttttcttagtaaaatccagcaccttccttctcttcattctttgtatcactgtggctttaaactgtcttcaagttattcctcctcatcacctccattgttttatcttcacccccttaacatccacagaaacagactggagttcttgaatgttttagcttcaacttctacatgtgcccactttgctttgttaatgctaccacagctgtgctgaatgaagcctgtttcccaggcagagatcctgccactctggatgggaagataaaatgcaggggtcctctttcctggtttcctgggaacatcaagggacaggtgaccagcttggaactctttgatgacttggaaggaggaagatggtctggctgatctgtggtgagaaggtcctttgcacaaggctggcctagaggacgcagccacgaccccagcgcttggccatctctgtagaggattcgcgggtggaccatgcttagtctaacagggtatggttattaacgcccgttatgaacggttcataaccagccaacggttatgaactgtggagggcttccgcaatcccgc

SEQ ID NO: 448202 - DNA, 447 bp, Homo Sapiens
tttttcttcgagacaggatctcactcagttccccagactaaggtgcagtggtccaaccacaggtcaccattgccttggcctcccaggctcaagagatctccccaccccagcctcctgagtagctagtaccacaggggcatcacggtcccttggaagcttccccatccactgggcctttcccataactaaggcctgacctgtgagcatgccaaaaacaccgatgagtcatcaggaatccgaacaataaacacactccctggaacgtacaaggcaattatacacagatgtaattaaagagaagaactattaaataaaccaagtcagtgacacacagccgccgaacagcagaacaaggccttcctgaagcaatttcctgatttgacagcaacatgcgtcacggggtctgtgttctttaaaaatttataaagcttttaacatagacgggaa

SEQ ID NO: 448203 - DNA, 512 bp, Homo Sapiens
  misc_feature (55)..(55): n is a, c, g, or t
  misc_feature (108)..(161): n is a, c, g, or t
ggcgcagggacagaggagggcggggagccggggatgccgcggggtccatcgcacnccgtccgcttctccctgggtctcttggtcttgcacgtcgtcgctcccgccaannnnnnnnnnnnnnnnnnnnnnnnnnnnnnnnnnnnnnnnnnnnnnnnnnnnnnagcgcggcactcggggcaccgcccgcccgcggcctcgtcgtcgtcgtcctcctcctccccgcccgcgcggtagtagctctgtccgcagctgctgcagaccgagggcgcgcccaccgcgtggatcttcttgtgtctccggagcgcggcgccctgcacgaagccctccccgcactccacgcagatgtgggccggctcctcgccccccgccgccccgagcccgtccccgtgctgggcccgctggtgcgccaggagcccggccccgtgcccgaagcccttcccgcactccagacacacgtacggcttgggggccggggcgcgccgcgaccggggccccgcggcctttgcccccgc

SEQ ID NO: 448204 - DNA, 466 bp, Homo Sapiens
  misc_feature (57)..(57): n is a, c, g, or t
tttactcttacttggttttaataatacagttaggatgggttgccaggtctggcattngggcctagatgcccaggcatcgtcggagtgcctccgtggtcactgggcacaggccaccagctcctccagggcttgctctcggcggttgccatggaccagcagcacctccttgatccggtcctgctggaagcccatgtcactgaactgctcccagaggcgcaggaactcccctgcctggctctcggagaactggaacatctccatggcctcatccaccaggccttcctcatatccctgacgtaacaggcggtcacaggcactgaggtagctcgagaaacttgggccggaagcgggcagagagggagggagggtaagaggagcagccgggggcagcaagacagggcagagaggcactccaagggcctgagctgagggccaggcaacagggcaagccaccacctgcagcgtg

SEQ ID NO: 448205 - DNA, 499 bp, Homo Sapiens
  misc_feature (404)..(415): n is a, c, g, or t
gtccccattttgagtcctgtttgattggtagcctggatcccttgttacaaacacttcgtgttcaagattatattctttgggtttataggaacaggaagtgctgaaaatgtcaaacatcatctctgaagaaaaagaagttgcaatggcttaagagtttagactaagaagggagctcagagaagtactttcagcataggaatgaacagtattctcaaatcgcagaataccgagttcccctccctcagacgagggctatatgtaacaaaaataacaataagcataggtatagtttaagagccttttacgtagtaattcttccaggccataaccatacaaatctgatcatttagacatgacaaatttctatatacaaaaaaacatgtaactttcaacccttctctgcnnnnnnnnnnnnacaaacaaagtatgaaactcattgtttcaacagagccatatctttcaaacactgaatgaatcatttcgacattcatttttcttt

SEQ ID NO: 448206 - DNA, 2186 bp, Homo Sapiens
gagctactgtagatttatttacttcttgggatggaaggaggatctgtcccaacttccctttcccatcagagacaggtccccaaaaccgcgaaaaagaaactatattctcaaacaaaacatgcattcaattcaggtgactgtttgatattttcataacattttctttaacatttaatagaaactatatacaataaatttttactatattttacataagatagcaaccacagaaatttacataggttaaaagcaagacggataaggaggacccagtcctgtgggctgttttctcagaggataaaaagccagagttcaccagggaaaggggttaaagactgcccaattaagtagaggtgaagaaaagctaaactgcaggtcttcagatagagataaccgatattagggccatcagtatctcaaagaccactcacaaagacagctcccacctagctacttaagtggatttctatccatgacttgggaaatcccattacaaagatgtcactttccttttaggtatagtcccaaataatcccagaagctttgatagggattatctctctttctcttccttgccctgagtgggaagaaacccacggtccacgtcctcaaaatttggctttacgtttgactataatactcaatccagaagaaaaacaaggtagtctgggttgcctgtgttttgtgagagatgatcagaaatacttctttgaagaacgagaaatttaaatccaccaaagtaaaatggttccccaaactatcaactaatagaagtgggttctggcttcccatttgcagtagccaatccactctgagacaatggtgcagaggctttctcagaatttcgagatccctgggatctgcacccatctccagccatctgcatctggcccaaaatatccactgtgtcttcagcaatttctttgactaaatgatcttcaagggttagtgaaggatcaaaaagcaaaggtgaaggaggacactgcataccatcacccacaacatccaagtcatcactgaactccagaggtaaactctcagtgggctgaagctcagcagcactcaagtacagatccatggggccggcttccagatcgtctggcacagacagtacctgctcgggcttatacatctgaggaggcaactggaaatgcagtgggcagcagggatcctcagagaggcttacaggaacaggtttgttgcagggtacctcttcagatccctggcagcacttgaagagaacctgattcgtatcctgacaaatatgggtaaggcagtgtctggtcattggaagagactgattggaacaacgaacatcatccacaaaggccaagcacttctgactggaacgagtggtatgggcctgttgggcagcaccatctgtggccagcattctccgttccttcaactgcctatgcagtaaggcttccactccatagcgctggcggtatcgtcgcagacattttaatcgctttaagttctctcgttctttggccaaaagtccctctgggccagtcaggagactactgcctagagcttcatgttccactttgcgattatgtaagtatcggcgcttcttctccttgagcagatgctgaagtcgtttaaactgatcaatatacaacgactgcaaacgaattagcttttcacgcataatcagggccacttcttctgccgtgtagacaccagcatgtctagtattcggctggcttcactgcgactactttctggagtctgagaccccagctctgtcttagcatatgagctcagctggcacaggagtgtttcacccacaggccctgggttggtcttcttcatttgagcatgaagtgccagggcattcctacggacatgttcagcacagaaggacaccccatctttcttctctggctttggggcagcattgggacatctttttccattcttcgtcgatatataactacactgcttgaagggtgcattcttgtcttcaaggatatgcttaatgcaaaactcctgcccctccagacgagggtgagagcatggacgatgagtgaatgcacaagacagaggttcctgagacctgggcactggagtgatcctcccccgattggttggcaagacgtgaatccgaatcctgttcataaccaaaacctcaggagctgcggggcgccgcactctgccgcgccgctcgcccccctcccgct

SEQ ID NO: 448207 - DNA, 1571 bp, Homo Sapiens
  misc_feature (119)..(119): n is a, c, g, or t
  misc_feature (141)..(141): n is a, c, g, or t
  misc_feature (678)..(678): n is a, c, g, or t
aactattcaatttattagaagtggggttttggcttccccatttgcccgtaggccaatccccttttggaggccattggtgcagagggcttttttcagaatttcgagatcccctgggattntgcaccccatctccagcccatntgcatttggccccaaaatatcccactgggtctttcagcaatttctttgactaaaatgatcttcaagggttagtgaaggatcaaaaagcaaaggtgaaggaggacactgcataccatcacccacaacatccaagtcatcactgaactccagaggtaaactctcagtgggctgaagctcagcagcactcaagtacagatccatggggccggcttccagatcgtctggcacagacagtacctgctcgggcttatacatctgaggaggcaactggaaatgcagtgggcagcagggatcctcagagaggcttacaggaacaggtttgttgcagggtacctcttcagatccctggcagcacttgaagagaacctgattcgtatccctgacaaatatgggtaagggcagtgtctggtcattggaaggagacttattggaacaaaggaacatcattccacaaaaggccaagcacttctgactggaacgagtggtatgggcttgttgggcagcaccatctgtggccagcattctccgttccttcanactgcctatgcagtaaggcttccactccatagcgctggcggtatcgtcgcagacattttaatcgctttaagttctctcgttctttggccaaaagtccctctgggccagtcaggagactactgcctagagcttcatgttccactttgcgattatgtaagtatcggcgcttcttctcccttgagcagatgctgaagtcgtttaaactgatcaatatacaacgactgcaaacgaattagcttttcacgcataatcagggccacttcttctgctgtgtagacaccagcatgttttaggggatcttcttgatcactgtctatgctatcagcttcactgtcagggtcacctctccatgtctgatccacagtaatgggttcctgctccccatcactccagctgtcttcatctagtattcggctggcttcactgcgactactttctggagtctgagaccccagctctgtcttagcatatgagctcagctggcacaggagtgtttcacccacaggccctgggttggtcttcttcatttgagcatgaagtgccagggcattcctacggacatgttcagcacagaaggacaccccatctttcttctctggctttggggcagcattgggacatctttttccattcttcgtcgatatataactacactgcttgaagggtgcattcttgtcttcaaggatatgcttaatgcaaaactcctgcccctccagacgagggtgagagcatggacgatgagtgaatgcacaagacagaggttcctgagacctgggcactggagtgatcctcccccgattggttggcaagacgtgaatccgaatcctgttcataaccaaaacctcaggagctgcggggcgccgcactctgccgcgccgctcgccctctccgct

SEQ ID NO: 448208 - DNA, 400 bp, Homo Sapiens
tcactgtctatgctatcagcttcactgtcagggtcacctctccatgtctgatccacagtaatgggttcctgctccccatcactccagctgtcttcatctagtattcggctggcttcactgcgactactttctggagtctgagaccccagctctgtcttagcatatgagctcagctggcacaggagtgtttcacccacaggccctgggttggtcttcttcatttgagcatgaagtgccagggcattcctacggacatgttcagcacagaaggacaccctgggcactggagtgatcctcccccgattggttggcaagacgtgaatccgaatcctgttcataaccaaaacctcaggagctgcgctgcgccgcactctgccgcgccgctcgcccttctctagtc

SEQ ID NO: 448209 - DNA, 532 bp, Homo Sapiens
ttttttttaacgtaaacacaaagtctcatttatttttgtctgaagcacacaggagctcactcagcacaataacagtaagcgaatcatacaaatattgagaaaaaatgttcctatgaatacatacatgtatattcttaagagtagcgatcaggagtttaacaacaaatgtaaagtggttttctctaaagaatgctttctgacaggcttttgggttggaaatggacaggtaaatcactgtcacataacaggtaagctaagaataacttctgttacccaagtcatttgaaccctgtggactgtgaaagccctcttggaatttacatttaattccatcattggtctggttgacttccacatttcactaaatttggacaagatccacaaagtaactcctcaactctcagtctttcacactcaggtctgtgggaaggaaaggcagtgagaccaggtgtgaacacatgcacggagaccaatgttaggattttctaacagtatccttctgtttctgcacttccaaagtcatacctaaact

SEQ ID NO: 448210 - DNA, 619 bp, Homo Sapiens
  misc_feature (17)..(17): n is a, c, g, or t
  misc_feature (56)..(56): n is a, c, g, or t
  misc_feature (58)..(58): n is a, c, g, or t
  misc_feature (64)..(64): n is a, c, g, or t
tgccactcactccagcnctgggtgacagagtgagaccctgtctcaaaagggggaananaggcanacacacccattaggaatatcgttctacgttcagcttgatcatcaagttttgcaaaaacatttttccaagtttactcacctaaatcatgggttaagaagcatctagaaagtccaaattctgagggtaatgattcacaacaatcttagcgcccagtagggctatcggagggaaaagaaaaatcctcccctcctggcgcccaaggaatccagccctttgtggctgcagagaagggaagcagtttcagcctcccccagcctggctgggccaatacctctgctggccaggaggggtcactgcagcccttcaggtgaccaggggagctaaagccaccaggggccaccgggcaactcacttcagtccctggtaataaccacaaaatgtgacgtttttccattttgcctttagatcctgaaataagaaagtaatctagtccacacatacatattgtgggtagttgacaaaattatctctaaactttccaagaaatgattcgcacttaagctgcactccagcgacggggaacacagggactggaacacgacagccccgcgcacc

SEQ ID NO: 448211 - DNA, 550 bp, Homo Sapiens
cagttgctcacaccctgtgtttacttttatttccagccacatctggaggccaaaattcataagtttgttgccaagccttacaacagtttactgagtttgtacgttaagggaagggggaaaaaatgctctcctgacttgtcgagtgtaaaatggatggaggaatcagtgggcaaaccctaaaccccaaccatgtttattaacatctgcggcctgccggcagacggggaaggcgtgagcgggctatgtttgtcttggaggttttagctcagagagctccatggtgtacgctctccatatatatacagccaggcatctttttaacccaccagagaccaggagagggaaacaagggctgttcagaagcggaggagcccaggtccgataggggaagagcagggatgggcacttggccgtgtttacaatcagggcagtgcagtgggtgggccgattcttgtgacgtacttgaggcttaaaaaacgatcataaatctaatgtctgtcaaacagggctggcattttcttttcctttcacaactacgttttgtatgacc

SEQ ID NO: 448212 - DNA, 566 bp, Homo Sapiens
ggattccagttcattgaggctttactgtaggcaagctggagaacccccagctctgtgaacatgcagtctgcaatctggataccttttatttaatgtcaagaattccctttgcacggcaaaaaggggtctgaggaaagcggagcagcgtagatgagggcgagggcggaagcaggacgctcgccaaagtggtgccgggtgccggctgcccactgtgatcccggctgggaggaacgccggacccacggcaagggcagggaaagtcatttttgacacaaacaagggtcctggggcataccaccccacccggtgccaggccatgcaagacgctgaaatggagactgtggcccctcgggacgcagcgcccggagctatggagcaggtgcaccaacgtgaaggggaatcctttgggcgcttcccgaggcgcctgcagggtgtggagcacagcagggtctgtatccatgtccgtgagcacgggcagtaacagatagcaccaattgggaggcccagggcaggagagcctgaggctcagactctagcacccacttgcccggcgctgctgggaagag

SEQ ID NO: 448213 - DNA, 673 bp, Homo Sapiens
gtgtcgcctctcgcctgctccatgggagcaaggggctttctctcttattccactaggtcccagccaggcacgcagcagcccctcacacaagcatggcatgagtcagggaggaagggacagagggaatggccgtgtgaccttgggcagtaacttgggctggtttttcatgtacagaatgaggcgacgacccacttagattgctgaacacatcgagtggccatagccgtgagaagtgagagctgcccctgccctactgatggggagacaggtacaggtgacgggagcgttagccgagatgtccacccatccaccacacgcctatgggcacccttgtgccatgagggctcagcctgggccctggtggaagcaggtaccgggtcgatgctacctgcagcctcatcagagcctagctcttgggcagcgggcgtggttctggcctcttcacagccgaagtgcagacaggggctgtgggccaagctcctgaaatttccgccgacaagggcatctttcatgagtcttccttctgggccccctgttttgaaaccaaacaaggatgcagatttctgccaatcccgatgagctcggcatgagcacaggctctgttcccacgcggaggtgatgtcagccccgagcagagacaggcgcttggcattccacgagcctgggcggccgc

SEQ ID NO: 448214 - DNA, 1303 bp, Homo Sapiens
ttcaatagatcatgtttattcccaagccccaaccagacatgttctacccctcaagatccctgagacccaggctgtgggctggaaaatgaaggcacagtgtcaagagcgcccctgttggcatatgaagacccaggagtgctgaccttcagggatctgcctgcactgcccatgggcctggcacagcaggaggcactcctgtttctgtcccttctgtctctggtcttcagagcaaggtttctgctgagatgctaaggaagctgagtcctttgtcagccctgactctgactgagaggcagacaggagccaaggccccattgaagctccaggatgacgatggccctcaggggaacagacgcaaaaccaggcacgggcctgccttccagctggaatctacctgtcaggcccagaacttctgtgcagttggagtgggctccccagaaggaaaaacaatacagctgagtctagtgctaggggacagagaactgggggctcaagaaagcaccccaaaacgggctgccaggttaaggatccatggggctgaagagaagtttgccccagagcccaaagcccagtctgcagtcagtgggtgggagatgagaggcagcctgggcccctgcaggggctgggccctgaatcctgaggccaccgtcacctcaacatcacttcctacagcagaaaaaggtcactcttctttccaaaggtggtaacacagcctcagagcttgctccgcggggcctctgccaggggccgctgcaaccgccacaccaccctgactggctcagcagcgcggtccagctcacggaggccacctaggtcttgggtctggctgtactgctgcagggccggctggagcaccagtgatgggaatgctgaagttcaggtgggggtaggtggcccaccgtattattgtcccgggtgttgctggtgattatgccaaggaggtttcctgagtggttggagaagaggggtcccccactggagccgctgtgcacagcacacgtggtctgcagcattacgggcgtgccattcacctgcaccacagccgaaaggatgcctgaggtcaccgagggcccgcaagactggccaaagacgccaaagcccaccacactcacagcctcgccttcatggaagtgctcagcgggcacagggatggggacatcatccaggtcctcctccaggctcaccactgctatgtcatagggacatgtctcctgcctggctataccacacggccccagatgccacactcccgtccggctgtgctgcctagcgcatcctaaaattccagaccagtacagcctgt

SEQ ID NO: 448215 - DNA, 1727 bp, Homo Sapiens
  misc_feature (26)..(26): n is a, c, g, or t
  misc_feature (543)..(572): n is a, c, g, or t
  misc_feature (1042)..(1095): n is a, c, g, or t
gtgcgccgcctcaccctccctccaanataggatggaagcgggccggaattcttccgatggagctaggcagcttcagccggaccgggtaggggtcctcgctcgctagcttgctgtttctcggagaagctcccgagtgtccggcctagaggccatgagaaggcagtgggggtctgccatgagggcggccgagcaggcgggctgcatggtgagcgcctcccgggccggacagcccgaggcgggcccgtggagctgcagcggggtaatcctgagccgtagcccgggcctggtgctttgccacgggggcatcttcgtccccttcctgcgagctggcagcgaagtcctggccgcggccggcgccgtcttcctgcctggcgacagttgcatgggacgacctgcgcctgcacgtgcagtgggccccaacggccgcgggtcccgggggcggcgcggagcggggccgcccagggctgtgcacgccccagtgcgcgagcctcgagcccggcccacctgccccgtcccgcgggcgtcccctgcagccccggcttnnnnnnnnnnnnnnnnnnnnnnnnnnnnnnccggccttctgggcccacttcgcgcgcctcttcggggacgaggcagcggaacagtggcgcttctcgagcgcggcgcgggatgacgaagtgtcggaggacgaggaggcggatcaactgagagcgctgggctggtttgcgctgctgggcgtgcggctaggccaggaggaggtggaggaggagcgcgggccagccatggcggtgtcgcctctcggggccgtgcccaagggtgcgccattgctggtctgcggctcccctttcggcgccttctgccccgacatctttctcaacacgctgagctgcggggtgctcagcaacgtggccggcccactgctgcttaccgacgcacgctgccttcccggcaccgagggcggcggcgtgttcaccgcgcggcccgcgggggcgctggtggcgctggtggtggcgccgctctgttggaaggccggcgaatgggtgggcttcacgctgctctnnnnnnnnnnnnnnnnnnnnnnnnnnnnnnnnnnnnnnnnnnnnnnnnnnnnnnacagcaccgctgccctggccgcccttctgccgccagaggtgggcgtcccgtggggtctgcccctccgagactccgggcccctgtgggcagccgcggcagtgttggtggagtgcggcaccgtatggggctccggagtggctgtggcaccccgccttgtagtgacctgtcggcacgtgtcccctcgggaagcagccagggtcctggtgcgctccaccacccccaagagtgtggccatctggggccgtgtggtatttgccactcaggagacatgtccctatgacatagcagtggtgagcctggaggaggacctggatgatgtccccatccctgtgcccgctgagcacttccatgaaggtgaatggcacgcccgtaatgctgcagaccacgtgtgctgtgcacagcggctccagtgggggacccctcttctccaaccactcaggaaacctccttggcataatcaccagcaacacccgggacaataatacgggggccacctacccccacctgaacttcagcattcccatcacggtgctccagccggccctgcagcagtacagccagacccaagacctaggtggcctccgtgagctggaccgcgctgctgagccagtcagggtggtgtggcggttgca

SEQ ID NO: 448216 - DNA, 462 bp, Homo Sapiens
aagaggagggttggacgatgcaggcgactctccctgcgctccggcgcgcgtggtggctgtgcttcggctcccacagccagggccacactcatgcaaagactgcgtttggcccggcttccagcagtcgtcgcgccaggcgctgctgcgagagactgggtgcgcgacattcgccagccagggccaccgtgccgcttggccttggggctttgtgcagcagtgccccgtgtgaactgccaccgccggcatttcccactggctcttgggcgcgtacagtagggcgcacacacatgcaaatgccctgcaggaggcagcggcttagggtgttgacagtggcagccctcacgccaggccagggagcccctgttcccaggcagggcccctcagggtactcatctgccccattctgctgcctaatccggttatcagctgcagaacaacgggttgcctggtggagctggggag

SEQ ID NO: 448217 - DNA, 624 bp, Homo Sapiens
tgaagtgaaaatatgaacattatttaataactgatcttctgtaataaaccatttgaaaatattttacaaggaatcacacacacgatattttacaaagtttcttgacttttttgtcgctgttgtttttccaacttgtctgtacaaaatagaacaacaaaaaaagggcagagaaaaggaaatggccccccagtcccccagcccaaggtgaggggcagccaggtcgggtgggtaatgagaaggattagacccagctgggggttagacagctacctgatggggattgttttgtctgtttttctgttttttaaacttaaaatatatatttttctgtatatgtttatattctccattgagcacctgactacactacagttacacgcacgcccccgaaggacacagctggcatccaggccgggtgcacatggacacccaccctggcaccagcagtgggcatggaccacacacacacactgagaaagcgacaagcaacatgacattaattaacgaagccattaattaatgcatcaccctccccctcctcccagtccatctgagccccatcactatatccccttgccctcagttccccactggcccccaggctgggatgcctttgggggaaat

SEQ ID NO: 448218 - DNA, 606 bp, Homo Sapiens
ttttgcaacctctgaggctccttaaacatttttgaattgctgtagcctaggcttgttttgtaaaaagtgcttgttgctgaaaatgatgatttgtttggataaaccccctcctcattttttgggtggtgggggagctttttattgcatagtcacaatgggaggcattgttcacacagaccagcatcgtcatacttctattcttgtcactgacagtattatttgcaactgctttttttccagcctcttctaatttccacactaccacttattgtatttcattaaagctgggttagaaatgcaaggcatataattagattgagaactatgctatcgatttggttttccattatgatgttatcacatgcacaaaaaagtcatttggtacaattgttatgattaaaactacaaaagagatctattacatcagacttagttttcagtgcctgatgcagtgtaaaataagagtgagaggggttgatctgtttatattagagctgcatatgccatgtaaccataaatgtctgtaggctaataatttcaaaggaacctttagtagatgagaggttttttagaaattcatattaaataaaagtcaatcaatacttc

SEQ ID NO: 448219 - DNA, 421 bp, Homo Sapiens
  misc_feature (136)..(136): n is a, c, g, or t
agatttcaagctccttgagagcaggtattttaattctataaagcctctacgtggccttggacatgggtaggtgcttaattacccaagatgctccttgaatacagatgggacacgacctacacagacttagatcttnaccacctccccctctccccaccctgacttgctcaatcctgaaggaactggagacgtctaagtgtctgaggttcacgcttccacacagaagcttgggtctgtgtgggagggaaaaaggaagccatctgtccgcaggccagaccaggccacaccctgctagcacccagaaccctttgtcccaggcccagccctgccattttactttccttgcatctggaaagcacagggaatatagtagtgacaaaagaaggaagggttgtttgagtttaagaatagtttactctaa

SEQ ID NO: 448220 - DNA, 510 bp, Homo Sapiens
ttcaaaccctggcactttagcatctgaaagacacctgccccaagaccctgtggcagtccctcatgcttgacttttggtgcctagggtcctgttctcctggttagagggaacttggtgtgctcaacactgagggaaagtgaaggacgcggggcatcttcctgccctggccttcctgccttggtgcctgcgctccccaccatcctgcaaagaggaaccctgggagtgagtggaggtggcaggggtttggttcctgcctgctgccaggcggccttgcccagggggtgggtcccagacctgagagcaaagcgctgttctctgaagtgctttgtagctgactgcatcttgtgccttactcttttggttgattttcaaattttgtaaaagcaaatttgcatctattttctcttttacttggttatagttttaaatgtctctatgaaagggttttgaccttggatgatgtagtatatgcaataagatgctgtgattttatttcaggagcaaaaaaaa

SEQ ID NO: 448221 - DNA, 314 bp, Homo Sapiens
gagccggctcccgggttgtcatgaaacaaatacttgctgttcacttactaagtggcaggcagaggactagatgctaagggcataagtagatgtgttaggagacacttcctgaagcttttgtttgcagtggaaaaagtagccttaaagccctcttagttcctctgtcttctaccatcactgaatcctgcccccttttctaatacttatctctcttttccagatgctggtattggctctggtcatctcaccccgtttcctgtccaatatgtacagttcacagacagtgtcttacacagtcttacgtttatcccatc

SEQ ID NO: 448222 - DNA, 367 bp, Homo Sapiens
ctagggatagacctagtatgcatgaaacataatactacacagaaattaaaataactacaaatgaaacaactctgatgaacatcacagacataaaagaagtcatacatgaaatgcacacattgaaccaattatattaaatttttaaaataggcaatctaaacatttatttagggatgcatggttacagactaaaactgcaaagacaagtgattaccataaaactgaggatgaaggtgattaagcgttaaaatcaggaggggacataaaggagcttctggggtactagcaaagttcaatttcttaacccacataagttacacgattacaatgagttttactccattactgaccctgtcagttgaaaagg

SEQ ID NO: 448223 - DNA, 538 bp, Homo Sapiens
agagcagatcagaagggttattcagcacgagagttggaaggtatagacagcagggtctgtacagcactgtgcccgatggtcctcccaagcctggaagtgctgggttcgcctccctcggggtatggtggtcaggagttctgtccctcgtggtctggtcctgcaggtggggtgggtctgagagattgggcagcggaggagtcggggaccggttcaggttggcgcgagggcccctcgggcagggtcctgtcgagtttgcaggcccgtgttgcccagcgccggttctctcctcagtacgctccggttctctcctcaggactggtcggttccggctcggtcggccaccagcgggtcggtcagcgacagccggggtgtggcgcgagcgcgggcctgggcccgcagcctccgcaggtggctcagcagcagcaccagcagctacgcgtgcagcagcccaaggcccagcagtgcaagctgcgccgccagcgccctgcagcagagcgggccgggagcgcaagcggcgcaaagattgtcctcggccaga

SEQ ID NO: 448224 - DNA, 1454 bp, Homo Sapiens
ttccctgtaaggcactgaagaaaccgatgcaagctctcaggaccggaagacatgcacagctcggattacatactgccggcagatgggacattcattcatgcgcttgccacacttggtacaggttaccatgtggccacactccagaagaacacagtcaatgggtgagtccatgcagatcttacacaggttctcctccaagcctgatggtactgctcccccgttttggtcttcggcaccactgaccaggtgctggagtcctttctgatccttgtatagccgggtcactctctccatcagctcccacttctcacagcagcccttgtagttgacaaagttgcgagccaagatctctttcagctgccgcactgtcaggccttcaatgtcctccaggtcagtcaggtcagacagagaggcccttcggcctgggacaaagctgtcctctgagtcaatagactgggtctcatcctcagcaggtactctggccacgctctccaggtagacgggttcctcttgatcctgagacacatggccattggcctgctgattctcctgaacctgggctgggggaacagaggtggcttgtgcagatgaagaggggaggttgggtgaggtaggtggaaccatgctggagtgaggctgggtcaggaaggcctgctgctcaggaaagtctggggacaaggtggaggcacgagtcctgtcctcctgggagattacaggctgctggccaaaggaccaagagcaccagctcttctttctcccggcacatttcggtagagatgtcatggaggctgagatagtccctcaagtccttcaccttcatcttcatgagctcctctcgctgaaaggctgtagctcgaaaccgttggcagagaaggcagaggccggggccccattccctacttggctcgaacaggtcatgcaaaaatttttcttacagtccaagcaggtctgcttcctggccgtgtttgcaaagtgagccccacaggacttgcagcttggttccaagcctgttggggaagggaaggagctgtacccagggttggaataggcctgcatcctggctccctggggtggtgggacctcctcaggctgtccatccaggcagaaccagttgcagcaggttgcccacatgataaaatctccttctgatcttgaaagaaaattattggatcttcactcagggcttgaacattccttcccaactcccctcaccctcttcttaaaagacagacttggcaatttagtcctcaaaaacagtgtctaactgctgtcctacagagcttgcttgaagcctgctagggtctcctcttccactttccctgaaatttaaaatcatctcttaacttggaaggctgcttacttttaaaagtaagttagtctggcaagcaacttgaactcctttgaaactgtttactggaattttccagcaaacctgcctgaggtacccacctgac

SEQ ID NO: 448225 - DNA, 238 bp, Homo Sapiens
gcgatatagaatcttagctttttatttgtaggaaaaaataaacagatttccctccccaacaaggcgtcacaagaaatgaggcaataaagggaaaaatgcaaatcctaaagtcatctagtgcctttctcataattctaaacaaagaaaaagtgctctcaggttttgaaatcttcacatacactacagatgggcaaaaaagctacagacatctcagtttacaagtttcaagttcttaaaa

SEQ ID NO: 448226 - DNA, 531 bp, Homo Sapiens
gcttgttcataattttactgttttactgtagctgtcatggtggaatcaggaatacatagtccctagtggcattaacagaacaagaaccatacaaattaaagctcatagaaacacaaagggaagacagaacctcagagaacaatgccaaccatgacagtctgaaatagatgcttgggccacacatgaaggctagaaggaaaatccaaactgtacgtggatctttgatgcggagcttgtggagacaactgtggaaaccaacacatctctttgagaatggaagtcaagcagctcagggtgttttcaggatacttttgattggcagagaaaataaccaggaaaatgagcaggaagcaggctgtctccctgtatggtggggttccaatacctgactaatgtcttcttcacttctgcctggcaaatctcatgcaagtgaggctataagtgaatttcaacatggatctataaagggaacagattctacgaaatttacctgtgtcgacaggtagcaggagggccatgtccagctctaga

SEQ ID NO: 448227 - DNA, 529 bp, Homo Sapiens
  misc_feature (473)..(473): n is a, c, g, or t
gtattataatgattgggtttattttctgtaagaccttagtaacacacgcttgaaaaagattatcacttttgcttggaatataaatgttgaactgtcaaaatcataaaaactctataaaacaattttttggaaaaacctaatagaaaatagaaatgtataaatatgataaagaggtcaaacacaaatgctaatcaagaaagtaggtgaaatagaccagtattcagcaatttctctcccacagtaatcttaatttcatttggaatttaatccgcaaaatttcttcttttccaaatcccatttagaataatatctgttgataattttcagctttttaggcaatgtgcccagatgaagagacgtcttctctgaagtactgtttcccctcttatttagcatctttacaaaacaataacaaatctcaattatttcatgctgagttaacatttcagtacatttataaggtaatgtaaatntagagtagttgtccaggacattttccttctcctaacttcttttgaagtcttatagt

SEQ ID NO: 448228 - DNA, 1093 bp, Homo Sapiens
gatttgcctgctgctgcgcatttaccagctggatgagcttgtcaaggttcttgaaccacatgttggcattctcatattggaagtccgagcccatggtcatcacaatgtggttggggcggtaataccggccctgggcaggggccacatttaggaagtaatcgaccagctccttggcgttgtactcggggctgcgagggtcctccaccaccggttgatcgacacacagcacatcccaagcccagattccttggcgggttgtacccattgggaagcacaccagtgaagaggtccgcggtcgggggcttcaggctggtgctggcccgccacacctgctccatctccagcttctgcatccgtacccacttatcttgataatcaaggcgcccaaagaagaagccgtcgaagcccatctgcgcaaacagcgaggcctgctcccgagagtggccgaaggggtcaatgtgccaggccacacggggtcgcccatcattgccaaatgtgtcctccagaaagcgcagcccaagtgtcatctggtccacgatggcaccgtagtgggtggctgcctcatcgttcatcacccagccaccattggcgaactccaggcgcccctggcgcacaaggtctcgcacgacttcctgtgtggcatttgtctgctggtgccaccaacgggagaagaaggcaatctccacgtaaatgaagcgacgggtgggatctgccagcaaggcagagatgaccgagtccaggatgtactgcacaccggcgtgctggatgtcattcttgattccataaaagtactggtccacggttttgagccagcccacgtcatcatgtgtgtgaggcagcaggtgcacgttcagcatgttcggctgcactgtggggcatgtctcgtatcccccggcccgagcaccggcagccgccagcaacaaaaggaaaaagcagagaggcgggagcggtggccgcagggcgcgggacatggtccaggggcctgctgagtccaggcagccgcgagcgcagacccccgaagcccgcgcgtaggcgcccatggctcagcagcttcctcctggggttcccatccggagaattccggaccggtacc

SEQ ID NO: 448229 - DNA, 569 bp, Homo Sapiens
  misc_feature (114)..(115): n is a, c, g, or t
  misc_feature (356)..(389): n is a, c, g, or t
  misc_feature (400)..(483): n is a, c, g, or t
gcctttggaaatcactaagtcatttcagtttttattcgcagggtcatacaaagcactgacatctgcattatttagaagcggctttcaaaactttttttgccataactcaccgtnnaaaagaatacattttatattgcaactcaagtctataaattctttcattccttcaacatattgaacacctactatatgccaaatatattttatgtggaatacagtagtgaacgaagtaaaagaggaagaaaggaaaggaggaagagaaagaaattaaccaaaattcttgctctctaagactttacatactagtgggacagacaatagaccaaataagtaagccagatgcagtggctcacacnnnnnnnnnnnnnnnnnnnnnnnnnnnnnnnnnnaggatcgagannnnnnnnnnnnnnnnnnnnnnnnnnnnnnnnnnnnnnnnnnnnnnnnnnnnnnnnnnnnnnnnnnnnnnnnnnnnnnnnnnnnttagctgggcatggtggcacgtgcctgtagtctcagccacttgggaggctaagggttgaggattgcttgagcccaggcattccgct

SEQ ID NO: 448230 - DNA, 1331 bp, Homo Sapiens
  misc_feature (597)..(605): n is a, c, g, or t
tgcgggcctttcggacggcggtacgattgattcccgggccgttatagtggcgcggcgccgttttatttatatactgtggtgctcacaatagtatgtgtgaagtcggttggtgtgataaagagaggggggcaaaaagatcagatattggtgcgggcagggtgaaaggttggacaaaataaactggcgcgcgcggggggtgaagcaaacaacggtacggccgctgtacaaagatgagtgttggttaaaagggatcacagatatggggcggataagcggagaagagggtgcgaaagatagagggcaggattaagtacggaggggggcggattaagaggcggacgaatgggcggacagaataaaagagggggtggagttaagcacagcggcatagcagagtatattgaatgcaaggggtggggtgggtggcgatagcaataagggagatcgaagcgggccaaaggacgggggcgagaaagtggcgcggccaaaaaaatgcgggcgacagggggggcagggtgttgcaccgtggggggaagaggtgggttaaataaaaaaaccggagaggggggcggggtagttaaggaaggagaaggcgannnnnnnnnaaggagttactttgattagaacaaaggaaataatgtggggggaagaaataggagggggggcctcccggtgggggaggaaatggtgggcgggacgcccgcggaggggtggggtagaagggggccggcatggtggcggagcttggtgggtagcggggggtcggaataagagggcggaggtatggtggataaggagtttggattggtgtgatagttagcggttctcacattgtaattctcagaggtgaaaactatacagaaattgctggagcagtttgaatctctagaaaacattcacctccccacccactaccccaacccatgcccttgacctccaagaactgagccgagcctggggcacccgcggcctgtgctgcaagggtcaccttgtgacgagggccgtgcacagcctccgggctgagcagggacaaagactcctgtcccatccatggccccagctccccgtgagcggtaagagggcgcccagcagcgcttcctccatctaggcgggtctcgggggcccacgggaaatgccctccacaggtgtcccctgcacccacagcctcttgtcccctgcaccaccacgagcctgaggtgtgaaatgtgtccggggcactgtgggcaccgccagccaggctgggtgggaacgtgaatgccaggcctcggcccatggccctccctctggcagccgagtctccaaagcagctcaaggggtgaggaccacgggcg

SEQ ID NO: 448231 - DNA, 915 bp, Homo Sapiens
  misc_feature (694)..(694): n is a, c, g, or t
  misc_feature (759)..(759): n is a, c, g, or t
  misc_feature (762)..(762): n is a, c, g, or t
  misc_feature (778)..(778): n is a, c, g, or t
  misc_feature (780)..(780): n is a, c, g, or t
  misc_feature (853)..(853): n is a, c, g, or t
ttttttggctggttcccttcatttactcacagatgaaaagattaacacgtcagcaaatcaaaatcagagaattcctaaggcactctgtgcaacaggagcgggtggacgtgggggtgggtgcacgactggcgcggctgcctccacacgggccctcctgaagttaccttggcccggctgctggctacgggaacgctgggtcctcgatgccatggtcggggttgcagctgaaggcgatggtgatggcgtaacgggtgccccagtggaccttctccacgcggtgtaggttctcggaccccgaggtgaagaaggagacgcgaccagctctcggctccaccgtcttgttggcaccctcctccatgaacatgaaccgccctccgccgaagtcctccaggtagttggagaggtacagcagcgaggtgtagtcgaaggagccgtaggtcaccttgtccacgtgcgcatgccagtactcgtcgtgcgccgtccgcgcttccgtgctgtttatgcgggagaagaaggtgggcttggtcagatgcagcgaggatgcgctgatgcccaaagcctcagcaatggtgagctggaccttctgccggcaccttccgggtataaccgggaagtcctcctcttgagaagatgttcttgtattttatccccgaagtatctgtacaggttcacacagtgcttcccgacaggacangggcccctgagtgcaagtccagaatggatgcccctccgtcagatcctcccagggagagccccttngtnggtacgctgcgaagtncnccgcttcctccctggtgatgacgacatcggtgacacctctgccgcactttcggggagtgcagccttctgaacntgctggtgactgtcgtagtcctcagagcagggcacctcgatgaatctccctgccacgacctc

SEQ ID NO: 448232 - DNA, 1323 bp, Homo Sapiens
  misc_feature (210)..(211): n is a, c, g, or t
  misc_feature (237)..(237): n is a, c, g, or t
  misc_feature (375)..(375): n is a, c, g, or t
gtgagaggggagaaaaacggtctcgtactttttttcccactatgcgtatatcccccactttggagatgggcgtggtgtcctcttatttttgattggcctagaaagtaaagttttctcttttttgacaaaagaatttaattgaattttcggacggcaggagaaaagggtgttaccaccacagcggcccaatattcttactaaaaggggagnnctgttaataagggtgccggggtgaanagggggggaaggtccgccccgcggggtaaaggttaggtttgtccaaaaccccctgggcttgttttttctcacccttttggttgttgtgggacgtgacccatgtttttctcccttcaaagggtgttgaagctccttggngtgtttttcggttgttggggtgatctccgagtgtttatccactgttgagggttttttattccacggttggggattgagttttaaaattgtgtccgggggaaaggaaagggttatagggttggggggtctcttggttttccaggatgtggcagtgcgtagggtattggccgtttggattgccgcaaaaaagcccttccaggcaaatgggtggaagcttgggacttttcttgcccgccccctccccgggtataaacccggaaggtccttccttttgagaagatgttctgtattttttcccctgaagtatctgttacaggttcacaaagtgtttcccgacagacagggcccctgagtgcaagtccagaatggatgcccctccgtcagatcctcccagggagagcccctttttagttacgctgcgaatctgctccgcttcctccctggtgatgacgacatcggtgacacctctgccgcactttcggggagtgcagccttctgaacctgcggtgactgtcgtagtcctcatgagcagggcacctcgatgaatctccctgccacgacctcgccacggcgggccaggacctctgcgaccccgtcgtcggcccccaagctgctccagagcaggagtgcggtgagcacaaagccagcccccaggcccgcggtccttagccacggcctctgccacagcctctgcacctcccgcggggctcggtccttcttggtgctgctccggttccggcgctcggccgctccgttgccctcgggcgccttggttgcggccctccgttgaggagccatcggaccaggccgccgcggagccgggccggacgcgggcgccaggcccggggacgaacgccgtaacagggagcgcgaggcaggcacggcgccctcgtgccgaattcgccacccaggcctcgctactttgtttttttgtcgtgccgtttgcgc

SEQ ID NO: 448233 - DNA, 690 bp, Homo Sapiens
tttgtttttgagttatggtagtcatgagagcatctgatagctcctctgtgactcatccatttattttaatgacatctgaatatgacagtatattgaaaaaagaatgcatgttatttattccatactggggaagtgccactataacattgttttaaaaaatcttcgaagatttcctattagaacctatcattgaattagaaaagcaagctttgccaaatgcctgattatgcctttactggtcctgctagctggcatgtttcaccaacttttccctagtgtttcctttggcactgttgagcccacactacaaaacatgaacaagtcccacaaaaccacactatgccctctgcttccccatcatgtggggaccatctgcctggacatccactgtggggtagcaggaagaactttggcctgggtggacacatggggttaattatctgtgtgtctttggtctatgatcaccgcattcttccatttgttcgaccctcagttttcctgcctaccagtaatgccctatgactcctccagctctggtatctgggatcttgagtctgaggggcaggtcacttgttgctatgggcttctgctcccagcaaaggcagtgggtgactgcttgactttagggttcagtctggcaatagctttgtttctggtgaagggaaaggttagatcatcctggtcctggcc

SEQ ID NO: 448234 - DNA, 990 bp, Homo Sapiens
tggctcctctagaagggtgtccttcttcagcctgcatgaaatgggtaaatgaagaagaggacgatcacaaagaccacggaaaagcagccagctggccccaagagcgggacctggccgatcctggcccagcccagccccaggagcacggttttcaggccggatggcacggccggtgagccatgaagagggaagatgatgaggaggacataaaagacgtggaggaggaagttaggataataggacaggtccagggagctcctggaggctgaaacagggcggtagtgcgtgatgctctggtaggcactgtcccggccgtacatggggcgttccctatccttgcactcctcttcagaagaagacaaaagatcgtcatcatgcacctggtgatggaaagcgtcagcatctgggaatgaagtcactgactggcggacagccctggacgggccggcagactcgggctccccataagtcctggtggtgaagtagctctcttcatagtagtcgtcattgtagcccttgctctggtagagtaaagcgtcctctttcttgggaagatcatacatatctgcatcccctctagtcgaattcaagtcagagaagctataagaggaggcggcggacgagctggggggcgagagccgccgcctctgggtctcgtactcgaagatcttcttctcgtaaagcctacgagttgatcctactacaggcccgtgcgggatgttgtaccggcgcagcaaggtggtcagctcggtatccgaaagatctgcgtagttgtccatggcgggtgcgggctcaggcggaggcctggcggcggcccgggcctaccaaaaccggccgagcaacggctgccgaggagcacggcgggggcggcacgagcgcatcgggagcggccgcgctcgcgtcacagccgaatcgttgtcgcgtcacagccgaatcgttgtcgcgtcacggccgctggctccgcaggctgcgcgcgctgcacggggcggc

SEQ ID NO: 448235 - DNA, 797 bp, Homo Sapiens
cacctgtgatggaaagcgtcagcatctgtgaatgaagtcactgactgtgcggacagccctggacgggccggcaagactctgggctcccccataagtcctggtggtgaagtagctctcttcatagtagtcgtcattgtagccttgggaagggggtcaacggtagcagagggggcatcggtgtgccccgcctggcctgatggccctaatctgatcccatttcgggaccttgtcacagtttctccctcctaaggctgctggagtggttgggactgaggtctcaggtcctccctgtgagcggggtccctgacgaagtcgggtgaaggtgccagcgtgcccacccaacccctgccttacccttgctctggtagagtaaagcgtcctctttcttgggaagatcatacatatctgcatcccctctagtcgaattcaagtcagagaagctataagaggaggcggcggacgagctggggggcgagagccgccgcctctgggtctcgtactcgaagatcttcttctcgtaaagcctacgagttgatcctactacaggcccgtgcgggatgttgtaccggcgcagcaaggtggtcagctcggtatccgaaagatctgcgtagttgtccatggcgggtgcgggctcaggcggaggcctggcggcggcccgggcctaccaaaaccggccgagcaacggctgccgaggagcacggcgggggcggcacgagcgcatcgggagcggccgcgctcgcgtcacagccgaatcgttgtccctcgtgccgaattcgccacccaggcctcgctacctt

SEQ ID NO: 448236 - DNA, 713 bp, Homo Sapiens
  misc_feature (46)..(46): n is a, c, g, or t
ccaatgggggttgaattggtatatagccgcccgtgcgctgtaaatntgaacaaaagaaactatatcctgagctggcaggagcacaaggaaatgggtctcgtgctgatgatgaatgtgaattgataacagtttttttgtgatttgcgatagcacaaaattgaaaacagcacaaatgtacgttactctgggctcgctaaataggcactaaataaaacgagtcagtttcttctcccgagcaagtaaactagagggtagatccacgcgacccggagtctaggacacatcctcgggagtgaacagccacaatttcatcagacgatgtgtgcagccggggcatgaataggcccaaggcaaacacaccacgaggtaaacgccgggactctgagagagaggggtggaagccgggacttcgaggagggggtggaattgacttagagacacggagggagccgtcttggagcggcaacagctgccctgggcaagtgttcttgttcttgctaaaccttaccttctggtctctgtctggacaatgtaagcgcgccccctggtgggggagagaggacggggaccgaaaagggggtctcgagagagagaataaagtgctcgtgggtggaagaaagctggaacacgaaaatgccagaaaaatctggaacgagaagtgcagacggcccgcggcaggccccggtgatctccacactcattgcacctctccg

SEQ ID NO: 448237 - DNA, 478 bp, Homo Sapiens
agtgcgctgggtttaaaatagcaacaacaacaaaaattacaaataaccaaaaaacagcataagaattaaaaacagttatattccaatgtttttaatacttggttcacattttggatgctctccccagggatccgacggcgctgcggaggcggcagcgatgtttgggatcctaaagaaagcatcagaccagactcaggtctggacgtccctcaagtggcccggaggtaccgatattagtgtcaccgccgtcagtgccctgcccagaaataaaacctttgttctgagagaaattgaaaagctggaaaatatggagtaggcgatgtgaagagaaactacagggaatgtagaggtcgggttttaaatgcgtatttcctcaaggatgttgtggaagcagagacaaggtggctggcctggagcaggctggaggacctccaaggatctccacagggaggcagttacatttaacaccctacctagc

SEQ ID NO: 448238 - DNA, 346 bp, Homo Sapiens
acaccttagaataaggcttttactgttctagaaacaatattccagaagatgaaatcatccaggatgcccccaaaatatttatttatcccaagattttgagagtaatattcatacttgtctttatccctcagtctatgcgtctggggccaagtcactgtgtggcccatgtgcagcttccccgaatgcctcacatgttgtagcacctgcttccaggaacaccaaatgaacacagggtcttggaggggaagggggggaagaacccataatgccccagggctgcatggaaccacaatccaaatatgtgctccccgtcctggaaggcccatcaccacgcgtccacggggaa

SEQ ID NO: 448239 - DNA, 1079 bp, Homo Sapiens
ttgagttattgtattttacgtaccggttttactttatggtctccctatggggtccgcgagggttccccgtgtaacagaaactgggtcccggtatcacttatggaccacgtggcaccttgatataccgtctgttttgcgccctcctcaaataagtccctcggggttttgtatatgttttttaaaacgattccaccaacctgtttaaggggaaggaaggtcctttcgtaccactctgaacttaagggaagaagtgatggagaggaaagaaggaaagtacactggccaatactctgaactgactgacttgggtatctgtggtccaaagaggatccccgaaagacagtgactctgtgctcaatgagttattccccatcccaattaaaagtcataatgacagcatttacattcacacagggtctctttccaagaagttttttgagtcaccctacatgtctttcaattcctcaaggcaacagtggggggctacaaggaggttgacagccaggtcctgtgagagctgtttgtcaaagcccactctcagtgagtcagtccctggaagttgggttcagttgcacggaggcagggccactgactggcttagcaacgtgtccaatcatgctgattttagcatcttgcttctcaatgtcctcatacggagtccaggacaagtcatgctgtagtttgtaggcaccaaaggaagtcatgtggacaacttgtcccccattcctttggagaaatgatggaaaaatactgctgaccactctcccgtttatagagatagtaaatgttgccaggtttttttactatattacaagctacatggtgcaggttggcatctctgtgagcatcttccagtaccttcctggcttgttcttgcaaatgttggatttgctcagctatgactgtcagcttgttggtggcatttgctcggatgaattcatcagcctccctggcctgcagctggcggcgctccttgcctttcaaggaccccctcggtccgccccggcgcggcggcgtcctccatgacagcgccttatcctcccctcgtgccgattaacacccgggcctcgtacctagcc

SEQ ID NO: 448240 - DNA, 1049 bp, Homo Sapiens
gccccacagagtatctggaaagaagatgtacgagagcgaccacatcaggcagtataaagcagacagagacaatgggggagaaaaacagcatgatgacacctcctatataaaccaattttttccagttctcagactccaggattttgtcatatggatagtagctctggtccatcatgaagagaatcatgagtgaggccatgcagcagaggatgaacctgttgcctttggtcagaagggaggtggaagccaagatgcaggaagcataggggcagggtagacccttgtatgtggaggggactccaggtgaataaaagcacaagtggaaagaagcagctgacacatagatgatggccaggatcccactcagaagtccatccacgcctaggagcagagcggaggccaagccgaaggtggtgaagacggcaaagtcattcagctcggctcccaatttggagcatatgttgatgtggctggtcattgccctgactgccatgtctaacaggaagctgaccaggagcatccgggaggcatagtggcatttcatgtcttcaattctcaaggcaacagtgggggcaacaaggaggttgacagccaggtcctgtgagagctgtttgtcaaagcccactctcagtgagtcagtccctggaagttgggttcagtgcacggaggcagggccactgactggcttagcaacgtgtccatcatgctgattttagcatcttgcttctcaatgtcctcatacggagtccaggacaagtcatgctgtagtttgtaggcaccaaggaagtcatgtggacaacttgtcccccattcctttggagaaatgatggaaaaatactgctgaccactctcccgtttatagagatagtaaatgttgccaggttttttcactatattacaagctacattgtgcaggttggcatctctgtgagcatcttccagtacctccctggcctgcagctggcggcgctccttgcctttcaaggaccccctcggtccgccccggcgcggcggcgtcctccatgacagcgccttatcctccccccgct

SEQ ID NO: 448241 - DNA, 993 bp, Homo Sapiens
agtggggaggataaggcgctgtcatggaggacgccgccgcgccggggcggaccgagggggtccttgaaaggcaaggagcgccagccagctgcaggccagggaggagttttgttttttctcaccctgtcggctggtggcttggtcctggtgaatgccacctaccagctgaccgtcctggctggggaccccttagacctcgtggcgctcgcagagcaggtgcagaaggctgatgaattcatccgagcaaatgccaccaacaagctgacagtcatagctgagcaaatccaacatttgcaagaacaagccaggaaggtactggaagatgctcacagagatgccaacctgcaccatgtagcttgtaatatagtgaaaaaacctggcaacatttactatctctataaacgggagagtggtcagcagtatttttccatcatttctccaaaggaatgggggacaagttgtccacatgacttccttggtgcctacaaactacagcatgacttgtcctggactccgtatgaggacattgagaagcaagatgctaaaatcagcatgatggacacgttgctaagccagtcagtggccctgcctccgtgcactgaacccaacttccagggactgactcactgagagtgggctttgacaaacagctctcacaggacctggctgtcaacctccttgttgcccccactgttgccttgagaattgaagacatgtaggtgactcacaaacttcttggaaagagaccctgtgtgaatgtaaatgctgtcattatgacttttaattgggatgggaataatcattgaaacagagtcactgtctttcggggatcctctttgggacacagataccccagtcagtcagtttcaaagtattggccaagtgtactttccttctttcctctccatcactttcttcccttaagttaaaagtgttaaaagaagaaccttctttcccataaaaaaggttggggggaatcgtttttccggaaaa

SEQ ID NO: 448242 - DNA, 477 bp, Homo Sapiens
cggggctttgaggggccacaggcgtctctggagctgaagtgagtgcccagcccctgcctgcgcactggatattagtggccatcctaggcccgagacaagatggtggaactcaggatgccagctgcctgggaggctgggagcccactactgtcctccaagacccaacgctctcagcaccctggactttcatttttccatttggaaaacgggcattccagcacccatcctcaaaaggccaatgcttcttgagaagggggatccagggttttgaagttcggccaactcggtgtatgtgccttcctgcgccttgcatggctctgggcaccattggaagactgcagatataaatgacaagtgatttattttgttttcagcctccagagctttagctttagagtcagataggcagagctgggtttatatatcatcctgagtacctaccctcagcatctgaacctcagtttattaattggtaaa

SEQ ID NO: 448243 - DNA, 457 bp, Homo Sapiens
tttttttgaggagttggaattttattccaagtgaggcaaaaaccatgcaaggcatagagcaggggaggccaaggccaggtgtgggtttaatcggggtctgtcggtggcagggcagctgcagggaggccgtgttggtgatgcctgggccagggcacagtggtaaagtttaacccaggctcccctgtctacccctgaaaaagactggaaaatgctgagtcccagccaagggtccagggtctaggagctgaggtcagagaggcccaggaggtgggggaggcaggcccagtgaggtggccctctcctggtcttgctggcttcggttttcccaggggagctcactgcaccctgagcggcattgtcccccattgccctgacccttgcccccacctccttggctggtggagccaggagcctgggaggcccctgtgcacacctggcagcttcacctccccaaaca

SEQ ID NO: 448244 - DNA, 339 bp, Homo Sapiens
acatagaaatgattttttatttactttgatgattagggaaagataccaacatagctttcatcaaagctaacaaataactttactggcagttaactaattttattagactaaagacatgtctgtttaaactgaaacaactggccctttgctttggctgggaccttgggaatcacggccaaggtgctgatcagaaaagagtcaccattacatcaacctccttcccagcacacagcacagagatgccacgaaggccccataggtccctagaagagcagctggggcttcacctaccgagtcccagtggcttattttgaaaagatttgctttccacaggtaagg

SEQ ID NO: 448245 - DNA, 594 bp, Homo Sapiens
  misc_feature (207)..(247): n is a, c, g, or t
cacatgagacttttttacatccttttatttactattttctgatttttaaaatgacagtggcaattaccatttatactgtgttatttgtataagctgttaaacacaacattgttaaacacaacgaaaattcatttttctacctgaaagctgtatcatagaaaattattttcaagtttatattcaacagcttaataatgttcaaaccannnnnnnnnnnnnnnnnnnnnnnnnnnnnnnnnnnnnnnnnacggcacccagcctaaagcaatgttaggcttcaagaaaaacctaagcatagcccactagtttttactgtttcctttattatattgcaatctgcaaaactatttgttttcagccaagtatctatgtccagttttaataaaatagtagcctaagcttacaaaatagacaaattaagcagcaactgttgattctgagtaagtctgtatgctatcaagaacacaagaatgcaggatcatgggaaatgcacgcaaatcctgttgaagcaatgcatgcttcaacaaccactgaccactttgcataattgactccatcaatgaatctgtaatttagcttctaatttttcataat

SEQ ID NO: 448246 - DNA, 979 bp, Homo Sapiens
  misc_feature (767)..(794): n is a, c, g, or t
aagggcacatttttgcctttcggagaaaatatgctacaataagctgaaaccccagaggatctgtactctaactttctcacataactagctatgtgaccttgggtacctctctcaccttgctgaacctcaatttgctcctctgcaaactagagttagaaaattaccctcctgtggggtgttgtggggcttaaatgagataaacctagtacagccctcaaaaatatggcattctgcccccattccttcttttaatttttaacgtgcaaccattcagaaatatttcatttctctttcttttgaggatgccttttgccaccacttttttaatagccaaaggaaatttggggttaaagacgatgggtgtgcaagctgcataattttctatccactctaaacatgtttgagtaagaaataataaggcagaatttccagggtggttcagacactggttctggagaaagctgttaaagaggctcagaagagaagttttctgagaagggatagcccctgtggaacagctgtcatgcctctcaaggtgacccctggaaggggacagcaactattggcatggataaagtctctgcacagttattcagcttcattccaggagggctcaagagtccttttcaattctccagtggaaccctagccacgtgtctcttcagttgtcaatcacttgactcggaaagcttgaattacaatgagtctgaggctcccatagttcctgaggagcaggagagttccacccaggtctgattctctctctnnnnnnnnnnnnnnnnnnnnnnnnnnnngaacccagttacaagaaacaggtctgactttcttgcaaagattctgcttcctcctcaaagttcaatctctctgctgatcaccggcatctgctgttcttctatggtgcctaagaactttgccaactaccaagcccctaagactgtgggtgggatccagaaagcccagtgcctgcctggaacacaca

SEQ ID NO: 448247 - DNA, 588 bp, Homo Sapiens
attgcggctctcctggcccctggagcctccgcccccgacccgagctctttcgtctgcctgccagtttcctgcgtccccggagaggatcctgctgagcccagcctcccccctccccttctcctcctctcccttggagagcccgggcagccactgccccgcagccccagtgacaggaggagaccataacccccgacagcgccatggcccagattctgccaattcgttttcaggagcatctccagctccagaacctgggtatcaacccagcaaacattggcttcagtaccctgactatggagtctgacaaattcatctgcattagagaaaaagtaggagagcaggcccaggtggtaatcattgatatgaatgacccaagtaatccaattcgaagaccaatttcagcagacagcgccatcatgaatccagctagcaaagtaattgcactgaaagctgggaaaactcttcagatttttaacattgaaatgaaaagtaaaatgaaggctcataccatgactgatgatgtcaccttttggaaatggatctctttgaatacggttgctcttgttacggataatgcagtttatcact

SEQ ID NO: 448248 - DNA, 530 bp, Homo Sapiens
  misc_feature (240)..(240): n is a, c, g, or t
  misc_feature (343)..(343): n is a, c, g, or t
  misc_feature (383)..(383): n is a, c, g, or t
tttttttaatgttcttaggaaaaataactttatttggaatgtaagattttattgggataatggttcttatgccttaaattcccttagttcaaataaactaatgttaaagaattatggctgttttttaccaaaattctctacaattgtatgattactctccaacataacttcaagatgttgaggaaaataaaacaggtagtctctgaagtttttccacaggaacagcacgctaagtgcttnctttctggagttattttgtgacactgaatcgccaaagaaaagcttcctatagagttaacagagacttctcttgggctgaaggctgcttgtgggtttcacatgncagtttctgtgagaatgggattcttgtgtcagccatgggntcacaactttctgtgcactttctggtgctggattaggtggccatgctggttgaaggcacgcccacactccccgcactcatagggcttctcgcctgtgtggatccgctggtgctggatgagcactgagtactggctgaaggccttccc

SEQ ID NO: 448249 - DNA, 172 bp, Homo Sapiens
cccccagggtttggccatcatccaaaagtgggtcttccttgaacagccgttgttcttaaggaggccgtttgaggatgccctcaacaatgcccttaatttcaaacaccgtgctggactctttggcgcccgaaaaaatgggggtcttggggccccggatcatgaggaacacttc

SEQ ID NO: 448250 - DNA, 321 bp, Homo Sapiens
tactgtgccaggactatacttaatctgtattagtcaagtataattgaatctttataacaacccaggctggcactcccatttcacaggtaaggaatctgaggctcagaggggataacttgctgaaggtcatctagcaaagagaatggctaagcttggatttgaatccaggtctttgtaaatccagagccaatctcttaagcgccatactatatactctggtgtttaaagatgtgtaccaagaagggtcatatgggagaagctgaaaaagaggccagccaggaggtttctgtaatggtccaggggagagctgggatgcctaag

SEQ ID NO: 448251 - DNA, 778 bp, Homo Sapiens
  misc_feature (725)..(725): n is a, c, g, or t
  misc_feature (741)..(741): n is a, c, g, or t
  misc_feature (752)..(752): n is a, c, g, or t
  misc_feature (764)..(764): n is a, c, g, or t
gagaaaccaacggattagaaggacttttaaagatgtgtgaggaaagagctcaccgctgaagaaggctgctgcatcactgaacttcttatcactaacatagcgagattttagtttggacgaatttgaggttataggggagatagcgatggcagaagactaggtggaaatggcacatctaggttggctgcagtcgaaacggtttgagcgtggtcgctgtggctcatcgtcggcaccaattaacgaagcgatgacatctgcgttgttaggggtttcttaaactgagttggtagaaatgcgacgttcaagggttcccgccggcttcgagcctttcttggcgtatttgtatcttgagctgatttctgcgtcagccacatctcgctttgatccgcacgccccccgggttgttttgcagtagcagtctcagccctcttctcgtctcattcccaaatcgtaatttcagttcacagctttttatctataatagctttatcaactctttttccgatgctctgcaccagatctcttaaaatataaaattaccttgcaaggtattgtttggaatacacggtattttcatgaagacaactattaatagaaaaatcagagtccagaactatggttctccatttctggtatactgggtttgcaggaagccttacattaaggtttcataaatggttgttttgctgttaagttgcaacaaccatcacagttggtgctacatnaaaggttggaaagggnggtatttttancagtgggcaccngaatgggctggatt

SEQ ID NO: 448252 - DNA, 2304 bp, Homo Sapiens
  misc_feature (60)..(73): n is a, c, g, or t
  misc_feature (130)..(140): n is a, c, g, or t
  misc_feature (192)..(200): n is a, c, g, or t
  misc_feature (221)..(392): n is a, c, g, or t
  misc_feature (1351)..(1369): n is a, c, g, or t
ccccccgggggggcgggaaaaatttctttggggagggaggtttttccccaaatatttgtnnnnnnnnnnnnnngaaagagaaggggtttttcctccccaaaaaatttccccacgagtggcgggttttttnnnnnnnnnnngcggggggtttaaaaaaagggggcccccggcgcccccttttttaaataaggnnnnnnnnntttagggggcccctttttttnnnnnnnnnnnnnnnnnnnnnnnnnnnnnnnnnnnnnnnnnnnnnnnnnnnnnnnnnnnnnnnnnnnnnnnnnnnnnnnnnnnnnnnnnnnnnnnnnnnnnnnnnnnnnnnnnnnnnnnnnnnnnnnnnnnnnnnnnnnnnnnnnnnnnnnnnnnnnnnnnnnnnnnnnnnntcataccaatgacttttatttaagatgatttatgagttgatgtgtgagaagggttggtgaagctatgtgggtggctctttaaataccttccattatattttcaaatttttctttattctattaaaataccttttattctctttattcccataaaaaggcaaccaagcagattatactctcaactaagatgccagcagtaattggggtatgatgcaagtcatcttggagcagctacataccctgcccactgcagtcagtcagcatctgcagttgctttttatagctgtttttacccccaaccccgcccccatccacatcctgaaatggtgaattggggctcaaagaaaaaaaccaaaacagtagcatctgatgtcatgaggcagaagcagagtattattcaggccctttttcaaacaggggagccatgtgtgcttctccatgctcttctttcctagagctcctttcttcctctactttctttcgggattttatctccatcctcaggcattctctttcatttctctcctttctgctttcaggtcccaaagaggcagaacgcttggttctaaaagcacaagttgccgttcaaaaggactctgaaaatttctcaattttggaatgggatcttccttttgattccagtggctccttgaatgacccatcctctgagtattttctgtaatcccgtacgtggctacggcatcgaaattcttggtcctcatgagaatgccttctaggaagacggtcagacgatcggcatcggaattcctggtcctcatgagaatgccttctaggatggcagtcagatgatggaattctgggaagcacaggaagtgggcagggcagggaggttttcctgtgactggtggcttgcagtcggtggcgttcccggagtcctctctgatcctcctctctccagctgtggccccagaagctgctcatccatttggcaaagacannnnnnnnnnnnnnnnnnntttgtgctccatgtaaaggtgatgccaaatactgaaggcctgtccatggagcaggagaaaccggtgatcctgaagttcgttgtccaattaggccatgtctattttaatcagtccaattctggtgccacttgataaaaatatctccgtttcgaatctttatgtagctctactgtgatgttgttgcacttaacagcagaacaatcatttatgaaattttaatgtaaggcttctgcaaaccagtataccagaaatggagaaccatagttctggactctgatttttctattaatagttgtcttcatgaaaataccgtgtattccaaacaataccttgcaaggtaattttatattttaagagatctggtgcagagcatcggaaaaagagttgataaagctattatagataaaaagctgtgaactgaaattacgatttgggaatgagacgagaagagggctgagactgctactgcaaaacaacccggggggtgtgcggatcagagcgagatgtgggctgacgcagaaatcagctcaagatacaaatacgccaagaaaggctcgaagccggcgggaaccctgacgcttcgcatttctaccaactcagtttaagaaacccctaacaacgcagatgtcatcgcttcgttaattggtgccgacgatgagccacagcgaccacgctcaaaccgtttcgactgcagccaacctagatgtgccatttccacctagtcttctgccatcgctatctcccctataacctcaaattcgtccaaactaaaatctcgctatgttagtgataagaagttcagtgatgcagcagccttcttcagcggtgagctctttcctcacacatctttaaaagtccttctaatccgttggtttcttcgggcacgcgggcagaaaaccgtgctaacggccacagaggttcaagaggtgccaacg

SEQ ID NO: 448253 - DNA, 505 bp, Homo Sapiens
ctctcttggcaaatccctcgctcatcctctactttgccatctgttatggtctttctcattcttcttttctctgtctcaggttttctactgctctctctctcagtctcctgatccctttggccaacacaatcacaggagggctttggagtaagacgcctgcatcccggaggagcgcattttccaggggctggtgcagggcaggcaagaacacccggtgtcatatgacagccccgggcacctccccaacgcgggctcagggtaagcggtgactgcggtggggagacctggggagcataagggcctggaacgaggagggaggtgggggggcgacggcgccttaagacaagactgggaggcgcccagggcgggaatccgcctcgcggtaaggactttaaaaagtgctggtcgggaggagtcagaaaaaggttttgagcagggaaactacgcgatgggaagtgtatacattgccctatagcagaaagattcgggaagggaccatcctcag

SEQ ID NO: 448254 - DNA, 482 bp, Homo Sapiens
  misc_feature (317)..(317): n is a, c, g, or t
  misc_feature (416)..(416): n is a, c, g, or t
  misc_feature (432)..(432): n is a, c, g, or t
  misc_feature (442)..(442): n is a, c, g, or t
cctgggtgctggttaatgcacctgcatttttcctttattgacagaaccagctttcaggatatctgctaagaaagttcaaaaacagtcatggctggcagaagctctgggtcgtctttaccaacttctgtttgttcttctacaaaactcatcaggtactggagtttcactggagcccaatgcaggtgatgctagcagacagacacttaaccctgctcacctgtgtcccttttgtattttggttctgccctcccatgctttgcccacacaccctgtgctgtgtgaacagggaaactgggctcccttgggcccgtgggatnttgttacgtggccaccgttgtgcaggtagcagagggaatggggcattccctgtgggcaacccaggcccctgggaacccgtgttccctatgctgtcttgnaggatggactacccantgggccagcntcccgttgctgggttacagcgtgagattccccaggggatt

SEQ ID NO: 448255 - DNA, 462 bp, Homo Sapiens
  misc_feature (356)..(356): n is a, c, g, or t
  misc_feature (412)..(412): n is a, c, g, or t
  misc_feature (431)..(431): n is a, c, g, or t
ataaagaaaagaagtttatttagctcatggttccgagggctgggaactgtggaggggccgtatctggccttcttgctgtgtcataacatgatggaaagcatcacatggcaagatggcaagagcatgcatgtcagctcaggtctcccttcctcttcttataaagccatcagtcccatcatatgggcaccaacccccatgccatgtataacttttaactccccaaaaatgtaactactaatagtctactgttgaccagagccttactgaaacagtcgattaacacatattttttatgttatacatattaggacactatattcttataataaagctagagaaaaatattaaggaaaatncataaggggaaattattatttaggtaaatattaattccactatatttttatgggtncatccttaaaggggctgtnttccctgtgcatttgtttaaggcgggctgag

SEQ ID NO: 448256 - DNA, 908 bp, Homo Sapiens
ttaatggtttggactgcaaactagtacttaggctttcagcaacttggcagtgtttgtctgatgcagatactgcacccagttttaaaaaaggcttattactaaataaactagtgaagttaacaactgaaggagtaatagtatgaatgctggattcagaagtcaaacttggcttttttccaagggaagagcttattcttggaatatctatatgggtagtttttgaatcatttacctctttatcaatccctttacattcaatacttatactatgaccaactgacctatgaccaacgttcaagtgggtactttcagaagtaaactggttctttccaacagattcagaaatttcttcgattagttctgtagtagaacttaaaagtaatggattaggagccaactgtgaagaagtttcagggggacttctggttaaaggattaacagatacagtaggtgatggggaagggagattgctttctcctactgcactgaatggggatttagcggtagatacatcagaagcacctcccattttaaagtccggagaagtgcaatatacaggaggctgcttttcatgctttgaggtttcataagatcccttttcactggatgagaaactgtcttgctgaatgcatgttccttcattaaacatttctttctccaaattaatgatttcttttcgtactgagaacttttccaatatgctttctttattctgccgtacaacattcttttcaaaagttttgctggtggcactatctttcagggattcagaaagttcctgactttcctgattattgatgtttgtactacaagaagccttaagcggttcctgagtggggagcagtgcttcggctttaaggtttatggcatctttactgatcagacctgccaaaggacactcatgacgt

SEQ ID NO: 448257 - DNA, 774 bp, Homo Sapiens
ctgtcgggctagtcggggccccgactagcccgacagggcagtattgttgtcactttggaggtagcggataaggtagttgtagctgtcttcttggagacggaccacgtacttgttatctaggaatgctcgaagcttgaagttagataggatgtcctggatggtttgagtggtctgtagctgctcaatgacatccttctggctagcattctgcagaaacattccatggaagcggctgtaaaaactttccactgtgctcttcggactgttttggctcaggttgagatggaggtagacaaagagaggatagaggagaggcatcacttcgtggctatgctgggaatcagaatcgatgagaaaattccgcagtcgtccaaactgtacttcatattgctggggctctgcctggcaagggactgcagacactatgtcggcacaatgagattctctgtgtaccgtgagattggccgccaactcttcagcagtctgtggcagccgcagtccttgcttcaggggaccgtctgagtccacgtactgccagcgtttgaggtagcaggacactgccatctggatctcctcggtacgcactcatttcatgactgaacatcccaggcggccccggctccccaggcggccccggctccccacgccgccgcctcccggatcgagatgcttccgcctccgtcgtctctgctgcaggtctcgctctgaccgccggctcagctgtgtcctggagccccgcgccccgccgccctcgccaccgctctgggcggccgc

SEQ ID NO: 448258 - DNA, 506 bp, Homo Sapiens
  misc_feature (331)..(345): n is a, c, g, or t
aatatattttattttctctagaaattactcaaacaaaagcagccttctatcttgccttgtcttaatgctttaaaataaccaaactggagatctaactaccaaactgttcattatattattaaataccaactttggttacagtatagtgtctttactttagctgatggttctgtaaccttgtgctttttaaagcaatttttatgttttggtgcaaaagttgtccagtgtctcttgttcccttcactagagaacatgcttagaggtatgtttgtaggtatttttgtttagaagaactatttcatgcgctccattttatttattataataggtnnnnnnnnnnnnnnnggttgtaattcatcacccatgtaaacatgctcatgaagttgaaagtaattaagatttgatacactgatatcaatttatttatgtaactaaatcactgttttataaacttgttaatgatcaacaatttttgttttgattaaacactagttttttgaaagttg

SEQ ID NO: 448259 - DNA, 520 bp, Homo Sapiens
ccaaggtcacacaaagcagtgaattcacctcatgtcacagaactgctcaggttacgatagttacttttgttatgtattttaccacaatttttaaaaagcaaaccaaaaccaaccaagagtgcttcccccacacctcaaaatcatcctgcagcagctccctggcccagctctctctcaccctgaccctgggcccctctcccaccacccagggctagccctgtggaccaaccatctctgccagcccctccccgaccctccagccagggaggtggggcgctggccggtgaatggggcaggccaggcccaaaggctggcccagggctcaccagctctggactgggcgtcccgtctgaggtgggggatgaccaacatgccagctctgggttttagctgaggatgggcacatcaagcactgacagccagcaagctgggcacaggcgatgctcaacctctaacacatcggctgagaacctcacctgcctctccctgcctgggagccctggcaagacagctcctctcc

SEQ ID NO: 448260 - DNA, 883 bp, Homo Sapiens
aagaatcctttaaaaattctatttgagacccagcacacaagaatacgatagatgtcctcaaatgggggcttggctcacaggtggaaggacactaaattggtcccatctgatttcttgaggcaagggttgaacctggcttgcacaaatcacacctgtccaaagcaaccacgagttctactattttgcagcccttgctgctgggcgacgacgacgacctctctgcctcttctttccaccactacatcgcctcctggggcagcttctccctactccaccctgtgtacctttcccagaatacagaacctcaggccaaagagagatgccagccccattaatcacctctactgtaccccaatcatattacggaaagtcagacccaggagacaggactcaacagccacgctcatagggcagattccgtttgctgcctccagcccctcattcccgccttaattgtagggctctgcattatagccgcataattcatgcctccctaattatggctgtcaacagccccattgtaaagctgtaaaatgtacagcacctgctctccaggaaccctgtgccagggattggtagaggggagtgccaggtgtggatgggggctttgccaaagggttcactgattggcttctcaatcgccgtgtctggcatttatgcttgattctgggagcatggacaatagccaagaagtctcttgccgccaggtatcccgggacagaaaggggaagaggcgggtggggtataggaaagttaggggtttcctgtgtgctcttgctacaacttgcaagatttcacctctcccctagagggagctgctagggaaacagcttgcaaaaagtaaaatgggaagtctggcatggggggtcatgcctgtaatccc

SEQ ID NO: 448261 - DNA, 354 bp, Homo Sapiens
ctgtcagagtccagactgctctggaaatagaaaagactggtcgttaaaggctggttcgttgagtctttcatcgttgagtgataccacctctgcagatggctcagtggggcagccccgtaccacagcctgcccttgaggttgtgtagtttagataggtcacagagttgctgggcctaccgcaggtctcctgaccctggtgcagttttacttcaattacaaccaccaaaatagctacagtcaaaaattccaaagttcctacaccatcaacctccaccccacttccgtccaaagtccacttagaggctctcagttttggaccttagaaacacttagggagctttttaaaaagatcga

SEQ ID NO: 448262 - DNA, 681 bp, Homo Sapiens
  misc_feature (290)..(290): n is a, c, g, or t
aaaccaactgaaggccagagaaatgaaaggcatacccgtgaattaaattaatgctttaaaaaaaattgactttacttaaaatacaaacaaacgtcaactaatgaatactttattggcagaaaaaaagacaacttggctggaaatgctgagtgtcttggactggtctgaaggaagaacatctgaaaggtctgaatgtcaaagtcagaacagtctctggtcaatcctactttgcttaaaatccaacattttacctttcttcaaattcctcaagactaaggaaaacttggttntataccaagaattatgaatcaacctacacttgctatcccttacatcacattttcattctagcttttctgaaacactttaccagataaatgccatataacctaaattcacctcaatgctttcattttgcctttacaattaccttaggacagatgccaagtttttataacttcaggccagaaaatcctcaagtggctcacctaattgtcagaaagtgagtgagtgacaacagaacctcaggcacgaaactatttatcagcaccaattacactgtggggggttaccagaacaagaaaaggcctacatagttctaagtgaagaaagataaaaacattttattttggccaggcgcggtggctcacgcctgtatatcccagcccccagggtggtgga

SEQ ID NO: 448263 - DNA, 524 bp, Homo Sapiens
ttttgttttgtttagcatgaactagtttaacagactaaatggcctgaaaaaaacctggaattcaaggtatgcatattatgatggaaacaacaaagggtaaacatgatacctggcttcacatgtttgaaaaactgtcatatgaaagattttatctgtgtttatctgttgctcaagggagcagcactagaatcagtgggtaaagtgagagaaagctgattttcaatccaaaataaagaagaatttcaaatatacatgtctggaatttgattggggctaccctgcgcttccccatcaatgcaaatgttccagtgtgaactgagtagcctgcttgctgcagactcactaaatattcacatgtatgtaaacgatgatggcaaggaggcaacagaggaacccagtggaaggctgaattgctaaggcttactaaccaaggacttcttggaccccatttctactgctaggacttttccaagtctctcatgctataccttgacttctgtctctgtttcccttccagaaagtct

SEQ ID NO: 448264 - DNA, 900 bp, Homo Sapiens
  misc_feature (43)..(81): n is a, c, g, or t
  misc_feature (166)..(223): n is a, c, g, or t
  misc_feature (270)..(322): n is a, c, g, or t
  misc_feature (850)..(850): n is a, c, g, or t
ggcctgggtggcgaattcggcacgagggccggcgggcgctgcnnnnnnnnnnnnnnnnnnnnnnnnnnnnnnnnnnnnnnnccgggtcctgcctctcctggtgcccccagcagaggggcccggtggcctggggagggcgggcgggctgctcggaggcagaggcagnnnnnnnnnnnnnnnnnnnnnnnnnnnnnnnnnnnnnnnnnnnnnnnnnnnnnnnnnncagccattgttgagggaaaccttgcaaacaaagaaggctccggactnnnnnnnnnnnnnnnnnnnnnnnnnnnnnnnnnnnnnnnnnnnnnnnnnnnnnagtggccattgtaactttcccccgggacagcggccgccgcggggcgggccgaggctgtgcgtgcgagtctttgtgcggccggcggactggagctcccagtcgggcctgcccgtcccactcgggacatgagctgctgaagttgtccccccgtcagccctcacccctgccaggactcctctgggcttgcagtcgctcccccgtacctctcctggccccctcagttctcccaggttgttcctcaaagtcattcaagctgtactcgccgaaggagcccccgaacggcaacgcctttccccccttccatcccggcaccatgctggatagggatgtgggcccaactcccatgtatccgcctacatacctggagccagggattgggaggcacacaccatatggcaaccaaactggctacagaatatttgagctttaccaaacggcttcagaactggacagaggagtgtgacaatctctggtgggatgcattcacgactgagttctttgagggatgatgcatgttgaccatcactntctgcctggaggatggaccaaagagatataccattggccggaccctgatc

SEQ ID NO: 448265 - DNA, 687 bp, Homo Sapiens
cttgtttgttccaggtgtttttacattttattagctacagtatagatcctagagctgcctcattccctcccgctcccctcccctcgcccccaccatggggtcaggccttgccaggagcccctgcctttgctgcctgggcccgctggaactcctgctgcagctgagcaagggtctccctctgttgctctgactgccgctcaagatcccgaagctgggattcgtatcgcttaatttcagctgtgatatagtccagcctcttccctactgtggcccgagcctcccccagctcctgtttgactagcaccggacccagaagtttaaagaccacgttggacccatccagcagggccagttcctctttcacgatattattttctgttagttgtgcttcaagtttctgcctccccgacatggatttacttaagtccttctgtagctgttgatatttctccacttctccctgtagcttcttctggatcagctccgccatggcggggatgaaagcctactgggtgcgagacaagggcgctgggtctcactctctggaaggtacctgagctcccttttctgatctggcctgcggaaatgatagcactcttgagaggtagtcctgaggggcaccgcaacctcccccccgtcccggatatcgactccacctggtccccaggagatggtgggcgaaacgca

SEQ ID NO: 448266 - DNA, 771 bp, Homo Sapiens
ccaaggggttcctccccctcctgtttgggctctggacctgcccggctccaaagatcccccgaaaggctgggaatttcgtatccggcttaatttttcagcgtgtgatataagtcccagccttcttcccctacctgtggccccgagccctccccccagcctcctgtttgactagcacccggacccagaagtttaaagaccacgttggacccatccagcagggccagttcctctttcacgatattattttctgttagttgtgcttcaagtttgtgcctccccgacatggatttacttaagtccttctgtagctgttgatatttctccacttctccctgtagcttcttctggatcagctccgccatggcggggatgaaagcctactgggtgcgagacaagggcgctgggtctcactctctggaaggtacctgagctcccttttctgatctggcgttcttccttcagtagtaataaacccggaagtaaacaaggaatgctgggaaaagactgtgccggaagtttctttctgacccttgatgggaagtgtagttctgacatgtttagggagtggagttctgctaaaaagactagactaggacatttttaggcaagatggggaaactaatccagaaaaagaaaccgcaccgctacttagcccctggccccggacctgcctttcttttttaagtcactcttgcataagctgccgctcgcgataaggtgccaaaaactgttccgcccctctaaggagagcgtgccctcactcaagatccc

SEQ ID NO: 448267 - DNA, 513 bp, Homo Sapiens
actgttagctgaggactgctctcagctcctggaggtcaccctcaggtccctgtggtccctactttcacaacaggctgtttttcttctagaccagcaggataactcttctgcttttaaataacttgcctaattagatcatatctacgcaggataatctccctttggattatagtcaactgattaggaaccctttgccatatagcataatcgtggaggtgctatccaattatatttacaggtttcaaccatgctcaaggggagattacacagggtgtgtacaagagagggaaagtcacgacattcatctcagaattctgcttatcagactgccacctggtcattttgcacttcttgtaacacttaaccaacggatgaaaaacagggggttaatttattggctgtagtgattgatctgaatttccaaggtaaattggtttgcttctgcaaatggaagcaaggaggactttctggtacccaggagatttttctaaagtgcctcttaatacttccatg

SEQ ID NO: 448268 - DNA, 672 bp, Homo Sapiens
  misc_feature (572)..(572): n is a, c, g, or t
  misc_feature (591)..(591): n is a, c, g, or t
  misc_feature (640)..(640): n is a, c, g, or t
  misc_feature (657)..(657): n is a, c, g, or t
attgcactctgggtttgttttggtttgtttagttcacagtatctattcaagttgctccttttgttgtttcctctctgcaagccaccgttggattttttcttttagttctgtgtttggccggatctggtccatggtgaggggactacggttaaagggatctgtttggtcactgagcaaatgtcttgcaatggtggatctatccacagtgactctggaagatggcagcaccacagggtcacacatcagtgtgctcataatgggatccaggaactcatcacaggcatctgcataggtttcctcttcctgttgttggaggtctgcaagagacttgattctctctgccaagttgctgaaagccataatcatattcccaggcttatttattttcgtcaagactcgaactgtctgtgcaaagagagttggggaataggaacgtccatccttgggcacagtggcacagaaattctcctcatccccaagatttaagtagatagtgcagatatctgatacaagctgactgggtttgaagtcaaattcgctgaagtccttgacttttaaggcacccatcttgnggccaaaccagtgttgcangaagtagttcaacatggagatgatgcgctcagccaggaagggatgcacnaagagtgacttgatctntgatgtgagaaaggc

SEQ ID NO: 448269 - DNA, 483 bp, Homo Sapiens
  misc_feature (171)..(197): n is a, c, g, or t
  misc_feature (439)..(439): n is a, c, g, or t
ttttttatgtggtctgctgattttattttctttttccatgttgccccattcataatacagaccaggcttggactgaggtgtatataggataggtttactctgcctcctctctctattcagtcagtgaaagagcacagtctgtggtaagcaccaaaaggcctccattgatcnnnnnnnnnnnnnnnnnnnnnnnnnnngcactataaacaacaacaacaatggtcagtaacatagagcttttcttcacatttgcatggattgcaaaatctgcaaattccagaagtcagtggcttgaagacaaaacaactgtcacaagagacacaacacatagaaggacaggaagctgaagaagacagttttcaatattactgacccaggatacacagcaagtacccttttcctcctggcacctggtgccgccaccttgatggtatgattntttagtctatgatctgaaaaaatattttctcaaatgaagagctg

SEQ ID NO: 448270 - DNA, 943 bp, Homo Sapiens
  misc_feature (282)..(395): n is a, c, g, or t
tcttttcctggcccgcgctgctccttgtcgcgcctgcgtctcgctgtttagtctccctcgcgcggcctctgccctctgtcgcggcgcgctcctctctgtttccttcttatctttttcccgcttctcccgcttggaggttctacccctgttttgtggcgtgtgtcctcgcgcttttcgctcctttttctttctcgcttgctgtgcttgcgttttcgtgtgtctgcgtgctcgtagtgttctgtggggggttggtgtgttcaatttggtttgtattcttccccnnnnnnnnnnnnnnnnnnnnnnnnnnnnnnnnnnnnnnnnnnnnnnnnnnnnnnnnnnnnnnnnnnnnnnnnnnnnnnnnnnnnnnnnnnnnnnnnnnnnnnnnnnnnnnnnnnaatgctaatttttgtagaaaacacctgttgtcctcactggctggagcacgttctactttactgggaactgaatgaatgtgcaactctaattacagcccctccgaagtgcagtggcttgggaacctcccgttccgggaggcggcctgcagagccctcctcctacaagtgtgagcacagggtcagggttccatccaagcgagcacctgcttcctattttccgactaatttcggtcccctgatacggaatccgggatcctgcagacaggcagcgggtgacagcaagcacaagggtgttcgatgacacctggagaggtcaggagagccagtcctgcggtgcagaggaagaaacccagcacagaggccaacagagccagccccagcctctggaggcctgaaggtaccgccctgccgcgcgtgggcactgctcctggcgccgtccgtccactgaccatcgtccctcggcccggccgcccgcgcggggcaggcaacgcccgaccgggggcctcggggaccaggaggaacctgcggcgttaggagctgacagtgtc

SEQ ID NO: 448271 - DNA, 607 bp, Homo Sapiens
  misc_feature (11)..(11): n is a, c, g, or t
  misc_feature (27)..(27): n is a, c, g, or t
ctcttccctgnaaaatgccgtcctctnaaaaacctcttaaaaaaggcgtttgaagggtctggcaatcctcctcggcctcccctggggttctcccaggtctgtgccgcgagggttgccctcggcccgccggtccatgcccacctccaggaggcccagcaggtgcttggcagagccgtccaggggtaggatcttggaggagatgaagtcctctagcttccccagcagcccgctgttccgagggaagtccacagcgtagcagtcctccacccaggcctgcaggacgccagaggctccgcctgtagatcttggtgaaggtcgaggtggggtcctggtgggccctggtcagcgtgctgttgatgcggtcgaggaggaagtgcaggaagtcgtggggtgtgcagaagtagcggaaggtgtagaggaattgctgcacataaccctccaggaaggcatcactggagtacaggtaggccatgagccccagcggcgtgccggcctgcaggatgcgggccttctgccggccgcccgggtgcttgttgacgttgtagaagatgagcgaggaggactcgtccagggggctgaagtccagcgtgtcgcagggtgcggccgc

SEQ ID NO: 448272 - DNA, 592 bp, Homo Sapiens
  misc_feature (19)..(19): n is a, c, g, or t
attccctttttttaaaaanaatcaatacctcaaaagcaggctttgggacaagaaaaccccaaagtggcctgcttttcccatcacaggagctcattatccagtctgtgccaactgaagtaggagactgactgtgagtgctggctaaaagccctgggtggtgaggctcacagtactggtttccaggaggaagagcctttgtgcatttgactgaggccagtttctatgaagagcaagtagctgaggagaggtcgaatttactgctttttccaggacaattctggaagtaaagaaaatgtaattcaagctggttagcttaattttgtgccattctttaacataagagtaagctctattatgaaatacaactttaaaaaattttagctataaattatataaatgattttaaattgctgaggtttccttaggcagcttatttatttgtttacagttagactatctgagtaaatggttctttgtggacctaggcagttcctgactgttccacatgtagtacattgtaccaaagttcttaataagaatattccccacaatcctgttctctaaatgtcaaataaagattattttcactaga

SEQ ID NO: 448273 - DNA, 593 bp, Homo Sapiens
agtcacgctgtactttatttaaaggtggccatagcattaaagtgtgaattcattttgtacaaccagaaatggaaaaggagtcagtcaaggtggggcagaagtttctaacaaagtctaaagcatagttttatataactaataataaggacacaatgtttagcttacttaattcccaaactgaggtcactaaaacttaagaatatctaccaaaacttaagcaaaatctcagagagaaactttaaaaataacattttatttttgatcattcaaaatgtttcaatcaatattctgagcctaaacgtgtaggtgagtgctttctccatctttgcacatgtgaagtgcgcctgaaccatagccccacattttctcaaacaccatcacactcatagaacagaaaggaaagggcagtttcaccagctagcccccatacaccactccctagggtcctccccagcacctgataaatttgggaggcctgattccagggggctggataatgagctggcaaaataaacccagaagaatcgtaattgcagacaaagattaaactcaggttccagcacagatagacagcccataccagtgcttttgat

SEQ ID NO: 448274 - DNA, 447 bp, Homo Sapiens
ttgatgtttaatttttttattttaaaaataaaattgattcataaagtgcaagaagaagtcatttctttccggtagtctatatgcatcttcaacaagcaacactccaggaagagccggccatggcaggcggggactgtgtggcaagcctggttctgggcgccggcggaccggggctccggcgcggacatggcaaggtggccatgagggggacagaatggggcggaaggcgcagagtctcaggccaggtccagcttcttctgcgtcgccgccagcttgtcctgcagcctccttttcctccagtccaagtagcgcctccgcagtcggttcgcctgccagcccaggagtactccagaagcgaaggctactagcacggacaactgcagtgtcctctctgacacatccgccatggctgccgccggcgtgcagcgcggtctacggcgcggcccc

SEQ ID NO: 448275 - DNA, 1051 bp, Homo Sapiens
aaccattgaaacagtaatttattcctgagctatttgactgccatcaatccatttgttataaaactgaagggaaaacacacatttgaatcacttcttctaaagctttagtaagtgatctgttcaaataagcaattacatgaaagaataaaaccaaatttccaacctaaaattctgacaggagagtcaacatgatggttaaggcctatttcatattcaaacttcagtctatgaaagagtagagagagaagggtctcctctttcaaattaaatattataaaaacaattaaaaaaaggtatcaatagtcctaaaatgcagcaactccatctcaaacaagcatgacacacttctgatcagatgaagtatttacaaaggtagcttgtgttttaagcatgtaacactttgggtgacgacagaagtttctcctctttgggtgaaacctgcctaaggctgtagagatgaccaacactctgcaggtgttagttctgaataactactgtgggcttttcatgatcttccctccagtaggagaccacaattgagtctaaagtcagatccaccgttgtctatgggtaggcagggttgattcaaacttaatccttgtttgtattcttttggattactgcaaaaacatctagggaccagagtgaatgtctggtgaggcataactgcagaggtgaaagatgtcaaacattttcaatttggcagtttcttcaaggtgtgtgaaaattcacatacagaaggtctggcagtgtcttctgtaagttttcgtgttgccgtatttctgaaggagctcttgggcctgctgctgcatttcctgggccagacagccaggaaagtgggacctgatgagaagcaggacgaggcagcactccagcacatctgggaagggccaggccttaatgctctcaggaaattttgccattctctgatttgcctcggtaagccttttggttaactcaggcagagaaagtggctcatttttttcttctttacactggctctgagaactgcagaggggctgctctgcttctacttccggttcattcttcc

SEQ ID NO: 448276 - DNA, 464 bp, Homo Sapiens
ggaagttcaaaaagggaaagcactgagatttgggaaaactagcagcttaagccagaaacaaggttaaggtcctcgtggcattccagactgggagtagaatgggagaaggaagggaaaccgctggtgggttcctgctgtactttggctttacatctttcccctgccctcccctttctccccaccgcttgatgcagctattggcctgcccgaggggatgtaatgccccgacccactttttattgagcttatgccgctaaccgacttgtaaaccgtgcccgtcgaccaagttttgctgaatattacagcttgtgcccactaaacacacctctctctgagattaaaaaccaaaaaacccaagtaaaccaatactgagagagaatgaagagacatatcttgagtcttccagaaaggccaaataaaaaacgccacctggcttggtccccggcgttcaccaccactgtggc

SEQ ID NO: 448277 - DNA, 427 bp, Homo Sapiens
gcggccgccgctccctctgcgacctttaaaaaagcggtgaagcagttctcggcgtggtgcgtgtgtcgcgtcccgcctcctcgccgctcccgccctcggccgcccccgcactccgcgccggtcagcgttccggatggcggagggggcggagagtggcattttctgtttgacggaatcctgctccccaccttagggtaggggtgtcgcgggtgttgacgggttacctccatcccccaaattctggatgatttttaaggggttatcttgctgcagagtgaagtgcttcaggcttcagttttctgttcctgtgaatgcttcagaaaccctttcttaatattttatgttctaaaggggatacggtagaagagcagcagtttcttgttggaagttaatgccatttttttccctatggagaaggatgatgagc

SEQ ID NO: 448278 - DNA, 431 bp, Homo Sapiens
agggattttccttgggaaattgcaaagactagaagaaagttagacactgacatctccatacctgaatctctacccactccatctcacccaccacctgcttcacaaacttcctactcaaccacctaagatgagacttctgggcaatgtctcctcagccatcatctgccgtgatgtgtcaccctcaatcatgccaggcgttgtcgaattctccattcactggctcctcaatagctttaaaggccccagacctcaggttaatgaccaaggaaattgcaccatccatcagagagctgacttgcccacatgcaggatgaggccattgtaatgccaggtcttaaaggagagggtgatttcatcactgctgctctggatcgggttttgacacaagtcattgcacagctactctgagcctttggaggtggccacattct

SEQ ID NO: 448279 - DNA, 1391 bp, Homo Sapiens
  misc_feature (52)..(67): n is a, c, g, or t
ttttttttttccttccaaaatacttttatttaaaaaaattacaaacaatccnnnnnnnnnnnnnnnngccaccacaaactctgcctttcttttaaataacccggcatggagcagtttggtttccaccctattgcacgtggtccggcctggttatgaaatcaggaggctgctgagactggggtcctgccgaggaagtggggttcagcctggagggaggacaccagcccctcccaccccctcaaggtgcaagaggcagagcctgggtttctatagcaacctggcagcacatccctgtcatccttcgacaggcccagctttctttatcttccctgaggccccagtggtcacaggggagtgggaactagcaggaaaggtggaagaaatgtgtaagtggaaaatcagactcccagaaacagagtctcgttaaggcatttggaatagataaattaattcaggaagacccaccttcacagaaggtcggggtaaccagacacacacacacatgcaagacagtttgtggaaccctgaaatgggaacaaaggaggccatagtcactgcttcgagcccccacaaaaacacacacccagagttgcattcagggatccaggccaccgaagatgacatgaggaaggatcgatcccctctatcacagttttaggaccccagaatgatttccatgatgtgatccagttcattccactcccaagaacctggggcacagaagaggttgtgaggaggctctggtggggcccgtgcaggctccttttctaccggcagatgtgtcaatgtccagaaagaagtcatccaggccagagtcccccaagtaccgggagctcagagcttctaagaagactggatcaggctggggtggcacttcattctggaggccaaggggagtcactggattctgagggggctcagtcccatccatggaggtgtccagctccctgaggatagagccaatggtggctgacagggagaaatcctcctcgcccaggaagaggggctcggggggcagggcaggggcgggagccaggcgaagtgcagcctgcagctgttggagggtgttatggatgaggacatgcctgcggaggctgggtgctcgggggcccaggctgcgctggactttgtctagggagatgcggagcagggcttgctggtagctctgaaggcctgctggactccactcccacctctcctcctcctcttccaaatcagagtgtttcctcttcaagcctcccaccatgatgcccgcagctgccaggttcgccacgaccacctcctggaacgcccacagcgttgcgacccgccagtgccaggacccaccagtgaccggttggagcctcgctcacctcgcgggcatccctaattccgggccgtaccagtccctt

SEQ ID NO: 448280 - DNA, 689 bp, Homo Sapiens
  misc_feature (322)..(322): n is a, c, g, or t
  misc_feature (590)..(590): n is a, c, g, or t
aagttttttatttctaaatctttgcttgctgttagtggaccatcaacagttgaatactgcagagcttggacagtctgtgttgactcttgaagttttctactgagttcaagtttttcttgctcaaggcgcttaattcttctttcataagcttcagttgctaagttgttgtctagagtcctctgaacattaacatcaagatccagtgaggtgggaccagccgtaactcttaaacagctccgatcagaaagtacacagctactagtatatgtaaaacccaacaaatggcagatggttgccagaaaatgcagtatgtgttggtggnggcatcgtttcagaattttttaaacaatcatcatctacatcaaaattcgatgtatctgttgggctactaacttctggaatataaggtgcttcacagttccgaatattatccccatccaattccactggaaaaatgggtggtttcttaaagtcttctattccattttgaccaagtccgatgtctctgctacaaatgagcccttcgaattagattcttagcattttcagacacatcagtcaccttgggctggaaactgaaacccttcttngggggtcatgatttttcccgaatgcctccccagcgatcctgcttaaatgggggttcttcctaaaagctatttatacataacgacccccaaggaacacca

SEQ ID NO: 448281 - DNA, 571 bp, Homo Sapiens
atgtattcatttatttttacatacacaatccagttgttttagcagcatttatcctactcagggttctgtaagctttttggatctgtgagttgaagtaactcttcatctttggaaaattccaagccatcatatcttcaaatatttcttctgtcttatatcccctcccctactattgcaggactccagtgatatgtatgttaggccatatgatattatcccacacgtttcagaccatctattctgtttgtattcacttttctttcctcttactgcttcagattatttctgaagtgcgttagattatttcttcttaaagttcactgattctttctgccgctatatccagtctgttattaagtccaataaataaattatttatttatgatattgtgcttttcatttctagtatttacattggttctttttatggttcctctctctgctgaaatcactcaactgtttatgcatgttattcaacttttctactaagtcctttaatatgcttactatatttattttgaaatgcctgtctgtctgataataccaacatctgggccatctttgggcatgc

SEQ ID NO: 448282 - DNA, 905 bp, Homo Sapiens
cgagagcgcgcggggggcggttgccgtggcagcgccggctccagggagggctgctggcgccgggccgggaccgcggggcctgaggcggagaccggagagcccgcggcccggccggaggcagctcgggacaggcttgagcggcggggcgcgctgcccggccggcggggatgcgggaccggctgccagacctgacggcgtgtaggaagaatgatgatggagacacagttgttgtggttgagaaagatcatttcatggatgatttcttccatcaggtggaggagattagaaacactattgataaaataactcaatatgttgaagaagtaaagaaaaaccacagcatcattctttctgcaccaaacccggaaggaaaaataaaagaagagcttgaagatctgaacaaagaaatcaagaaaactgcgaataaaattcgagccaagttaaaggctattgaacaaagttttgatcaggatgagagtgggaaccggacttcagtggatcttcggatacgaagaacccagcattcggtgctgtctcggaagtttgtggaagccatggcggagtacaatgaggcacagactctgtttcgggagcggagcaaaggccgcatccagcgccagctggagataactgggagaaccaccacagacgacgagctagaagagatgctggagagcgggaagccatccatcttcacttccgacattatatcagattcacaaattactagacaagctctcaatgaaatcgagtcacgtcacaaggacatcatgaagctggagaccagcatccgagagttgcatgagatgttcatggacatggctatgtttgtggagactcagggtgaaatgatcaacaacatagaaagaaatgttatgaatgccacagactatgtagaacacgct

SEQ ID NO: 448283 - DNA, 319 bp, Homo Sapiens
gaagccttcccgcttctttaattggtgtaacagacatgacgttgtatacagagcacactcaggcccaatgatgcggggacagcagggacggatggggagatggggacactgctcacacatggcccagagaaacagacggcacacggacagaccagacgggaggggctgagacgtgaaggctgtgatggggtgggcagtgggactcaaaccgagccagggaggggtggggggtctctgctgaatccctctttagaaatcaaagagaaggcaggtggttgggcgtgggggttgttgtgggagttgggacttaagggcttct

SEQ ID NO: 448284 - DNA, 676 bp, Homo Sapiens
agcaagcaccttctctattttgggcatcaacacccaaccaaggacacagtgcaggcagcctgcttggcctctgggtagagaaaggccagcccctgcagaaagcccttcttcatcctgacagcacagcagtgctctacgcttccttgcacagaaactcataagatgcttgtggctggtgagaaaacacactgaaacatttcagctcctcaaatgctaaggcctcggtgccacctccctaaggttttattgttcactgccttcaaaacccatgtctcccgtctgccccgccccccacatcccttccagctcacctgattactcagttccattttcagctcagcagcctctgaggctggcctacttttcaaggccacacgagcagaaaaatttgggcattacacaaacaacagaacataactaggacaatgggacacagaaagggaagaacctgaaatggtgtgtaccaaggaggcaaggatacagggcagaacctggtgaaacagccaagggacaagtttgcagggcgggagggaagggctggcggggaaagagtgggcagaggcactgagcgtaacagagcaaggcttggccaggacaacctggaaaattgagctgaagaccaagaggcaccaggcaagatcactttacccagcaataagagctgtaaggctcactt

SEQ ID NO: 448285 - DNA, 1314 bp, Homo Sapiens
gaataatacaaaactgtttaatactaccaaaaatataattgtatgttgtgcggctctccctggctatcatgggaggactgcaggctgcctctgaactgtagtccaacaggagaaagggttgacagcctggggtaggggatgctgctggattaaaaaaggaggatgaggcccgtcccgtgaggtctgcgtccatgagggttagaggtgggttaggggcatgggggcaccagcaaggggagggttgtatggagtgggagagccagggggcaggtagtgggtataggtgggcagcagttccccctggagcctagggtcactctgagggagggagcacggtgagggggcttccagtttgcagtgggaagagccatagctgccaggcaggtaggctgtcgagtagctggggggtctgtacccaaagcctctgctcggttgggtggtcgcgtaccccggcccccagagcgggccgccgctggccaggttgcctcttccctgtccgcagcgggaaggtccggcgcccgagctcttggccttgcgccgaggccggtacttgtagtcggggtagtcgcgcaggtgtcgggcgcggagccgcttggcctcctccacgaagggccgcttctcgtcctcgtccagcagcttccactgcgcgcccaggcgcttggagatctcggagttgtgcatcttggggttctgctgcgccatctggcggcgctgagcggagctccacaccatgaacgcgttcatcggccgcttcaccttctccaggggcagcgtcccgggggccgcggggctcccagcgccctcccgctcctggggtcccgaagatgaggaggcagcagccgtggcagccggaggctccaggctccaggcctggtcctgtgaggagcctggtagcgccatgggttgggagaagccttaagagggcgtcctgaatgccctcccctcaacgtgaagcgtcgatcctgaaaatggaaaggtcttcccagtctggagtcgttgccgaggaacttgggtccttaaaaagtgtattttatccccaagcccagagcttaaaccggagcctttgcttccaacctgttcggcacactttggggagagtcgaatgcaaaatccgctgtctggtgccccggcactgaagaggtgttctgaggcctactgactgggggacccccggtccctctccccgacccgcagctgcgatcagaccgaccttccgtggagggggtaaaccataaacccctttgtggtctccggagttccgacagctgccaggcgcggataggccagcctcgtgccgaattcgccacccaggcc

SEQ ID NO: 448286 - DNA, 328 bp, Homo Sapiens
cttcgcaccgcgtttgctggtgacacaccccgctgaggtcaaggtcgcgcatgcgcccttgctcgcgttgctgacggagctgatggaggcggccggcgaggccggcaagctgcgcgccaccatcaacccgaagcgggtggccgcgatgaccatgcaaacggtcatgttcatcgcgcaatccagcggcggtcccgacgacgcgaccacccaccccatcaccgccgaagaggtgtgggacttctgctcgcgcggcttcgtcgcctagcttcccgaccggacctgtcccgcaccctcccgggttgagcaaataccgcacgctgtttgccgg

SEQ ID NO: 448287 - DNA, 377 bp, Homo Sapiens
gagggggtctattttatatttaaacccagctgtttggaagcaattataaaacttctcccacacaccaagaaccccagaactccccacccagaaggaaaggagacttagggtcctggtcccacagtctttaatgctgtagagtaggagaggggacaggcggagtgagggtggtaaaggactactcttgtccctgagaaggcagaggtgctggctggcctgcccttccccaggcttggataccttgggcctttcccttattcctgccccaacagcaaactcagaaggaaaaaacaaaacaaaactctaaaggtaaacgcggtccttctccctctctcatgtggctcctcctgcccctacctgggagaaggttcaagtcc

SEQ ID NO: 448288 - DNA, 554 bp, Homo Sapiens
gagagaagcaagactttagttaagaatgctacaagtatggacaataattagttctcaccttttaaaaaaagattacagaaaacactttactgaaattttttgctaaaaagacagtctttaagggtgtccgggagagacagcaagcacaacacagtacaaaaggagaagggaatgttgaattccagtgcaagacacgaacacagcacaattagggaatcaggaggaagcaaccatttcacaaagaatgaaattaggcatttatattcaatcggattttttttaagctttaaaagtcccgcataaggaagggaattgggaaaagaggcaggggacagggggcaggggatcagggaactaattttatttacaatcaccattttaccaaaaaacacactggttcaaccacatgagaagtggaggattaacctgcctacatagcccagcagatgttgacagcaaatgccaaggcagacaggtctagggttgatgtcacgactggctaaagagtttttaaagggaatcttattccacaaggactggtctgtcatcaacct

SEQ ID NO: 448289 - DNA, 1066 bp, Homo Sapiens
  misc_feature (102)..(110): n is a, c, g, or t
  misc_feature (249)..(261): n is a, c, g, or t
  misc_feature (293)..(304): n is a, c, g, or t
  misc_feature (346)..(368): n is a, c, g, or t
  misc_feature (379)..(393): n is a, c, g, or t
  misc_feature (414)..(414): n is a, c, g, or t
  misc_feature (486)..(585): n is a, c, g, or t
tcagtatgattattttggtgtttataaaaagaagagagagggaggggggcagaggagcgacccaccgcccaccctctcctattcttagtgtgtgggtgtctnnnnnnnnntccaccacaataattgttgtgatagtatggagaagactaccacccacaggtggggtggcgcacaacaaatataaatattttttattgtgagcggtgggcctccccagcgtgggcgagaaaaaaaattttttgtgccgannnnnnnnnnnnnggggggggtgttttcacaaagagggaggatgnnnnnnnnnnnngtgggggttttaaaagagccccccaccctcctgggtagcgcnnnnnnnnnnnnnnnnnnnnnnncaaaatgtcgnnnnnnnnnnnnnnnaagggaaaaatttttggtttngttggttggttgagtaggttggtttgaaatttttaagaaaagagacggggggttttcacccagtttttccannnnnnnnnnnnnnnnnnnnnnnnnnnnnnnnnnnnnnnnnnnnnnnnnnnnnnnnnnnnnnnnnnnnnnnnnnnnnnnnnnnnnnnnnnnnnnnnnnnncatacttattaccattcctagcaagcttagctgttcattgcctaactttttttcattagctaagactatataaattggggagctcagtgaataaggtttgaaattaaaaatgcctaaccttgcacattctgtcatcttcttttacaagatcattcccagtgaccccttctgggtgccaactactgaggaggaatacttgcactttggggagaaggctgactctgagaaccaagcccggaagtacatgaacgcagtacgaaagcggaaggggctttatgtggaagaaaagattgtggagcatgcagaaaagcagaggacactcaggaaaaataagtagctacctactactggtggattcttttccttatagtgaatttaaaagtatcatcaagggtttaatattgggaaaatttctttttgccacattatctctgtttattcactttcaataaagttgatccatataaatattttaaagagg

SEQ ID NO: 448290 - DNA, 555 bp, Homo Sapiens
  misc_feature (295)..(312): n is a, c, g, or t
tttttcttaaggcaggttagtttaattttatagaagaaatatttttcaaacagtacaaatgacacaattagagagaaaagagtgacaaaaaacaaagagatgaatactgattataacttattcccacaacagaaggctacttatttctacaattatcaatcaaagcctgacaattcagtgattagatgaagtgaaagccaaattcccttttacatgtggtactatttcaaaagaaccctggtggcaggatcctgatggttttgagaccagaactgcttctaaaacctggcagcgnnnnnnnnnnnnnnnnnnatcgcgaggcctggtagatggacagattgaaacatagatggaaacacctaggacttcacttttctggcatgtggggtatttttctggggttggcgtggcagtctgaactagtcagaagctccaagaccacgtcatgaatgacaagcaacatagggcgcttggtgtccttctgcctgctcaggccacctccactgcctgcatctgcacctgcagagaactgcgcggctctctggccttcctttg

SEQ ID NO: 448291 - DNA, 697 bp, Homo Sapiens
agcggccgctgcttctgcttgcctcgttggccttggctgtgtctagcagagggtgggcggcggaacggtttagtgatcgctgttctgtttctctctcatccacgcctgaatctgctctttcagttctggcactggttccagcatgctctctgtcagcgtctgccggttgaaggggtccgtgggggagttgagcaggtgccgcagatgatggagcggtccatgatggtgccagagggcagccgcacggggtctgtcatgagggtgtccatcagagggtctctgaactcatcaggagcgtcgctgtagtcgatttctgcgcgtgcttcttggccactatctcctccactttctcggcgagcagcttaaatttttctattgctattgtggatttgatccctgccttccgcatctttgaaataacttcttcaaacaattccttactgtaggatctctggtcgtcagcaatggctttcgcgaaccgagcacagtccagctgtaagtaaatatccgtcagttggtccaacagcttctttggttcaaagccgtatttctcagggttttcaactttcaggtcacggcacttggggccacaaagttgctgaagattaaagttcagcattgcagcccaatcggggtccaagctccggtctgaggaagggcttctggacctgcttcgtgaggatgtggaacatgtcgc

SEQ ID NO: 448292 - DNA, 445 bp, Homo Sapiens
  misc_feature (382)..(382): n is a, c, g, or t
  misc_feature (395)..(395): n is a, c, g, or t
  misc_feature (417)..(417): n is a, c, g, or t
ggtgacctgaaagttgaaaaccctgagaaatacggctttgaaccaaagaagctgttggaccaactgacggatatttacttacagctggactgtgctcggttcgcgaaagcattgctgacgaccagagatcctacagtaaggaattgtttgaagaagttatttcaaagatgcggaaggcagggatcaaatccacaatagcaatagaaaaatttaagctgctcgccgagaaagtgggaggagatagtgggccaagaacgcacgcgcaggaaatcgactacagcgacgctcctggatgagtttcagagaccctcttgatgggacaccctcattgacagaccccttgcggctgcccttttgggacccttcatgggaccgttccttnttcttgcggcacntgtttaaatttcccccacgggncccttttaaaccggcagacgttttacag

SEQ ID NO: 448293 - DNA, 466 bp, Homo Sapiens
  misc_feature (76)..(76): n is a, c, g, or t
aatttgaatcccctgcccttcccgcatcctttgaaaatcaacttcttccaaaacaaattcccttcactgtaggatnctctggtccgtcaagccaatggctttcgcgaaaccgaagccacaagtcccagctgtaagtaaatatccgtccagttggtcccaacagcttctttggttcaaagcccgtatttcctcagggttttcaactttcaggtcacggcacttggggcccacaaagttgctgaagattaaagttcagcattgcagccaatcggggtccaagctcctaggaaatcacaggataataggacaattcatgctgttgagacaagtgaaaaggaccaaaaactcccatttcagtggaggaacaggaattggttggattaatcttcaaagaatccttacaggtgctgtgtatcataagctgaagaaagacaacattatatttcaactttactccccatttctc

SEQ ID NO: 448294 - DNA, 452 bp, Homo Sapiens
caggggaccacaagagtattctctttttttaaaaaagaaaaagataaatgggcacatatatacaaaatactgtcaatttctactgggccaacacagtagccactgcaatgtttctccttcttccggagctttcctcccatagtctcacatgtactcctggcacagccacaataccagtctctgggaagcatatgtcacctactccacgtgggtcccattccagtcaccacagatggaagcacctgagcctccttgccagtttttccctggcagagtcactgcactgggcaggggagctgggagtgggagcacgtgggttttcctgtcctatatctcctccccccaccggcagataatactgttttcctcgggtgggcccttggggaaaggtcattcagggtttatggggccaggagggtgggtcagtttgattttggccattccatgggagg

SEQ ID NO: 448295 - DNA, 171 bp, Homo Sapiens
ttttgtgtcagctcaaagcacttaatgtaagaaaatactagaagaaagaagtactggaagaaaacggccacactggagtggaaggttctttctaagcatgacctagaagccgtcattagagagttggccaagacctgattaataaatttgaccaaattaaaaactcgctac

SEQ ID NO: 448296 - DNA, 442 bp, Homo Sapiens
tttttttccagatcagcacaaagtttattagccatttctgctcagaagagcccctttctgaacaggactgttcctctgacataacagacaagaaacagccacctgtgcagggcctttcctttatatctcaagctacatcaggagaacatcttggagcaatgtcagttgccccctggggttccctgggaatagctaaggtgtgagattgtccagagtcctatgacagaccttcaaggttttaagttccacagacttggactttgtccaggtccacaaccaacgaatagaaaccttcctttcaggtaaacaacatattgtacaaaaaagggaggatgataacataatagagaaagagctaagacccattgcttctcctctgtaaaaacaccaaactttatgccatactataaaaaagaaattcctactctgaaagtgggtacga

SEQ ID NO: 448297 - DNA, 931 bp, Homo Sapiens
  misc_feature (476)..(476): n is a, c, g, or t
tcagagaactgaaagagagagagaaaccccatggatgtggtgaatgtgggaaaacattcatgaggaagaagaagagatggatgtagatgaagccacaggggcagttaagaagcacaatggtgttgggggcagtccccctaagtccaagttactgtttagtaacacagcagctcaaaaattaagaggaatggatgaagtatacaacctcttctatgtcaacaacaactggtatatttttatgcgactgcaccagattctctgcctgaggctgctacggatttgttcccaagccgaacggcaaattgaagaagaaaaccgagagagagaatgggaacgggaagtgctgggcataaagcgagacaagagtgacagccctgccattcagctacgtctcaaagaacctatggatgttgatgtagaagattattacccagctttcctggacatggtgcggagcctgctggatggcaacatanactcatcacagtatgaagattcactgagagagatgttcaccattcatgcctacattgcctttaccatggacaaactgatccagagcattgtcagacagctgcagcatatcgtgagtgatgagatctgtgtgcaggtgactgacctttacctggcagaaaataataatggggccaccggaggccagctgaacactcagaactcaaggagcctcctggagtcaacgtatcagcggaaagctgggcagctaatgtcagatgagaattgctttaagcttatgtttattcagagccaaggccaggtccagctgactattgagcttctggacacagaagaggagaattcggatgaccctgtgggaagcagagccttggtcagactacgtgggagcgattacatggaatttcagatactaccttcgccttgagctttcgttgaacatcttggcacaggaaac

SEQ ID NO: 448298 - DNA, 438 bp, Homo Sapiens
  misc_feature (36)..(36): n is a, c, g, or t
aaaatgaacatagttttaatgattttttttaatttngtgcattggattcaaacagcaaactgtgtgcactcaactgttatcacaatgttgtcaagaggtctgtgtcttttaccattttacacacaattgttcattacagtatgttgtcagcctcgtggaaaccaggggtgtggcatggtaagcagtggtggtagtgcacctagcttttatattatctaacttgaaaatatttctcttctatgattccttttttcttgataaaaatagttttcaccaaacgttggtggtgcacacgcactaccattcatgcttgacatcacacccctgacaggaacacatgttcttgttttgttgataaaaagtattacaaaaatttccatacaaaaactattttcatagaaatcttgcatttccacaaataaacctgaacattttttg

SEQ ID NO: 448299 - DNA, 403 bp, Homo Sapiens
ttaaatatagcttaattctggacacaaacagttcccaccatgaagagagagtaggtgaccggaaaggagtgcgtcttaagcgcgttcgctgaatttgcaccactcaatccagccccgccgcccggcgcccgctccttagacctggactccggcaccctcccgccggggccgcacttagcagtggatagtctgtcctcctgaagaacgttgcgctccgacctccaagcatcaggtcaaaagtctaactcattctctgacctgccgccaattagaaaacaactgttgccaataaacgtggtcgcgccgcctgtgacctcagccgggacggacccgcgggcgggagcctgcggggcgtgaggcggggtggggccctggctcccctcccccgcccagccgcggcgtc

SEQ ID NO: 448300 - DNA, 426 bp, Homo Sapiens
caaaatcttcctggatgcagtgtggacagctgtggaagatgcagggggcagaaggattggtgaggaagttaggatatgtagggggtggccatggaggcagagaaatgagtggatttgagggttctggggtgcaaaatcaaggcattgtgataaattggttagggtgacaagaggacattggcaagggtgactcctagatttccatgattggttggacggtgttgccttttccttatcagtgtgctatcaaccccacaatacattgtcattatttttgtttaaattgtcagttaggtgtgagccactgcacctggcctgaagcaattcttgtgcctcagctatgtgggagtctgaggtgggagaatcccttgaaccaaggagtttgaggccaggctgggcaacatagtgtgcgaccccatcttgaac

SEQ ID NO: 448301 - DNA, 1114 bp, Homo Sapiens
  misc_feature (299)..(299): n is a, c, g, or t
  misc_feature (303)..(310): n is a, c, g, or t
  misc_feature (314)..(315): n is a, c, g, or t
  misc_feature (320)..(331): n is a, c, g, or t
taataccccttaaaaaaaattttttaatattttccccttaggggcctttaaaatttctttgtaaggtaatgtttgtcccaaattaggtccaccccccccaaaaagtaaagtttcctttcccaaaaagattcccaaggtagccaatttttcacagttcaggaggttggtaaaaagggggggccagtgccttagcctattaataggggttccctattaggggcccactttgtaacaagaaaagctgggtaccgcgtaagcttggggcccctggaggggatattttagagcggcccgccccngggnnnnnnnngccnnggggnnnnnnnnnnnntgcaatacagttgtatttataaaattttgtttacacacaaaaaaatgtattttgcttaaaaatataatttacatatatatacaaccacacaagggaaataacaaaatgttaatactagctaatttctatagagttggcattttaagtcagagggttattgatgaatagatgtagtttattaaatttttttctctatttcctaaactttctataaagaacttgtagtatctttataataggaaaaaatgtgattttaatgaacactccatatactttcaaagtagactaaattcaaaatatttacacttactcattttcatcttcgttgtcaaaagaaaggaggctactatttttaatttgtttttgtgagttctttttgaccgagtcctgatttacttcatcttcatttggcttcttcttttttgagcttgctgttaaacctgaatatttttcatctgagggatgcttgactggttttcgatatatgattcttccatcggctggagttggttcttcatctgctttggcagcctttatttctgctttaattttcatgacttcttcaactgacaggtctcccttttttaaaaccaccacttgaggctgttcatcttctttgtcactgtgatccccatcttcatctgggggctgaggctgaattctcttagtctctacggtgggtccctccctgtagccgacccgttccttgaagcgggccagaaacgccggctcggctggccgcacgtacgatacctggttccgcttgctcatggtagctctccc

SEQ ID NO: 448302 - DNA, 793 bp, Homo Sapiens
  misc_feature (77)..(85): n is a, c, g, or t
  misc_feature (126)..(263): n is a, c, g, or t
ggaaagaaaatcccctgcctgcatgttcctgcaacatgtatcccagttttgttttttctggtttttaagaataaagnnnnnnnnntttataaaggcaatgtatcaggttgggtgtgatagcacatnnnnnnnnnnnnnnnnnnnnnnnnnnnnnnnnnnnnnnnnnnnnnnnnnnnnnnnnnnnnnnnnnnnnnnnnnnnnnnnnnnnnnnnnnnnnnnnnnnnnnnnnnnnnnnnnnnnnnnnnnnnnnnnnnnnnnnnnnnggaaatctggaggtccatccccgacattgtgtgaccttgaattaagcacttcatctttatgtttgtcttcctcggccaactgtcctatgaaaaagtcagaggcactgtagtctcttcgtagctctcgttctctccagcacaacagcccatgctaggaagtctagaaaagcagtaacttatctcattccttaaattaaacagaggtttctaaatgctttggtactgtggggacccaaattatcccttgatactgcccccctattatccactattaagctttaaaaaggcgagagattaaatattgtgcccacattttacagtcattcgcgttcccgtttcaaattaaagggaggaaaacgcgttaaaattaggcctccgaccttcagaccagcctgtgggcttttttaagtcataaaactcgcggaggtggaaggccccggggaggaagaggggtgcattctagagctttcgggccgaccccaatttctcgttggcgacgaatgctaaccacgtgtcgccattttgtgttc

SEQ ID NO: 448303 - DNA, 349 bp, Homo Sapiens
  misc_feature (157)..(157): n is a, c, g, or t
tggtgttcttgtagttgtcttctttgaatttccaattcttcttgggatgggccattttgaacttgagcaggtagttgtgagttttgtctaggcaatgttggccctgtttcctgtgaatttaacacttctaaggcatgcatcatggcacttgcgaagnacattggcatcctctttgctgccaaagttgagaccatacacctgtctagcatctcgccactggtggaaggtctgtgtagcttgattgtacttcaaccctttaggaatggcacagtttatcacgacctgatggtcctgaatcttcctgcccaccactctgaatgtgttgttgcctgtatggtgatagatatga

SEQ ID NO: 448304 - DNA, 516 bp, Homo Sapiens
atagtgactatgttccccgaggaatgggagctccatgagggcaggggcctcccagtctggccacctctgaatgcagcccacagaacagtgctttgtatgtggggcactgagatgatctctgtggaagaagtgaggagtgatgctctgggccctgagagggaagcagagagaccccacacgcagacccagccccgaccaaacactcaggccaagcaggaggatatagcaagtgctggggaagctgtagcacaggtcagaaatgttaaaagaaagtggcaagaagttgtaagaaaggagtggggactctgaagaaaaatgaagaggaagggacagatgtgaggacactacagggaggacccaggaagaccaggccagcagcagtgctatgtgtgctggggatgaaagagggcacagaggcttcaagctgggagctggcccaagttcatgtcaaaggcactaggcccacctgccccagaaaccagcttcctcagctcccaggagagttgtctgcatgac

SEQ ID NO: 448305 - DNA, 608 bp, Homo Sapiens
  misc_feature (51)..(141): n is a, c, g, or t
gtttctatttcttcactactaagaaggaattctgcagtctcctgatttccnnnnnnnnnnnnnnnnnnnnnnnnnnnnnnnnnnnnnnnnnnnnnnnnnnnnnnnnnnnnnnnnnnnnnnnnnnnnnnnnnnnnnnnnnnnagactcatctgtcatttcttcctcttcctcctcctcttcctcaaacccatcttcattatctaatttaaacagtgcttggcgcttctggcgctcctcaaaccttcggagtttcattgcttcttgcagtttagcttttaacacctgaagcttttcacctggttttgtgtggcttgctccatccaacttcttagggtgctaaagtcacagggtaccacatctgcttttagctcttcctttccatcagtgcccatgtctttcactatgacggttcacaattcactgtctgaccagccctgggtttggctgctggattagcatgcttccagaaacgctgcttcaaggcttccagttctctgttggtttcaggttcaagtatcacaaaggaatcttcatcagcacctagccgtggtttaatggaaacatctactcccagttgcttaagtctatccagagtaaaccgtctcact

SEQ ID NO: 448306 - DNA, 531 bp, Homo Sapiens
catttttacttttagatccagggtctccttgtgtcgcccaggctggtgtcttttatcttgataaaatcatttagaaataatagcacttgtatggtgcttactaggccaggtacctcaaacatattatgtctacaaactcagtcaacagtcacttttattaataatgcatcagcctgagattggtgggtagctctgttttgctgttttcccgttttcccagaatcctctagggcagtctcctcctgtcctcttctgcccctgccccagacttcctggcccatggcagatgccagatgtcagacaactgagacagctcagaagaatctcccatagccagaaggaaactcaattctgcaggcactgcacagaaatgcttggtcccatgcttagctcaatcgcctctatccaggatctatgtactgggccgatacatagatcacaggaagttttatttctctccacccctgccccccaaccccgggcaaattccatggtccacaaggacacgggcaggctccagcatgtccagta

SEQ ID NO: 448307 - DNA, 487 bp, Homo Sapiens
aaactgtgggttcaaatcttagctctgctacttagctgtgagagtttctggttcatttctctgaaaccaaccaaccaaacaaaaatatgggaagggaaaatggtggatataataataattaactcttggggctgttgagacgtaaatttaacttatatatccagagcttggcacacagtaggtattcagcaagccaatcgttattgaggcaaaatcagggtaagaaccagagaagtgaggctacagcagagatgagaagatagggattccaagatgtcagtagtagcaacataatgcaaggtatgggccacatgttcagtctgttaaatccctagcactcaggacagagtaagatccatagcagcttctcatttctaacaacagcttatgctaagggttcccatgagccaggcatggtgcccggtgctttacatatgttatgtcaggcactactattttctcccttcgcagaggtggagactgaagt

SEQ ID NO: 448308 - DNA, 158 bp, Homo Sapiens
ttcttcttctttcaccctccgtctctcacaccccctccattcccctgtctcctttctgacactgcactgcagctgctcctcagccctgccccctccccagtgagaacaaaccagcaacattgctttttttcctaaagagatttatattgatccgatta

SEQ ID NO: 448309 - DNA, 781 bp, Homo Sapiens
  misc_feature (50)..(50): n is a, c, g, or t
  misc_feature (506)..(521): n is a, c, g, or t
  misc_feature (555)..(632): n is a, c, g, or t
tttgcatggtgcccttaaataaaattatttccctttgggaccttccaagngtgaccagtcccaaggacttctttggggtaagtaattgcaatcaccgcagggcccacccaagaaaaaatgtcagggtcacgacccccagaagctgtgcgtgcaagtttcctgtctctgtctccctgggttaagctactcagtggagtcacagcaggcccacctacagtaggctcctgcctgaggagttcagatgatgtttcggagaaaaagatgcaatcccagcttttcattgacctgttagggtcttcctgtaaagggggtcttagccaggagtcctgtgtgggcttcaggtcagggggccttcgaacccctaaaaattatatgccaaatgtgcggatggcatatttttagatttcatttgtttctcatcaaaactgctgtttgcaaggcagttatgcactgtggttggggctataactgtttccagaggctgttgatcaggatctggtaaaccnnnnnnnnnnnnnnnnaagacagtcttgctctgttgcccagacgagtacnnnnnnnnnnnnnnnnnnnnnnnnnnnnnnnnnnnnnnnnnnnnnnnnnnnnnnnnnnnnnnnnnnnnnnnnnnnnnncaatgattacctctggagagtggaattggagatgtaaaatgaggggggacttctacttttttacttgatactctcctgtattcttttaatatttttacaaagagtatgtattaccttctggaaaaagaataaaaactaaggattgctgg

SEQ ID NO: 448310 - DNA, 940 bp, Homo Sapiens
ctattttattgtttctatctgtttctatttcaaattatttgtcccgtttttagttatcgccgtggctaggtgtggcataaagaatatgtccagtgaagctccaggagcaggctgcgtgtttccagtcaagttcatagccaagtcctttccatccaatgggattgtgacccattgaggtcccagaaaggactggtcatctccaatggagcttgggacctggttgggtccaatgaggttcaaaagggggccagtcgcttaggagactgggttggagctttcctcatccaatcagggcggagacttccctgtccagtcccagtgaagttgggcgatcccgtccaatccaggtgcctgattgtcccagtcacaaggtggggcccatggatggcactgtccgatcgggtcacatgaggctgcagcgcgcgggatgcagcgccccctgcaggcgcagggccgggtgtgcagggcgcgcgcgcaccagagcgcagcgcagcagctcgcggaagagacgcagcacgctgccagttgtacttggcggagcactcgaggtagccgcagcgccagcccctgcgcactatggcggccagcgcgcgccgcggtccgaagcgcagcatcccgcgcgctgcagcctcatgtgacccgatcggacagtgccatccatgggccccaccttgtgactgggacaatcagggacctggattggacgggatcgcccaacttcactgggactggacagggaagtctccgccctgattggatgaggaaagctccaacccagtctcctaagcgactggcccccttttgaacctcattggacccaaccaggtcccaagctccattggagatgaccagtcctttctgggacctcaatgggtcacaatcccattggatggaaaggacttggctatgaacttgactgtgttttgttttttccttctga

SEQ ID NO: 448311 - DNA, 460 bp, Homo Sapiens
tcgagtaagctggtaagtggtataataggaatagtagaagaatatgccatagctatggctgaagaataggaataagaaaaatgtgcagtagacgctgtttgtccgacgatgatgaaagtgtgcacggccggctgtcctccgattgaggggccttgtcaaggcctcagaggcagcgaggtcacagcctggtggagggtctgggtgtgcgctgtgtccatctgcacctcacagacaccagtcatggggggatgaaaccgggccaagaacacatgtgtgcacaggctgtgtgtgcctgcatgtgtgggatgcgtgtaggctgtggcgggggtggagatgagggataggacagaaaatggcccatccaaccccacatcctggccgggcgtgtccaggtccctttggggcgagggtttggctgccccagacgtgacagggacttggctctgagggtcaggacctg

SEQ ID NO: 448312 - DNA, 1157 bp, Homo Sapiens
  misc_feature (395)..(424): n is a, c, g, or t
ttgggcgaggcattagctgatcgatgctgtgtcagtgttgaagtcgtcggctctcgggtcgcgtctctcgctctcgggtgagccgatgtatgccgggaggtcacgcgctgagagataggccgcgcggcgagccctgtgttcctctcgggagcgggcaggggttcaatgcttgaggggcctggcgccttcccctgtaggggagggcgcgggtttccaacggcccgttctttccacccccctaatctcatagtgatatctcagaggaccaaaccctctctttgccaaagcggaagaagggccgcccttgtcgcaagacccaggaagctgtgggcttttccggttctcccgattccttttgggaccggaaagctccgggtcctggggggggttcatannnnnnnnnnnnnnnnnnnnnnnnnnnnnnaccattccgtgccgggaggggtttttatcccagtggggattttccaaagggaggggctttggcagggcttttggggtctctccggaggttccaaaaggctggctgggggctctagggcagttccagccccagggccactggtgtctgccctcctggagcctgctggtggtaggaacgggggaggttcggttgggccagaggctggcttctccggaacacgggacctgctggccaagtgggccacaggggaggacgtgatgtggggtaggaaggctggctgggtgcagatggcgggagcattggggtcctcacatcgctccctggaggcctcaggagccccgctggctgtagggtacatgcagtcggcacaggatttataggaaggcttcactttgttaaggatcccaaatatagcatcatcctccatgccgttgggacagctcctcttgctgttgttgtttaggttctccgagttgagcaggttttgatcgagctgggttggaagctgcccccacctccctgctcccaggccctcctccctttccgtctcctccacctgcagcaaggagccgctccgacctttgggactcccaaactctagtttcttcttcacatccttctcacagagtccggaaccttgctggggctgtctggccggcctgtgcacctctgcaggtggagcagcttcctccaacagagcctccctctccctcgtgccggatatcgccaccca

SEQ ID NO: 448313 - DNA, 493 bp, Homo Sapiens
cattgacctgaaaaatccttgcttctctttttccttgagttgctctgaatgactaatattttcaggacttttccatggatcgaatgctggttgtctttttgagtggttggttccagaactgctctctgatggtagagaagaaactctagttgacacattattttcatggaaagaattgtctggacgtggagatggcactctgtaaaagctaccaactctccttggcacaggatcattgtataggtgtctattttctttgggggctgtgccatcatcagagtgtgggtcatgatacactccacccctcagacttctggcgtgtatggaaggaagaggtgccttctctggaggtctctttgaccgaagatcttgccacagtcatctctggagggagctgttctccaggcttgggtgacaagagttgcaggctgttggctctagctgccatcccttgccctatgctcaagcttccatccaagcccttggctctcac

SEQ ID NO: 448314 - DNA, 1573 bp, Homo Sapiens
  misc_feature (34)..(34): n is a, c, g, or t
  misc_feature (36)..(36): n is a, c, g, or t
  misc_feature (67)..(67): n is a, c, g, or t
  misc_feature (88)..(88): n is a, c, g, or t
  misc_feature (222)..(222): n is a, c, g, or t
  misc_feature (620)..(620): n is a, c, g, or t
  misc_feature (1359)..(1374): n is a, c, g, or t
  misc_feature (1387)..(1446): n is a, c, g, or t
  misc_feature (1448)..(1503): n is a, c, g, or t
cccgtggcgtcgctgtgtaataaaatagaggggngnctcgtcattcttgtggtatgggtaataacgntggagcaacagcgtgggtgtntagcatcagagacccgtgggcaaatacgagtacgtctgtctaggactatagtgaaacgtcatatcaccatgggcgtggtggggcgcggaccgggtgacgacacacccatcccgctgtcagtcacctagtaagtnaggccgcgtcgaccttgcgtcacatgggtacgagcgatgcgtaccgtgcgcctactactcctcataaattgccggtctactgccgcgcgggggtgctgactcactacggatgtgattgttataactcaggcgcggcggtgtgtggcgggaaagcaagcaccgagcggcggggagaaaaaaaatatgaaagcaacggcgggcgggcgtggagggccgctctttatccccagatatgagatggaggagtgctggcacagtgcccgcgcacgtggggtgtggtgatctaggtgtcgcggggctgtacgcggcctccccctccgctcataatctcgtggaagccgcagacaacgcctgttgtgagagagcggggggggaggcgacacgacgaccgctacacncgtcgtgtggtgggatgaatagaagtccgggcggcgcgaggcggccgcgcgaccaatggggggcggcgtggtttatttatgaggcgggggtgggagccgggcaaaacaccgtggtgtggtgtgtggggatgcgccagttatctcttttaggccacggcccggccgtgtcgccgcggggtgtttcttcaccgacgcggaaccagatgcccgcgaggcggggcgagcataggttatgcgcggaaaacgcgtttatccgcgggcgtaacgccagggccgcgggcacgcggtacgggctggcgggtatccgccgatggtggaaagtcggcgtctccgctcactccacgcgcgcgcaacggcggggtggggtaaatcatcgtgaagagggggggcgaggggaaacgcgggttatttattgatcttctcgctcgttttgtccccgcccgttaagaagaaaaggctgtaattttattttcaaatttttggaagtttttcagaaaaaaataaaatgacaagaacacatacaaatattgaaattattcattgaactataaacacttagcagaggaagggacttttgatgtatttgaatccgcctccttctgaaagcaggaatcacttctaaatgtctctcatatctttcttcaaggagtggttttccaggaggttcccagcctcctcaaatctttcccaagtttgatgcacttcacctcataaaaataatatatatatatatatatannnnnnnnnnnnnnnngagacagggtccnnnnnnnnnnnnnnnnnnnnnnnnnnnnnnnnnnnnnnnnnnnnnnnnnnnnnnnnnnnnannnnnnnnnnnnnnnnnnnnnnnnnnnnnnnnnnnnnnnnnnnnnnnnnnnnnnnncacatcaccacactcgggtaattttttttactctctgtagagatgcagtcttgctatgctgtgcatgctg

SEQ ID NO: 448315 - DNA, 818 bp, Homo Sapiens
ccggtacggacaatgggcccatcctctacgaggattaacggtactgtggcctgggtttgcgctccatgagtcaccccaggacccattccgggcgattgctctgccctcctctgggttcctggactgtcgacccctgcaccagcactggccctttagggctttggttgcgctttgtcccacgcacgttatcaacagaagttggctattgtaatgactgattctctcgtagtcttgatcggaaagtatattgagcactgaaaccttgaggatgcttctttgcccatttttggtcaagaaggagctgctttttgcctgatgtttctcaaaccaaggtagtgttctgtccgggctttttgaaaacgttttaggtaaaccagggcagaccaaacgggagcgcccccaattctgggaaagaaagacatggattttgtctgccccccggcggcacgcaccgccaccggcacttggaggcacgcaaggacgctcgccaggctgccgcaacgcgtgcctggggccagaaccccgctgctgggatttccctgcgcggtgccgatctaggttcctgggtggagttgtcccaggaccacgtgggctgaaagggaacccgaagtgactcccggcctccccacaggtctcgcgggacgcagcagcggcgagggcgcggggttgtggcgcctgggagcgaggggcagccggcggctgcgctgccccggccgagctctcgaaccagcgccgcgcctgccgctctgcggtttgggaggggagcggacctgcgagcgccgaagggcggtggggcagggcgaccgcccagcccaagt

SEQ ID NO: 448316 - DNA, 565 bp, Homo Sapiens
  misc_feature (266)..(266): n is a, c, g, or t
  misc_feature (268)..(268): n is a, c, g, or t
  misc_feature (271)..(271): n is a, c, g, or t
ggtctcagtttccacattcatacagtgagggtgttaagtcaggtagctggagacttcccatcgcctctgacacttttggaggtgatatgatacagcccccgaccaaaccaggctttgtggggggtgagagaatacagacacaagtggcaggattcagatggaagcttcgcaaggctgggggcgacggaccacccacttctctttcccagccctagttctgggttccccagtgggcaaaggggtggtggaggcagtgccatgctggntngangcctgcagtttttgtgagctctgggcttgtctccatgggaacaggggtgccttcttagtgagctcatttcacacagatcgagggggtatgcgtgggggagttgtgagtgagctcagctccttcaggcctggcctctcccagaacagagtgaagcccctgccctggacccctgctcccttctacccttgagggccaccaatggaagagcccgcccttcattttgcagctcctgcggccaggttgagctctgcccccaactttgttttctctcatgttctcaatacactctgcctc

SEQ ID NO: 448317 - DNA, 759 bp, Homo Sapiens
  misc_feature (505)..(505): n is a, c, g, or t
  misc_feature (714)..(714): n is a, c, g, or t
tttttggtggagatgaggtttcactatggtgtccaggcttgatttcgctaattttcttataaaagacagcaggaggctccgtcaactaagtgagacggaaaccaggggaaggagctgaggccccgacagggagaacccaggctcctcggaacatgcagaggaagatccgccgaggccccgacagggagaacccaggctcctcggcacacgcagaggaagatctgccaaggccactcggcaaagctgacggcaaggttgctcactcacatgacagagaatcaggtggggacagcattgtccccactcccaggccttctgggaagatcaggtattaggtagccgattggcaggtcacttaccttgaaccagtctgcatatgacaggaacgcagaggggccctccaagtgctgcctggcgcacaaccaggaacgcagtgaccatgctgtccagctggcagctctcgaatgcctgggccatcaaacgcgccacccagtcttcaaagcangcttctgcgcttctggaaagcagacaaccagggcagacacaaaggagagcactctcttccagtgaacctcctgcgtttccagaacttcttgcaaatggccaaccaactcctctgcactcagcatcacaaagagctgcggtacagtgaggtgagcagagggtgtgtccgcgcaaagctccactctctctgcatctgaacagcatcagatntttcagcacagggctgtgagtgagtatctgagtcagggtatgact

SEQ ID NO: 448318 - DNA, 615 bp, Homo Sapiens
  misc_feature (58)..(68): n is a, c, g, or t
  misc_feature (103)..(116): n is a, c, g, or t
  misc_feature (140)..(140): n is a, c, g, or t
  misc_feature (254)..(254): n is a, c, g, or t
  misc_feature (296)..(341): n is a, c, g, or t
cgcgcgggggggggccccccttttttgtggccccctttttttaagggtctcccccccnnnnnnnnnnnaaaattttttttggggcccttttgggttttccttnnnnnnnnnnnnnnaaagaatgtccaggtgaggttttnttggggttttggtcgcattctaagtttgtttggggggtttaattttccctttgatggaggggcatcctgtccaggggtggtccctgccttgcacactgagctgttgggataggnctctggtcgcccaccaccttaaactggaataactgagttggnnnnnnnnnnnnnnnnnnnnnnnnnnnnnnnnnnnnnnnnnnnnnntgcctcccataaccatacaaatgcaacaatagtaaatgacgctgtacggaagtgcccagtgagcccgttcattctggtgtttgacctgcgtggtggaaggaggcgctcctgacaatttttgctttgcaaacatttattctgtgatataactcaccatcgctgcaactgccagcactcagagtcaccaaaaattgggtaattatcttgtttttagtaatttttcttaaatgtatgtataactaactcatatcccgggaattccggaccggtccag

SEQ ID NO: 448319 - DNA, 467 bp, Homo Sapiens
  misc_feature (187)..(187): n is a, c, g, or t
  misc_feature (315)..(315): n is a, c, g, or t
cggcgccacctctgccgccgacgcggatagggtgcgctccttgagccgcaggccctccaggccgtggctgagcccggccacctcgatgctgttccgtttgtgcagctgcgcgtggcgcgcggcggtgaggggctcgctgacctcctgcagcgagtgcgccacgggcaggctgtcctcctggaacgtnttgcaccgagtggttcgcgcgccgcgtgatgaggtcggggttgctgctgctgatgtaaaggtggcgggacaggtctggcgtgctgttggctggcctggggggcgggtagggtgggggtgggcggtacnacctgcgtccgcatgatgttgggagacgggtagtcctgcgcctgcagctgcgcattggtcagctccggcacgctgaccgcgcccaccacgggccgccgctcggcagggtaggggtagggagacgggctgtggaagctgtagctcaggctgaa

SEQ ID NO: 448320 - DNA, 427 bp, Homo Sapiens
agcagctctggaatgagaataggtatttgtaacacacataactgataaaggattcatatctagaatatacaaagaactccaaatcaatgaggaaaagtcagaaaaccaaaaaaggaggacagctaaagctgaaaaagcacttcaaaaacagactgtacccagctgtctgataaatatgaaaaagtatgcagtctcaaagtaggtccaaattaagaccttcatgagaattggtatacacccatcggtttggcagaaatccccttctcaagccctggaattctgggctctacccccattgctcaaagatctgaccattttccatttccatcccttccatctttctgcagtacctggcattcctgaccatgctatttctaccaatcaacaaaaactactagatactcagaggggatttaatacagagagc

SEQ ID NO: 448321 - DNA, 764 bp, Homo Sapiens
tggtgtttatgtgtttttagacaaccacaactgtttattggtgaaagactcagcttcctcatgtgctcgctgcaaaataaataaaataccagatgctagtatcgtacactatttacaacctgcagctgaccaagcaggtcctgaagccttctctgtggaccagtactgcactcttctgaggctacgggagaggtccagcagccgggccagggactaaaaggaaacgaaggatctgttttatttcgagctcgggggcaggctgcacttctcgcagatctgaacgggcagcatgtgagtcaaggaagtactgtttatggccaccagcagctgcaacttgcccatacagtcctccagcgccgcctccgggtggtctcccagtcgcaagtccacgggccgcgagacccgcagcatgcggtccgccagcgccaggcagcagatcgccaggagggaaggggagtagctggtgaaggcatagtcggccagactcagctctgccaccccccgcgccagggcttgcgctttcagagcttcggaggcctcagcctgccccgcctccacgcgagcgtgcgtgaaatgctccaggaagaagctaatggtgggcgcacccagggtgaagtgcagcttgtgcagcacgatgcactcgaggttgcagagctgctgccgggagaaggcgccgcagcagagggccagaagctgcttcaccgcccggcgggtgcacctccacctgtttgcaagcgatgagcaaggaggtgaccccaagcagc

SEQ ID NO: 448322 - DNA, 239 bp, Homo Sapiens
ttttacattttaaacatgtatttctgtaggatgtattctatcatctgaaatattaataagatccaagaatttcttaactgaacagtaaacagatccgaagtatataatctgtgaaaatgatttagaaagcattttgactgggggaggtggaaaataaggacatgtaaatgatctgcagtttaaaatgcaaaatcctgtcacgttacatctcacatgtccaagacatcctccgtgtgctg

SEQ ID NO: 448323 - DNA, 891 bp, Homo Sapiens
ctctggtataacttcaactgtacttagtggaatggtcctcccgatcgttacccatatggacatctaacggtgcaacgtcacatcgaagatctgttccaccatttcggtgacacccgtcaaggtttcaccttatagaagggatataaactagttgaatcttatttttcaggaaaattgtagaagtctggcaacaaactgatatcaatgtgcatggcagctagtagcaggtcttttgtattggagcacctacctgagacgaagatacaatacaatgcagaaaaatagcaatggcatcaagatttcaaggacgtgctaccagagtcttccgtttctaaaatggagacctgaagctaaatgtcaacccatgacagtacacatgtggtgaatgctcttccatgttagaacactgttaatttcttccagtctccgcaactttaagatgaaatccttgccagcgaagaagttttaactttctgaacaccgtcattttcctagctgaagaggagggctcatcaccggctggggacccccgaggcctccctcgctccttaagtgagggcgactccgctcatcccgggacaccgcgccttctcctgtaaactcgacgcctgccccgacggccgaattccagaaggttcctcgccgccgcctcgccttcggtcgcgccccagcgcccggccagaggcggggaagcccttcccccggtgccaggagtgacgagggcccaaggaaagacagtgcgtgaggagaaatggagaaacggccaaagtcgagtttccgggtgtgaagacttccactgctgcgaaacgcacgtgcgcagagtcattcctgtcagaggccaccgcgccctcgctcggctaccgccgctgcgcgccacctgctggacatagg

SEQ ID NO: 448324 - DNA, 484 bp, Homo Sapiens
ggatacagtttttggtgatcgaataggacttccgaccattgctggtgactgggcggttttaggtgatttagtcttctgtcctggagagctagttttagtctttgttttaggtgtaaatgactttgtttctaatggttttgcagttggcatttgtgattttgcaactggagccaacattggcggctcgggtgagggaggtgccaagtctgtactgtcctgtacatggactggagaaagcattggtgggatcttttgagtatttattgagctgagtggctctcgagcttccaataacacaacatctagcgtgtcccctttagtgcttaatagccgaggccgcttcatggctggcagttcttcagcttcaggactatccagtggtctcttgcccaggaaattctcatcattaataatttcttcctcctccaattcatcatcttcttccaagggaacctgcatggcttctgctgatgtgcctccatca

SEQ ID NO: 448325 - DNA, 668 bp, Homo Sapiens
attccatttttacacatccacctgtttgccattaagtcacaacattttatcaaaatatacacacaggcacaaatacctttaaaatgtatggttggaattctaattcaactcaattgactgctgcaaacagcatgcatgggccattgatcttgaatgatgcctacggagggggcttatgaggtcatgaaatcaccagtcatgggcatgaggaaggggttaagggttcttttcccaggagacttatgcacttcatttcttttcttgttatagtgtgagaatggcagtgagtgactgtgccaatactggagtctgctgagaatgggtggatggaaaggtttttactggcaagggtgaaatgatactatcttttctatcttgacaagataacaagcgaaggtgtctagcaaaccttccctctcactttccacttgtcctcttgaccatggatttcatgcccaatcaggatgaatggatttgagatctcaagtacaagctatgtttattgtaaagaattcccataaaacctatccagggctgcccccccagcatttatacatccacagattggaattgaataaaaacggttaggattacttggctccggtggagtggatccgttttaaaccagccaagtgggggcgtagcctggagacgtggtctcgtttgcc

SEQ ID NO: 448326 - DNA, 595 bp, Homo Sapiens
  misc_feature (449)..(449): n is a, c, g, or t
  misc_feature (565)..(565): n is a, c, g, or t
  misc_feature (578)..(578): n is a, c, g, or t
gcggccgcgaccccgacggcttcctgcgcgtggagcgcgtcgcggcgctcggactgcgcttcggccagggcgaggaggtggaaaaacttgtgaaatatttggatcccaacgacctggggagaatcaacttcaaggacttttgccggggggtgttcgccatgaaagggtgcgaggagctgctgaaggatgtgctgtcggtggagagctcggggacgctgccgtgcgcgccagagatcccagactgcgtggagcagggcagcgaggtcacaggccccacctttgctgatggcgagctcatccccagggaacccggcttttttcccgaggacgaggaggaggctatgacgctggcgccacctgagggcccccaggagttgtacacagacagccccatggagagcactcagagcctggaggggtctgtcgggagtcctgccgagaaggacggnggacttgggggcctgtttctgccagaagacaagtccctggtccacactccatccatgacgacctcagacctttctacacactccaccacctcgctcatcagcaatgagggacagtntgaagactaatgngagaggctcgtggccga

SEQ ID NO: 448327 - DNA, 856 bp, Homo Sapiens
cgtcatctcagctcgtcaccgtctttccagggagctacccttttctggtgatgtcattgttcgcaagagtcaatgctgtcccggaacaggtcttcggtgctgccaattgctgctgctgaagttgctgctgtgcatgagctgccgtccaaaagccgtgctggagattctttcggttcgggcctgttggccttcaggtttttcagtcgggcttccaagtcattgagcaggttgattttcttgcagcattgagagcagtaaacatctagcaattcgctgttgtacacgtgccgcattttcctaggcgtctgccccgcactggaagacaccgaagaccccaggtccgagtagacgttggtcctggtctcatcatcggggcaagggctgctgggggcacagtccacatcgtcaccctccccatagtcttcaaactgctcctcattgctgatgagcgaggtggtggagtgtgtagaaaggtctgaggtcgtcatggatggagtgtggaccagggacttgtcttctggcagaaacaggcccccaagtcccccgtccttctcggcaggactcccgacagacccctccaggctctgagtgctctccatggggctgtctgtgtacaactcctgggggccctcaggtggcgccagcgtcatagcctcctcctcgtcctcgggaaaaaagccgggttcctggggatgagctcgccatcagcaaaggtggggcctgtgacctcgctgccctggctcccgagagctggcggggtgcgcatccgcgggccgctccccggcagaggcgcggaagccagcgggcgcagggtcggcaggcgcgcggggacgcggcgggcagccccgaagcgcag

SEQ ID NO: 448328 - DNA, 313 bp, Homo Sapiens
tcctcttgtgttttcccctccccaggtattgttgagtctgttcaaagctgggtgtgttgaaacactgcacaaatcctgccactcttgatgtgccgcttgtctcagccttggcagaggctgagtctgttcctgtgcccacctgtccagcaggttttgatgttggctcctgagagagtttgtatttattttattttgcactagtcccagttgttgttaaactgtatcaaatgttttgggagattatttgcctgagatggaaagagagatggatgatttattgcttcaattgttttaaattaaaagctattctccc

SEQ ID NO: 448329 - DNA, 549 bp, Homo Sapiens
tttgatggttccgaggattaattataacagtcaccatttattgagtttattgccagtctacatgttcgctaaaggactctccatgtcttacacctgaaaccctcccaccagcctgggagcccgttttacaggtgagaaaatggaggcacagagaaggtgggtcattttcccagaacacacagctgctaagtggtgaagttgtgatttgaatccaaacagtgtggatccagatcccgtgctcttaatgcgagctctaaatgaggctagaggagtgaacggtgagcccctgggaggtaggtgcctggactctggagtcccttctcagcagtcgccatgtataactaggaagcactcgcatttaactggatcagtatgtccccagactgagcttcttggggacaggatgttggatgaattaattaacgaatgaatgaatcgggcaagggagacagagttggggttagtgattacaacaggaggaagccttcccccgctggacctcagttcacccaggtgagcaatgtgtgcacttcactaagtctctgtgac

SEQ ID NO: 448330 - DNA, 968 bp, Homo Sapiens
  misc_feature (753)..(785): n is a, c, g, or t
  misc_feature (914)..(922): n is a, c, g, or t
ttcgcgtcgtgccggtttggcgctctggtggttgttggccggtggcgctccggggcgtgggtgttgcggctccacgctgtggttcctgccgtgttggcggctccgtgggccgctgtccccgccgtcctggggaggccggctccgctcctgcttcgtgtgggcgtccgtctgttcacgcggggggtagcgcgcagccctctcccgtctctcgcccctgtgtctccgttctggtgctccttgcgcggccggcgccgctccgcgcccgccttcttctggcgcgcgctggtgtgtggatcgcgatggggtgcggggtggatgtgagggcgacgcggcatgcggggcgtgtgctcggtggggctgcctcatccacgcggccggcgttctaattttggagaatactgagccgcctcgctttgggacactcccctcgtttgataagaaccccccgcgtgatggtgctccctctccggaggacacgcccgatctctagggatttgtgttctcgagaaccgcgctgctgggttgtcgccccccggcgcggttatttttagttcgtggtggggagtgcccggcgcccccgtgtggcctgggggccccgggggttctctctccctgggggagaccacgcgcttgtggggcagcatggtttcacgcgtgatcgccactgggggcgcccccgcgccccccacacgaatgtgtgtcttaaaaagcttttttctcgagggcgcgcgagggcgcgccccacacacatgnnnnnnnnnnnnnnnnnnnnnnnnnnnnnnnnngaggagattattaaatgcttttattttcaatattaaaaatcagtatttttaatattaaaatggcgctaattttaacaaaacgacagaaaaaaaccccaaggtacaatctacagggaaactcatcttgannnnnnnnnggccgtaatggccgaattcccgggcatatgtccggtaccgtcgact

SEQ ID NO: 448331 - DNA, 763 bp, Homo Sapiens
agctacagaaaatttttagtaattttattcatttttcatagctttacagcttttatgaaaataatgatcactgtaagtataaaatgaaaattaaagaaaagggataataacccaaaactctccctggccaaaaaaccagttagcatatggcaaatatccttccacacattatcttcaggcatatattcacaatgaaaggtgatcatttatattaactagatcttaccaagagagccaccagccctatttctcccctaaatacgagttctattcctgttcatggttctgtgttatcatcttgatggatttgttagaaagattccaagtgtgaacaaacccccttccactctcagtagttttacagggtttaccaccagcatggactagcccaaaaacttgaagatgtgcattcagacaaaagttggtaacacatttctcatttctaaagctttttaccagtatggactttctgatgatatgtaagacgtgaacggtgacggaagtccttatcacatatgtcacatttgtatggtttttctccagtgtggactctctgatgggcttcaagacgtgcactctgactgaagcctttaccacactcttcacatttaaaagagtttttccctggtgtgaacacccaggtggacctcgaagatttgaggggagactgaaggccttaccacactcctcacatatatggggtttctctcccgtgtggaccctctgatgatggcgaagattcaagctcctaccaaagcctttc

SEQ ID NO: 448332 - DNA, 303 bp, Homo Sapiens
ccatattctgggcacatggcggttattgggccgggttggaagcttgccctaggaattttagatggagacgctctgtcttgccgggtgtagcacccgctcctgtggctcctttcctctccacactggccaagcaggagctgaatgctttggaggctccctgggcataaggcccaggtgaccactatgtgttggtgctcagcctttgcacatgctgtccctctctgtggaacacattccctggcccgcacatcttcctcacccccaattacctcccgggctccacacagtgcatttcctcaggtg

SEQ ID NO: 448333 - DNA, 360 bp, Homo Sapiens
  misc_feature (217)..(238): n is a, c, g, or t
  misc_feature (258)..(309): n is a, c, g, or t
tacatactttcgcctaagacagttctgtatattcttctgttaacggggtagcaaaagcatatagaaaggttttggggggatgcagtgcattgctcttctgtaatgacagtaatttacttcaagacattgcaggagaaggggttaaaggagtaaaggggaggaagagaaggattcatttcatgcctacctgtacagagacactttcttgctttctacnnnnnnnnnnnnnnnnnnnnnngagacggaatctcactctgnnnnnnnnnnnnnnnnnnnnnnnnnnnnnnnnnnnnnnnnnnnnnnnnnnnnctgtctcctgggttcaagtgatcctcccaccacagcctcccaagtagttgg

SEQ ID NO: 448334 - DNA, 414 bp, Homo Sapiens
atctctgtgaaaggaagtttatagcatcactatttataggagagaaagcagcagaggtatgcatctggaagtgaatataacattgtaaaaccagcccacattaaataccaaaaaagtaagaaccatcaaaatgcagcattatttacaggattaaaagtgtgaacagtacagagttaaactttcttatgtgtgaattttgacctgctatgttgttagcaaaaagctttagtgtttgtataaaatgatgtgtacccttatcccaaccaccaccagatcaagacacaaactgacaatgattccttccttattttacagctttattactgatttccctctaaaaagagactcaagtgtggagctgactcatctatagattaaggaatcacaaagtaccatagtcacttaacaaatggc

SEQ ID NO: 448335 - DNA, 590 bp, Homo Sapiens
  misc_feature (35)..(35): n is a, c, g, or t
  misc_feature (40)..(40): n is a, c, g, or t
  misc_feature (60)..(60): n is a, c, g, or t
  misc_feature (196)..(196): n is a, c, g, or t
  misc_feature (340)..(340): n is a, c, g, or t
  misc_feature (441)..(441): n is a, c, g, or t
  misc_feature (524)..(524): n is a, c, g, or t
  misc_feature (541)..(541): n is a, c, g, or t
  misc_feature (551)..(551): n is a, c, g, or t
ttaaacaaatagaatatattttattcataagaagnttttnaaatagtaaaaataaaaatnaagtgctaatcaaaacagctaactataagttctttgctgtttccaaagagtctctgaaccagagactacaacaagcgagtatttttcaagctttaaaagttaatattacatgttagactcctaatagatacttacntcccattttcaaactgcattcagtatcatttgttttcctgatgactagaacatgtaactttcccacatagatgtaacacaggcaaaagacaagacaaatgcattgtaaaatacatttaatagtttaatgggaaagtacagtccnaaaaattttaaacttactggttcatgggaatccagccattggtggctcaaatcgtatgggcctgcaattcccccggtagagagatatacttttctgctganatgaactgagtccaagtgttgtctcggtctgtagtagccctccatcatcaaaacgcagtacttctattatgctctctgactgnacgaatgcttccttctnggcccgcgcngcagccactacgagggtcatcaccaggtgcagcgctcct

SEQ ID NO: 448336 - DNA, 1152 bp, Homo Sapiens
ggctcgactcggctcgcaggcttcggagaaacccctactccagtctgccgactcagcgcccaagagggtcgccttgggctgggggcgcaccccatggaggggaggggtccaggcagctgggccgccgcggacacctagcggcttcagggtgaaccccgaccgcagccgtcgccgcctcgggcagagtttgcgcccttgctttgcgccccgggcgctgaagccgggcgggcgatgcccgcggcgtgaaagcgcccgctggcgggcgccgacctctgtcctagtctcctgctccccccgccccgcttgtcccgtgcccttgtgaccctggctttggcgccgtcgcccagtgcgccccgcaatgtagctgcccctgcgcctcggcgggaggcgtcctgccccgcgagcgcccggggcccggagcccggcctgggggctcagccgagctcgggcggggccggggccgcggtggcgatgcaccgggccccgttagcgccaggatgctgccatgtgcagctgaggcggggggcaatgccctccctcggaggagccgcgcccccggtccctgctggtcccgccggcgatgctgttccacagtctgtcgggccccgaggtgcacggggtcatcgacgagatggaccgcagggccaagagcgaggctcccgccatcagctccgccatcgaccgcggcgacaccgagacgaccatgccgtccatcagcagtgaccgcgccgcgctgtgcgccggctgcgggggcaagatctcggaccgctactacctgctggcggtggacaagcagtggcacatgcgctgcctcaagtgctgcgagtgcaagctcaacctggagtcggagctcacctgtttcagcaaggacggtagcatctactgcaaggaagactactacaggcgcttctctgtgcagcgctgcgcccgctgccacctgggcatctcggcctcggagatggtgatgcgcgctcgggacttggtttatcacctcaactgcttcacgtgcaccacgtgtaacaagatgctgaccacgggcgaccacttcggcatgaaggacagcctggtctactgccgcttgcacttcgaggcgctgctgcagggcgagtaccccgcacacttcaaccatgccgacgtggcagcggcggccgc

SEQ ID NO: 448337 - DNA, 537 bp, Homo Sapiens
  misc_feature (343)..(372): n is a, c, g, or t
tgcaacaaaagaaactatttatttggaatatgcattaccagtacaaattaggagactgtaaaacctacaccgtgttagtatcattagagaacacaaaagttcagttggaatcaaaagggacagaagcctgtgctctcacagaagcagaaaagcttaaactttcaaaaccaaaccagagcagagctttgcaggtttatattctgattaataggaaaaggggaggggtaggggggagattaaaaccaacaaccaagggaaagcatttcaaattgaaaatgccaaaggaaagaagtaataagagagaaacaggagaaaaacattgaatgttttatttattttaacnnnnnnnnnnnnnnnnnnnnnnnnnnnnnnattccaggaagctttgagctagggattgaaaccataaaggtgatgtgaaaagctcatcattattttgttgtgacttcaagagtacaagtgttcaggtagaaatatttcctaaagcattgctccacaattctgcattctttctttacttttcttgcttaagttctg

SEQ ID NO: 448338 - DNA, 810 bp, Homo Sapiens
cccaactcaggccacgcgtccgctagggccgctgccgcttccaatggccactcccgctgcccgcagcgtccaggatggaggtgcgagggctgcgggaacgccgggagggagcttcccggcccccgtcgtcctggtctgggacgaggtaccgcggagatggagatgttgaagcaagtgacgggctccaggagcagccaccggtagggcgtggcccagagccgagcgacaaaggtccgtcccgtctgcgaaggtctgtccataggtaaggcagctgggctcacagccccttttttctgagagtgggagccaagtcgggccgcaggtgatatcatcttcgcagttggcgaaccaggcctggcagagctcctcgcagagcggctgtgcctggcgtacccccaatagccgcaggcggaagcgactgcgaagggcacgttggaggtgttccaggaaggattcgcattcagggctcggcactccacagcgttctggatggtttccagggcccgatgtctctgttgtgtccatctctgagggacaacaaggtcctgccaggtgcagcttgcctttgcccagatcagctgccagcccatggtgttgctgggacctggcttggagtgggcggctccctccacaggcttctagcaggatccatgccaaggtcagttgcagcacccacgtcaggccgatgggtcgcatgtggaccctgcagtccatgtccacctgagataagagctgcctggccatcaggattcttcctactgccctaattggacaggcacctagacagctttctcactcttcatccccgct

SEQ ID NO: 448339 - DNA, 1643 bp, Homo Sapiens
  misc_feature (1620)..(1620): n is a, c, g, or t
cacgtgctctagctggcgactttattcaaaggggagagggaaaagtgagagagttgggtcatttctgggataacctggagaggggtgggtctctggagctccagggaggagggacagacatctcaaaactattacagaaggccgagaggacgaggggtggggttctgggtgtcctgaggggcggggctgggggaagggtcgctcccccaactcagggccacgcgtccgctaagggccgctgccgcttccactgccactcccgctgcccgcagcgtccaggatggaggtgcgagggctgcgggaacgccgggagggagcttcccggccccgtcgtcctggtctgggacgaggtaccgcggagatggagatgttgaagcagtgacgggctccaggagcagccaccggtagggcgtggcccagagccgagcgacaaaggtccgtcccgtctgcgaaggtctgtccataggtaaggcagctgggctcacagccccttttttctgagagtgggagccaagtcgggccgcaggtgatatcatcttcgcagttaggcgaaccaggcctggcagagctcctcgcagagcggctgtgcctggcgtacccacaagtagccgcagagcggaacgcgactgcgaagggcacgttggacggtgttccaggaaggattcgcgcttcgagggctcggcgactccacagcgttctcggatggtttccagggcccgatgtctctgttgtgtccatctctgccaggtgcagcttgcctttgcccagatcagctgccagcccatggatgttgctgggacctggcttgagagtgggcggctcgcctccacaggcttctagcaggatccatgccaaggtcagttgcagcacccacgtcaggccgatgggtcgcatgtggaccctgcagtccatgtccacctgagataagagctccaaggtggggagggattctgtagccgagaagcgtcctctgctcgtcttcagctgcgtttctgaggggttagtacggaagttcagggttaatacggaggtccggtcccaaacatcccagaggggaaggtgatgatatctgtgccccaaggccctgcctggggtctggcccttctgagcctccttggggctcagccccaggcttggtaatctggagtttagataaagccgagaatgggcccagactcaggctccatccccagcctgaatcttgggaaaagaggattcaaaccctcacctagggcttcgtccatttctagactcccctaatccatcattcccgaggttgaaggccaaggggagctgattggtcaattgcagcaggaaaaaatgttgatcagactgcaggaaggaccttcccaggcgtctgggtaacgccggagccagacatgagttggaaaactaatttgctttcagagcccagatggcccgatctccggagcctaggcctctctgaagtgctcccacattctctccgcctctcgggggtgggttaggagagtgggttccgagagaagggaggcagctgcggcaaagttagagcaagtactgcagcagccaggttgggtccgcgccgtcgggtatctgagaaaagggaggaaagagcggggcctgcacggtgtgtccccncctccaggccggcgtcaactctc

SEQ ID NO: 448340 - DNA, 482 bp, Homo Sapiens
ccatgccaaggtcagttgcagcacccacgtcaggccgatgggtcacatgtggaccctgcagtccatgtccacctgagataagagctcccaaggtggggagggaattctgtaagccgagaagcgtcctctgctcgtctttcaagctgcgtttcctagggcattcgttccatttctagactcccctaactccatcacttcccgaggttgaaggccaaggggagctgattggtcagtgcagcaggaaaaatggtgatcagactgcaggaaggaccttccaggcgtctgggtaacgccggagccagacatgagttggaaaactaatttgctttcagagcccagatggcccgatctccggagcctaggcctctctgaagtgctcccacattctctccgcctctcgggggtgggttaggagagtgggttccgagagaagggaggcagctgcggcaaagttagagcaagtactgcacctcgttccgaat

SEQ ID NO: 448341 - DNA, 465 bp, Homo Sapiens
gctatttccttggaagtacataaaattgaaaacctcacaaaaccactcactttttcattttggcagactccaattttgctctcaacccacagcacacagagaataaaactgcaatgagtaaatgtagcttaaacaatgactttatcatcactaaaaccagtatagtcacgtggaaattgactgggtttgggcagcttggaaggtgaaaaatctatcaccaacattataagacaagcaataatacccatgaagaaaggaaaatctttacaagctgccagctcaagccagcctgtatcctctgtccaaagttggatgatgtctgcacccaaaccagccatggaagtgggaatgaggcctcgcccgaagggatcagactcaataactccagataaaggtagagagcacagctatctgccctccctaagcattttaaggtgatacacactgtgatatcagctaatagtg

SEQ ID NO: 448342 - DNA, 258 bp, Homo Sapiens
ttggtgactataactgtttaagtacctttttgtgtgcctatttatgccatagatctggcaattgtcagaagtatacaaagattacctgcctaatttttgaagacatgaagattttcttctttcactgtggcaggagtccatgcaagatttgtaaacagcgatacaagatactgtaaacataacttaacagagcttgtataaaacagaagaaataaatccagatttacgagtggataaaaaaaacagagggcagcttct

SEQ ID NO: 448343 - DNA, 422 bp, Homo Sapiens
gtatcggaatttttaaaataagcaagactaaactatagtgtatagaaatgcacatgggagataaaaccataaagaaacaaggagtgattattgaaagtgtcaggttagtaacagtcacttttggagtggggccggggtggggctgtgattgggatgatgcacacagagggacttctgggtggggagggcctggcaaagttctatttttttgaccaggggtttggggtgttcatcttgtaactcatcaagcttgtggtaagggacaggtaagtctggaggcagagaagacagagactgggtgacatgagggttggggaaaatggagcaaaacagagatcaagtgccttctagctagggatggccacatgactatgttctggccaatgggataggagcacaagaagcaatgcagcttcctcatc

SEQ ID NO: 448344 - DNA, 732 bp, Homo Sapiens
tgggcttttcaagggcaagggcatggcatggctccttggggagagtgagccaccatctattaattgtcctagggcacagcgtcctgtcccttcctcatacaaccctcagccccagatcacaaggcagtacagccagtcccctgggcagcactccacctgttttagagacaagagtgcgttctagggagggatggatccacccaggggtccacagccgcctctagctcctcctgcctgctggcaccttccaccagcatagccctcccctgaacttttgaggttctgtggaaaatttgtgcccaccacgacctcagaatctcatccaatggctctcaggagcaattagggctctatccttctcctgccctccgcctttctgggatccaaacagaaaaagtcatgcttgtgttatcttaattgtaaaaggtttatcaagaaaaaagattcaaggagcagcatccaggaggagaccatgacccccccggggggcaaggggggcagtggtgacacatgtcagcaccccacagcaagctgctggaccacaccctgacctgggtggggaggaggcagaaacccctcggggatgtaaacataggtcagagacagcacaacctgacggggagcaggggcccacattccagcgaggcaggcagagggcaggtgggcatggaatccctcgcatggctgggcaagcaggcccctgtctttttcctcttaggtttcccatccgct

SEQ ID NO: 448345 - DNA, 723 bp, Homo Sapiens
  misc_feature (99)..(118): n is a, c, g, or t
ttttattagtattttatttgtatttttggagaagatatagagtttcatgagaaacactgatttttctcaaacaatagaaaaagtgttttttgtgtgtgnnnnnnnnnnnnnnnnnnnnaaaaacccaaaaaacaaaaccactgtcttagaagaagaatacaagtctcttcagcaagcatgtggccaattcagatgggaggaaccagtgaagttagaagttacacacaggaagtgagttcagatttatccacaaatgtcttctggtctagttctgtaaggctccaaatgggccatctcagcttaaaactggcaacaccctctcaaagctctcaggatcccatctggtttgaacctggggcctcattctccaggaggctgcatctgtttacagaactcatcaaactgctgctgctccagttctgtcatgactctgttgagggcatagatctctgctctttgtctctgcttcagctcctgctgggctgatttctgtttggccttctcaactctgctgacagattctttaactttggttttttctttacgtgcaggtggatccatggcttgacttctggatatttcttaggaggctctgatctttcccgaccgggccactggaagttggagcctccgccgagtcgcagacaacgcctccgggagggtcctcctcgccttcccccgaccactggacccagcgctgcctgcccaccgcccctcgtcctg

SEQ ID NO: 448346 - DNA, 465 bp, Homo Sapiens
atgcaggaaaacatttaaaatttattgacaacagaaatattttatagcccaacctggtatgcaaaaatgctggctatgtcccactgagttgatttcatggctcactaatgaaatgtgagccacagagggacaattacattgcagggtattaaatggcctggagaatcaccagaaaagaacactcttgcctgtgcttccacaaactgggtggtcaagtgggctgatagttccagaagcactccatgtgtataacccacatcctcaaaacgatgcctggtgtctcacagaatctgatggacaaaacctaagtgacacccaaaaccctgatacaaaggaatctgagaaacatagtaaagaaaggaaagcacactagcaaaacttccaaaagatgttaatcaaggtaagccacagaatcagtcccatctctccactgctgctgccccacttcttgcattcagcaatacc

SEQ ID NO: 448347 - DNA, 365 bp, Homo Sapiens
tgctgaccaatggcaccttcgagtacatccgccacaaggtgctctatgtcttcctggaccacttcccgcccggcggccggcaggacggctggatcgccgacgactacctgcgcaccttcctcacccaggacggcgtctcgcggctgcgcaacctgcggcccgacgacgtcttcatcattgacgatgcggacgagatcccggcccgtgacggcgtccttttcctcaagctctacgatggctggaccgagcccttcgccttccacatgcgcaagtcgctctacggcttcttctggaagcagccgggcaccctggaggtggtgtcaggctgcacggtggacatgctgcaggcagtgtatgggctggac

SEQ ID NO: 448348 - DNA, 347 bp, Homo Sapiens
tgagtgtgggctgtgtcctggggaatacttgggaacggccatggtctgggggcaggaggccttcggagtgtccctcccccgccactccctggaggaccccgggagacacaggcgagttcgcccctgcccctgccaagccagtgggattccccagcaccccagtgagcagaacctgtttggaaagaggcttctggaaggcctgcacgattacttgtataggttcccgaagtgataaataaatgcatgggtaaaggggaatccacttagattccctaaaagcctttgaaacaaggtggtaggcgagtctgttctgatgtgttagatccccatgcagtagtgttgtggtt

SEQ ID NO: 448349 - DNA, 396 bp, Homo Sapiens
gttttttttcctaacaggtttggtgggattcaattaacataccattaagttcacttggtttaaaacttataatgcgatggttttggtttttacagagttgtgcaatatcactacaatctaactttagaacattttccttaacccctaaataaacctcatccttatcaggagtcacttcccatccatcccaccccaactccaaggcccaaggatccactttctgtctctgtggatgtgcctacggaatctgtttctcaacacacttctgggtgattctgctcctgcaggtccacggtcgagcattcaggaaccagtggaccagactgttccaagatcctttcctagtctaagctttcatagccggaacaatgaataccgacgaagtagcaggtgctt

SEQ ID NO: 448350 - DNA, 400 bp, Homo Sapiens
agaatctggatttttaggaaccagtgacctttgaagatgtaacactgggttttaccccggaagagtggggactgctggacctcaaacagaagtccctgtacagggaagtgatgctggagaactacaggaacctggtctcagtgggtaaggctggcctccaggtcaagaaggatctgtgctttgtagcacaaatgtagcacctctgaagtatgtgtctgcttgggctcagactgcaggggcaccagtaggaaaagggcagcttttcagtatgacttctgaatcattgcctagtccatccctccctgaataccagggagatgggtctgtcagggatgttttcagctgcagtagtggatgcttattgttcttgcaacaagagttccggccaggcatggtggct

SEQ ID NO: 448351 - DNA, 855 bp, Homo Sapiens
ccggccgacgggcgccattgtgcggcgcgcgccgggactctgcccacttccaccagagacacattgagaaggaggaaactatggcctccaggcttccgacggcctggtcctgtgaaccagtgacctttgaagatgtaacactgggttttaccccggaagagtggggactgctggacctcaaacagaagtccctgtacagggaagtgatgctggagaactacaggaacctggtctcagtggaacatcagctttccaaaccagatgtggtatctcagttagaggaggcagaagatttctggccagtggagagaggaattcctcaagacaccattccagagtatcctgagctccagctggaccctaaattggatcctcttcctgctgagagtcccctaatgaacattgaggttgttgaggtcctcacactgaaccaggaggtggctggtccccggaatgcccagatccaggccctatatgctgaagatggaagcctgagtgcagatgcccccagtgagcaggtccaacagcagggcaagcatccaggtgaccctgaggccgcgcgccagaggttccggcagttccgttataaggacatgacaggtccccgggaggccctggaccagctccgagagctgtgtcaccagtggctacagcctaaggcacgctccaaggagcagatcctggagctgctggtgctggagcaagttcctaggtgcactgccctgtgaagctccggacatgggtggaatcgcagcacccagagaactgccaagaggttgtggccctggtagacgggtgtgacctggatgtctgaggaggaagtacttcctgcaggacacactgccgagggcacca

SEQ ID NO: 448352 - DNA, 712 bp, Homo Sapiens
tcaatttcaaaaacatttattgtgtacctattaaatacaaggtgttgagagccacatagtagaattagggataggggccctagagatgtggtatctagcagagttgatccaaggctcagctgggaggcagggggtgggggatagcgcccatactgattctcccctcctgggcagtactggtgcgataccagcgggaggatggcaaagtccacgccgtgaaccttacagcaagcgggccctggctgatgggcgcacacacacagttctcctgcgactccgaggtccctccagacccagccctgccctacatctctacgtggactgcaaactgggtgaccaacatgcagtccttccagcactggcccccattcctccagcggaggtcgatgggctggagattaggactggacagaaggcgtatttgaggatgcagggctttgtggaatctatgaaaattattctgggtgggtccatggcccgggtaggagccctgagtgagtgtccattccaaggggacgagtccatccacagtgcaggtaacacagagacttgtttgctgacattggaccacggatcctgtggcctttggtgactcctgtcgttcttgatccccctctcccttaaaacccattcctttggctcacctgtgtcctagggtttctaaacctgttattccaaatctttcactctgaagccacgacggaggggatcc

SEQ ID NO: 448353 - DNA, 1665 bp, Homo Sapiens
cggcacgaggggaggagtgacttcaccaacatcactcataggtgcttgtgtccgtggtgagaagggtgatggagagaagtggctgcagttcccacccatggagaggtcactggtgaatcccagctaaagaggaaggacaggcccggcctgagtcccacaggcttaccatctgagtccttctgattgggattgggtaccaggcggcagttatcgggaccaggaggcacataatctgggatgccatcattgtcatcatccccatcacactcatctccaagtccatcgttatcagagtccagctgggagctatttggcagctgtgggcagttgtccttggtgtcctgatgcccatccccatcgctaatcagaagaacaggttggtgaaagtcccgaactttgtctccccacccagaggacaactggccaggaaatctgcctgtttcttgtctcaccctctagtccacactctgcctaacactacgccctacctcacattcctattgacatctgctgcaggtaatctctcctcacccaggccaacgtccacaagcctgcctccctatttcacagagacttcctagcttccctgcttcatccccacctgatccaaattctcacaggtcccccagccaccccttcagccccaggcctgcaccatccccatccacgtcgttgtcacaggcatctccttccccattgccatctgtgtccttctggtcattgttgggaacgttggggcaattgtcacaggcatcaccaaatgaatctgtatctgagttctgctggtctttgttggggaacagccggcagttgtcctcaacattcttgatcccatccccatcagcatcatcatcacactggtcccccacaccatcattatcagcatcttcctgcccagagttgggtgtcaaaaggcagttgtcctgtttgcagtgtttgttgttgtccatgcagggcagtgcttggtctgggtagccatcgatgtctgtgtcagtcccacacacgttcccattcccagcccagcccacgttacactggcaggacactgcaccattgcgttcaaagagacagtgagcatggatgtggcaggggctgtgggctgggctgtggcaggtccgggctgggaggcagcgctggctctggttgcccaggaaacccaggcggcagggaccacacttgaaagagcccacagtgttggtgcagatggagtatgggtcacagccaccattgttgccatcgttgcattcatcgatgtcattgcagacctgtttgctggccgggcatagtcaatgcccaaaccagacacctgtgtgcccttgtaccctcgaggacaggcctcacagtggaagccgggcatggtggttgatgcagctggagccgggaaacaggggtcagcgtgagcacactcattgatgtccacctgcagtggggtgccgttgccctgcaaggccaggggggcagggcccacagcgcgtagcctgggtactccgtacaactacccatgcagtccaccacctcggaaagcagggaatgggggctgcacacgggcaacgctggtcactggagacccagacactccataagggcggacggatccaggcgccacgttcacttacctggtcatccgtatatcacaccggaacacaccaagaactggttgcaaag

SEQ ID NO: 448354 - DNA, 1033 bp, Homo Sapiens
  misc_feature (779)..(839): n is a, c, g, or t
ttttttttagcctttgtctcttctttatttgcggatataattatgtaccgcactctaaattagagatagatttttttctgatatacatttcatcttattcaccacgagcacaccacacgcacagtagaacagttccacacctgataaattgcacaagatgagagtttagattcctgaaaaccggcaggcaagctggccccgccgcggcttctcgccttccggcttcgttgaaggaaattgcccacccaaaatggatttcccagtcagcctttcccgctgcagggttgaaacgtctccggaatgggaagcgctcttgctggaaatggctggacgctgtagattccgagctctggatggatgtgaaatattcccccaaggtcaagttgccacgcctgcgagctgcgcccacccatcgtcacacatcacgttgccaaccgacagccgtcgacgtgacttgagaacacaaaagatttcgagaggcactcacatctaggaacggtacagacgaaccacatgacaccgccaaaatgcagacccgcgaaaagtgaacacgcagctagaacacagggaagcaagacgagcgagccaaacagtggaccaacgagcaacagaagaccagaaacaaaagcaatcgacgcaatggacaaagtagccacacgcctacgcccacagcggacagcgccaaggcaaacgagagcccaaacaaagcgacaccacagacaccaagagaaacgagaagacacacaacagaagaggcataatcagaggcacaaatcacnnnnnnnnnnnnnnnnnnnnnnnnnnnnnnnnnnnnnnnnnnnnnnnnnnnnnnnnnnnnnacgtgacaaaacgagcaccactgagaagcaaaaagacagagaagaaccgacagcctaacaaggaggaacacaaagagcaagcaaaaaaagacagcacagacaccgagaaagacagcacaaagagagagtagacaaacacgagaaaggccaccaagagagaaacacccagacacgaagaacaccgagaatagcaa

SEQ ID NO: 448355 - DNA, 447 bp, Homo Sapiens
  misc_feature (377)..(407): n is a, c, g, or t
ttaaacaatagtgatctgccatttattgactctatgtcacttgcattgtatacataatttcatttaatccttacagtaggtgtcattatttccatttttacagatcagaaaacagactcaaagatgttaaatacttgttcaaatacttctccaaataataagttgtgaagccaggatccgaacccaggtttctgactgcaaagcccaagctttctccactacgccagccagctggagatgtgtcaggggtagttttcactccaggcagagaaatagcataagcaaagatggagaagcagtaaatcgtggaggagcattcagggaagtgagcaggcaggctgttgaagcacaggggtacctgcgctgcctggctctgnnnnnnnnnnnnnnnnnnnnnnnnnnnnnnnttctcgggtcgccctcgggctccggcctcgccctcccttc

SEQ ID NO: 448356 - DNA, 419 bp, Homo Sapiens
  misc_feature (324)..(324): n is a, c, g, or t
cagtgggcacaaggggttttattgtttctgcccggaagaggaagccctggcagcagcagggacacagagaggacacggcgctgcatcctgccggcagtgtggatgctggtggcaggagtccaggactgtgaagagctgtcagcatatgagctggagccgctgaggagctgcacctaggcctgcagaggccaccagcttgagaagggggtcccagcctcaccgatgccgttttcggatgctctgcagcttctggtagatggtgcttaagctgggccgctgcccaggctcataggcccagcactggtccatgagcctgaacacggnatcaggacacagttctgggcagggcaaacggccccccttctccacaaactcccgtgtctgctgattgctgaggttgggataggggaggcccccag

SEQ ID NO: 448357 - DNA, 542 bp, Homo Sapiens
ctaaccagggtagctgggcacaatagttgagcaggattctcattaggctatcgagagaatcaggcagccatccatagatcaaagtgaatgcacctatgtcagactactgcatacctctacgtcgtctgggaatcttacctagtctggcacgtgggaatggatgcaattaaggctactggagtaccctgaaactgtcacgaagcttgatgcaatgacatactgcacacatctcactctgagccagttgactatcacttgtcccagcccttgatatattggaagattagaggggaattgccagaagtaaaccaactgtctgctgaaagaaatagacagatatcgaataacttggaaaaatgggtacttacgttcggtggcaaaagccaaacacacccctgagtcttcagagctcagagtaataggtggggctgaaactgcaataggcttacaatgaaggtcctttgtccatccgttttaaaaggtacgggttggcctgggcacagtggctcacacctgtaatccctacactacgtgaagccaag

SEQ ID NO: 448358 - DNA, 418 bp, Homo Sapiens
  misc_feature (221)..(235): n is a, c, g, or t
aaccagaagcactgaatgaaaagatttaaaatttactgcaggttttaaaaagaaagtgcaaagttaaacaacatgtcaaagaaggagaaagtaacttatatcgcagatacaaaggcttcctaagaatctaggaggaaaatggaaaatgctcagtttcattcagaagagaaatgtaaattgaaactttactggcataccactttttatttataaggtttgcnnnnnnnnnnnnnnntccagaagctcattaacatattctaatagtgagcctggaccgatcaaataccactgaagagaatgcaaaatggtgcgccacctctggagaggaatttggcaatatctagtaaaattacatacacactttaccctttgcactctgcattcccagtcctaggattttatcccaaagttaaactgg

SEQ ID NO: 448359 - DNA, 817 bp, Homo Sapiens
tccggaagttcccgggatatcgtcgacccacgcgtccgcggacgcgtgggcgagatccctattcctccaggcctctaacaaggggtgaaatcggctgctttctcagccactactcagtctggaaagaggtaatggatcgaaagctagagaagactcttgtaatgtgatagacgatgtgcggtttagagcagtcgagtttaagaagaagctgatgaagctgatggataacattgaccaggctcagctggactgggaactgatttatattggtaggaagaggatgcaagtaaaggagccagagaaagcagtgcccaatgtggcaaacctggtcgaagccgactattcctactggaccctgggctacgtcatctctctggaaggagcacagaagctggttggagccaatccttttgggaagatgctgccagtggatgagtttctgccagtcatgtacaacaagcatcctgtagccgagtacaaggagtattatgaatccagggacctgaaagccttctctgcagaacccttgctcatctaccctacgcactacacaggccagccggggtacctgagtgacacggagacctccaccatctgggacaatgagacagtggccaccgactgggataggacacatgcctggaagtcccggaagcaaagccgcatctacagcaatgccaagaacacagaggccctgccaccggcaacctccctggacactgtgccttcaagggatgagctatgaaggctccctgggagtgtggcccacatcagttcaacatcctctggtttttctaaagggctattcatctgttta

SEQ ID NO: 448360 - DNA, 469 bp, Homo Sapiens
  misc_feature (376)..(376): n is a, c, g, or t
  misc_feature (409)..(410): n is a, c, g, or t
gttttatgcactctgtacatttttcttttatggtaaaaaaaatatctttaacctcagggggaaagggagaaaaaggaaaaagcgcatgcacttgtcccatgggtgctgtgaagggctgttcagagttccaggggctccactaaggcagcagcggctcggcaggccatgtcttttggcctctgcaccaacctgtcaagagttaagcctcaggagggcaggccaggtgactttcagcacacgcattcgagtgtgcacgtgcacacacctttaacttgatttcccaaattctccactttgtggttttaaagctctctcaatacccagtggctgggaacctgagccaggttcctgaataaaggcttttgaggttgccttnccttcctatgctaacagagtgctctcaagggcnnctggtaggcagccccgaggtgggaaggtgggctcacaggagctgctatgggctgcgtct

SEQ ID NO: 448361 - DNA, 546 bp, Homo Sapiens
tacttcacaggggagttaagatattttttttaccataaaagaaaaatgtacagagtgcataaaacaaaaaagagaagagaaaacactggaatagtacagaagatactaaagatgaaaaaatacaggtatcacttttgtagacgtgaatacttcatttctactatcctactgttaatggcctcttaattttcctctagaaattttctgtgcataggcaagcatgcatagcctacacatacacatgcaaagacagacctttaggaaacctgtaagtggggtcatgctggacatgtgttccctgcaccttccttttttctgttaatagtatgtctcagactttttttgtaacagctcacatagagagctgcctctcgtttggtggctgcatgatgtgtcatcgaatgggtatgctttggcttatctgcccagtctcctgttggtgagcattcagagtctttccattttggataatgcagtcagtgctgttaggagaatccttgtgcatgtaaccctgccctgtggaaaggtcactcggacgggaccagc

SEQ ID NO: 448362 - DNA, 547 bp, Homo Sapiens
ttttttttaaacatcttcattacatctttaatgctctcacgtggagctgctctgggttaaattacagctgtatgcatcctgaattcctggcagcctccagtcgactcaagtgctaacgtatttatagcatttagaggagggaataaatccagaaccttccccatgggggcttcctaggcctttccctcctgacacatggcatttgcccagtggaaggtctgcatacactacccctgcatcccctccagccagcagcggacagtgacggtggagaggctgggcacgggacatgcctctgtgcatgcttgtgtgcatatgtatgcccagcgtaaaaaaatgccctgctcttgtggtctgtctctgcccaatggcttgccaggacccctggtatcagccctgaccctccaaggcttatggagaggccaagtgcagggacccatctccccactctctaaacactgaacggctcttcccatagatgggatggaggtggggaattcaaacatagactaagttttttagatgtttttctgaagtgcaatccctc

SEQ ID NO: 448363 - DNA, 514 bp, Homo Sapiens
  misc_feature (417)..(417): n is a, c, g, or t
  misc_feature (466)..(466): n is a, c, g, or t
gaaaagggcttccattctgatcaccccaacaccatgactgtacaaaccagttttattagggaactgccccaggtgcacctctggttcatgctcttgtcacacctgtttctcagatcagcccaggctcagaggcaagttactagctaagcaaagaggaaaactgttctgcaaaatagcaactgtcagcttaaggcattactaacattgcagaaggaagcaagatttactagggacatctggatagcccaggacaatgacttctgggaacaggaagctccctagggccagatcgtgctgccatccaacttgggagatgacattatcgtgctgggatggtgggtaactccttcaaaccaatccatgtcacagaacactgtctattccttgagcttttggatttagaaattagttattatnaaaaagtactcttgggcccagaagccccaacatgtgcgtgggtctcggngcactccctcagtcctccctggctggagcaggggaggatggagataca

SEQ ID NO: 448364 - DNA, 1697 bp, Homo Sapiens
  misc_feature (63)..(79): n is a, c, g, or t
gttcctcggaaatatttggaaagttttatttaaatgttttgtgttcccttttaaccaccaccnnnnnnnnnnnnnnnnntttttttttgccgttccaaacaggagagtcgcttcagagaggagctggcgtgtgtgttcagagcccaggagtgtgagccctgccaggtggctcttcccggcctgggccacgctgggtaggatggccacccaggcaccggcttcctgggaccctggtggtcttggagtgagtgagtgagcaaggccttgtcctgaggagaaagacctcaactcccctgaaggagggctgggcctggggacagggacatgagcattgtagggcctggggggttccagaggtaaggagatgggagtgggagggtcaggagatgagactgggagggtcagatccagaatgttccacggaggcttcagggcctctgggtctggagaaatacgttcgctagaaaaataagaggctttgagaatgtctgcagtctgtactctctgcctgcccaagagaaatctaccctgttggccaaagggcagcggggagggagcaaaggctggaggccagaagtggttttggcccttgggggaagattccagaggggagcgaggtggcgggagactttggtttcttgggtcccctttcttgcagttgcagaggctgaggaggcccccacctccctgccccttgaggggggggctgccgtgtgggaagttggcatctgtcacgggcttgtgggtgcccgggccctgggccctcagaacaggacgctcagggggtagagggccagcgcgagcagcagggggcctgcagcaaggctgcctgccgagctggcaggagcacagtggccgaggttggccccgatgcaggctgcatacgccatcacgtgggggacgtagttctgctcgtggacgccgtgcagcaggtgcgccatggggcccttggagaagacggccacgtcctccccgccgtgggtctcgtggcgcaggggcacagcagactgcgcctggtagttgttgtgagcatagtccaccatggagacattctctcgttcaccgcccaccaccttgtagccaggcccattgccatacaggatggcagtgaagggcttcttgtctgtgtcactcagcatgggggccagaccaaagatagagttgccacggggggtgtatccaccaaatgtgaagacgtgggaatggtccgcagtgaccacggtcagagtgtcttccgaggaggtcaagctgcctgcctgcccgatggcccggtccatctccaccgcctcatgcagggcctgcttggcttttccttcatggtgcccgtggtcaattctgcctccttccaccagcaagaagaagcctttggggttcttccgcaggatctggatggccaccaccaccatctcggagagtgacgggtccgtcacgttgttcctgttcagctcgtactgcatgtcccctggctcgaagagacccaataggtagtccacattgtgggggtcaagggtcaggagttccgtgcggttccagatgaagtgggagtgcttgtatctcggtttgaagctcttccaggtgtcaacgaggtccaggccgtccagcctcggtgcacctggctttctcgtcactctcatactccacagtcacgttttatttcttggggtacatgtatttccggccaccccccatgatcacgt

SEQ ID NO: 448365 - DNA, 377 bp, Homo Sapiens
cggtaccacatccggacacaagaaaacaccaagggcactgggggatacatgatgaaaccttcatacaaaagagatactaggtagctttggatgtaggaaaatacataataacatggtaagacaaacatgaaatagcggaatcagatttcaaagtagtatgtttgtagttttacatacataaaaggtgcacacaaagtgaaaattcgtccaaaacccagcaatttcccttgtgagtggggtgggtaggagtaggatgtgattttgcatgctgtttgtatttcccatttctcaatgtatttgctctagtgcccctgaaacttgccacttagctgctttcttgccctctcctgactcagtctcttaggtcccaatcaatc

SEQ ID NO: 448366 - DNA, 506 bp, Homo Sapiens
  misc_feature (14)..(14): n is a, c, g, or t
  misc_feature (26)..(26): n is a, c, g, or t
ggattaaagggggnaaggaaaccgangaaccatcgtgtctaggaggcccagcgagggcccccagcctttggtacgaaggaaaatgactggcagtcgcgacttgaataggacttttaccccgattccatgctcagaattccccatgggcatcgaccccaccgagacaggaccactgtcagtggaaaccgcaggagaggtctgtggtgggcctctggcccttggcggattcgatccgttcccccagggaccatccacggatggcttcttccttcatgtaggcagggccgatgaagacaccgagggaaggttatatgttagttgttcaaaaagccccaactcccacgattcagagccgtggactctcctcaggcaggattctgactcggatgtggtggacatagaggaagccgagcacgatttcatgggtgaggcccatcctgtggttttcagcagatacattggggaggaagagtcggccaaactgcaggaggacatgaaggtgaagg

SEQ ID NO: 448367 - DNA, 274 bp, Homo Sapiens
aatctttcttactcatttctcattgctatactttgccctgtgatgaataacttagggaaactatttctccctctaaatcttattcactttcacctctctcctgaattctcctgccccagcccttctgagagggtcaccccattcattcaccaaggtgcctctgaggctgaaaaagctaagctcagtcagcatttggtacccacctacatccatcacttgtgttcatcccagctttccttcacctttaggggctgcagatactaccttctgttta

SEQ ID NO: 448368 - DNA, 494 bp, Homo Sapiens
gcggccgccccgcccgtggggtcggggatccgccctgccctatacggggaagggcgccggcggcccctagcggacacgcgcgcggcctccgggacggccgggtcgtccgcagcgcaggcccggggcggcggcggacgccggggacgcgagaagttatgggccacccgggccggcggcctcagctcagcacgcagcgctcccgccggctcaactgccggctcagcttgcggcgccgctgttccaggccgcgctccaggcgctcgtcctcctccagggcgatccgctccttgtggtccaggtcccggactagctcatcgcgctggttcaccagcgacaccagctcctccagtaggagctgctctcggtgctgctgagcggacgttttctgccagtcttcgatggccagcatggcccgcagctcgcggctcagcagctcgaaccttcgctccaagtcctgctcctccatgctggaaggtggcggggggtgggtggcg

SEQ ID NO: 448369 - DNA, 1119 bp, Homo Sapiens
  misc_feature (29)..(29): n is a, c, g, or t
  misc_feature (33)..(33): n is a, c, g, or t
  misc_feature (57)..(57): n is a, c, g, or t
  misc_feature (81)..(81): n is a, c, g, or t
  misc_feature (191)..(204): n is a, c, g, or t
  misc_feature (228)..(238): n is a, c, g, or t
  misc_feature (278)..(356): n is a, c, g, or t
agggggtgtggtcataaataagaactatntaancggttttataagtttatttcgggngtggcgggcatattttgtttacanaaagcggtatatatatatcgggcgagtaggcggggtggggaaatataggcgggtggtacttgtttatgcggtcgggtggattaataagggggatatggggaagaattgtnnnnnnnnnnnnnntctatgaatgttggtgaaaatgcnnnnnnnnnnncggataaggcgggaaaataaagcaaatcggggcataaaannnnnnnnnnnnnnnnnnnnnnnnnnnnnnnnnnnnnnnnnnnnnnnnnnnnnnnnnnnnnnnnnnnnnnnnnnnnnnntttggtaaacaattgggggcgttttcgtcagttcagcacgcagcgctcccgctggctcaattgccggctcagcttgcggcgccgcggttccaggccgcgctccaggcgctggtcctcctccagggcgatccgctcgttgtggtccaggtcccggactagctcatcgcgctggttcaccagcgacaccagctcctccagtaggagctgctctcggtgctgctgagcggacgttttctgccagtcttcgatggccagcatggcccgcagctcgcggctcagcagctcgaaccttcgctccaagtcctgctcctccatgagcagctgcagctggtcctgcctccggatgagagcgttcttcttgttgaccagggtgaaccactcctggatcagcacctcctcctgcagcttgttggcacctgactccatgaggctcctcagctgcatctccacctcagccgcccgcccatctatctgcctctgctcctgttccagggcctgcagctctgcacacacgtactgacttgtgtcctggaaccgttgcagcccagcctcctcccctgggcttgggggtggttcctccgagggggaactcccaccagggggctgttgagagtctgcagctgtgggtgggcctggggcagggctggggtcaggggcctggccttctgcagccgcagctcccatggctcccgcgtccggatcgtccatcgagaacgagctgctgcctcgtgccgaattcgccacccaggcctcgctaccttag

SEQ ID NO: 448370 - DNA, 760 bp, Homo Sapiens
  misc_feature (745)..(745): n is a, c, g, or t
catacctggaccttctcaaacaacaggacggggcagccgccatggagatgcagcccctcaagagtgccgagggcggcgacgctgacgacaggaagaaggccagcatgcacaagaaggagaagtccgtgctgcagggcaagctcaccaagctggctgtgcagatcgggaaggcgggcttggtgatgtcagccatcacggtgatcatcctggtgctctacttcactgtggacaccttcgtggtcaacaagaagccgtggctgcctgagtgcacgcccgtctacgtgcagtactttgtcaagttcttcatcattggcgtgacggtgctggtggtcgccgtgcccgaggggctccctctggccgtcaccatctcgttggcctattcggtgaaggtgagaggggaggagagcaggaccagccggctgatgcagctgcagctgagggcctgggggaatcactggggctggtgctggggttgggagatgaacgaagaagccccatagaccccctaggagcttggaagaagaatgtatgcaggaccccaaaactctgacgctttcatagagtccaggggcctgtagcaaaccagagagccataccctggctgaagaggcagctgttattcagcccagccacacgccgccttgcaggggtgcaggcccagcattgccacattgtcacctttttccaagagaagccagaaatctggacttaatgtagactactcgtgatttttagacattgatgntctcacgtttgtttt

SEQ ID NO: 448371 - DNA, 390 bp, Homo Sapiens
ataagcctggcggccgcccgggggctctgggatcgccctggagacgcggatctggatgctgaggagctaggagaccacatgcgtgcgcgccgtcgccggcgagcccactggccccgtgactgctcctctcctgagtccgactgagaggacccatctcttgagtgccacttgggccgcggggggctccggcttcgcatccctgagcgctgccaccgctcttcctctgaatctgacctgcgctcccggctccgccgcctccgtctgcgccgtccctcgtcctcccggcgccgtcggtttcgccgcccatggctcctgctccgacttcggctcccgctctgactctgccgccttcggccccggcgacccgcggaccgcgagcgcgagcgtgtg

SEQ ID NO: 448372 - DNA, 904 bp, Homo Sapiens
acgttgtgtcttgttgttggtggtgtggatgtcatccgcacgctcgtactttctttctccagcgcgtgttttgcggcgtctgcttgtccgcgaggtctatatccggtgaacccgggcctaatcggcgaatgttattcgcgctcccctattcgggggtcccggcagattctgtccctcgcttggaccataggagtctgggctcatgggcaactcgcttattggccctggcgccacttgcatgacccgggttctccgcgtcccgtcatacgagtccctcgatgtgttctgcttgttttttcttctccaaaaatagagaactttattgtcagggtcaagggcatgtgggacccagccccagaagcctagtggtgaggaagaggttaatgcacaatacacacagaaggcacaatgggaaggtgccctcccctggcagactccccactcagttatccacaggaccccaggtctccctgtttccctcctagagaagcacctaggtctggtctgacatagagacctaggtttggagtagacttcttacccatttccctccccacttacgctcacctgcctaccacccccaacccataaggcccagtagctggtccagggtccagggacttggcaaatcacaggtctctccccagtggggagagggcagggaggagaccacagagcacaccctcccttaatcttcactcagcctaatccgtgtgcccggtgaggcactaaggccccacctcccactgctggctcaggctggcccccaacacgggcaggcacagtaaacctgctccatcactcccacacctcggtccagatggctccgtggtaggggtggggtagggggccttgggctaaacttaaaggccttgcctacctgcttgctggtgtattttggggg

SEQ ID NO: 448373 - DNA, 2082 bp, Homo Sapiens
  misc_feature (1970)..(1970): n is a, c, g, or t
ttttttttcaatagaaacactgtttattcaaatgacaggcaggaagcggtggcagcagcaggggggaaagggcagccaggcaggggctgggcagtgcttccctgtgtcccctgcaatcctgcttggacagccacccggctgttggcatcagggtcagaaatactttccctcctctccctcctgccccaaactgaataaatagcatccctctccccacgagagctaggggagactcatgtgctgagtttggtgccccagtcacagcccagagtccggtgagggcagaagttcaaaatggcttgtagggagtagaatacaaaactgttctactcattctcaccttcctcttcctcctccctgccacactcccctcccagcctggtcccaggacaggtggtcggtgagggtctggagcgggagaattgttgcctagcatacactgagctcaagttcacaaggccatccagcctgtcacccatccgggttgaccaccaaagagaacgtctcacttcacgccactttatggacataaaaggaggggcagggagggaggcagtgggcagccaggcctttcccagcctcagaggtaaccagagtccgaggagcaggccccctaccgatccatctcgtccaggagtggggtggcatcgccagcaatggacatgggggtgctttcgatcatggggctgggggagggccgaggtgtcagccgctgcttctgtttccgccgttctgcctccttttcctgcagccactgctccgccatttttccccagtcgatggctgcatggctgttggactttggctgctgctgccgttgccgggagctggaagagggctggggctgggcctgggccgactgtggggtggtgctggccctggagctggtggtactgaggggtggtgatgggctggcttggggtcgtgtaggagtagctaggggtcattagtggtgtggccactggctgctgggctggcgttgggaatacgtggtaagcactgctgccgcctccactgccgccatagccgtactggctggaggcccactgggctggggtggcattagggttctgtccttggcctgtcaccgcagcaatggcactgaacatctgtgaagtcatgttctgaggcagggcattcacagcccgtgtcagatctgcaaggttgatgttggctggggtagcattgatagaggcaggtgtccgggtcctgctgctgctgctaggggtgatgcctggtacaggatcctggtagtgatccttaaaccatctaaacagtccattcacggttgggaagatctggccccggtaccggaatccctctggagtcaccgttacatattctatcctgggtttaccccggggctggtatcccagtaggaacttgccgggcagttccttgcaggcacagatgaaataagggatgaaggtgggcttctccttcttagttttgatgagcagctcctctaatttcttgcggtccccaccgctgcagtcctgataatacttgtgattcagaaggtcccgggcaaaggatgccatgggctggacatagcgagcaacaatctcatccaaatcttcgaattcctcactgttgatccacagagtggctcccaggctgaaggcattgttccttgccctcctcccgcacatccacatgctggtagatgccatcactgactttccaggtcactgtcaggtggttctcgcccttgctgcttggtcggataatcacatcaccctggtccatggtctccatcatcttttctgcttgcttgaaattgatattatggaaggatgggtgtgcgatcactctcttgatgtatgtggtccgctgctgcttccgcttcatgtcctcctcctgcttgtggtctgcagcttcagcatcaaagtcatagtaggtgtctttgggcagcttccactcattgttcctgtccatgaggtctgaggtgcggcaggtcaggtctgcanctgaatcttctcaatgtcaatcttcatgatgcggcgagtgaacagtcacttcccaccttcactcgttcttctggccgctttaccactttgtcactgaggaatttggtgggat

SEQ ID NO: 448374 - DNA, 788 bp, Homo Sapiens
gttttttggacccatcctcctgatttggtcatcccaggcttctccgagatactgtttatgctgaggaataagcatattctggcttactgttcacagtggagggagtttctccccttctagataagtttttatcccaccagtgttctgcttccccagtagagactgtgttaagaaaagaggcaaattcgctttctcagactgcacagagcatctcattattttgtgaagccccatggccacctatttctgagacatggggcatgggcgaaagccagagttattcttggctgtagattttattcatccttttccaccttgatttcaatgaatgagttcaagtcaggacagcaggttttgtggggttggtcaaaagatggggagccaggtgcattctcatcccctccctcatcttcctcttcttggaaattaggattgtaaagttctggtggaaggagctgggcttcagcagaaggcagtctgtctgagggaggcccatacacacggttggctttggtgccatgcttagagttagcatccaggtggtagcagagctctgtgaggcgctgggcccggaaacggggagggcgggccacccacacacctggctcgttaagactgtcctcttcatctgacatcagttcctctgtcacattcattccacagacgttgggtcctcaggttccaaaatgcctcatgatactggatcggttggcaaaaagccgatatcggcgactttcgaagtttcttctcctctttttccttcaggcctttaaaggggttcagggagt

SEQ ID NO: 448375 - DNA, 453 bp, Homo Sapiens
agagaccaaaggcttctgagcaggatttttatttcattacagtgtgagctgcctggaatacatgtggtaatgaaataaaaaccctgccccgaatcttccgtccctcatcctaactttcagttcacagagaaaagtgacatacccaaagctctctgtcaattacaaggcttctcctggcgtgggagacgtctacagggaagacaccagcgtttgggcttctaaccaccctgtctccagctgctctgcacacatggacagggacctgggaaaggtgggagagatgctgagcccagcgaatcctctccattgaaggattcaggaagaagaaaactcaactcagtgccattttacgaatatatgcgtttatatttatacttccttgtctattatatctatacattatatattatttgtattttgacattgtaccttgtataaacaaaataaaacatc

SEQ ID NO: 448376 - DNA, 502 bp, Homo Sapiens
  misc_feature (365)..(365): n is a, c, g, or t
  misc_feature (416)..(416): n is a, c, g, or t
  misc_feature (435)..(435): n is a, c, g, or t
  misc_feature (453)..(453): n is a, c, g, or t
  misc_feature (462)..(462): n is a, c, g, or t
  misc_feature (481)..(481): n is a, c, g, or t
  misc_feature (488)..(488): n is a, c, g, or t
gaaaatagatgttttattttgtttatacaaggtacaatgtcaaaatacaaataatatataatgtatagatataatagacaaggaagtataaatataaacgcatatattcgtaaaatggcactgagttgagttttcttcttcctgaatccttcaatggagaggattcgctgggctcagcatctctcccacctttcccagggtccctgtccatgtgtgcagagcagctgggagacagggtgggttaggaagcccaaacgctgggtgtcttccctgtaggacgtctcccacgccggggggaagccttgtaattgacagagagctttggggtatgtcactttttctctgtggaacttgaaagttagggntgaggggacgggaaggattcgggggcaggggtttttattttccattacccncatgtatttccgggggagncttcacactgttaatggnaattaaaantccccgcttcggagccttnggttttncccggggggagttt

SEQ ID NO: 448377 - DNA, 448 bp, Homo Sapiens
  misc_feature (392)..(392): n is a, c, g, or t
  misc_feature (434)..(434): n is a, c, g, or t
tttttacggaaacgagggagctttattggttacatattgtactgcagagccaacagagagcattcgcgccagaggatacatgcagacaggcagctccaatgatacacatgcacccaaggagccctgagccactgctttgccctggtttccagcgacaggttctggcctccttggtcccatgcttggagctgctgcacctaggactctaaggggcaggggtgagagagaccagagcacctgcctgagcaagtaggtgtggaccaacaggctgcccccaacaaaggggcctataatgcaataacagtttatttgagggctactttcttagccctctcaatctttaaaatacaaaaaaatagactttattctcttaaaaatacattccattcagnatatgtctgagctgggaagcagcaggaaaatagggccccttnctatgatcctatgg

SEQ ID NO: 448378 - DNA, 373 bp, Homo Sapiens
cctgatcctgggaacctgtcaatatgtgaccttatgtggtaaaagggactttgcagatgtgatcaaatttaaggaccttgaaatggggagagtaccctggactatccaggtgggtccaatctcatcacaagttcttaaaattggggaactgtttcttggctgcggaaaaccagagagatggcagcatgagaagaactttgccccttactgctgactttgaagatggaggaagggctcctgacccacaggatgtgggcagcttctaacagctggaaaaggcaagcatggattttcccccagagcttccagaaaggaacgcagcccttcttggcaccaataagttgtgttctttttctactttatactggctgca

SEQ ID NO: 448379 - DNA, 489 bp, Homo Sapiens
  misc_feature (74)..(83): n is a, c, g, or t
aaacaccaaccacctttattggctgccaccctaaattagttttccttaaaacagtaatatttcacttttactgnnnnnnnnnnccattaaagcaacaccattgggctgcaaaactaactttttgcaattaagtccctgatacatgttttctgcttttaacaagtgatagaaaaggttacatcatctcattaagaaaacattttccttagacatttcgtttggttttggttttctgttgaacgagttatagcagatggctatttcaaagattggttctttctcctttcacaagtcgagctcgaaacatccaaatatcctttaagttcacgctattttcagctccaaagaatttatgtgctattcctacaacttcctttctcgatgttttcttgactggtgcccttcacgtcaaatgtagtggcaatcggcactggcgaaatggcaggaaattgccttccggaatcccctgggtttatctgacccagaacc

SEQ ID NO: 448380 - DNA, 355 bp, Homo Sapiens
gccatataaaaagaggtttatttcgatgttagaatcatctagtgatcgaacaagattggacatgaacccacccaggcccagggctgggctgccgagcagctgccgctgacatctgtgtggatttgacatgcaacagggagtagccacgtgctcgctcgctggccactgtgcttcgaaacgtttttccagcggacggctgtgattgcagttttcagatgtgctctggcctctaaggacgtggggccgaggcggtgtcctctgtataaaaagtgctgtcctgggagcttcccaacggacatcttggggcatctgagtgattcccagggagggcagcttggcctttcctcaggctacc

SEQ ID NO: 448381 - DNA, 580 bp, Homo Sapiens
  misc_feature (478)..(478): n is a, c, g, or t
  misc_feature (506)..(506): n is a, c, g, or t
  misc_feature (514)..(514): n is a, c, g, or t
ctagcgaagttgataaacaacttcaatatttgcctttttgtgagaaaaggtatttcacagtatttaccactttgatgtcctcgcagttttattaaatgtatcctctctgtaaaactttgcctgttttaaatgagcctttccttgatttaaaaaaatacctgtttacacatcttctagattcttgagaacgccagacacagttcttaaggccaaatttgtatcgttattgttaagaatcgtcatcaaaagtgtctttggaaccatacaaatctgctagtttcttaaaacgaggtccccagttctgtagataatcatagtccaagtctgaatctgtggtggccgactctagggagctcagggacccggccactgagcccctgccttcataaccgtagatttgaatggagtcataaggatgagtcgtggggtcattgtctgccctcctgtcttctcgtgttgatgaatgtcatcgaacatnccacgctgttgggacgtctggccggagncccaggtnctaggcatgtactgatactcaggtttgaatgtcctttgccgggggataaatcccattgatacccat

SEQ ID NO: 448382 - DNA, 488 bp, Homo Sapiens
  misc_feature (144)..(147): n is a, c, g, or t
tttttttcacggctgataggcttttattacagactgggggcggtaacggctggacagagaacggaaaaggaacatctgagaccaggctcaaagctagggggttacacaacctccaataacacaaggtgagtgcagcacttctannnngacacacagacacacatcacttactcataaacggcacagcctacggtacaagaaaaagggcaaggtaggtaagggcacccaacaccctcctgcctgcagggggccacagggttaatgtgccttcctgcacgcaggcttaagagggataaacaaggagagggctgcccttggagaaggcctgcggataatagtgactgaggcacaggtccatgcaggggaaggaagcacagttcacagagttggcaagctcagtgccagccagttgcaagcaacaggcagttctttgatcctggcttagtcacagcaaacatttacccagcctggctcttctccatagccag

SEQ ID NO: 448383 - DNA, 461 bp, Homo Sapiens
ctattacttttattttgccaccagtgttttatttgatgcttgctaaatatttgggtggcatgaatcctccagcttgcagcagcagaatgtggctgtcataatcatgaaatgttttaattatctctgctatatatgcctgtttctgcagccccagaccctccagtatcgactgctggctcatctacgaacaaaagcagccgccgagagtcctcgtgtgagcttagctccgtttacagatttggtgctgtctgccgaggccggccgctcagaccgaggcccgcgcacgcagggcccacgcgcctccgaactgggaaaacaaagatggatttccatgggagttttcctctcagtgccgtttagaactttccgggtctgattcttccattttctatatatcaagaccctggctcccctcaagggtggggaaccaggccgcatccgaggacgcttttgtcagcctg

SEQ ID NO: 448384 - DNA, 349 bp, Homo Sapiens
  misc_feature (147)..(147): n is a, c, g, or t
ccgcgcgctggggccccggggagggaaaaggtatttgcaacgacctggtggcggcgagcctgaggcggccggccccgagcagagctgagcgcaggagacagagccgagagaagcgagaggtctgcgcgagccggggacggaccccangaggccggcggcggacgggcctggctggcccggggtctcgcaggggaccggagtgtcatcgcccggacagccgccaaccctttggggtttgcatagcagtgtgtacaaagggactgtcaaacccatttcttaattaggaaatggcaaaccgtatcccaaaaacctcgagttattgatttttaattaaagtactttctcccct

SEQ ID NO: 448385 - DNA, 549 bp, Homo Sapiens
aaaaggattatgcatcatgaagcatactgacatttcaaccagacgcacaaaggagatctctcagtggcagcggagtggaaaattgccatgaatgctagttagggtagaaagactgtattgtataaacagacctttttagtgcattactttttaaagtggatatctgtggtggttccactttaatactgaaacaccgaaaggcatttctatatttttaatcatgttctaaagtgctcttatgagagacttgtgggccatcagtattagtgatttcatactgcagtgctggcattgcagatatttttttaaattggtgctgctttgcccaatcatgttaaaactcagggggatataaaaataacattcacactggctatcttcttaagaacagaaagactgaactgtcctatggttagaaggaattgatgcttatgtagtgccttctgttgtcctacatgtttcacagttcagctgctagtcttgaagcttttccttagcttcattatgatacgtaattttataaggtattctgttgagtgatcattgttt

SEQ ID NO: 448386 - DNA, 485 bp, Homo Sapiens
ctcttcccccggccgcgcttggaggtatctctaggttagactcctctggggctggaatgacgtgaagggtaaggtcgcccagcttggccagggcagtcgggggcaggacagcgggagagccggtccgaccccagcccagcctgctgggtcagcattcatcagagaggtcgtcgctgcccgggagctccgcggcttcgagctccacgctggacagaaacctcctcagcgtcttgcggcagttgtaatccagggtggtggtgtagacggccttggggtacttggggtacacgatggtggtactgaggaagcgggtgggcctgtggcgtggctcgaagcgcacctcggccttgtagttgcgccacgtgccattggggacacaggtgaccgtctggctgcaggaggccaccgccaggcccaggggcagctgcacgtcgtcgatgaagtgcctctcggagtcgtacttgaccaaggaggtgtaccttact

SEQ ID NO: 448387 - DNA, 902 bp, Homo Sapiens
ccaagaggtgtttagtgtaatgagtgttcagatgggtggggcagggtggggttccccccatctgaccctttagggctctggggtgactcattcttccttgggctcaaaggtggagctgatatttgttcctccagttgagccctgctccccctggcccttggcgttctcagtgtctccagacactagagccacgttcctcagataattgatgttgaagcagttgacctgttcatccccaggactcaggtaacagcagagggcagggtctcgccagatgttacgtcggggaccacacagatcattgatgaaggttaatttctcctcctctgcacagcaggcctgttctggaaatggcaggtcacagcagcgggcagtcatgttgtggatcagcccaggaatatgtttatgcttggtgagaactctttggtttccacagaggtggcccatgaggttgggggtgactcgactgatgtcaatggtcaagatgtcccggtcatagttggggtaaggagcccgacgggcaaagcactcatcccgagtagggctgggagggtggcggcaacacaagtggtggtgggtcttcacagcatactcccggtcacagtatttgtcaagggtatcctcccaggccttccatgtacaggtgtgattgttcccctggcggcagcagcgctggaactccctctccagctggatcagtgccagcagctccctttgtagggggtcagtagctggcaggttgcgtggcacagagcggaagcgcctcaggtggcagatgttcttgatattgtccaatgtgggcaccccaggagggaaaggcagctcaagacccgaggaaatatcaggctgatggctggggcaggcccggagctggtagtgtgccgggtccgggatcctctaga

SEQ ID NO: 448388 - DNA, 1260 bp, Homo Sapiens
  misc_feature (17)..(17): n is a, c, g, or t
ttgactttaaaatttanatttttaattacagaatattggtagatgtttacatacactaggataactgtgaccaataccataaggaaaactgttctacatattgatttgttcattaattctccacaaccatagaaaacaggcacaaagtgttcacgggatgtgcagaggcagccagggacttgggagcagaaggcatgcaaaaagcattagtgaagggagtctgatgcatgagttctatacaaagttcaacacagcaaacgggcaacaattggcagaaagaggagacagctggtgtggcccttgtcctttaagtttcccagctagattgttcatgtatggagatagctgggtgcttagaagccttgttttaagcccttcacctccaagaagccaaaagcagcagcaggaactggttggggtggggcaagaacagtagggaaggaaaaggggggtgaaatacagttaggtcatggaaatgcggtcatctatggccactcccaagctgatacccatagtggctcacagaagcaacaggagaactttgacatttattaaaaccatcagcaacatatatgagaaaagacatatttgagtttagttaccaagaacatgtgtcacccgacaattaaaatatggatacccacagtctgctagattttgtaaataacaaaaaaacatgctccttgcctgagtttgtccttaaaaaggagtggcaacatgaaggaacccccctggaagatgggttactttaaaggttgtgttattaacaagtgatgtggtcccacacagctgtgggtcacaataactcattatagtacccacccagagagaccactggctcctttaacaccaagtcctaaaaagctatgggcaaaacatttttaaaatgttacaacattcacaataaagaacagtagcaataaagcacagtagaaataaactgggggtactctcaaaagaaaagatattcctcactccagtcccattttctgggcaccaattcccttccaccccaacatgcttggatagcatcaacacttgagatatttcttaattcctacctggactgagattaggaaaactgacactactgggcttaaattgggcgaactgttattttaacctcttatatctgtagggtgggaggatggaaatacattcctaccgaggttcgttaattccttctgactaagccaaagagttcttcattaccatagaagataattcattctgagaataggacaatcgacctatttgtct

SEQ ID NO: 448389 - DNA, 892 bp, Homo Sapiens
taggtttgaggttgaatgttgagtctgaggctgattcgtggcaccctgggctgcccccatggctgcgttctgggctgcctgctgcacatgtggattcttccaggcccctgtggtccactcctcctgagctttgctgaaactccccccacttccccggtaaaatttatgaaccatgctgagggcgatgaaggaaaagacggccatcactgtgaacatgacagtgggaattagcatcaccaccgccgagccaatgttcgttccgaagaaggagatggtagcaatccagccgcagacgccccagcctgggatgcccacggcctggatgatgctgatgaccaactgagccatgaaggtaaagaagaatgccatgaaactgaaggagctgtcagtcttgaaggccttgtaaatgggccgaaaccagcagacgtaggagcagggtgtgaagaggatgagccagagaaaggcgaggccaaagttggtggctcccccgcctccgatcagccacgcgagacagcccaccaggttcacggccagcgtgacgctgttcaacatccagaggtagtagaggcgcttggtcatgctgacatgctggggaggaatatctgcctcgaagtcttggtagaaacatggcttcagcgggatgaatttgggcaatggtgggaagttgttcactttctctgccatgatgttaccagctggcccagtggcctgcccacacctctttgtcctgaactgccgcggccgttcggctgccgaaaggccgcagcgctgcgctgagctgcgctgcacccgagcgatgcggcgcggagccggccgcgagatcccgggaattccggaccggtaccacctgtggttgtttgagggtttatggttttgtttggttgggttgatg

SEQ ID NO: 448390 - DNA, 362 bp, Homo Sapiens
tttttaaaagattctggaggagggcagctggaatattctattaataactttcggtatacaagaaaaaatagtcatcaccaccatttaccatctgggttcagtgaactctgtttatttttgtatttttaaatgattttatgaataattttacaaaagaaagggatagtgaaaaacaaatctattcaaaagtttagtgagtattaaccacataaacgcaaatatttattccgtattttcctgattttgaaggtaaatataaccaaaatgagcaatgtgctttgaatgcaactaactgctcattgactatcatgcatgaaatgggaacacagccaagctgtaaatactgattccagattccaaat

SEQ ID NO: 448391 - DNA, 1127 bp, Homo Sapiens
tttttttaaagtcttgtgggcttcttccagttggtgctcagcaatctctttcaatcggatggcatcttccagctggctgttcagcagtaccgtctcctcctcaaatcgcttaatctcatgctttaagccttcgtattcaacctggttctgcttcaacgtggacactagtttctgcaatgtgatattttcttcttccaattcagtatagtcctgaaggagccgtgcctcccggaacttatattctcggatttcatccttcatccgtattctctgtagctccaccatctcattgttctccttcagatcctgcacgactgcggtgagcctctcgttttctgcctgtacattagtgaccacagcccggctctgtttcagctcgttctgcatctccaagatcttccccagatagtaagcctccttcgatgctgactcctgcagaagcgtttcctcccgagtctctccatcttcagcaaccttccggtggatggagaaggactgcccaaatgcctctttgagctgctccagctcctgtttgaggctgtcgtactcagccttcagttcatcatactgctgtttgagggtcagcttctcctccagcaccaccagcccgtactcggcagcctggatcttctcgtgggtggtctccgtgagctccttggttagcctctctatctcagtcttataatggtccaccgtctgcaatacctcttctgcggccatagccccggtggatggaggcaggagggggttacggggtgggggagatggatgcgaagctggcggggaaagggagaaggaaatgggaagggatgggtggaaacggaaaagaaagtgcggccggatgaatgagcagcgcgatgccccgccggctctggtggcagcggcagctacaccgccccgagaaactgacgagaaatgcaacatggagaacagggcagagggtcaggggcgaggcggcaaaggccgccgcatgtgtcctcggggccggcccctgcgtgcggtcagcagccgtgcggcatggcccgggctgcggcggccgcgggtagcgaggggctccggattctgcttattcagagacgcccgtccgccatgtctcccgggccgcgtcactgcagtctcgccctggg

SEQ ID NO: 448392 - DNA, 494 bp, Homo Sapiens
ctttcaacacaggcggccgcaaatccactggctttctcaggagccggactgtccccctgcttcaccaacaggatgtatttgaggaactcacagctggtcaagcattcgtagctcttcttggggaagagaggctcacaaaagctttggcactggtgtttcctcaggtcccctgattccttgcagggctccaggcacttagaacattgcttgtgattctggcaccaaaccagggaaccattgttctggaagtgctggaagaaggcggagatgtgagtgatctgcaggctcaggcacctggaggcgcagcgagcgcgctggacgctcccggcagacagcgactcgtccagccgccgcgcagcagccgcgccggggccggccgccaggcagccgctggaggccgccagccataggcagagggtcaggaccgcgccgggcaccccaggcaccatggctgcaggtctagggcaagggcgagggcgccagtcgcgggccga

SEQ ID NO: 448393 - DNA, 2003 bp, Homo Sapiens
  misc_feature (181)..(208): n is a, c, g, or t
  misc_feature (307)..(348): n is a, c, g, or t
  misc_feature (440)..(440): n is a, c, g, or t
  misc_feature (1520)..(1520): n is a, c, g, or t
aattaaatacttttatttgcaacaaaccaaaccgacctgcaagggagggccagtccccgtccctgcggcggtcgccgcagcagcagcagcaaaaggcagcggtggcgtgcaggtccagccgtctcggtgaccggtgtgtgggcgcgtccccctccccgtggcgagggtctcagctttcggnnnnnnnnnnnnnnnnnnnnnnnnnnnngacttaagtaaggcacagcccgcgtccccttccgcccggcccggaaggcattcatgacggaggccggcgcagatgggaacaacaggcttttagtgtcgnnnnnnnnnnnnnnnnnnnnnnnnnnnnnnnnnnnnnnnnnngctcggcccggctccggcgggaggagtgaggacgaggcggatgcgctccacgcacagctctgcggcctggcgcgtctcggcggcacagcgcncgctagggtcaggaaagccgtgcggcaggtcctccaccacgcgcagcgtcaccggctggcccaggttgcgcagtcgccgcgcgagcatgaccgagtcgtccagcatggggtccagcgcgcacgccacgatgtgcacaggtggcaggctcttgagcatgctgtcgggtgccagcagcggcgacatgaaggggttcttgactatgggtgaggagtagaggggcatctgtgtggccaccctggctggaagcgtccgggggtggaaaccttcggggaagggcggcacggacgcccaggcttctgtccatggggctcagctcatttttggcctcagctttcttcccctgcatcctcaggtggtaataagaagttgacatcggagggtgtggaggggctaagtgtctcagctgacagcgacatctcgggggtgtccgacgacgtctcggagtttcccctcaggctcaagtccctcagggtcaggttcttgagggaatccgtgcccagtgggccctggggctgggccagtgctgcttcagacacactgcggcgcatcggctctgctatgggctccgacatcttctgggacttgcgcccacttaactccaggaaggagttgagccatgaggaggcacccaggcggaagtctcggaggagcagggctgtgtcccgccgcaccagccccatcatgccgagggctttctggtctgagttggagtggtcctccgtctttgcaccagcataggcgctgacacacttggagagcacactgaggggcagcaaggggtccatgaggctcagcaggcgggagggagaggcggcaggctgcagcattgtggccgggtaggctgccatgatgccatctggcacccgcaccccgtaggctgctgcccgaagagccacggtgaagcagaggttcccgcctgcactgtcccccgcaaggcagattcgttcccctgttgagccaaggagggcgcagtgcttgatggcccagccagtaggcgaagaagcactcctccaagcgcacgggggaagggggcctcaggggccagggagtagtcgatggagatgatgggggcgcccagnctcctgggcccagctcttgaggtagggctcgtgggatctggaggtctgggccacaaagccaccgccgtggaagtgcactatcagggaccgcgagcggggtgcctgctgggggcgcggccacagctcccaggctccgttggccgttggactttatcaggctgctgagctcctcactgtcctgtccttcacgcaggtcataggagatgagcctgacgaggaccggcccagggcctgtgtgggccagtgggggtgagatggtgaccgtgagcgtggggtcggcagtcagtggcatctcaaaggcttcgggtggcaggctgagcaggcggcttaccctcacggtggccgatgccatgttggccagagacgatagcacttccatctcggtgatgttccagaaggctttccagaagtgcacgtccaggttctgtgtgatccgctcaaactcagccccacgcagctcggggtcgatggcaaagcggccgc

SEQ ID NO: 448394 - DNA, 1263 bp, Homo Sapiens
  misc_feature (998)..(1041): n is a, c, g, or t
  misc_feature (1139)..(1167): n is a, c, g, or t
ttcgggcagcagcctacggggtgcgggtgccagatggcatcatggcagcctacccggccacaatgctgcagcctgccgcctctccctcccgcctgctgagcctcatggaccccttgctgcccctcagtgtgctctccaagtgtgtcagcgcctatgctggtgcaaagacggaggaccactccaactcagaccagaaagccctcggcatgatggggctggtgcggcgggacacagccctgctcctccgagacttccgcctgggtgcctcctcatggctcaactccttcctggagttaagtgggcgcaagtcccagaagatgtcggagcccatagcaggcctatctgctctccctctctcagagccgatgcgccgcagtgtgtctgaagcagcactggcccagccccagggcccactgggcacggattccctcaagaacctgaccctgagggacttgagcctgaggggaaactccgagacgtcgtcggacacccccgagatgtcgctgtcagctgagacacttagcccctccacaccctccgatgtcaacttcttattaccacctgaggatgcaggggaagaggctgaggccaaaaatgagctgagccccatggacagaggcctgggcgtccgtgccgccttccccgagggtttccacccccgacgctccagccagggtgccacacagatgcccctctactcctcacccatagtcaagaaccccttcatgtcgccgctgctggcacccgacagcatgctcaagagcctgccacctgtgcacatcgtggcgtgcgcgcttggaccccatgctggacgactcggtcatgctcgcgcggcgactgcgcaacctgggccagccggtgacgctgcgcgtggtggaggacctgccgcacggcttcctgaccctagcggcgctgtgccgcgagacgcgccaggccgcagagctgtgcgtggagcgcatccgcctcgtcctcactcctcccgccggagccgggccgannnnnnnnnnnnnnnnnnnnnnnnnnnnnnnnnnnnnnnnnnnncgacactaaaagcctgttgttcccatctgcgccggcctccgtcatgaatgccttccgggccgggcggaaggggacgcgggctgtgccttacttaagtnnnnnnnnnnnnnnnnnnnnnnnnnnnnnccgaaagctgagaccctcgccacggggagggggacgcgcacacacaccggtcaccgagacggctggacctgcacgccaccgctgccttttgctgct

SEQ ID NO: 448395 - DNA, 705 bp, Homo Sapiens
  misc_feature (65)..(134): n is a, c, g, or t
cagtccggcgcacagttctcacagttacatcaacaaaaaccccaggaggacgctgctggcgcgannnnnnnnnnnnnnnnnnnnnnnnnnnnnnnnnnnnnnnnnnnnnnnnnnnnnnnnnnnnnnnnnnnnnnctctttcacctttgccccagcccctcaggcacctcgggccactcggcttcagcctcgcccctctgcgccaacagctagggatgcttccctcaagctgcgtcgctcccggtccgctgagttcctcattttagtgtttttcctttagaagacgccaactatgagaaaccctcaccctccaaagaggccgagtgcgtgttgagtgactctacgcatttgccgccacgcctcgggttccccccacggcctggagcatggggccggggcgctggtgtcaaccttcggtggaagtttgggaggctggctggatccttcttccacccgagaagcttctgggaaccgctgaggcgaaaccaccatcgcccggccagaccgctgcggcagggaacgagatgcggcgcccctgggccccgtagcggctgcagcccccgggacccccgctgcccgcctcgccccaacttcttcgcccggcgcccggcgcgcccagcctcggccgcagctcccagccccgggcgcccggccgagcgctgggacccggctcccgccgccggcacgtcccccggcagccactcgc

SEQ ID NO: 448396 - DNA, 466 bp, Homo Sapiens
ccagaagaataataccagcttccaattcctgtgaatctgaccgtttctgtgtagatagtctaagccttccaaaacctctttaagaattgttgctattattgcctcttccagaactccattcttgtgttctcctcggttgacaatgtattttatgatatccaacattgaacctccacttagtaatttcatgaccagccaaagttcatctttgaccacaaaagaggtgtaataggtcactacgttgggatggctgcactgactcatggcttgaatttcttttaatagttcatccatactggtctggcatttttccaagttgatccgttttattgctacacgttcttgcctgggtttgcatagggctgcctgaaccacagcagtagctccactgccgataacctcctgcagctcgtacgcgtccctgcagatgggccagccgacagcctgtgccgccggggccggggcc

SEQ ID NO: 448397 - DNA, 415 bp, Homo Sapiens
ccttccctaggtaaaggagtgatagaacttgtgccaaaaagagggaatctatagaacagaaaatatagtttcccccttaaggaaagaaaagctggacaagattgaaatgctctgtcttctaaccccatgaccagaagcaagaaaaacacattaagcaagttggtgctgggaggctccacagggtctgggaagcaccagggtgcccacttacttgcattgctgtgctcggcccttctataggtagggctggacgcccccgccaaccacggtgcagccctcgctggcatctttcttgggctcgtagccgccgcccggggaccggtagtgggactcgagcgggtgcgcgcccgccttgcccgcgtcgctggccgcctttggcgcggtagtgcagggcctcgccgggggccgcggccgc

SEQ ID NO: 448398 - DNA, 354 bp, Homo Sapiens
tttttacatccttatgactattttaattcaatttcaattcatttccacaaacatttttctcatgcctgctctgtgctaggcactgctgaacaaacggaacaaaaaatccacccttatgcagcttacattctaatggagaaacagaaatgatacaacaaagtaaataaacaagttatgtggcattttagtagtaagcaccatggagaaaaaaataaagtgaagaaatagcaaaagccactgcagaggctgcaggtgggactaagagtgaagaggtgagtgagtcatatgggtgtctgagggaacctgctctaggcagagggagtgacaagtgcaaacgccctggggcaggaactg

SEQ ID NO: 448399 - DNA, 401 bp, Homo Sapiens
aaagctgtaagccagcgggcctggtggacatcttttaataatcagtctttccattcaggtatatggtatatgtctccatttacttaggtcttatttcatatccttcaggttggagctatcatttcttttcatacaggttttgcacatttcttgtgaggtttattccttcatggtccatggattttgttgtgaattgggaatcctttttccaccaagtatattttctacatttgttactttagtatacaggaaagataactaatttttatctgcagtttattatctatgaacaggattcaaagtagaactactcagtaacaggtttccataatcaaataagtatgggctaaacaaagctaaacagatgtgttcactgctggacttatcaatgcttgtgataa

SEQ ID NO: 448400 - DNA, 315 bp, Homo Sapiens
atgagcaactgcacccagcatttgggctcattcttttcccctgaaaataatttactcttataaccttcatctccccttccctgttaaagaagggtaggtatataagcatctggactttattgggttatcattctcctgcaattcccctgtgcttactatgcacatgaaataaattttatatgcttttttatcctattaatctaccttctgtcagttaatttttagtgaacttttagagggcaaagagaacgctttccctctttaaccctatagcctctcaaacttatgaatcattgccaagaagaaaaagagcgc

SEQ ID NO: 448401 - DNA, 1147 bp, Homo Sapiens
  misc_feature (410)..(410): n is a, c, g, or t
  misc_feature (467)..(475): n is a, c, g, or t
  misc_feature (534)..(542): n is a, c, g, or t
  misc_feature (546)..(556): n is a, c, g, or t
aatatataaaaagtcttggtgtggcgagagctcaagggttttgccccaacaagaagtgcgagaggggtgtgttatatatgccgcaacggggagggcacaggcgcgtttattgggcgaggcacaaataaggcggccgtgttccggggggtatagcgtgctacaaaacgcacagggtttgtgggggaagaaacggtctttcacaatttgtctcgctccgaggagcatagcgtcttacaacaggggccagttggccgcacccacgcggttatctctcggacaagaggaaggttgtgcaacacgagtgctgggttgggcgcgccgtataaaaagtcggaggagaaaatgacgggagagctctccgcctatttccggaagactgtgccacctggtatggcgagcggggaatctcnccccacgtttatagagtgggggctccctttgcggggggcaaaattttccccgctttnnnnnnnnncaaagattctggtgcttgccacggaaagccgcgctttttggggtgttgtgcacgcaccnnnnnnnnntggnnnnnnnnnnnatttgggtttggggaaaatcccacaggccccggtaattttcgggcgggccaaggggtgttccgtgaggaaaaaccaaaggtagggacccaatgtttccgcggttaccatagggggggtccgggcggcgccaaaaacggagtggtgttaggagagcgttttttcgaggggccgagagcggccgacaaggggtgggagcccgcgttcatgggggttttttacagaaacagggcagtaggctgatttgggccccagggccgcagcttgccaacccctgctgctttaggggattcattagacttcatatccttgacatatgagagagggtgtatgtctgaaaccttcacagatcctcccatttacgaaattgctgtaatctcgcgctctcctgtttcctcatctgttcccgggagcaatacctatagtgcacaggattgctgtgagaagccaatgagatcctgtatcaaatgagaataacatgcatggagctgcatccactgcccagcagctatgcccatttgccagccggtgactcacttctacatacaagtagtggtgacatagtgcaaatctgtgcctgaggataaatcact

SEQ ID NO: 448402 - DNA, 473 bp, Homo Sapiens
ttacatttatgtacattttatttctattattattacattgtaacatatagtgaaatatacaactcacagtaatgtaggatccgtgggagccctgagcttgttttcctgcaactagacagtcctatctggaggtgatgggcaacaacgacagatcaggcattaggttttcaaaagaagcgcgcaacctcctcacatgcgcagttcaccatagggttccagctcctatgacaatctccagccgccactgatctgacaggaggcggagctcaggctgctgtgggatcaatgggggggtggctgtaaatacagatgaagcttcccttgctcgcctgctgctcacctcctgctgtgtggcccggttctgggtaccggtctgtagcccaggggttggggacccctagtctataaaaccgtgagcctccagacattgtcctaccctgcctgccttcaggcagtttcgaggcagacacctg

SEQ ID NO: 448403 - DNA, 446 bp, Homo Sapiens
  misc_feature (394)..(394): n is a, c, g, or t
ttttttttcccggcaagaaatcatgtttattcacattccccaccccaccacctgagagtcactttcactccaagccctgggcctgacgggagggggccaaagaggggggctgcctaaggcagggcccagaccccacagtgtgggcctctggagctgtgtctttactcttgctgccgatcaatcccatgctctgaaatgcgcacactctggctccttagtagatgccataggtgggctcatgactgtccctgtaccggtccaggtagcgcaggggctgccggtgggggaagcgcttctgcttggggtggtaagggggcggccgcacgaactcaaacaccggctcccgcatgtctgcaagaagagtgaggggtacccgggtggtctctggcctgcnccccctaaagcttaggcctgcccaccagggacctgccgcagccttcccctaa

SEQ ID NO: 448404 - DNA, 523 bp, Homo Sapiens
cctggagatcgctcttgctttttaggttgtgtttcagttttgttttaaaagagctttggatttgccgttggtgggcagtgcctgtccctggaggctggaccctcacgtggcagggctaggacaaggggcaggcccacggccgctgagaggatctctgtgtttaaagcctttgagaataagttactgcagttcccagggtgcaaggtagggattggcagaggggtttctggtggcggcatcccctagagtccaggccacaggggctcccctgtcaggcaatgagagggttaggagggagagggtaggaagagtgaaccagaagcacttctcccatgccagcctccagtttggttagagttttgtgggctccctgcccatgccaggctccaactttgggagccaactgagcatttggaaagagtttgtgagcggtgtggtgctctagacatagggttaggaaggagaagagagagtggcgaagtttgttttccttcccccttctttgccttgggctttcttttcg

SEQ ID NO: 448405 - DNA, 864 bp, Homo Sapiens
cccgtccttttttatgatgaaaaatgattcccaagctctttgagcagattcctcaaggcggaatatgagtgtgactctccctacttgggaggacatctccgactctgcaaaagacttcattcggaacctgatggagaaggacccgattaaaaagatacacgtgtgagcaggcagctcggcacccatgggatcgttggtgacacagccctcaacaaaaacatccacggagtccgtcagcgcccagatccggaaaaactttgccaagagcaaatggagacaagcatttaatgccacggccgtcgtcagacatatgagaaaactacacctcggcagcagcctggacagttcaaatgcaagtgtttcgagcagcctcagtttggccacgccaaaaagactgtctggcaccttccacgctctgtagtttcatttcttcttcgtcgggggtctcaggagttggagccgagcggagacccaggcccaccactgtgacggcagtgcactctggaagcaagtgactggccctggaggtggggcccggggtcggggctggggaaggggagccccagggtcgccagagccgcgagccactccagcgagaccccaccttgcatggtgccccttcctgcataggactggaagaccgaagtttttttatggccatattttctactgcaattctgaagtgttcatttctcacaaactgtactgactcgaggggcgctgatttcataggatctggtgctgtatatacgaatcttgcaaagctctaactgaacggaccttcttattcctctcccctaacaccatcgtttccactcttctcagtgtaggtaaccgtctatggtgtgttttttcattaatgac

SEQ ID NO: 448406 - DNA, 752 bp, Homo Sapiens
  misc_feature (663)..(699): n is a, c, g, or t
gcgggaaaacaacttttcattatgaaaaactgggagactgacatttaaatggtttatctgcatgattaaattaatcacatttccaacagtgcatcaagcatctgagaataacattattttgagtaaaaacagaaactcttcgggagagaccccctccccacaggtcaggctgctcaaatgtccaccatgtctagcagcgcagagagatggagctcagaggcaacttcctcttcccttgaactccggatcagcctttccaggtgctttagtcgttcgcctagacacgttcctgtcgcctctgacagctgcagttgctccctcatcatgtcactctgtgggctagtagttacagatgttttcatcacaggttcaatagtgtgagaaagagacactagagtctgaggaagatagaggggaagggaagttaaatccgtaaatgctcctgagtcttcagacaaccattgctgaagctgatcttcaaacctcttgttctcttctttctccagcagcagactgctcgacaaacactgcgccaagagctcctcagcagaagctcctcgcatcagatcctctgtgctgggaatcctcccctcttgagcacactctgtgctcctcttccactccgctctcgacgaattcgagctcggccgatttggcctgatnnnnnnnnnnnnnnnnnnnnnnnnnnnnnnnnnnnnncggccgccaccgcgtgaagctccagtcgccctatagtgagtcgtatacatccc

SEQ ID NO: 448407 - DNA, 466 bp, Homo Sapiens
tgacttgatggaagcttggaagcaggcatggggccagcatgagctgttccaggagggcacatgtgtctgaggcacatgttcttacatgttaatgcacatgtgcaaatgtatctacatgctttacatgatgctgtagaaatattttctcttgaccataaacatttcaaatcatgtacttacagtttggcaataaagccttttcatccttctgcaaacaattttcccataccattgcttcacatgcaccgtaactggaagaggagcacagagtgtgctcaagaggggaggattcccagcacagaggatctgatgcgaggagcttctgctgaggagctcttggcgcagtgtttgtcgagcagtctgcttcgcactcgctgtcgctcgctcgagcctcgctccccacgtccttccttccgacccgcggctggaccctcctcacaaatttctcagagaggctcacctcaaa

SEQ ID NO: 448408 - DNA, 828 bp, Homo Sapiens
  misc_feature (87)..(87): n is a, c, g, or t
  misc_feature (336)..(336): n is a, c, g, or t
acccagtgatcttgggctggggttgtctttaggaaaagttgagactataagagtcataaataagtccttgtgtttccttaatttatnttgttaacacccctaattacaaccaaagtgatgatgtggagtcttctgtcttcattttggccccagcattcttaatttcaaagctttattctgtctgcctaagagaatcaaccaaaggtgattctcctaaagagcagtgaaggaaatgtcaggttagcaggacccaagttttgggtgtgaaatgttgccagcttcctataatgtaaacggacttgttaacctaacctaattatgctcagtggacttctnttagatggttttgaaaaatgaactgagctgccttcccgcatcgcataaccagttccatcatcctggtggaacttgaacatttagagtttatctagagagcttggttaatctttccatattatttgtagtattggtcacaaatgctgttccctcttagcctcattctgtgcaaccaagtgcatataagatgccctgaaaagagtaacaaagtatgctttgcctgtttccacttaccaggaaattccttcagaactagattagcattgccctgcctgtctgaaaggacagtttacctaatggtgccagcctccttttgctttggcaagctggatttctcagagccagcatgttgtttccataactactttgatattttaaactcaggtactccagtcttcaccccaacctcagctgattgtagtacacctgctagctctgttgccccctcaaaactgcacccagagcagggccacaagggtgctttttttcttt

SEQ ID NO: 448409 - DNA, 1713 bp, Homo Sapiens
  misc_feature (1028)..(1116): n is a, c, g, or t
  misc_feature (1469)..(1492): n is a, c, g, or t
cttgcgcggccgcgtacgcggggcgagtgtagtagaagaagaatcgtggaggacctaggtgtggtattctcacgtcggaaacgaaggtgtggcgtataagggcggggaatgagaagagaaagggtatctttgtattgtggtaaaaatgggaggtaagcagatttagggcgcctagcggagcgagtgagatcattgtggtctcgacactaccgtgccgtatggtgcgacgttcgtaacatgcctcactgggctctcgcccatgcgcaatagtctgggcgcgagaagatgaatatattcggtttgtatgtgcgcccccgctcgatacgttgtctctggccccccgcggtcaggcggggggtggtgaatttcttgtttgtataacatttttcatccctaagttagcggtcgtgtctcaccgcaagagagggtggagggaaagagagacgcgggctcggttttgttattaagaggggtgtctgtgtggaaggcgggggtggtgttcgatcttacatgattcgttcgtgcgcgtccattttataggggcggcgggcgtggcgcttttgggcactcggcgtgttttagtgtcgagcgcgagtaagaaactgctggcgtgtgcgtgagcggcggaatttattttctagcgagcacctatgcgatgggtggacgtgaaggtgagaagtaggggtgaagcagggagcggggcgtgggcgcgggaagacaattacgatacaagcgaggaccgagcggctaattgcgcggtccaccccgcgtgggaggagggagtcccccgatcagagagggcgctcgtgcgcgcggctccccattgggaaggacgggtttgagagacgcggagtcggtggtggcgccgccggcgggggttttgtttttctcgcggggaaaatcacaaacccctatgttgtgtacccctggtttttcgtgggaaagcggagggagaggggcaaggtgttccgcgttcttcggggtgggcggaggtgcccaaaggaagtggtggggaagaattttctagnnnnnnnnnnnnnnnnnnnnnnnnnnnnnnnnnnnnnnnnnnnnnnnnnnnnnnnnnnnnnnnnnnnnnnnnnnnnnnnnnnnnnnnnngtctctctgctcctgcttgtattcagcgcgttctttgggtttgttttctaaattttaaaaatttattctttctcttttgttgctgttgatttgttcttgagatggctacaacaccagacagaacagtgccctcatatctgatggctgtgaagggctgcactcctttgaaacattaagatctgctttgggcttccctcttcggcctcaccctccccttaaaatcaagtcatttccacactttttagtaacatactaaatgacacatcatcccttgttagccctgtaaacattttttctccacacaccctccctctttttttctctcatgtctgtgggtgaataattcactaagnnnnnnnnnnnnnnnnnnnnnnnnttacacatttatatcctgcactccccacccacccgcccaccccagttttggctcttctctccaaggcagacaacaactgatgtggattggaagtggactgagagaatgaacggggtcagggttcagatatccataaattctgacctggcaggtcccgagcatcaccatgtgaccacgatagaaagcagaacaagttccttgcttactcctccttgtctaaa

SEQ ID NO: 448410 - DNA, 473 bp, Homo Sapiens
  misc_feature (371)..(371): n is a, c, g, or t
  misc_feature (417)..(417): n is a, c, g, or t
gaaagtcacaaaaatatattaaaacagcagctgtcttcactctaggcactggcctcccttcccagtgccccttgcccaccacccgccatacactttcagagacagatgcccagggcaggaaaacggatgcgcctcagccgcagcccagggtctggagaggtccctccagcctgggagtagagggcggctaacagtctcaacaggctcgacgccaccgccgacgagggggccgctgggaggccggaggtacaggagggtcgggcaggacgcagcggacagtcgggccttgccacggggacagaaaacagaagagaaatgaacaaagtgaagacagggagagagagaagtcacagcagtggggggaggcgcanaggagtgagggaggtcagtggggagtgggggaaggaggcccaccangtgacacccacttagttgagggggacagggaggctgatgagctggggtctgaggca

SEQ ID NO: 448411 - DNA, 491 bp, Homo Sapiens
tttgaaatgagacatttagtttttatttattccacttttgttctaggtttcactgaagaaatgttggtttcacagtgcttcccagattcccctgggctgttatctgcatattactttctgtctgatgggtcctctgggtagctgatacagacatggagttcaaagagcaagagatgactaagcgtgactcctgggaaaaataaaagtgggtagaagcaggctcaggtatggaaaaccttctggccactgtggaggtctgacagcttagaccacattgcaggtcacaggcagtatcggccaactccacagggagttctagggtgaggagcctcatgttgggctgaatcagccatgccctgtgcctttctgtgcccacgtattggctggggactgcagagaaagaccatggccttaacttgaaagccaaggccgaccttaaatgaactaccagatgcaggttggtcagtgttagctacctgcactcattgctg

SEQ ID NO: 448412 - DNA, 474 bp, Homo Sapiens
aacattataaatctgaccacttttattaggttggggtgaaatagagaaatctttactatcctggggagaaacaagcaataaaaccatgttttacaagtttaaagaaatgaatttatcctaaaatcatcagtatcagccccccaacaaagcaactttgccatttttacttaaagtacactgtaggcttgatcagacacttatctcaggcagtacttgtttaaggcaggtctctttgtacaaaagcaaaacaggaaaggcaaaacaaaatccataggccattatttaccttgcccccagtaaaagccaagagatttaagggaaggacattttctaatcccatacccatgctaacatcatcaacattgctgatacaaaactcaggtcaggaaaagaagctcaaacagggaaggtgagtggcaacattttatgtatgctaaattggatggcaatattagattacatcttctgcaactg

SEQ ID NO: 448413 - DNA, 456 bp, Homo Sapiens
ctgcaccagcaaataaacctttcaggttaactaaacacacttgtgtctttgaaaatctagtttgagaaatcctaacagcagtttgggacaagtgatggagccaccgccctccaccctacaccaatttcactgtcagtacatgcagtgctaacagtaagatcagctgtgtcttttattaggaagcatgttttattgggggcaaggaggggttcagttaggtgctaagaatgtgtcctgcataccgctgtcactctcagtactcaaaaagtaaacatatcaaagccagaagcgtaaactggcatgacaagactaggaagagaaagtaggggacaaagacaaaacagaaattggctggagaaaataaatttagacaaacaatttacaactttcacttagaccctaaggcaacacattccagccgacccaacgcgctcagccggggcgaccgtgaaacta

SEQ ID NO: 448414 - DNA, 1107 bp, Homo Sapiens
ggggacagggagcactgcaaaggctcagacacgggaaatagctggccctgccttgggctgcagcacccgagctgggtgcaaagcaggggccagggagaaagcaattagctgggtctttcttccagatccagcatcttccaggtaccagaacttcagcaaaggaagcagacacgggtcggaggaagcctacatagaccccatgccatggagtattacaactgggggcggttctcgaagcccccagaagatgatgatgccaattcctacgagaatgtgctcatttgcaagcagaaaagcacagagacaggtgcccagcaggagggcataggtggcctctgcagaggggacctcagcctgtcactggccctgaagactggccccacttctggtctctgtccctctgcctccccggaagaagatgaggaatctgaggattatcagaactcagcatccatccatcagtggcgcgagtccaggaaggtcatggggcaactccagagagaagcatcccctggcccggtgggaagcccagacgaggaggacggggaaccggattacgtgaatggggaggtggcagccacagaagcctagggcagaccaagaagaaaggagccaaggcaaagagggaccactgtgctcatggacccatcgctgccttccaaggaccatttcccagagctactcaacttttaagcccctgccatggttgctcctggaaggagaaccagccaccctgaggaccacctggccatgcgtgcacagcctgggaaaagacagttactcacgggagctgcaggcccgtcaccaagccctctcccgacccaggctttgtggggcaggcacctggtaccaagggtaacccggctcctggtatggacggatgcgcaggatttaggataagctgtcacccagtccccataacaaaaccactgtccaacactggtatctgtgttcttttgtgctatgaatttggattcctaattgctattgttgggtgctggggttttaaatgattgataagcttgttcagtttactttatagaggggggaagccatattttaacatttctgggattttcagaagtagaagaatttcctggtggtttg

SEQ ID NO: 448415 - DNA, 700 bp, Homo Sapiens
  misc_feature (52)..(60): n is a, c, g, or t
  misc_feature (554)..(615): n is a, c, g, or t
tcatggaaaacaaaacatgggcttttaccccagctctcttctgatagtaagnnnnnnnnntgataggccggagatttcaaggaaggcccgtttcaagcactaataaaattgtagctggattccttacctcttacccaacatgatttcaaaagcaagaaagttgcctttcatcttgcccctatcaaatccaaaagagccaattatagcctgtttcataatctatttttattgttgttgttacacttgaactttctgtttggaacctaatctatttctaaaagcaaagtctgtataattgttaagtgggaagtccaattgcaggaatactaaatgttccaagctcagtttagaaagtacatgggacaataatatagtataaataagagatcacagagacaagggggaaatatatattagagacctccaaaaaaattctctgaaaggagaatactttagctgctgtactacaggttatttctctcttatgtcacccaggagagaagtgggggagaatggtgttaaaaacacaaatagtgccgggcgcggtggctcannnnnnnnnnnnnnnnnnnnnnnnnnnnnnnnnnnnnnnnnnnnnnnnnnnnnnnnnnnnnnaccatcctgtcaacacggtgaagcctgtctctacaaaaaatacgaaaatagccaggcgtgtgtaagatcctgagagtcaccgcgc

SEQ ID NO: 448416 - DNA, 420 bp, Homo Sapiens
  misc_feature (371)..(371): n is a, c, g, or t
ttaatttagttgtcttcttctcccatctgcctgctctgtgtctttcctgtcacctgtctatgggtcggcctgcctctccctccagcctggctttctcttctctcctcagagagctcggctgttgctgactctcacagggtatgggctgtgccttgtgcaacatcagtcaataaagataaattacaaaatcatttgttttatttgttcttgttactttgagggctgtctgaaattgcctttcttttgaaagccatatttgcatatctctatgctggagtcaaaggctgcagctgtggtttcaatacaatttaaatattaataaaacctcctaaacctttagctgttttttaaaaaagcagtcttgcccttcntgctcctagattgctaatataatttaatctttgtcctttgcattgtaca

SEQ ID NO: 448417 - DNA, 500 bp, Homo Sapiens
gggccgaagggctgaaccactgggcccggatggggctcacagagcggaacgctccacgagaatcgtgggggcgagggaaagggtcaagattaccagccattgaccaccctcccgggaagggccttagcctgggaagcacagcttctccgtcaagtttttcccgagctcccctcgcaatacaccaggaagctccgccccgtcggagactcaatcttcgcatctgcaaaatgggcgcaggggtgcaaatgggtggccgtggttgccggggctggggagatggcccacttgttccagccacggtcacctctcttctcagagtgaagttcccagaccctacgccccgctgtcaggcagcccgccgatcagatggaggagaacgaggtggagagcagcagcgacgcggcccctgggcctggccggcccgaggagccctctgagagcggcctgggtgtgggcacctcagaagccgtgtccgccgacagcagcgacgccgcggccgc

SEQ ID NO: 448418 - DNA, 612 bp, Homo Sapiens
ttaggaagaaacaaacaatatatttcgcttaaaataagaagcacgtggaaaaagaaagactttgaaagagttggccaatgtcttctcacaattttttgtatagcttttaaaaatgtctgcatggctcagtggagatggtgtccacgtcttccctccacctggaacctgcattcaatccttcacaagtgctgtctatgtatgagaccagctgggtgactcggttaaacccctcgcctctctaaacaaagtatgtgatttaccctgaatcattcttcagcaagtactaaaaaggtataatttcttaaaatgaatgcgattgatcgacttttggcttgcaaaaatgacttctcattggaaaagagacacaccttagaaagatgaaaatgtgaaaaacaacagtcataaaatggaatcgctccatgctcggactctctgccaccagacatctgactgcgcagccatcagctgagagggctgcttgcagttccccatccggggcccacggtgcctgggtgctaaggggcgactgggcttagggagcctctcatcaccagctgtgttgcagctttaaattctgccccagttgtgggatttaaaattctggatgttaaa

SEQ ID NO: 448419 - DNA, 506 bp, Homo Sapiens
  misc_feature (422)..(422): n is a, c, g, or t
aatttaaaaaaagttttattaaatcatttagacttgaaagaagtcacaagttaacacacttaagtgtgttctgtacaccaccaacccaaatggattgatttcagaatttttataaataaaacataaacatatttacagtgaaaaataaaaacatgttagcaagtgagatgattaaactgttacctataatcagtttgggggaagtaccaacctacaggattacatataagacacttaagatttcattaggcttaaaaagtccatagttgaagaagttagttgtaatatatatgatccatttcttactacggcttttttcctcccaaaactagacctttcaaccaatttacataaaaagcttcattttccctttattggaggtaaaagtacaaaaagctgtaaaccccacccctagaaccatnctaaggaataaagctattgaatgctacaaataggactataaaactacggacataaaccgttatacagtttgtgctacttgtcct

SEQ ID NO: 448420 - DNA, 353 bp, Homo Sapiens
tttttagtgtcaatagtgcgctttattccgagtgccaatgcatgccacaagtagttgttcatgaaatgttttctcaattggatcgacaaaactggattcctggttttgccctgaacttgcaacaggacaataatgcccacgctgggaatgttccaggttaactcctcacccttccccaaggcattggccacacaggtcacacacactctctgcaaggccctgctggaaaactctgccaaggcgttgattcatccgttgggcacctagtgggagggcagagtgggtggaggtgatgggggcacagccacaggatctcactggggccttacagaagcctgaacaccccacggtgc

SEQ ID NO: 448421 - DNA, 507 bp, Homo Sapiens
agccatatttcactcattttttaaaaaatcaattacaatttttagccttaaggtttgatattggtattgtgtttattttttcaaagaatctttatcttgtagagttatacactgcaatagttacagatgaaaagatagtgtggtctgggatttgtctcaaaaccagtaggaggtaggagtggtgggctacaggtatatagatgaaacaagattgccttgtttatactattctatctactttgtacctgttttctatgttataaaatgttcatagtaagtggtttaaacttcaaaaatcatttctgaaaataagtggatacccttatttactcagctgtgctataaatttcatattaaccccccaaaactagaccagtctgagtgtttctaataaaatccagcagtaaccgtgactgattttaaaacattcactgcttctcttatctacaatgcctagcttcattagtcatgtagaaaatgcttacattccccaagcttttaaaaatt

SEQ ID NO: 448422 - DNA, 921 bp, Homo Sapiens
  misc_feature (827)..(863): n is a, c, g, or t
  misc_feature (899)..(899): n is a, c, g, or t
tagggccctaaatcccaatgacaggtgtccttataagaaggaaaagaagtcacaaacacagaggagaaggccacgtggattcacagagaatacagtggtgccgccacaagcccaggggacacccagatcccccgggaactggaagaggcaagaaggagcctcccccagagcctgcagaggagggaacagggtcctgcagacacctggatcttaggcttctggcctccagagctgagttcgatattcagcattcattcaacctacatttattaggctcctactgtgcgtcgcgctggaaaggcaagcagaagctagattcccaatcgatcccgggaggctggacgatccagacacaaacaccgttcatgcgtctattcgaaaaggccctcttggaattttgtgcacagcatttccttggggtgtcgatggatcggggtctgcaaacattagcaccttttccggtggccgctgtcttctcagacctcagacaccggcgcctccccgtgaactcccgcaggcgtccctagcccagggcttggcgggcgctgccggttgtacctggcctaagccacgctgggccgccagcccggggcgacaccttcttcggacggcggggatttgcggctcgggtgaccggaggtgccctcccgcgggtttcggagcagctccgcgggctctcgctccgcggggaggagcctgcgtctcccaggggcggggctcgaggcgcctaggggccggtggacacataccagccgcccggtggtgtcggcctctgcgcctgcgcctccgctctcgacgaattcgagctcggccgatttggcctgatnnnnnnnnnnnnnnnnnnnnnnnnnnnnnnnnnnnnncggccgccaccgcgtagagctccggttcgcccatantagtctagtaatacggtttccc

SEQ ID NO: 448423 - DNA, 409 bp, Homo Sapiens
tttggaagtcgaaacagacttttattttaaaaagtattcttgataatgtgttcaaagactgccctggctacagcccaggactggcagtaaatacaaccagctttggggaggaatctccctctggggaatgtggaatcacagatgctgacagcccaaaggaggcactggaaacaggtgagtgaaactcctggggagaatcttagctgaggaattagctagggaaactccctaagcatgaaggtttctatggcagatcaggatcacttaccctttcaagcactcaggttttgtttgcaggcaaattgtttacacaatcagaggactcagttgccaggaaacagtcaatgtccccagctcattagtctgatggcaaataaatctaccaatatcaaggcaccgggcctggtcc

SEQ ID NO: 448424 - DNA, 978 bp, Homo Sapiens
  misc_feature (169)..(170): n is a, c, g, or t
  misc_feature (180)..(180): n is a, c, g, or t
  misc_feature (183)..(183): n is a, c, g, or t
  misc_feature (187)..(187): n is a, c, g, or t
  misc_feature (189)..(189): n is a, c, g, or t
  misc_feature (191)..(191): n is a, c, g, or t
  misc_feature (193)..(195): n is a, c, g, or t
  misc_feature (437)..(450): n is a, c, g, or t
atttggggggaggaaattcccaaggcccctaaggtccaatggccccaggattctcccttgggaaaccagcttatgggcccaggttcccctttacttactgggggcccgcgcccccaaagggaatggtgctagaaaagtttttcgagggccgagggcggccgacacggtnntttttgtttnttnccgntntngnnnggtcccacactttcattttctttatttttcattgataccgtatgaatacaaagtttctagaaagctacaaaatgtctaccactttatcaagaaggcatcaaaatgtgtcactttgcaaagacatgaaaacacctgcaggaactgacacaaaaatagcatttttagagtgatgaaataattgcacttaactgtcatgggtattaaagttatcacacatatgtaccgcaaaagctagaatacannnnnnnnnnnnnnacaaagcactttataaaaaaattctctgcacacaaatcctataattttcatataactatcatactaaagataaattcactttaaagccaacacttagaacattttaaaacaaaaaggtaccagtacctaaacacagacgttaacaaatacaagaatactgtactgccaagaggtttaatcaaatgccttttgaaagtttctgcaaataggttaagaaaacatgtgtgagaatttgcccacgcccacccccatctctccaatctacccaagaggaacccagttacccgaaggcaggttccacagcccactcccagcagcagtacaatatcaaaggaaccactgaccagatgaaacgcttacatcacaagcccattttatacacgtgacacaaagacacagaccgtgagaatcccattaagtcatttagaatgtgaacaaacacacgtggcgaaaaccgatttacataaaatttaagtgtattattaaagaattaaaggctattcaggtttcttttttaaatgttacaaa

SEQ ID NO: 448425 - DNA, 1519 bp, Homo Sapiens
  misc_feature (244)..(244): n is a, c, g, or t
  misc_feature (269)..(269): n is a, c, g, or t
  misc_feature (317)..(317): n is a, c, g, or t
  misc_feature (382)..(382): n is a, c, g, or t
  misc_feature (387)..(388): n is a, c, g, or t
  misc_feature (447)..(447): n is a, c, g, or t
  misc_feature (449)..(449): n is a, c, g, or t
  misc_feature (481)..(482): n is a, c, g, or t
  misc_feature (488)..(488): n is a, c, g, or t
  misc_feature (499)..(499): n is a, c, g, or t
  misc_feature (533)..(533): n is a, c, g, or t
  misc_feature (575)..(575): n is a, c, g, or t
  misc_feature (577)..(577): n is a, c, g, or t
  misc_feature (592)..(592): n is a, c, g, or t
  misc_feature (629)..(629): n is a, c, g, or t
  misc_feature (648)..(648): n is a, c, g, or t
  misc_feature (1368)..(1385): n is a, c, g, or t
ggcggtgggagggtgttatttcagactggtgttggtggtaggtcagtattcgtggcgggggtgtataaagcggacgggtcgggttataaaagcggcgagtaggttctgattgtaggggacagaaaaggtgaatcacttcatagaatggcggtaagtatttggctgggttgtgtgggaaggggttttgggcggtagttaagtgtgagatggagggtgggtctgaccgccacagagttacatgttngttgtaggtttgggcccgggttcgngggatttggttgcggagccaaacgggctgcgcttgggtcaacacaaancgtgtggcggccattatcctcccgcccgccccgaggggatgggccaggcgtggttcagggccacntcacnnggcgcccagctggaaataagccccacacctcgtgggtgctaggtagtaataatcccaanangaggggaggggagagaataaggggatgctaannttgaantaacaaaccantacaattgataaagaatactttgtttttacaagnacctgttaaaataaaacagcaggggtcgcaacgaaagaggcnangacattttccagttntggaagaatgtgggggataaaccggccgagggtcagngtggaaaattgcgtcttgnggcacgctgcgaattggggaggggtcgcagggtctcccctcaaggtatgatgagaaatgtgtcactgtaattgggtggatgctccgggccccgagtttcgttcgaggcctttaaaaaacggatgtttgtggactccgcaatggatttgcggtttcggggtggtttggtattgggtcacaggtgcggtgccgtgggcgctttttcgttggttgggccgttttggttttggttagatggaaaataataagtttgggtttgggcttaaaggaaatgtcattctggtggttcctccctgaagcgggatttactcagcctcatatactcgcccggaattttcaatctcgcctgtggaaatcgctagctgcgcatccgcggaagaagtcctggatgagaggtagggtgaagggatcaagcagatagcagcaggcatcagcacactccggccgttccggacggtcaggcccgccgctacagggagaagtgcgggaaaccgagcagagaggtgggagacttggctgaggcaatggcaccaggcagggccgcccggagtcccgagtccaggtccgcgaggcaggccccggtgcagccgcgccccggccgaaccctacatgtcctctgtgctgtggacacgagtccgcggagcgccagtcacacccccgcacccctgcaagctcccgccgtagagggggctcggcaccatcctggtcacaaagtacgtgnnnnnnnnnnnnnnnnnnaggtgaagaggacgcagcccggcgccgtcagctccaggctgcctggagccccctccggcctctcggcgcgaccctcgtgccgaattcgccacccaggcctcgctacttaggggcttagcgggttgttggggttt

SEQ ID NO: 448426 - DNA, 173 bp, Homo Sapiens
atttatagtctgattttaaacaatcagattcaagttggttaattttagttatgtaacaacctgacatgatggaggaaaacaacctttaaagggaattgtgtctatggtttgaattcacttaggaattttattttcttataacttaagtgccattaaatgtgttttttcatgtt

SEQ ID NO: 448427 - DNA, 1124 bp, Homo Sapiens
gggctctcccccttgtgttggggacacccttggacaacaggctcgtggcgccacaccgtgttgtgaccccagcagggcgcgcactgcggcaattgcaggccctaactcaaaaacagggttcaggggttctacgcccccactcggtggggtaaagctttcgggattctcacaggtcggggcaccacacaggggcccccacggggttcacacgcttgttcaacaaaccatgcccgttaccgtgacaagcccacggagtggtcggtggcccacacgctggtgcgaccagattcaatttcatgtttgttgcggaagagtttctggcgggcaaagcctcggccattgtccagctccccatgtgtcaggacccccagaagcgtgcttttgccagcatccacgttgcccaccactgctagcctgacctccaggaagtcattgtctcctactcgtgttccggaccaggtaatcacgcacgcggcccccagcttcttgccgttcccgcagaaggatgacatcggcctctatctgttccgccatgctcttcactgtggcgtaggaggcctccatgtcagcttcactcagcccatactcagtcccatctgatccctgcccaatgacatatatggtctctccgcatccctcgtccatcctctcccacatctgccgaagtaggctgtcatactgctctgatgtagggctcactagaaccagcttgctggtgaggtccagctctggctcgccgttgagcgcctcgccgtcctcgctgcagtccgagtcaaagccgccgtggagtcgggcggcggccgccgcggcctggccgcccccggggagctgggctcgggggcgaacatagaggccgggaccggcgagtccatcgcggagcgactgcgctccgtcgccatctttaataacttaggctaattcgtagccggcttccctccctcccaggctcatttgactaatctatgcacagagccccgccccgctccttatcggaataatttatgcaaaactccagccgcgtactgggtgacacgtacctctagctaagaaacagtcgactaggcctctcagccaccaatccctgcagagctttcaagtacctaatgaataattaatgaagccca

SEQ ID NO: 448428 - DNA, 404 bp, Homo Sapiens
ttttgggctgtcgtgccgaagacagtggttttcaggtacttctcatgaccagccaagtcgatgaaggtaatgactttcgtggacttctcacagatcttggtccactccaggctgccgccgtggctgtcaggcttgttcactacattgccttcactgtcaaagcccagaatgtcgttgcccacactgctggtgcgaccagattcaatttcatgtttgtggcggaagagtttctggcgggcaaagcctcggccattgtccagctccccatgcgtcaggacccccagaagcgtgcttttgccagcatccacgttgcccaccactgccaccctgacctccaggaagtcattgtctcctactcgttcggaccaggtaatcacgcacgacagcccaaaacggtccgagcc

SEQ ID NO: 448429 - DNA, 504 bp, Homo Sapiens
  misc_feature (445)..(454): n is a, c, g, or t
cagtacactagaaatgcaaatgaatgtgtagtgacaggaaacaggccagtggttgtttgggtgtagacacctccttggagaaactgcttgtacctaggacaagagatggtggagagctggacaaatccagggttgtaaaacagagatcataagactgatggaatggagtctttgtggcttataaattatgaaattataaataagactaaggccatgccaggcaaaagtcacatacccctacactaaaataataaatgttctaacttaccaattgtcagatgctaactgatgcccccagactccagactccattccacaaagcataactacaggtttgattgaacaagagactgacttcagtaattttctcctgataagacaccactgaccatgggctggttctggccagtttatagaggctgcgcactgagtacctttgtgttcnnnnnnnnnngaggcagacctgtactccagcctggggtacagagggagaccctgtctcaa

SEQ ID NO: 448430 - DNA, 259 bp, Homo Sapiens
  misc_feature (53)..(53): n is a, c, g, or t
  misc_feature (60)..(60): n is a, c, g, or t
  misc_feature (236)..(236): n is a, c, g, or t
accttgatggggatcatagtttcactggtcaaaaatcaaactgtacccttaanatgggtntattttattttataaattatacttcgtagtaaaggaattgttcggagtctgtcacacaaatttgtcaagtaaaccctttggtccatgaaccaaaatatttaattaaaaagggcagagctaatgacaaaacacaaaacctgttcaaagagtaattactacagtaacatacctttctncagaacttcattctgaattttct

SEQ ID NO: 448431 - DNA, 680 bp, Homo Sapiens
gagatcctatctgagagccgcgccgctcttgccctcctgtatggtaaagagatttggcagcggcacctccaggatgcgccctcggggggtccggcgagcatgtcgggaagctagtgttctttctcgggcaagtgattaccgggccccaagtgtccgcgcggcttgggaacatttactgggttttttctgccagaagccatttggcggagagggacgcccaaagtcagtgttatctcgtggccacaagggcccttgggaaaatcccgcgggagtggatgaggtcatcggttcccacttgaccatgtcaaggactgttacaatgttcccatctcttctgctgaagctcctgtaaccagtaagtcatgagttgacgattgggagccttgagcaccgtgacggctcccgcgctgtgcacctggaagtgcgcgggcggctccgtgcccggctccgccgcctcgtcgggggccctggtagctgaagcaggcgtccgcgatgtccaagtggccgaggggcagcgcgtcctgcggactcttgaaatagtaaaggtagcagcggcgcgcgtcgaacacgaaccagcggctgcggtagccacgcagggggcccttgcccgacagcttctgcagatagccacacagccgcgctggctcccgcgccggacccgccccgggctccgcggccgc

SEQ ID NO: 448432 - DNA, 499 bp, Homo Sapiens
gttttgcttttcattgagacgatattactaggaaattttataaaaccagttacaataaaatatataacaagtatttttgaggcagttattggtacttgtgcttactttttatttaatacttattttgataaaatgaggtaactgtaatcttttgatctaaaaaaactagcaactttgtagaaatactttgagtgcaactgcaagtctagataaatgatacttaaaatgaacctgcccagtgttttgctgtcggaagagacgtgctttctccaagggctgattccctggtctcttcctctcagcagcgccctagggacctgcggcggcccggtgttcacactcaggagcctgtgctttctggggggcaccctcacctcccagtctgggactagaggggagtgccgtgtgttctcaagagaatgtacaattacaacccctaaaccacatgagagcctgtgttgttttttaacagtgtttcaactctgagacatcttaaaat

SEQ ID NO: 448433 - DNA, 411 bp, Homo Sapiens
atatcttggtctttaatgtgcagagacaggtctttggaatagagacacccagccagcctgaaggcttcttcctctggggtgcagccatgtggctcttaggggattaagcctaggcccccacgaacgtttggggagcccctaaagtacagcccagacaggcagtggggtcacgttatgggtctgtcgccttcatgccaagtcctccacacccccgcaggtcccacaccggcgagcgccccttcctctgctccgagtgcgggaagagcttctcccgctcatcctcgctcacgtgccaccagcgcatccacgcggcacagaagccctaccgctgcccggcctgcggcaagggcttcacgcagctcagttcctaccagagccacgagcgcacgcactcgggggagaagcccttcc

SEQ ID NO: 448434 - DNA, 747 bp, Homo Sapiens
gacagttttaaagaacactctttaatttatctcaatgtccaatttcagccctcccagttctggcgaaccttcctctgtcccgaccttggttattcattccatgtgggctcctctttcttcttagcctctccacctacattgttctggatgcttctcaagcttttctcctgctcagctggacctcttttgtgcggtgtcagtctgatgtttcgcagcttccaggcattattttcaggggtcttttgcaagtcttctatttttgccctcattaaaaaatatcgtgggctgctctggtcttaaggttgctgtgccctctttcatttccttgtaagtagggtttctgccatcctctggaaatttcaagtggggagccacctggaggctaggtgaacagggcaagggcattgccccttcctgtgggagcccctccctaggtcacacgtgacttttcctccacttgctcagaagtctttccatttaactgcctttcctcttcagcggctgctgagggttcctggttgtgggagaatgtttcagacatggccctctgtcaccttctctgaaggcagtggcctgccatgtcgagtcattgtagccgcacgctggcagagaggacggagcctgagtccgggtgccgaaggcgttggtcttgcccgggctttggccccagccgctgccaaagacgagggactccaaacacagctccatcgccttggcggacagaggctcacagagggcccgaagtcc

SEQ ID NO: 448435 - DNA, 462 bp, Homo Sapiens
ggtttggaccctcgggtggcaggatgatttaattagctttgtttttaagcaagagggaacgtaattggagaagggtagttccagatgttttgagttttcagccacagtggggcagccaggttttccttgcttttggcctgaccactggaggcccctgctttacccaacctgagaggcctcctgggaggaagtcgcaatgatagatggagaaggggcatttgtttttcccgtggatggaaagtgacccgtggggacaagctatgagaaacactgaggtgcgacggcacagagaaagcgggctgaggccaattacaccacgcagggactctcccaggcttcagctgccagggcagaggtggcgcagcccgtgggctccccgagttccctgcaaatcccacccctgaccctgagaccaccttgggccccgggagaccctacatcgtcgctctgtcagaggtctga

SEQ ID NO: 448436 - DNA, 866 bp, Homo Sapiens
tattctcacagggggagacctttctgacgtggagttcgattcttctctgtcaaatgcttcaggagcagagagtttagccatccaaccgcagaagcttttgatcttggatgcacgctcctatgcagctgctgtggcaaaccgagccaaaggaggaggctgcgaatgcccagagtattacccaaactgtgaagttgtgtttatggggatggcaaacattcattctattcggaggagttttcagtctctgcggttgctgtgcactcagatgccagatccgggaaattggctatcagctcttgaaagcacaaaatggctccatcacttgtctgtgcttctgaaatcagcgcttctggtagtgcatgctgtggatcaggatcagcggccggtgctagtacactgctcagatggctgggaccgcaccccccagattgtggcattggctaagctcttgctggacccttattaccgaaccatagagggtttccaggtcctcgtggaaatggagtggctggattttggccataaatttgctgaccggtgtggtcatggggagaactcggatgatctgaatgaacgttgcccagtgtttctgcagtggcttgactgtgttcatcagcttcagaggcaatttccttgctcttttgagttcaatgaagcattccttgtgaaactggtgcagcatacctattcctgcctgtttggaacattcctgtgcaacaacgccaaggagagaggggaaaagcatactcaggaacggacatgttccgtgtggtcacttcttcgggcaggcaacaaggttttcaaaaacctactgtattcctctcagtcagaagccgtgctgtaccctgtgaccctgtggagtagta

SEQ ID NO: 448437 - DNA, 305 bp, Homo Sapiens
atgagcaactgctcccagccatacacaatcatctttatcttagtagaaaacttttagaatgccccggcaatggctgtatctaaaagaaacaggtatttgccctccataaatcaaatagatgtggccaaatcaatatatcccttgcctatatagttatatcgaacacatccctatatggttacatatcaaatattgaatattcagctaatgatcaaaaaagattaacacagtcataaatatcccctcccctcatattcagccttcaaccaaaagtctttctaaggcagcatataacagtgctaaca

SEQ ID NO: 448438 - DNA, 360 bp, Homo Sapiens
taagccaccgcgctggccaagctgcagaattctttagccatcaaagatgatgcctcaagtagaaaggcacaagctgccttcctgaggaacacagggagaactctcattacatcatagtctcaccgactctgtctgaaggaagtgatgcttctcgtatctcaggagtgtctaatgtcatctggcccaccggcagtttgtgtattcaggaggctctggctttcaggtttgctcccttgggacctcttgtgtcacgtcgctcgttccgagaattgaaaggcaggtggtgagggatgaggggtgaggagtggagggtggccataagcttctgcgttttggctaaagtacagacacaagcccgct

SEQ ID NO: 448439 - DNA, 357 bp, Homo Sapiens
gattttttttggctgagtctgtaatttaactgttccactgtctcttgagcagaactggaaggccatgtactacagtgattacaaataagattctggagtcaagtctggaatctgcttcttgacttaccagctgtgtggccttggataagttacttaacctctctgtgccttatgtcctcagctgtaaaatggagatattaggatctacctcacagagttgttaggggcactgagccaggcaatagacatagaagcctggcatgtagctgctgcttcatgaatgttcactattgttatttgataaccccaaaagcactctcagtcactgaatgaagcctcctaagcatcagaccagga

SEQ ID NO: 448440 - DNA, 1043 bp, Homo Sapiens
gccgccatgctttgttcttttagggatgtgttggggggggtataaaattaaaatttattttcatttgttgttgtgtaaaactcacatgtggaagtgttccttgcacaggccgcagcatgcaatacagtttcacacttctgccagatattctatctcagaaagcaaattacctgcaaactaacactggatgacaagtgtcaccagaagtgctttggaaacatgattatgttatacaaagacttggcaaatccaacagcatacagtgcaactgaaaccttccccaaggatctgagaagtcttgccgatggaatccttggacatcaagagccaggcgaggagcagtttccgatctgctgagattctgctccgccttcacgcgaatcagcatagccaagtgccccatccaccagccaagtccttcagtgctgaggacgcacgcatagccaggacagtcacgggcaaacgtgacatcaaatccgaagggcggctgtcggctcccttcctgccagccccagcgggcaccccgtcaagttctcgctctgtaggcagctggagtctcaggctcctcagaacgatcactgggctctggcacctctccccacacctgtctcaaccactggtccgcctcgctctcctccctcaggtagcaccagatgatcagcgccacgaggaagcagctgaggggcagcaccttccaccagggccgctgatgtccctttcccatggtatggcccaccgaccagcggtgagggttggctttgctggaggaaaactcaatggggcggtcagggtcgtcctcttcctcggcggcagggtgggcccgatcccgggaaccgggcaacggatgaaggcttcgggaagcccagcctatgagcctcagcgcccggacggccctggaagagagagagcagtaagcgctccgcccgcccgccggtgtctgccctcggccctccgagaccttgaggagctcacccggccgccggggcacacaagacacgattcattgctgccttgaccctcgtgccgaattcgccacccaggcc

SEQ ID NO: 448441 - DNA, 152 bp, Homo Sapiens
aataaaatcaatacaaatcttttattaaagatctactcataccatggctgaaatcatctattattgttgctagttagcctctcttctatagttgggtaatgttgtcttgccactgtgtttgccatctctcccaagtgaaaagaacacttttt

SEQ ID NO: 448442 - DNA, 477 bp, Homo Sapiens
  misc_feature (122)..(122): n is a, c, g, or t
aagatgacttgagtttcttgcactcaaagagagagacacagtcagatgtgtctatggtattgcctagaacgtcttaactactgagaaaggatgcgggggtgcacgcacgtggttactgagtnggggggtgggggggagggcaccaaggctttctcaagatttacctgatgtgaacgaatcactggcgtgaagttgtggggaaaagaaaaaggcaggatcagaaaacaactgaaaataatttacgcttcttaaaaaatatctctgcttcgggtggttgtacaaaatgatttcctgatgcttgggatctgaatggccctggacaagctgcctgggccagccctgccgtgcggccctcgctctctcctggctggcgaggcccagccccgggtcagtccatgagctcgtttcaccgcgtaggatgccgcccaccctggctgggcgggagggaaggtcctaggcggagaccggctggcacct

SEQ ID NO: 448443 - DNA, 431 bp, Homo Sapiens
  misc_feature (101)..(101): n is a, c, g, or t
aagtgccaaggctatgcagatcatccttctctttgtggagcacatagtggggaaaacaatttgaaagatatttgcacctatccaatcaataacactcattnacaggggaagaatgtggtagtatagaaaatacctagcctaatttgagaaaggttgctttggagtcaggcatataaaccctccctgacgaagtatctattacactgagacagaacagacagattttagccagatattacaggcaaaaaaatgttgcaggttgaagaacaaacatcttgtatgatggcctagtgggaagtttggaaagtgaaagtccataggctaaatgtgaccttatgatgtttcatgtggcccatacactgtttcaaaaaataaaatcacttgaagaaaatcaagaaaattaacatcaatcagattcatggcttgtcttt

SEQ ID NO: 448444 - DNA, 568 bp, Homo Sapiens
  misc_feature (547)..(547): n is a, c, g, or t
ccctgttttctagaaacattttatttaaaatttaaaaccatattacttcatacagcaaactgtgcactttgatatatcacagtgtcttaaaaaggaaaataatcagatttgtttggaaatttatttacatcagcctagaatgattggcaagtaacacagttactatgaaacccaaattgttacaaaatgtttacaaaaaactatattcatagaaattctgcatgtccacaaagggcatcccctgaatggcccagagaccagtgtgtgggaaccatgttgagtgggagtggggggcgtccaggcactctggtctgggtggtgggacaggtctagggtctcagaggcccatggtgctccctgggggctcagccaggagcctggggaactgaggcccctaccatgggaggcccaaccaggaagtcggcccaggcagaggtgggctgggggctttggcgcacagtggtaagaggacccatgatccctacgggaacccagacaggatgctcctcatggggctggagtcaggcgtgcttggtcaagggccccnaggcagacccagagttcagtt

SEQ ID NO: 448445 - DNA, 1058 bp, Homo Sapiens
tgctagtgcagttatccacctcggccaaggctgaaatgactttgcccaaagttgtaagagacttattaatatttgctccttcctttaatcgagtccctttggcaccagcttgaatcagctcgttcacttcctgctagatccaccaagctgattttactgaccttctcagtggaaaggttggtctcattatcgtgtttcttctgggtgaaaacaatcgtaaacacagcgtgggaacggctacttgtttcattcatgtttgtagctgccactgtcctgggctttgttcccagcatccatgaggtcagcaatgtctgtgtaggaagtaactgctaacttggacagatcctccacatagggtccaagaagtgggtgttcacgcacacgcaaattacccttgttttttggattcagcaaatctcgtactctttcacagtaaatttccatgtagctcacctctacagagtaagacatttcttcattacagttgtcattgatttgtctcaaaaagttcttcacataactgtggaatgatgccagcctggctttcttcttgtttacccatcattgtataagattttccagcaccagtctgcccataggcaaaaatacagacattatatccctcaaaggcgtgtaagagcatttccttgccaatgtcattgtacacacggttttgagatgcaaaacagggatcttcgggtgaggtatgagaccagtaggaatagtcgaagctgaaggactttggagcttcctttggattctttgggttaataatactggtcgagttgccttgcatctgaatgatgcatttggattccttgctggtctctcgagaattgaagggccttacccggacagccaccttcactgaggctcccgacattttaatggccttgttatatatatatatgcagtccagaaataaagaatcaaatcttcttttgaagttacagccaagtttcctcagccgcgctgcagaccgacgggcggaccgggtcaacaggagccgcggcgcgcgggggcgcggggggccgggcaccgacgcacctcagcgcgag

SEQ ID NO: 448446 - DNA, 466 bp, Homo Sapiens
  misc_feature (193)..(230): n is a, c, g, or t
  misc_feature (278)..(278): n is a, c, g, or t
ctccttgcaaatgacctgccacacagtccgtcactgcctctgctagctctgctacccttgggccctgtccacagcccacgtgggagaccttttcacgggatctactcggatgtctgggatctggccactaccgcaggctcgagacaacccaggtgcgtatgcgccgcgcacacggaacagcacaggctgcccnnnnnnnnnnnnnnnnnnnnnnnnnnnnnnnnnnnnnngccaggactgggaatcccccgcgccgtccggccggtgggggcggtggncctgtgtgtgggcgtggcgggcctctgcgcaggcgccgacccactcccctgggccgggcgcgcgcccgcggcgggttccgctaccgccgggcggaggggtgcgcgcgcacgagcgagcggccgtgacgtgcgccgcgctacgcccgacgtcacgggtccgtgtgtagtggctgccgggctgcctgccc

SEQ ID NO: 448447 - DNA, 544 bp, Homo Sapiens
tttattgggggttcccaagtatttttatgaaacattttaatctcacaaagtattgatatagccactgttaatttggagttactgacctatttattctctttgctccactttcttcacaaaccagacatgccatttgagatcacctttgctttctgcatttagaatttctttaaatgtctgctggtggcaaattctcttttcattgtccaaaaatgcctttattgtatcctcattttggaaaactgtttcgctgggctagtatctcaggttggcattttttttatagcagcctgtgatgacattgtcctgttttgggggctctggtggtgttcacagtgttcatgtccattccccttgaatctagaccccacccagggctacaccagtgctagagcaggactcacacctgacagatggctggtccgcctgctcctccttcacggtcctcctgtctagatgaggaagcgagagactccctcgggaaaaggcgacacaagggccttggccctgtgagcttcagcccagtggaggcactcagcacact

SEQ ID NO: 448448 - DNA, 331 bp, Homo Sapiens
cattttcaactttcaagttttattcgttcattatttttgcaacacctgtttggtgcaagtcactgtgctgggtactataggaaatatatttagctttttgcttctcagattgtagagacagaccacacatgcataatcccaattcgaggcagcatatgccacatgtcacagaagaggctgtcacaggcagtagccactgttgcatagctacttcaaagccattcccagcttgttccacctgccaacacaacgcagctctgtcctgggtgtgggacacccatgtgcattggaggggctgggcttcactaccagggtgaaccttcccctaagc

SEQ ID NO: 448449 - DNA, 461 bp, Homo Sapiens
  misc_feature (95)..(104): n is a, c, g, or t
  misc_feature (225)..(264): n is a, c, g, or t
  misc_feature (285)..(363): n is a, c, g, or t
taataaatattttaaagattcacgaaggtgagtgaattccaataagatcatctcaaggaaaaccatgttgaggcaataaactaaagaaaagacannnnnnnnnnaacctggaaagcagccaaagaaaactgacttatccaggttgagtattcctaatctgaaaactcagtaatctaaaatccgaaacttttgagtgttgacacgatgctcaaaggaaatattcannnnnnnnnnnnnnnnnnnnnnnnnnnnnnnnnnnnnnnnagggcggggcacagtgtctcnnnnnnnnnnnnnnnnnnnnnnnnnnnnnnnnnnnnnnnnnnnnnnnnnnnnnnnnnnnnnnnnnnnnnnnnnnnnnnncaattttttaaatgaaaatagatgttacgttcatgtgtggggttgtctgatagtgatcttctctggaggtagaaacacggggcaattttgcttacaaa

SEQ ID NO: 448450 - DNA, 778 bp, Homo Sapiens
  misc_feature (131)..(142): n is a, c, g, or t
  misc_feature (288)..(288): n is a, c, g, or t
  misc_feature (298)..(298): n is a, c, g, or t
tttatgttatgtgaaaaccccttacaaaaggcagtttattgacaaataaatgctttatacattcaggtttttcccatctctcaatagtgatggtttccaaagaagaaactcagtagtgaagaatacatacnnnnnnnnnnnngcattagtttgatcagttgaaaatcggaacccttcaaagcatcttgtgaatgagagaaatggaactggacctgggcaaggcatggggatggtaggagatccatatgaataaatgatttagcttgttgatgtggacagcaggagagnttggtggganaatgttaccagcagacctgaccacgctacaaagggtctgtgaagaacacagtacaggtatcaaaacaccaaaacaaaactaaactaaaaacaagaacaaactgcaactttgccaaattgtaaacaaggtaaagcatttcacaggttcaaagttcaagggaagtaaacgtctttaaattatttttgtcagttcaaccctgatttaaaaatatggctagcaaaaacaaggaagccacagctgtcgacatcctgagcaagcatcggtctcctttgagaagctgcactcccaagcctcttctcaagctgctacacgaggaggagacacttctctcttgaattccatctcagttctctttatttccacactcttggaatacatcgattgctttccattttggtgtctacagttctggctgctatagatttagacgtgggatactgagcctcgtgccgattcacacccagcctcgtacctagccta

SEQ ID NO: 448451 - DNA, 705 bp, Homo Sapiens
ctcatttcagtttgcacagcgggaagagacagtctccagcttatgccaaaagtgctctcttcccagagggaaaagggcagattggtttttatgcctcacagggcctgtatcacacaatagagtaaaacatattcagcagttttgggagaaaagttatacatatctatgagggaagttgaacacacgtgcaatggataaacatatgtaacacaaatcccacgttcactttggggtaaggttttaacattaaaataaggtggaacttggcccttcatgtcaaaaggtgaactattggacacaaagtttgcatgcagtctctataaactggctgacactggctcgaggtcttcggttgcttatcaggaaagaatttttgtaaggctggtcctttgtccaatcagagctataagtggtttggattgtaaatcaggtttggtaaggttctgacaattttcccaatagctcctatttttagcaaatttagcaagattgtgttttttcttgtagccttaggaatttgcgaagttcccatgccaaccaagccctgaaccctccacccataggtaactttcgttttcttaactttagggttcttcttagttgataaaggagcatccattttggtcttccagataacagaacacaatctgacagggcaattatgtgactaaaataatgaaatattaaaaactgaattttcaacag

SEQ ID NO: 448452 - DNA, 1264 bp, Homo Sapiens
  misc_feature (97)..(121): n is a, c, g, or t
  misc_feature (690)..(788): n is a, c, g, or t
  misc_feature (792)..(813): n is a, c, g, or t
tccactttgtacaagaaagctgggtcaggaaaccagctatgaccatgtgccatttccttactctttctcccgcaccggacatagatgcctcgagttnnnnnnnnnnnnnnnnnnnnnnnnngcagagacatggctgcatttattgttcccagcccggcgagaaggtgttcccagaaaggttccttgggtcacctgcccacccagccttggctctgggctgccatgtccccacgggggcaggagagaggcacaagtcacagtcaggcaagggagcctcagcgtcctgggcggtggctgttggggtccctccagtcttcacctgggaccctcggccaggctgggacagcatccaggaggcgaggctgcatggtccagcggtgggtgcaggtggcaacaggtcggcgggctgtgcaggttccaaaaggagctctcgggttggcactgggtgagaccagccccggggccagcaggggaatgagcggtggagcagggggttgctgggcactggggtgggccccatctcctgtccttccctcatggctgctggaagggccgcctcccctggctcagcatcatctcagattccgggactcaaagaccgtctcctcgtcgctgtccagcgaggccatctccgtggggtcctcagtgttggcgaggaggccgtatcgcctccgctgaggcttcttcaannnnnnnnnnnnnnnnnnnnnnnnnnnnnnnnnnnnnnnnnnnnnnnnnnnnnnnnnnnnnnnnnnnnnnnnnnnnnnnnnnnnnnnnnnnnnnnnnnnaatnnnnnnnnnnnnnnnnnnnnnngcggcttgactttgccagggtggtgatggggagggataaggtcctcgctgtgtctctcccacccgggagaagcagccacactgggtagtcaggagcccagaggagactggagccacaggccagggaagccggggtggcctgaacacgcagaagcccctcctgcccaggggctgcctacagctggagacccccgcgagggtctggggacgcagctgcacctcccgggctgtgggagcacccaaggcgggcacgtggccgaccctggcgacgaaccagcttcagtgggtagaagcagaaaggaaaatatcgggaccccacggaaaggcctggcggcaggcgggaagatgagaacgaggacgggcatccggcgacaaggagccaaggaggccccctcgccccgccagggcctgacccctgcccggcatgctccggcttcagtggccccacctgc

SEQ ID NO: 448453 - DNA, 567 bp, Homo Sapiens
tttttttacaaaaatatttactttattgtttccttatacatttctaacagtacaagattatcaatgttttgacaattttcaaaagacaggaaaaaaatcacaattttacccattaatgattatgaacagcacatggcagtttcaggttggaaggtcatttttacagttctgaactgctgtgcagtgaggactgtctgttttatgttgggagactctgtgttctgcttaaaattccctgaagaatgtttcttttttttctgttttgtcaggcaatcagcctcgttagccttagtctgcaggtcctgcgttgccttctgtttggtggtggtggtccgagtgtcagttcagagtgtggctgtgttgcctgggctctgtctcttgtatgtgcagctctgggctgagcacggaattcagctcatgtacagaattagagaatcctcttttcaggtctttgctcttcaggatttccccccagactccctggcacccagggggccccttttcctcatcctctggcttagaaagatgggctttctctctgatgattacctgcctacactgcctgct

SEQ ID NO: 448454 - DNA, 754 bp, Homo Sapiens
ctcccccgggctcgtgttctggcttggagggagcctgactttggccaaaggtagcgtgacctttcccagatgccggataccaggggctgggtgcctgcacactggcatcctgtggtccgagatgcgctccgcctgatggggccccaggaggtgtgtcttggggtgggagagcccttgcccggtgacctcgaaggatcgggacctccgcttccttctctttgcctccagcgactcctcccttttcttgcccaggcttttcttctggccacgcagccagggcctggggccgtccccatgatgtccgactgcccgggacggggcctcgcccgtgctgctggacaggttgtcctcactggcagcatgctgtagtgtggggctgggcggccgcttgcaggccagtgggcctggtggccgcgcatcgtcgccctcgctcagtgagtgcagggacaggctgctgtgctctgtcgcgggtgccagcaggtgtcgcccctcggttcccagggcccgcgagcgccgccgggcggccttcacccagatgcacttggtgccagtcaggatctccttcctctctttgtgggacaaggggatctccgacaggttctcactgctgtcaggggaagagttgatccagctgcccaggctgtcctgagccggggcctcctgcgtcaccaggctgccgagctggatgggaggtggggtgggcacagaggaccttaaagggtgccaggccccagtaccagccttgaacacgtgg

SEQ ID NO: 448455 - DNA, 467 bp, Homo Sapiens
cttgagatttcccaggactggctttaatttgaaaaatctgattggggtctcttcccgtatcagagaaggaacagcccaagctatgaccccagggccagggaattcagtccccaccagaccctgtcattccatcactagggggtaattccaggctccccctgccagccctgagacaggaggacggatgtgaagttgcccaggactagattctgtctctccaaagtggcccaagccctgttctctgtactagggaagccagctgtgtcttttcgaggacagttggtccagccagcaggctcagttcagataccagacaaccattccagcacgagggctcagcgccctggccccggcggtcgctccagtgcctgtgtgcccaccagcacatccatgaggtagtccaattcggcctcgtccagctccggagcttcctccttgcccggcccatcctcagggcctggtttgag

SEQ ID NO: 448456 - DNA, 1523 bp, Homo Sapiens
  misc_feature (655)..(723): n is a, c, g, or t
  misc_feature (743)..(785): n is a, c, g, or t
  misc_feature (828)..(836): n is a, c, g, or t
  misc_feature (977)..(1023): n is a, c, g, or t
  misc_feature (1268)..(1268): n is a, c, g, or t
  misc_feature (1375)..(1375): n is a, c, g, or t
aggcttctcttgtcatctttctctgcctgaggggaaactgagcttctgaaatgcgatgtgatctgtaccaggtcacccagctatgctgcaaagtgggttggccaaggccctttgcactgcatcacccctggtgcccagcaacatcaggtaaccttcactgagcaccaagcttatgccaggtctgtgctggccactctcatatacctcttcagatcctctgcttgtacccccagcccttgccttccctggattttgggcacccaggactttgctctgcctggtggagggtacttgatttctctgggcttccttcatctcaattctgacagtgtggaaggaaatctgtaggtacccaggtcctcagctccagactgggtgatgctggagacccaggagcaagtcagcacaggctctgcccacaggaggcatgcacaatctggtaggagaaacgcacaagtacagatagcttgctctctgaccccacacctatctcccccctaaacaaagggcggccgctctaagagtatccctcgaggggccctagcttacccgtacccagctttctttgacaaagtggcccctactagtgcgccttattttcacccttgcccctgcccgccccccctacgccctcccgtcctcggtaaaactgctnnnnnnnnnnnnnnnnnnnnnnnnnnnnnnnnnnnnnnnnnnnnnnnnnnnnnnnnnnnnnnnnnnnnntcttaccctagtcttccacnnnnnnnnnnnnnnnnnnnnnnnnnnnnnnnnnnnnnnnnnnnacaatagtttctgccccgccacatcttcaatcccccatttctnnnnnnnnngcacccgcaatcaaatatccacccccacgcctacgacgttgtcctatgctgtccccgctcctcctcttcccttcctctatggctttccccctctgccactccgttcaaacccctatacccttaccatattctttagcctannnnnnnnnnnnnnnnnnnnnnnnnnnnnnnnnnnnnnnnnnnnnnngcctcagtatccgccaccacaccttgcctccacttatgtatccgcccttccgccttatctatattcctcactatcctctacggtataaaactcccgtatctttcatcccctatccaccccaacactccccacccgtcacatcctctatcatcccccgtctctcttacagtccatcactaatctcacgtttgtgtcacgtcatgacactaccgtccattgaactcttcctccttcgcgcctgctcncactcttcgtacacatttgatcaatcggtctcgtagacgctacagaataggccctccacccttttctccactcttcaatcaatttctggacctaaacggcctgatcncccatcgctcgcccctgtccctctattcagtagctcgttttccccgcccaataactctctcctccccttttaccccacatctctcctgcccctctgtctcatgcatatccacgtcgcaccccgcgccctgccaacgtgcccagccccc

SEQ ID NO: 448457 - DNA, 1322 bp, Homo Sapiens
  misc_feature (320)..(340): n is a, c, g, or t
  misc_feature (485)..(495): n is a, c, g, or t
  misc_feature (528)..(538): n is a, c, g, or t
  misc_feature (676)..(676): n is a, c, g, or t
  misc_feature (1244)..(1279): n is a, c, g, or t
ttttttaaaggtttgaacatcaaattttaatcttgaaaccttttatccagtcctcaaattattaacatgaaaaggagtgataaattgcaattttatcattaccatatcactgtgtaacaagcccttgttacaaaatctccctctactgtctgcaaaaaaccaatagaaaacccatacattatattacctaatgatctattaacagatgaaattttaaccaactttataccaggaaactatgaacagaggtacttcaaatcacatagcttaaaatatggagaaaagacaggtaaaaaaattatcttaacctgtagtagtcnnnnnnnnnnnnnnnnnnnnnataaaatacactaatttcccaaaataaagaatattatgacacattggtgtcaacttacacagatgaaagctgatgccagctttttcctaactaaagttcatttcaccaaacctttatatattacatgaatatccaagtaaagtannnnnnnnnnnaaattcaacacacaggaacataatatacattgnnnnnnnnnnnaaaaaaaggttaatttaggaatgatttcatcttcaaccacataaagtatctttttaagaccatgaaacctcttgtcattgcaagacttttcagttcatgtttctatttcccagttttaattcttaaaggaaaaaaaanaagatgaaagggtttattatgttatttcccatgagaaaactgtggtaaggatctttattcattaccaggctgtcttccctccttttgttttccggactacccagatccaatgactgcgtggcaccgtaatgaaatcggtgggagagccaatgacatcaaggaatggatataaaaagacaggctcttctggatcctgccacaattgtaaggtgtgggcaaattcactcccaccaagccttccagagctccacagtcacaggagtatctcccaggtcagcgtgcagttcacatgagatctcgagctccgggaggactactctaatatgaacagattcactaatgacctcagtactgcatcaggacattgttcagaccagatagggagcgaccggcgcctttaatgtaatatccgtggacaaatacaagcactaggcaagagcaggagtacactaggtaacagcaaagatccatgttcagttccattctgagtacgcactcctaacgacaggtctagaaagcgtctctaatggcccggaattcccgggcatatgtccggtaccgtcgactnnnnnnnnnnnnnnnnnnnnnnnnnnnnnnnnnnnncggccgcttcctcgctcactactcgctgcgctcggttcccgtt

SEQ ID NO: 448458 - DNA, 794 bp, Homo Sapiens
  misc_feature (419)..(427): n is a, c, g, or t
tcttcattaaggtctcgtctaactccttactcttttcctcttcttctcttcatgagcaatccgtaagtggccttgcttgactaacattcatttcttcccatctttctttcttttaatctttctatcttaaaaaatcaacaaagaagtctttcattggctttagataattaaagccaagcaagctaaacaaatgttggtctttcctatagaaaccacgtttaaaatggttacataagcaccaagcttcctacccccatcacacaccttgtccttgagaactggtgttgctgtgtttcagttctgtccagttctccctggtgaccttttcctcccttgattagttccatggcactgaaggctaaggaaaaaagggagcgggtgggtccaggaggggactgacctaggagacaggctgatannnnnnnnnacttttagacaagtaagaaatgaaaaaatgtgcaagactattccctcagcaaatgctcccttcaggttcgaacttggaacttcccagctttggtcatgtattttatgcccttaaagggtttgtacttttctccatacatatccagacgattcaccttgagtccagaaatggccagctgctggatcttaaactgcaggttaattgtggggttttcatctggtttggaagctccagcctgaagactcatggtccccttcaaacttggtagcttttgtggatttatttttgcctacatcccaagacagcatgtttgtgactgggtcgaatgtgtgtgttcccctgtgatggagtaaggctcatgttcagg

SEQ ID NO: 448459 - DNA, 458 bp, Homo Sapiens
ggttgagcacaggatagtcacgggggttaggttactgatgttagtttccataaaacccttttgggtattgggccagaaatgtaataatctatgtggtcctaagagggcacaacctataccaagtgaggacacagccagtaaaccggaagcaaatgcgacccggtttcaccatatcaacactgccgcctccgcgcacccgcctccgtctgcgcatgctcatacacgttcacacccgagacaccagcgcccccccgggacctcccctcgtccccagcgcgccgcgcccgggcttcccagccccagctttcccccgggccactggccgcagaccgcgggcgcctctcaggggatcccgaggcggctcaggcgctgatctccaccgggccggcctcgtcttgctcgcggattatgtgcacgcccgcagtccgcagtgtgcgcgaggcgctgcgcgagcggcc

SEQ ID NO: 448460 - DNA, 512 bp, Homo Sapiens
ctcaccatctgatatattttacttttgtcacatttactgtctctcactagaacatcagctccacaaatacaggccttgggcacaagatacccaatgtgtttgctgagtgcaactcagtggtgcccacctccgccctgtgcctgatagatgtgtatccatcaccccaccacccactgagtgcctctgtgggctccctgggtgtggttttaagcattggtaggccctgtatcatgggtgctgggctatcaggcccccccacctgtgtgtgatgttgtgttgacaccacctgggagggccgacagtccctcagtcttgtgtgtgcgctcatggaccgacatctccaccactgctggtgggctctgttggggaaagggttagttgtcttcagttgtatgcaagataactgcatcatgttgggtgggactatgactatgttatcgtacttatttggagattaagtgtggttaaggagatgtgtgagggtgcccagatgacaaggactagatggtcag

SEQ ID NO: 448461 - DNA, 896 bp, Homo Sapiens
  misc_feature (842)..(843): n is a, c, g, or t
acagtgttgatgcacgcaggcaggccccgccataactggccaatgggcattgggtatccatccatcacttggttattcctcacccgccagaaccagcgctccttgaagacaaacatctcccctcggagcatggccacggtgtcaaagttcccgtcacagatgttgggcccataggtggggtttttgggtttatcaggaacagaaggccgggaggtagtcctgggttgagggggcatcttggtggggaaccctgactcacccccataaagttgctggatgccccggcggtcatcattgggcagcacaaaattctccgtgtccatccactggtaaaagggtgccatgatggccgaggggtcactggaatgctcgagccccagggcatggcccagctcgtgcacagccaccaggaagatgtcatttccattcagatcctcattcctgacagtccaaggctcggcagagtcaaagtgggtgtctcctccaatgttggggcctgggaagtaggcatgggccaggaagccgccctcaccatcgaagggcgtgctgtcgccatggaagccctcggcaaagaagatcatgatgtcggcctgcttctcatggccctcacggatgtaggcatagggcacctcgcggaagcgcagtggtgtggcactctcccacacgcggaacgccttgcgaatggcctcgtatgtggcatactcgcccacctttggggtgtaattctggatgcagaaagtgatttcatttatgttgccatttgagaccctggatggcgtagccgctttcttcgaacatttggccttgatctcagccccaaacttgtctggaacaccacatcnnggggcgcccattggccttcatgtgtctgcatcagctttgcctgtaccttgcag

SEQ ID NO: 448462 - DNA, 1046 bp, Homo Sapiens
  misc_feature (87)..(119): n is a, c, g, or t
tattttagaagccgtttaattatggtatgaagtagaaggttcctctagcgagacaactgccagtcataccagcttctgccaacggannnnnnnnnnnnnnnnnnnnnnnnnnnnnnnnnaaccaaatcaggaaacagcccatcacagcactgcagcacagaataaaatccatgctggttgagatgtcccattatatttgcacaaatgtggttcatcgctggtggaagactttccccttttccccgaagaattttccacgttgaagtgtctgtgaaggtgacaagcatcgtgaggtacagggtgatgagtcgggagtcctgcaggatttcaggcttgagctgcttgagaaaatcacagcagtaccacaaaatgttcttgatctgttgaatccaaaggagggtgaggtccttagaacaagccagggacacataccacaccttaggctcattctcagcatccatgctgctcaggatgctgcgacacaacttctcaaatctctcattatcctctttgattctgaataggaacagcagtttcctggcaatcttgaaaataccaagtgcacttcttttagtggactcagggtcatctgctttaaaaaagtcatcaatctctctcctgatatctctctgcagtcgactccgaccagagaaaactccggacatgggcctggatcacaacagctgcccgctcccgttccttcgtgcacaagcctttcttctcgtgcctgacgggctctatcgatgaaccatgctctcgaggtctgagacagggtgaacatgtttgcaaacttgcacaaaccctgaggacctgcctgtgtcgcagaaatgccaggtaatcattagtgatcttgcacaggactcgtggctgagaacagcttctcacttcagaaaagcttgttattttttctttattcgcccggaggtccccgcacttggggtcggggccgcagctgccactgtctcagccccaaacacccgagttctgccagacccggggcagcagccgacgcactaccgccatcttgccccgcgatcccggaaatt

SEQ ID NO: 448463 - DNA, 839 bp, Homo Sapiens
  misc_feature (385)..(385): n is a, c, g, or t
gaattcaaaaacaaagtttcctttaattcatgtttttctctctcactctttaagctttattttttaaagtataatttcattcaactccaaggaaatctgcattttaacaatattattaaatgatcctactattttacccacatattttattgctgagccagtgtttgtcttacctcctcgatggataatcaaagaagtttcacttccaatgggacagtccttaagtatatccactacttctgtatggctcaggttctgtacattctgctggttgatctcaacaatgaggtcgccttcacacaggccagggcatccctgaatgtcaagtatttgtttcacccgctgtcctgtaggactgtcggcaatagtgaagccgaagccctgngcacctttcacaatggttaaggtcataagttcagcttgggtggccccagatgaagccatagacacattgtcatcatggacgggcggtggatacgtgccgtctagctgaccatcagttggcatggagtgcaagagaatgaggcggccgatctgttatatctggaactgactgtgaggtccgagaaatgtactccaaatatgtttcatagttgtgtcttccattgaccatcactggaggtggcctctccattattgcaaggggtggcacccatgctgttagcagggtcttcaggatcaaagggcaaagggtagccacgacacaacaccaggttgacactctgaccaataggaacagactggaaatgtttgacaacatctgcatgagtgtgtccaaggacacaaacttcattaatatagacaatgacatcacctgtttccatttttccatcctgtgc

SEQ ID NO: 448464 - DNA, 903 bp, Homo Sapiens
  misc_feature (498)..(506): n is a, c, g, or t
ggcctgggtggcgaattcggcacgagggcagattaaagggtgtcaaccaaggaaggaaacaaaaaagtagggcctggacttcatttgcagaatgaggtcatagtcgttgagtcccacagtcatatatgggagacctcaagttgctgtcaccttgataactcttgtatcctgggttaaagccctctgtatttagtttgaacttctctctaagccccgtggtccaaagtcatcacgggagagaccaagatgggcttaccttgccctgctctggatttaaccattgttcattgtcaggctatatttttgtacaatcattcaaataacccagtgacataggtcatattgccacttttcagaggagaaaactgaggctcaggagggggagttgacatgcccaagctcccttgagctcagatcagcttgactcaatgtccaacattcccttggtagctttttctccggggtcctgtgctataagaacttctctctgcactgtannnnnnnnnctcccaattcttagctatttcctcaagcaatgattggccaaggacctagcataatccaccacattggccaaggggacgtggtgcaccccaaggccatttctctgcattggaggctgcgaatctcctctggaaaattcccaacccgaggacccaccatgagcccagctcagcctgaccagacagcctctgcctggagcattcacatcagatggaaagaagctgctgtgtcctccagcatcctgggaccctgtcctctgcccagtgacacagcagccatggctagcttgatttctggtctccaaagctaagcataaccttcccggggtttctggtttttcagcctgtacgaaacatgtctctgttctaattaaagttcccatggtatggtgttctcaaa

SEQ ID NO: 448465 - DNA, 494 bp, Homo Sapiens
ccaaggaggtccaggttgaaaaacaaactggtttttattctaaacacgtactagggcagcatgctggggggcctctcctgcctccagaggtgcccctgctccccactgtggccctctttagacagagtaggagctcgggctacccacatgcagcccagcccttagcacccaagggcctgcctgtgccccactctctgcctgggctagggaggcccaggaccctcggagtgggcaggcccaccctttccatgggtcaccagggtctcagtgcccacttgtcctccaaccaacagtgacacggcaccctccacacggcctgtggctgccagtgccaccaccgcctgctccgtagggaagcccatgcgctccagctgctgcagccgcagagaggagacagaggacttggacagccatggtgcgctctggggttcctgggctggcccgtcaagaagcgaggcctggatgccctcctgcagcatctgctcatccaaggc

SEQ ID NO: 448466 - DNA, 669 bp, Homo Sapiens
  misc_feature (354)..(354): n is a, c, g, or t
cccaagaccacgagggtgtttctgtccattgtgaaggcctgggactatgagagctgtgaacactacgaactcaaagtgtcggtgcagaatgaggccccgctgcaggcggctgcccttagggctgagcggggccaggccaaggtccgcgtgcatgtgcaggacaccaacgagccccccgtgttccaggagaacccacttcggaccagcctagcagagggggcacccccaggcactctggtggccaccttctctgcccgggaccctgacacagagcagctgcagaggctcagctactccaaggactacgacccgggagactggctgcaagtggacgcaggcactggccggatccangacccagcacgtgctcagcccggcgtcccccttcctcaagggcggctggtacagagccatcgtcctggcccaggatgacgcctcccagccccgcaccgccaccggcaccctgtccatcgagatcctggaggtgaacgaccatgcacctgtgctggccccgccgccgccgggcagcctgtgcagcgagccacaccaaggcccaggcctcctcctgggcgccacggatgaggacctgcccccccacggggcccccttccacttccagctgagccccaggctcccagagctcggccggaacagaacctcagccaggtc

SEQ ID NO: 448467 - DNA, 628 bp, Homo Sapiens
cttcaaaattatctttattcctaatatgaaacaaaatttctagagaaactaaaaactctgcgtctgagggagataaggaaacaaagagggcatgtcagcccaccggagtctcaggaggctggggaggactctggaaggactctcagaggatgctggtggcagcaggcagcacttcctggctcatgaaaacgttcaagtccaggttaggatcttccaaatccagtttcataaacttatccactaatgtctggcaattttccatttggttcttctttagcaaatccttgacagacttgatgggttttccactgcggatcaagtctgagacctccttgccacgagccacaagcttgtcaggaagcccagcctgggcagctgtgtgggaggcatggctggccttcgcaacaccttcgcaaacctgatagaagaagacaagatcgttgccatcctcacaggtctccatggtcaaatactgcaccaggggcccttgtggcagcagctgtagctgaacaaggctcagaaagttggtggccacaaagatgtgggggcatgtgggtccacgtgccagccagtgtcggagcacagcggccagaagcgcgagcccatccaccgtgttggttccctttcc

SEQ ID NO: 448468 - DNA, 1196 bp, Homo Sapiens
gggatttggccggttacattttaccccggaaccgcttggctggttcgaatttattcgctccatttgagaaatttgccttgggcacaggattcgcacgaggggctactcaaggcgggttactccccaaagtcctgggttacgattccgatttgcagacttcctctgaggaactttgtgcccgaactttgtgccaaacttcacagaatgtgtggggacaaaaggagggtcaaagtcatcactgaccccaactcatcagggtagagcatatacctcaaacaggtggccaaagccgttaacaatgccactgcacagtcgctgtccttatggatgaattggaaagggaacccaacacggtggatggcctcgcgcttctggccgctgtgctccgacactggctggcacgtggacccacatgcccccacatctttgtggccaccaactttctgagccttgttcagctacagctgctgccacaagggcccctggtgcagtatttggattggccaagggtttcaggacaggaaggaggtttgcgaaggtgttgcgaaggccagccatgcctcccacacagctcgccaggctgggcttcctgacaagcttgtggctcgtggcaaggaggtctcagacttgatccgcagtggaaaacccatcaagcctgtcaaggatttgctaaagaagaaccaaatggaaaattgccagacattagtggataagtttatgaaactggatttggaagatcctaacctggacttgaacgttttcatgagccaggaagtgctgcctgctgccaccagcatcctctgagagtccttccagtgtcctccccagcctcctgagactccggtgggctgccatgccctctttgtttccttatctccctcagacgcagagtttttagtttctctagaaattttgtttcatattaggaataaagtttattttgaagaaagatattgcttctttagtctcaaaacaagagactaggaaagatccaaaacacagagcaggagtccacaggggaacctgccctgcctcagtaaaaatacagtgttgttgctgtaggaagactcccggattccaccccaggatacttcatgagaacgaaccccttcagagaggccctacaaaacagattagaggtaagacagaggggtccaagggagatggtctctcttctcaagtaggaacaccccagc

SEQ ID NO: 448469 - DNA, 846 bp, Homo Sapiens
  misc_feature (336)..(347): n is a, c, g, or t
  misc_feature (396)..(416): n is a, c, g, or t
  misc_feature (431)..(500): n is a, c, g, or t
  misc_feature (534)..(654): n is a, c, g, or t
  misc_feature (729)..(784): n is a, c, g, or t
ggtacgagacgggaggttttcatgcatgttgccccagcgctggtctcaaacctcctggagctcaagttcatcccacctgctcttgtgcctcctaaagtccgtgggattacaggtggtgagccatggtgcccggccctagcatttttttaatgatctcttatcccacaagaatggtcaagtcatttagcattaaatgaatagagtacacagtggtttacaatattataaacattataagcgccccataaaatattattgttataaatactcaactgctttattctcagtgattattccctttatttttacataatgtaaatgtagctagcaggtttnnnnnnnnnnnncttttactagaagctgatatatatctcttaacgtcactacccatttaannnnnnnnnnnnnnnnnnnnngagacagggtctctnnnnnnnnnnnnnnnnnnnnnnnnnnnnnnnnnnnnnnnnnnnnnnnnnnnnnnnnnnnnnnnnnnnnnnaagtaactgggactacaggtgcgtgacaccacannnnnnnnnnnnnnnnnnnnnnnnnnnnnnnnnnnnnnnnnnnnnnnnnnnnnnnnnnnnnnnnnnnnnnnnnnnnnnnnnnnnnnnnnnnnnnnnnnnnnnnnnnnnnnnnnnnnnnnnnatgagtaaccgcacccggacacctgtttaattttcatccataaatggtgttataaatatagatgtggatctctgnnnnnnnnnnnnnnnnnnnnnnnnnnnnnnnnnnnnnnnnnnnnnnnnnnnnnnnntgacaacttggaccccagctgggggggttttaaccgggaattggtaagggatcatcccagga

SEQ ID NO: 448470 - DNA, 715 bp, Homo Sapiens
  misc_feature (287)..(300): n is a, c, g, or t
ttcgcacttatttatttatttattttcaaacaaggggggcgcccctcttctttcaatttgaaactggaaacatccagaggtcttgttcctaagggggcgcgtcctctccctgctattttgcaccttcggactagccttctttcgtaattacacaggagcaacctccctgcaaggccttgctcaacgttggcctcgcgctcagctgcacaacacgcagtcaaagcgggggctgggttagaagcatcggtctcccctccccaacacacacccccggagccctccgtaannnnnnnnnnnnnnaatgacaagcaattgccaggctcgcagggtgggtgctgcattgcaccgctccgcgcgcagctggttctcagagtgcagccggtgcaagcccgggggtccaaaagggcgggaggagcacaccctgggcttcccagctttgcagccttctctcggggggagtaatggcttctgcgaaaagaaattccctcggctctagaagatctgtctgtgtttgagctgtcggagagccggtgcgtccccaccccaggctggggttcttctccaaagggtgcccctggaggaagaagagggggggattaggcagggcgaggccgccgcggtcgcaatctgggtcacggctgctccagcttggaggagaggcggctctcccggcgaccctcctcgcgcgggcgcccctgccattcccgggaacagg

SEQ ID NO: 448471 - DNA, 604 bp, Homo Sapiens
  misc_feature (108)..(173): n is a, c, g, or t
ggacttccagtgcaggttttgggatgtagccctgtttaggttgaattttctggatgctgagtttgattaaaaaatccactaaaatgtgagtttcctgagagcagggannnnnnnnnnnnnnnnnnnnnnnnnnnnnnnnnnnnnnnnnnnnnnnnnnnnnnnnnnnnnnnnnnatagaactgcatttttggtattatactgcatccatatgtgttacatattgtgcatagaatttcgtttggtggggagaagagctcactcgccgctaaactcttgaagcttctggtgcacttgagttctaaggtcctctgcactccagctctctgagagcagtgaaatgagctcctttctgtttccatccccgagcatacgggcatttagctggcactggggcctgtcaccagcctagaaagcactccgtggcttggcagggtttggggattgggctggcacatagcacctcttggaaagggcttggcaggtttctccctttgaggaataatctccatgacacaatgaggcaaattttgggtttagtgtttcactggctgccggttgataagctactatttataaagtagaacgagcaaggtttctgcccccc

SEQ ID NO: 448472 - DNA, 479 bp, Homo Sapiens
cggttacccactctgggtggaagtcccctttatttggatttgccgctgggtggctagatgacgtaggtggccttcgatgtggaccaggagggcatccagcatgtgcaggaccccacggagcagggtgtggtctgagattggggcccgccgtttccagggtccgcagggctcagtggtcacctgcggatgctcacccttggtggcctgtgagcgccgccgcccctgcagtatcttgcggcagatcatcagcatcgtggtggtgatcatgaccgcagccacggggtagatgcggcttgctccagtgcccagccagtagccaggacagctcaggccacccctacagccctccacactctttggctgacacccccagggctgcaagtccagccccacctggtaccagaggggtctcgaccaggcgtgggtggaggcagacgtcaccagcaggagcagcaaaggcagcgaggccagcacatgca

SEQ ID NO: 448473 - DNA, 499 bp, Homo Sapiens
aatatttattacccaataaaaatattcacccagtgcttcagcttacggtaaactaaacacatctattatttacaacatagaaaattaaaggcgatgcccaagtcccggccttccgcaggggcgccgctcccgctggaggacggaagggaccagggaccgagggtgcgcgggcgcatccgggcgcaggaggcggtgcaggagtgcgcagggcagcaagagtagcaggctgggcgcgcccccggcgctcggcccgtgagcgtgggaggccaggaagtctttcgggtcacagcggtcaggcgtctggagggggaggcagtgcagggccccgaagatgcacctgcagaggtggcaggcgcggagggtccaggctccgtgctccagggcgccgcattcactgcgcctctggtcatgctcgcagtagcggccggtgaagtgggccgggcacacgcagaagctgcccagcacgcaggtaccgccgttcctgcagcagcgcggccgc

SEQ ID NO: 448474 - DNA, 2039 bp, Homo Sapiens
  misc_feature (567)..(643): n is a, c, g, or t
  misc_feature (729)..(765): n is a, c, g, or t
  misc_feature (793)..(907): n is a, c, g, or t
  misc_feature (1882)..(1882): n is a, c, g, or t
  misc_feature (1932)..(1932): n is a, c, g, or t
  misc_feature (1966)..(1974): n is a, c, g, or t
gtgtcgtgtgcgactgcattcgcatatcgcgtactcgcgagagcgctaggtgctctccgagtatggcgcaccatctaatctctgtgtccgtctgatgtgacgggtggagcgcgcgagccgagccatgattcgatgctacgtgtgctcgtgcgcccaggtcctacagtgcgcgtgtgtcggttgcgaggtagcacgggagggtgcggccggtggggtcaggcgagcagtccgggagtgggtaggatgcgcgcggtatatctcgcacagggtgtgcgtcggtgcggttgagggtactgagcgctcgtcgctgggcggtaggggcgtgtgatgagggtcaggttacgtgtagcttggtgcgctgctatgcaccgattaaacggagcgtctacgtttcgctgatagtccggcgtgtcccagattagtcggtcgttagcgtgctttccccgtggtcccgtctcgtgcccgctatgcggtgcgttgcgtgatactggcgggcgagccggcgcgcggcgggtgcggtgtgcgggcgtgcggggggtcggcgtctggctcgtccatatggtcctnnnnnnnnnnnnnnnnnnnnnnnnnnnnnnnnnnnnnnnnnnnnnnnnnnnnnnnnnnnnnnnnnnnnnnnnnnnnnaggcgtgcgtacgaagccccccgcccgccgcgcgtccggcgttgccgcgccgccacttggggcgccgacgcctgagtacaaagaannnnnnnnnnnnnnnnnnnnnnnnnnnnnnnnnnnnnatcttttttggcggccgcccccccttgnnnnnnnnnnnnnnnnnnnnnnnnnnnnnnnnnnnnnnnnnnnnnnnnnnnnnnnnnnnnnnnnnnnnnnnnnnnnnnnnnnnnnnnnnnnnnnnnnnnnnnnnnnnnnnnnnnncactttaatcttatatttgtaatttactttttttctgaacagttaaaaaaaacccaaaacacactccattatcatgatcctaggttgtgaacatattggtacactgactacacatcaccataacataatcacaaaagtcaaagcagtcagtacttaagagtctagagaacaaagaggtgaaccagctgaaagctctcggggaagcttacatgtgttgttaggcctgtcccatcattggagtgcactggccatccctcagatttgtctgggctggcctgagtggtcaccgctttgagaaagctgttagtttccttggtgcccagagggctaacaccctagttggccttttccttcagtgtccaagaaggggaagggttaggaggggaggtaacactttaaaatacgacttaactgcactgatccttaataaaacacacaaccaatcaggagctaagagcgccagctgtgctggttggaaagcacatattttagatgtcatctggcctccaggacattttagatcacaggtactcaacttccaacagaaggagcttctaaagatcaatgcattaagttccacctgaaaccaggcagccatcatcatgctcttttgatttctctcttcagctccaaggattctgacaccacagatgagctaaagaagcgaaactgttttattcccctaagaaatggctctctttccgatactatgttgacactgtggttagaggaggtctggtctgttggtgaacaactgtgtggaggaagaccagggaggctgcaaccctaaggctccgggctgcaactaatctgggttggactgctctgctacagactggagggtgttgccatctaaggcaaaagggagatgctgagaaggtcaacagtaccaaggtatctagtccaattatgggaaagaaaaaaattgccctgattatttccagtattccccacccctcccacctttgtttcccnacacaatcaagtgctaagtaaggagtagaccaactacagctgttcagacnaatggtaccaggagccggcaagggaagagtgcannnnnnnnnctctgtagctttagactgtacagaagaaaataaaaaaggattgttcttactcaagcaaaaaacca

SEQ ID NO: 448475 - DNA, 945 bp, Homo Sapiens
  misc_feature (787)..(787): n is a, c, g, or t
  misc_feature (860)..(860): n is a, c, g, or t
gtgtacgtcatggagagtgtgtaggtgatgccatgcgacttccatgggcataggtatgtatctagatgcagcgttctacatggctcttgcgatcctgggatgcctcatcctgtgaatgccagacaccatgttgtgaggaggcccaggccacaaggagaggccacctgataagcattcaggccagcagccccaggtgagttcccagccgacatcaacggccagatgtatgatgaatgatctcacgtggtcccagcctttgcatgactttgcatgacgccagctgatgccaagtgggacagagatgagctgcccattccaatctctgcccacattgcagattcatgagcagagatagatgtcactgtttgggggtgaatcatgacacagttacagtacttgaaacattttgcgaagccaggcatgaatgtcatatgaaattctaataaatccattttatttgtggcaccacaatattatcattaagctctctttttacacagtctgcaatttgtatcagctgcccccgtgtgactctgcccttactttaggaacaaccttttgctgggtggcgtcctagaaggtctgggcctgggcagcagccactgggaagcccacctgtgctttcccccatctgggtggggcggcagcagagaccctgagaatcagcggttatgggagctgtgtgttagctgtgtgttattggctttggcttcagcatgtcctgcctaggagtctccagcagctgtggtttccttggactggaggctttttctcctgatgacaatcngtgacaggtccatcaggcagtgctttgatgatgttccaggcttcaaaccgtgtgaaggccctgcatggcagtngccacccagctgcaagatttcatctccagggctggactggtctcactttggttctgaggctgctcctgaaatgaagggagaaggt

SEQ ID NO: 448476 - DNA, 588 bp, Homo Sapiens
  misc_feature (525)..(534): n is a, c, g, or t
cttctgggcaccaatgtttcctggctcctgtgtttgggaggtgggtctgctgatgttcggaaccagttctctgcgtgggtcttcaggatgtggtatttgacgccactctcagaactgaactccttcggacacagcagacagcggtacttccctgccaggtgggcccccttactgcagctggcgagatgagccttgagtccggacacgctggagtagatggcttcacagcagtcgttgggacagttgacgtggcctttctccttcacttcattccttccatgccttctagcagctgggggttcagcgtggggagccctggtcgagtgtagttgagccgtgcggtctcgggcacaaggtcatccttcatgcgccgcttggtccagtcgcgggccagctcgtcctccgctatctcctgcaggtggaacaccgccacctgggccgacgtgcggcggacacgcccgcttggggtccgctccacacccagcgggtcctcagcctcaggggacttgtctgtgggctcctcannnnnnnnnnccgtgtgctccgagcgcacgtggtagtcgtggccagccttggatcggtacgtct

SEQ ID NO: 448477 - DNA, 568 bp, Homo Sapiens
gtccttttgtcctcccctattcacattacaaaaggaaagggcaaggttctgcagaactgacgaaggaactaacagatactacaaaaatattacaatttgtgaagattagctcaaccctctcagcttttatgaatggagcggggaggggcccaggctgagtgggaagggcatgggagtgagggggccagctagttctatggaatagtttgatttttttctcttccttccccaccaatgttgaatgacatcttgctgttaaaaatactgttttctgggatttacagatcccctgagggccagccagtccccgcttcttcccagaccagaggaggaagccatagtgcataatgatttcttacagacggcccctcccccaaatgatttcacccttttcacattataaacatgacaactgttctagtcacgtatttcaagtttaacttcttttcctttccaaaacactaagtcgttactatagttgcaaaatagcatcctccctactttaccatccctaatccacagtctagtgacaccgtcctcccaattcacatcctcccaacacacaatt

SEQ ID NO: 448478 - DNA, 500 bp, Homo Sapiens
cctctctttttgggctttcatagtgttcattgatgctgctggctaagcatttatcaaagcataagctcagtaactgtgcatctggtctgtacctggttggtccttcgtctttgcatgtaagctctttgagaggaagggtgaagccttatttgttttttatgtcccctgccagggcctgtctctgactaggtgtcaccatacacattcttagattgaatctgaaccatgtggcagaagggataagcagcttacttagtaggctctgtctacccccttccttctttgtcttgcccctaggaaggtgaatctgccctagcctggtttacggtttcttataactctcctttgctctctggccactattaagtgggtttgccccatcacttagttctcaggcagagacatctttgggcctgtccctgcccaggcctctggctttttatattgaaaatttttaaatattcacaaattttagaataaatcaaatattccattcttga

SEQ ID NO: 448479 - DNA, 441 bp, Homo Sapiens
aaacaattgatttaaatccatgtcattttactttatatgtactggtctctcatctgactttaggcgttttctgcggggctgtataaagtcttcatcagagtcctcagttacctcaccatcatcctcttcctgctcaaactctggcaaaggtgcgaaggtcctgtctgagtagatctctgtgagtttatcttcaaagtacaatgcaactgctttccctgcctgagctacttctgaatcagccttcaaattaaatcttttgtgtgtctgcataaacttgaacaactttcatcatttcattaaacctttcacagttcttgaagatcaaacggacatcggccacaaagtcatccgggatttggtagtgttgggaatgttttttctgaagcttctttttcacggtggataaatccattggtttctttataattttatagtagtttg

SEQ ID NO: 448480 - DNA, 450 bp, Homo Sapiens
  misc_feature (360)..(360): n is a, c, g, or t
  misc_feature (432)..(432): n is a, c, g, or t
aaacaattgatttaaatccatgtcattttactttatatgtactggtctctcatctgactttaggcgttttctgcggggctgtataaagtcttcatcagagtcctcagttacctcaccatcatcctcttcctgctcaaactctggcaaaggtgcgaaggtcctgtctgagtagatctctgtgagtttatcttcaaagtacaatgcaactgctttccctgcctgagctacttctgaatcagcttcattaaacctttcacagttcttgaaggatcaaacgggacatcgggccacaaagtcatccggggatttgggtaggtgttgggggaatgttttttctggaaggcttcttttttcacgggngggataaatcccttgggtttcttttataaattttataggtaggttgggtattcgaaggcgggaacagggctncgggggatttcaatactt

SEQ ID NO: 448481 - DNA, 617 bp, Homo Sapiens
  misc_feature (342)..(382): n is a, c, g, or t
taataaaaaaggttttatttcccaggagcaaataaatcattttgaactactgataaacactgctgcagtgaaaagaaagatggctacatgtatgcaatagcacaaattcagtggaagaacagctgtgttgacgattagagataaaaatcacttatccattccctcctttcccacaaaccaaaccgaggattcccatagggaaaatgtctaactcaatagctcctcccttacatgacagggggtgtgtcattctcttaacagtggaaaacaaaatgccaggtcttcgcccagtggagatgctcttaacaccctaactggtagcaagacttctgcaaatgaggnnnnnnnnnnnnnnnnnnnnnnnnnnnnnnnnnnnnnnnnngactcagacctccttccagcagccatagagctttatcccagtgtcttgtccactaactttagggctccaaaagctaaagggagcgaggcagcagggaaagggaaagatctaactgaaggaaaaagctcctcctcgccccagtttctgcagggagcagagggcttcaagcaggccatgctttcctgggggccctggggtgagggctgacacggctggattccagggcacttctggt

SEQ ID NO: 448482 - DNA, 478 bp, Homo Sapiens
  misc_feature (340)..(380): n is a, c, g, or t
aataaaaaaggttttactccccaggagcaaataaatcattttgaactactgataaacactgctgcagtgaaaagaaagatggctacatgtatgcaatagcacaaattcagtggaagaacagctgtgttgacgattagagataaaaatcacttatccattccctcctttcccacaaaccaaaccgaggattcccatagggaaaatgtctaactcaatagctcctcccttacatgacagggggtgtgtcattctcttaacagtggaaaacaaatgccaggtctccgcccagtggagatgctcttaacaccctaactggtagcaagacttctgcaaatgaggnnnnnnnnnnnnnnnnnnnnnnnnnnnnnnnnnnnnnnnnngactcagacctccttccagcagccatagagctttatcccagtgtcttgtccactaactttagggctccaaagctaagggagcgaggcagcagggaagg

SEQ ID NO: 448483 - DNA, 394 bp, Homo Sapiens
  misc_feature (150)..(190): n is a, c, g, or t
ccctgcagaaactggggcgaggaggagctttttccttcagttagatctttcccttccctgctgcctcgctcccttagctttggagccctaaagttagtggacaagacactgggataaagctctatggctgctggaaggaggtctgagtcnnnnnnnnnnnnnnnnnnnnnnnnnnnnnnnnnnnnnnnnncctcatttgcagaagtcttgctaccagttagggtgttaagagcatctccactgggcggagacctggcatttgttttccactgttaagagaatgacacaccccctgtcatgtaagggaggagctattgagttagacattttccctatgggaatcctcggtttggtttgtgggaaaggagggaatggataagtgattgtccccgct

SEQ ID NO: 448484 - DNA, 584 bp, Homo Sapiens
cttaaactttccatattgttcataattatctaatgggggccggagctaaaaggcaaattcctttggaagaggaaaaattgtacttgcacagaaaactttttctcagtttagttgacaatccttttagtacccaggaaacagaccatttcctggaaggggactcggggcaacagatatggagaatgtaagaaagagaaatgattaacagatcagaaacagatctcactgtctgacattcaagtttcttcatgatctttcagccatgtatccaaacagtagatgagcacttcttagctgaacctttatgtggctttctctttgcctatcagaatccttccagtctctgagactgatttaattcacttcaacccatgaagactttcctgatcctctgatcatccaaggctctactatttctcttttctcttaaggtaccgctatagcagtaggtctgcaccacccttttctggtattaagccaattctaagttatttgttaattactcacgtgtaagtaaaatttcccctgctagactttaagttccttgaagtggggaatttagatggtttgcagactgtagtcat

SEQ ID NO: 448485 - DNA, 747 bp, Homo Sapiens
ccctttttttgtatggagatcgttgtttctttttataaggcaggagggaatttagtggagctggggaaggaaagaaatggggttgggagaacctccccaaccccatccctgctggcccggggacgggcatcggctctcagcaagagaagtattcccgggatgctgagcgcttcattctgtctccaggactcaggcaggtaggtcccagctccgccgcgcccccggacctacaggtcagcgtggtccgaagtttcctctgggggcttcgcgggcgcccacacgtactcggggggcacctgcgcgtcgggcgccgccttgcggtagaagccgagctcctgcactagcgcattgatctcttcgcgggtcatttcactgagtgggatgcgctctagttcctcgtagcggcggcccagcagcacgagctcagggtcggccccagggaggtgtttcatcaccaggttgtgatagaatggaatgtcctgcgtgacgaaagccttcacctcctttaggcggttcagctgtcatcccccgcaggtctctacccgggcgcgggttaggccgctcagacggttccagtccggccggtaggcagtggcggctgtggctggggccacaagcgccgcgagaagcagcagcagcgccagcggaggcaacaggaggctcatcgggacccggccgcagatgatgcgcaagctggaggcgaacctccgagtcgctgcgccacgtctggcctctattgcagaattc

SEQ ID NO: 448486 - DNA, 1394 bp, Homo Sapiens
tttctcattcattaaaagaaacaaggatttattgagcccctactgtatgcttggcactcacggggaccacagaacagccctggtacagtgggagaacacaggttcagaaggagtttgtcacttggtcacacagtgagcaagaagaggcagaattcaaacccaaaccgacctggtcccaaaactcagagataggtttcctagagatgacgtgacagtaaagagggccccagggggaccccagtactcctgcaggcaagacttcgggactggggtctcccacggccgggatggccttgtccatggatcatgtccccccagctgcctgtcaacgccgaggacttcggctgggtcctgacctcttagcacagatcgccgcttagagcctggtgggtgttgaattttaaagaacattccatccctcctggatctctaaggagggaaatgtgggtgggggtcagggaaggagagaggaactgggtgagaatggagatggggtctcagaggacaaaagaggagctcagtgcttgcatatctcaacagaccagggcacgccataggctcggtttcctcatttgtaggacgacgacaaacatgcccgggtgttgcaagattgtctcgtgcacagctgctatccggcatagagttaacgtgcaaacggagggtggcttagcagctccaggagtccagccctgtctggggaaggggcagccatcaggcccctgatggggtgcagtagggtagccctagtaggaggcacccaggacttctggcccacaatgagaagttcctgagaactggaagtctggttgtcatgaggacaacgttgacagtctctatgggaacagcttggtgaacagggccccgttgtcccacaaggaaaagcctagggggacaggtgttctgttacctcggactccagagtttggtcaccatggcaacagtggtggggtccaaaccgcctgggggtggagcatggagggtggtctggaactggagtgggcctggggacagggacagtttgtttccatggtgagagccggagaactggatgttgggtcaccctggcgacagcttcggggagggtgatctccatggcggtgagtcagggtagggacagccagaagttgaggtggaggtctctggggtgggggccaatgagatgagaaatgtgtggtatccatggttacagctggaggagggaggcactgtcttcatgggtgtgcctgatgagggaaggggtgtgtgactctaggtgatcaggtagcagcaggactggttgcctttgtgacagtgggacccaaggcaactgctctgcataaaatagctcgccactgggttttccccggtccaacagggcacaagagaggtgccctaagtaacggcgccaggttcga

SEQ ID NO: 448487 - DNA, 241 bp, Homo Sapiens
atgagccacaaccgcttggcacactcactcattttttataaagtaaaaacgggagaccaaaaaatctccttacacactcctaaaagcaaataagaaataaaccatttactctacttgcaggttcatcttgcccagtgttttctttctaacagaggcaacaaatggagttctgaaaaatttatcccagattgccttctaggaaagagaggatggagttcgagcattagccatagaaaggctt

SEQ ID NO: 448488 - DNA, 347 bp, Homo Sapiens
agttaggagatgtaaccccatccatttttttcccaaccaaaatatttccaaatcctgcgggttggttgaatcccacagatgcttggaccccttgaatattggagggcccaactacactagaaacacacacgctagcttgagaaagatggtggcttaagggtaagcatggaaagaggcaaggaggtgaggacagcaggactgatagataagctggggaggccagagctccacaaggacatccatttcacttatcagaatctaaaaataaaccacgttgagatactagaatcaaagaatccaaattagtttctgaacacatttgaaaagatcaaactcttacagttaaa

SEQ ID NO: 448489 - DNA, 500 bp, Homo Sapiens
caggcggacagggaggggtgactgcagctagggcaaagggcagcccgtggggatgactcctgggccggtgccagcccctcagccctaccattaaggagcttgcgagggtctccggggataggcagatgtgggttctatttctccctctgctgtttgatcctgggtatttgggcaattgacttaacatcttggagcctcagttttctcatcggctccgcctgcctgggggatgaggctctggtctggacactcccatggaacgggccccaggacaggcccgtggcgaggctgagtcgggcccgtatgcgcctctgcccatcctgcaccaccggctccagctcgtctgcgctgggagggctcggggcttcaggtgccgtggccttttgctccatgtggctggcacccaccaactgcacctcctctctggcctccatgtctccgagggaacgcttgatctgccgggggttgctctgtttccgcctggacatgtctcaaacgcc

SEQ ID NO: 448490 - DNA, 509 bp, Homo Sapiens
gcggccgctgcccggtgccctgctccactgcgaacgccgccgctgggccccgaccgcccgggaggcgtcttgggctcgccccggagcttcctccctggagccgcgccctgcacccggccttgcccggccctagcagggaagccaaggcttgtggggcgcagggacccgggctctgcggggtcccggttccgcctccccactcctgcgtcttcccgccccggccgggttctgggaagcctcgcgcggctcttccgcagctgctgcccgcccggagctcctggtccctcgtaaggggaccccacttctctgacaccgcgttgggttcccggggcctacagcgaggcctgtacctccgggagagaccctggagcggggtgtgggacgaacggtctggaggaagggctccgagcacttcgaaagtataaaccgcggtcccaaagaggcgtgctgtgtctgcgattttcctgggagtgcacggtttacattctgtaaagcagtgctgtcgacta

SEQ ID NO: 448491 - DNA, 736 bp, Homo Sapiens
atttattcttttactttattttcttttttctccagaatttaagaaaatctgaaatgaaaatctgaaatgtagtttggtcaaaggttggacttttgggagcattttgatggctagtggtgacacttctcatggctagagagggccacgggtgttctagaaggtgaggcatgggttaaaccactttgaatcacacatggagaaagctcatttattcacaccccctgttccattctccttcactccttctgagtatcctcaaagaaaaagtctggttggtcctaatacgacttcagcacctctccaacacttgctaagatccttttgttggagggagaggtggaggacgaagcgtaactgtcttccagttgtccagaaaggctgggcaaggtcctgggtcaccttctctgttctaggcccatcagaggctttcttcagggtcagttgggtccccaggaagctggcaggggctggcagggcagggagatctgggattccaacatggcacgtccacagaaaagtattcctattggctctgcgtggtccatccaggttaggggggtgaggtgtctggacttctaggaatcctcaacagggcactcagaagggagctgacaagtcccagaaacctgcattctggctcctggttcttgtcacggatgccatggtgggaacaggcccctttaggctgtgccttggcacttggggactgtccctgcagcgcagtgactgctgtccc

SEQ ID NO: 448492 - DNA, 384 bp, Homo Sapiens
tttttgcagcatttttcggcctctttatttagaacccggcggacgaggggccggggcagtggtacagacggctcaggaaccattttaacagacttgtcttcaagtttcagataaacacagtcataataagagagacagcgaaagcgcgaagagactgcaagctagatgggcatgtatggcagctacagcttgtgagtgacccccttccccagagtccgcgatgaaaataaagttacacttgtcaataaccagatgtgggagatggagagtgcctttggcataaccaataaccgagctagtgcgtggcagagcggtccacgcctggacataaatagaaaatataagttagtataactttaaaaactttttgtacaaatatacatg

SEQ ID NO: 448493 - DNA, 956 bp, Homo Sapiens
ttcggtacccgcttcttcatggtctggaagacatctcccctgttagcccccttagcctccccggtgggggcccgcacctggaagacatagattgcgccggctttgaggccctgccgggtgacgttgttggtgggcttttttatggctgtggcgttgtactcactgagctccttctcatagtactgcagctcatagtccaggatcacgccattgggctggtccggctgggaccacgacagggtaatgctgtccacggtgcggctcacctgatgcatgatggacactgccgatggagctgcctggttggtggtgatgttcacagaggcgaactgaggcgagaaggggctctggtcagtaacgccgttcacagcctggatctcgaaggtgtactgggtgtgggccagcaggtcactgatgtaaatgcgtggctcggtcaggcctagctggcgtggtgcgtactgtacattgtccccgcagcgggtgcaggcaccccggcccgagccacagctcttgcagatgatgttgtagacgaggtcctctcggcctccggagtcgcggggaggggtccactccagcatgagggaggtctcattgacactggaaatcacagcctggggcgcggaggggatggttgtgcagggcatgtccagggggtccaggtctgctctgtagtagccattgcggcagacacagttggtggccccttcagaagtggtccggctgttgatgggacagtgggtacaggcctcatccccttggttggccttgaaagtcccagatggacaacctcggcagacggtgccattctcaacggcctcgaagcctgctttgcacatgcagcgcccgatgggcaccagccactcgccgtccccgttacagtagagcttgatgggtaccctcgtgccgaattcggccacccaggcctcgctaccttttacccgagagtactgccgtcc

SEQ ID NO: 448494 - DNA, 505 bp, Homo Sapiens
gcggccgcaccaccaggtggtgaagagcactggactcctgccgggagtgctagctgtagggaccttgagcactactctggagtctccgttttcaactccataaaacaagagcagcaattgtgcctcacagaggggaggtgagaaccgaatgagtgaatatgcttaaagcaccaagaagagtgcttagagtaagttcccgcattctctctgggaaccatcgcaaggcgggtggatagatcctaatgttgcctgttgctacagctgactttcccaaatggtggacttgagatttaatcgacttcaaaaccgtacacacagtcgcggcggtaatagcacttccctgccccctggcttttcgcaatagtaaatttgggtgcttttcatctccacggggccgtcgggtcagcgccccgggcgactccaccgcccgagactcagtgcagcccggggctgtcttgcaggagtcggctgtggagctcctcttcgccgccttcttcaccacggc

SEQ ID NO: 448495 - DNA, 378 bp, Homo Sapiens
gcacacatccagggtcccgaggtgcggggcactggaacattctggctgtgagggttgcccacactgggctggcaccttcatcctcgcaccacagcagagtgaccagaaccatacactcgtgacccaggacggtgccaaggccaagacctggccctgtcctccagcccagcaaatcgcctgtcaggagagaggggttggggccgggaggccccggcaggagctgcatgcatttcctacccagctactgctggaccagggcttggctacagctgagaacacgagggggaatggggctggttgtgacgccggcgctggttctcaggggcagcactgagacattagaaatgctggcaggtgctgtaaatagctcctgaatcg

SEQ ID NO: 448496 - DNA, 1024 bp, Homo Sapiens
  misc_feature (126)..(142): n is a, c, g, or t
cacagcactaaattagctcatttatttaaaaggacttttttggagttgccctaggtaatggggagtaatgactccccttctcacccccagccctggcaggggttctaggcaactcaaccaaccctnnnnnnnnnnnnnnnnnccactggggtgcacccaaaggtggcctcacgtgggagtcagagctgttatggccgttggagctcaggggccaccccagctcctgctgagggtggctcaggtgccctgaagtgagggtacagaggtggccccagtttgggttcggcctctgcgtctccacgtggcagggagggtggcctgagcccctacagcttatctggcaggacctctcgccgtgccccgtctgcccgagggcaggatcccctcgtcctggttgcgggtcttgtgcgacttctgcatccaggctcgccactggtcgtagaggcggaagctgaggttggagcagtacgcgtgcttcttgagccagcccaggaactgcttgagctcgcgccgcaccggccccgagctcggctctccgccccgcggttcgcacgccccgccgcccgggcccgggcgctcactgcggggagtggaggcggctgtggggtggctccactcactccagatcccggctttcttggagccatagatgccaaaggggttgcagcgcacttgcacgaagtacatggtgccgggtttcaggccggccaggcggcaggaggtctggttgctcacatcgtccaccaccttccagtccacactgtcctccactcggtagcggatctggtatttggcttgaaagaggaaatccttgagggcgggtggcgacacccagcgcacgctcagctggtcctccaggcccccgacgcggctcacgtgcacgtcgggcggggggtccgtggtcaccacatccaggatatccagcgtgagtacatcggagcgggcagagcccaggcggttggtggcctccacccagatctcatagggcgtaaagagagcctcgtgccgaattcgccactccagc

SEQ ID NO: 448497 - DNA, 619 bp, Homo Sapiens
tccagagttcaaccagatgacgctgtaatctttttagccacaaaagcacctgaaggtctcttctctactcaggtcaagattatcttttatgtttagtctggaataagttatacttccatgatgtctttttatccccagtgcttaaaaaaatttgtttttattattttatttttgagtcagtagtcagtgggagggaatctttgggtagtttgtttgttcaatgtccatttacaaagactctttcttcatgccagtgcctggtgaatcttttatagcctctgccaggataaggtcaccttcgaggacttaagatagagatgaggacgataatgggaaaaagccatatatgaaccaaaatcccaacagcaccatcaacggaattcttagttgctaggtcttgttttgcacattctccttctgcaattgatacatcatcaatagcaatgtcaccttctattccaggacctcggataccttcaaaaatgagctgaaatgaagttattgggtatatattaacatgagcctcattccatctttgtgctttattcccacttgaagaccacagtggattgtctattgttgtttgccctttcagacgtagataaacatttaagacacc

SEQ ID NO: 448498 - DNA, 392 bp, Homo Sapiens
  misc_feature (276)..(276): n is a, c, g, or t
  misc_feature (278)..(278): n is a, c, g, or t
  misc_feature (303)..(303): n is a, c, g, or t
ctggttttcttttatttagtgaaacattcctttgtaagtgaatcttcaatgaagacgtcccgagtgtgtgtgggggcggagggggccggcaggggaggaaagcgagcaaactgcgctcatccccctcccccggggcctgctcactcctcccaactggtccgggcctcctggcctccctcccgcggcctcccagccaatcattcttccaggccccggcccaagtcccaacttgctcaagagctcaacctcctcggggagaacaggggtgggaaaatncnggtgacccagagactggggaagcangggctgaaccccatcgcccgccccgagtacggccacccacacggggaactttacacaactgacctccaagactggggggggtcggaagg

SEQ ID NO: 448499 - DNA, 397 bp, Homo Sapiens
caggaggctcacaaagaggcctttatttatctagctcaaagtagacactatcacaatcttgtttgttactccttttactaaaatagttcaaatcaatgtttttaccacactatcaaaaagttctatttcttcttgtctccccacgtcagagtggttgaatagaaggtagaaacaggccgggagtccacgggctcccagctctaaacggcgccagggcaggaaggggtggctccaggtctcactgtggcaccttctacagaaaatagacgtagctgccgggcccggggacagaaaccagacgttccagtccatctccaaaaagcagcacaaatactttgccccacagtatgaaaaatatacacctctaccgctctgcagtcatgcatttagttttaag

SEQ ID NO: 448500 - DNA, 252 bp, Homo Sapiens
gcggccacggtcccagccgcgtccccataggcgggcagcggcctcagcgcccgggtccccctcgcccccagattttgcccccgcgggcggcggggtagggggcgccgagaggtgctgtggaagggttcacgctcaccgcatgggggacctcggagcgaagcgggcgggcgctgccacagatgggaagagggacgtttccccccccacacactgctgtgcaactaaagtaacctgttgaaggctctttgtaaa

SEQ ID NO: 448501 - DNA, 878 bp, Homo Sapiens
  misc_feature (814)..(814): n is a, c, g, or t
  misc_feature (829)..(829): n is a, c, g, or t
agcggtgtccggaagtcctgagagggaaacgcccgcaaaggctggtttttaagcgggagcatctcttcactcgcagcaagtgcgcgtgcgctgcctctcagcccaaattggaaacatggccgtacggtcgctgtgggcgggccggctgcgggtgcagcgcctactggcctggagtgccgcgtgggagagcaagggatggccgcttccattcagcactgccacccagagaactgctggtgaggactgccgttctgaggaccctcctgatgagcttgggccccctcttgctgaacgagccttaagggtaaaagctgttaaactggagaaagaagtccaagatttaacagtgagataccagagagctatagctgattgtgaaaacataaggaggcgaacccagagatgtgtggaagacgccaagatatttggaatccagagtttctgtaaggacttggtggaggtggctgacattttggagaagactacagagtgcatttctgaagaatcggagcctgaggaccaaaagctcactctggagaaggtcttccgagggttgttgcttttagaagcaaagctgaaaagtgtgtttgccaagcatggcctggagaaactgacacccattggtgacaaatatgacccccatgagcatgaactcatctgtcatgtgccagctggtgttgggggtgcagcctggcaccgtggcattagtaagacaagatggctacaaacttcatggccgcaccattaggcttgcccgagtggaagtggcagtggagtctcagagaagactgttgagaggccctcaggaaactgnatggtctcccagaancgcagtcacctatgtttccttttatttattaactaaggttggtattcta

SEQ ID NO: 448502 - DNA, 607 bp, Homo Sapiens
ctggacatctaatgacaatgcaagtgaaaaacatcacattgggtaaggagttttgaaggaggtttgaatgcaagagggactactctctaacttaaaaacaaacacaacactatgaagagggagtgtgcatctttgagaaacctttttcttcaaagtgaatgcacaaaatgaggggattcactactggctctttcgcttcacggtggaagtgaccactttatggtcacttcaacattgctgccctgtttgggctgcgattcaggcttacaaataaattacataatctgagggagtaggaaaaaggcttataagaagtttctattcatttgaaaggtaaagaacccccaccccatttgactgtcttttcttccatctttcctgcagcagagttttatttcagtcttactcatgagggagatggtgaggctgtaaggcttgcagtcttagcggcttgtgttccttaattgcttcctttgcagcgataatcagacgagtcaagctggacaggaggctggcctatttttaaaaatggatgctgcaaaagttccttggcagatccttccccattccaattcctctcagaaaagcgatttaaaaagcaccggaa

SEQ ID NO: 448503 - DNA, 503 bp, Homo Sapiens
ttttaaaaaatagcattttgttttttaaatggcacccattaaagactcaacagtcaaaatgagacaaatcagtcctttagacgttcacagacaattgaaaggcactttaaaaatccactttttaaactaccacttgagaacacatggtagcacagtcttaaattcatcctagttgatcgggaatgatgaatgagtgttggcaccagaaaatcctgcttgcagaagggggcgcaggtgtcggtccacgggacagccactggccaggctagctgccgcctcactccgcagccttctgtggctaaatggcaggacggacacacaggaatgggctttggaccacaagctctggcatatcgggaggcaaagcactcaagtactctgcagtctagatgacacatttcagtggtttggaggacagaagtaggtttccacatcacatgaaaaggacagtgtcacagtggggttacccagtaaacagttaccaaagccatcatttcaggctt

SEQ ID NO: 448504 - DNA, 629 bp, Homo Sapiens
tagtctctcaatactttactggccatatcccccgatacccccacagcaatttcaccaacacagagcaactgccctcagccactctgatgtgatggagccaatccaggtgtcctaaaaatatcctagaaatgcagagcatggggaaatcacagaaccctgggaaatgccataagaacctgggctctggaaagtgccatccacctcccctctggtcaggctggcggcactgacaaggcatccacagggcagccatgctatggcccaaacctccggatatgcaggaaccggggcctcccacagaagtccctgcgcacagccacaagattaaggtacaggtcaggccggctctgaagccagctgctgacaagctccgggtgccttgggtccacttctaagaagatactaccagagtctttcaggagccggggtgccaaggccagaatgtgggtaatgatgtccatgccctcctccccaccatccagggccgcggggtcttcatagctctgagcattctcatgggtcagagagatagcagcttcccgcttatccacagcaatgactcggctctgggggagctggctcaacaggctgagggagatggctcctgatccgcagcccaccttcagaat

SEQ ID NO: 448505 - DNA, 919 bp, Homo Sapiens
  misc_feature (62)..(84): n is a, c, g, or t
ttgtttgaagaagttgtttccacatgaagggagtggtacctctccgggtggtcctcgagttnnnnnnnnnnnnnnnnnnnnnnntgggttcaatttcttttattttcagagcttccaacagttggttagtaatgctagctaagctggtataatctgaaggccatcccacctttctctttaggcagtcaaccaacagaatctctttcttacaaacaatatcattaaccagttggaatctgtctcaatgcgcgtgtaggaagaagtcctctcccccacatttttcccaacaagattgttttatagccaaatgtaactcaaacccgtaacacagcaactagccatctccagtatcactgattcccaccccaagaagttgaggtaagaggggagagactgtctcctgtttaagaaaaacccacctacacctcagtgaagccgtgatggtaaggaggctggcaccagagggcagggatgagtaggcactgaaacaggtctctctagaatcaatgaagtctgccccagctccttggatgaggtgttcttttgaaattcccacttttatggagttagataaggggacaaccggtgatgattcatcactccctgtctctaaaattaaaacatgataaacccagaaagttttaccttcaaaatccaccaagctccctcctgagaaaattctatccagtcatgtccatgccagcacccactcccttctcctaatgcccagggcttccagcccctctcctcacccttgggtggtccatccaacactgatttgatactctttgactcataatatgaccattttttaaaaattagaaaataaaagctatcaatatcacagcaacataaggaagatactcagtggacatgctcctcccccatcccctcgtgccgaattcgccacccaggcccc

SEQ ID NO: 448506 - DNA, 517 bp, Homo Sapiens
  misc_feature (503)..(503): n is a, c, g, or t
gcggccgcgcgcggggactggcgaccctgaggtagcggccgaacgggcccgcccggccatccctgtggggcccacagccatctaggtgcagacccgagccagttgcgcggggtcggtcgcgggggacggcttcggccttttcggtccggagggaccagggcacgcgctgcgacaggactgcggcggcgcgcggcctgcctagctcccaccccggcatcgaagccgcagctctcgggcccacctccgcattctcaggggttcccgggggctgccgacaggttcctgaccagcgagcgcgcccccggggcaagcattcttggcgggcagaagcctgggagcggagcacagcggtgcaagggaaccgtgccaggcgggaagggcggaattgcggggaacttggagcgcgctggcctcttcccggcagtaggaggccttcttccctgcccgcccgattgagggctgctgggctggctcaaactggactgcacggtccatcagcctgngctcaccgagtcta

SEQ ID NO: 448507 - DNA, 1353 bp, Homo Sapiens
  misc_feature (260)..(260): n is a, c, g, or t
tcttccctttttcctaggaggttgaatagatataaggagggaaatgggggtttttccaaccagccagtgtcttggagatgggaggttgcactcaagggagtccctcacccctaaaagggatcaataacctttactgggtaaatcaaccttaattatccctaagctgccttggggttttgtgttggtccaagttttgtttggttttaggtgccaccacgtgtgattcctggtgccattttctttggtctattatttttctngaggaccctgagctatggcttcctcctcagttccaacactattcagctttcgttgttttcctcattttgccgatgtaggcctcaaagaagaaatggcagaagagcacaaggtagctgaggtacatgagtgaggaccagaagatgttctgaaagtgagagtgacactggtcatgctgcatccagcagaagaccaggtagttaaccacacagcccatcagcatctgagtgatctgggacaaggtgatgaacatggcaaacttccgggagactcggaaacctgccgcccgcaaggcatagtaagagtacatcacggcgtgcacgccatagttcatagtcatgaaccaacctcccccggcaaccatgtctttgtaggagtaccaagagtacaggagcacagtgatgtggtgataccagtgcaggaagatcagcttctgcttcctcagaataatgaatattgtatctcctagttcgggtgctttgcttagcacaaatgcataagcccagaatttgctgacaggtccattgtaaaaaccctggtcacaaactgactgcttcaggcctttggtcatcaaaatgtacaccatataagcaccagttcgaagagcaccgaatatagctgaagactgcaagggtcagagaccagagcacctaatggcttcctcagttcaaactttgctcgtttattcattaggtgccgaccaccgaatataaaggcagcatacagagcagaaaacaggaaagatttcttccagttttcctgcatccattggattgcttcattctcgttgaactgcttttcgaattcatattcttgtaaagtcaacactgacatgttcattggggctgatcttcggagtcgctacgtgttctctatacaaaataaaataatctgtaaagcgcttgatttcgagtgttctcctgtctgcttcccccacccacccccctaggtcttccccacgccgctcggtctccagcggtcgtctcttctcccagcctctcagctacatccagggctgagcattgcctgcgcctccgctcccagctcctctctctggggctctcctcctcccggcgtccgcatccaccgtccgct

SEQ ID NO: 448508 - DNA, 633 bp, Homo Sapiens
gggtgcgtaaaagggaccctccacgggtcggggctgtgctggcaccaagttctgatgggtccctgaagtctcagcagctgtgtgagcaggagggctctgcgcccactttcctcccaggcctgcgatgggcacaggcctctgaggagcggctgcgggagtgtagggctctgcgaggcagtgactggtggtggggaggcggcggcaaatgcccaccaggcgggactcggcccctcgccggttcaccaagaagcctggtgtccagctgctcccacactgtgagcccggcaggttccctgtccccaggctgggcccagcgggcactggggtgcctgggctcaggctgccggcattgtccctgccatgtggctccacctcaccctggcagtgacatctccccaggttcagcccttctcttgaggggctcttggcagcaggacctgggaccccacaaggagagcctgtggggagggggaaggcaagaccgccaagcaccttcgagaaacttctacaaaagaaaatgctaaggaggggggcgagtgccctggggcccccgcggcctcgggtggggccagcacggctcacaggggccggtactgggcgtctaggagagagaggtgatgttggagcggccgc

SEQ ID NO: 448509 - DNA, 1053 bp, Homo Sapiens
  misc_feature (63)..(123): n is a, c, g, or t
  misc_feature (125)..(133): n is a, c, g, or t
cggattacgcgtcctagacggaaggagatccattcctaagttcatcattttattgtgtgatgnnnnnnnnnnnnnnnnnnnnnnnnnnnnnnnnnnnnnnnnnnnnnnnnnnnnnnnnnnnnnannnnnnnnnctctaatacatttccaagtaccaggaaactgtggtaaaaagtttgctctgcccacaaagataaacagataacatcaaatgtttacagtacaggaagaagaggacttctcgttacttctcaaggacttcatcttcatagaaaagaaaagttctatgggaccgcctgactccctggagagaccccaggtcagagaaggcacatacctgacatagagtgaaatgggcccaacggtgttgaggatgatgatgtacggaccagaaggagaggaagccagagaagaaggcactgtccactgcctcatcccacggcaggtagacctggaaacgcatccccacctcgtgctcccagatggcattgccaatggccaggatcacccccatgcaaaccaggaatccaaaaatccagagcaccagggtattcattaggcgatcgatactcgttcttttgaactttgttctgccgctgttttgcatcagcttagtgtcgggacctgcaaagatgaccagcccgaagcaccactcggtgtttcgcagcacacagccccgcagcagcatgttctggttgctcagaagggaacttattttccttccagtagagggttccgctgaatttgtccagtttgttgttgggaggttcacagatcacttcaccgtcaaacttggcacgcttactgatgtctcccaattctgaggtgactggaatcgcctgacgtactttcatgttggtctcgccatcaagttctgctgtctctatgtaacacagcccatggggctcactgctggaaaggaggaggagatccgccgccacaaactggttattttctagcttgataatatcaccaacacagacattcatccactgctcctgctggaggattccattgatcagcacctcctcgtggagaattcgccacttcaggc

SEQ ID NO: 448510 - DNA, 645 bp, Homo Sapiens
  misc_feature (622)..(622): n is a, c, g, or t
ttttttttgttataaaatatttctatacaaaaccaatccttctttcatcatttgcttcagtttcagtgcctgtatcacacaatggtccatgttgtacagtaagtctaaagcagtcttgaataatcagaacccttctgccagattgtctacagtcaatttgttttctggcactacttctttgccttcttccttatcgtccaacgctggtttggaagcaccggcatcttcatttaaatcatcttctgttgattcctctggttgatgtctattagctcttgtcttatccacagtctctttcataaattccttgactggctctgctacaaatcctgtgaaatcatgctcaacatcggtacacagttttctccagcaggaagttactgttttgtgcttgatggctttcatggctttttctataacgatggcatcttcagcggtgtaattcctccagattttcatgatgttctattgaggttagagtaccgtgtgttattaaccttaaaggtcctcatgatcccctgatctagatgctgaaatagagactgtgttcgggggcaagtagaccacttcaatgttttcggtgttaaactcatggggttctgggtggccagggggcactgcncaactcaaaaggactttaaaagg

SEQ ID NO: 448511 - DNA, 343 bp, Homo Sapiens
  misc_feature (148)..(271): n is a, c, g, or t
attatttttgttcagtcctgcttaattaagctaaaaaaggacaccactctttttgacactgggaacccaaaggaggtgaaagaagagttcagatagcaactcaccatgatcaccacccctgaactgccactgttgcttcagacctcannnnnnnnnnnnnnnnnnnnnnnnnnnnnnnnnnnnnnnnnnnnnnnnnnnnnnnnnnnnnnnnnnnnnnnnnnnnnnnnnnnnnnnnnnnnnnnnnnnnnnnnnnnnnnnnnnnnnnnnnnnngagatgcttccaaatgaagtgacaatccacatatcacccatgctgccctccaggcacaaaagattcatttgg

SEQ ID NO: 448512 - DNA, 459 bp, Homo Sapiens
ccccggttcccaccttcttaagtgtatgtgttgtcatcatgtttcaccccaaccaaaccttgggtgggcagcctctgtaggggaccactcacagctggcctgtagtcacggtcccctgcagagccctgtcccgatgcgtcgtccctgcccgtggcctgctctgcctgatgtgcactgtacgctcggctctgctgactcccgggggcctccgtcacacactgagccagcctcatcagctgtctcggtagttggtgttcagggacagggatccagcccttcctaaggtccacctgggctgagactcagaatggacattcaaaacaaagagatggagctgtgagtgacaccgggccccacgggccgtctgtcaaccaggccttggccctagtccatcgggcactcaccccctgcaagatgtggacccactagtgcccaacgtgtgaacaagtagctggaggc

SEQ ID NO: 448513 - DNA, 350 bp, Homo Sapiens
  misc_feature (128)..(173): n is a, c, g, or t
cctctacacaaataatttatcctatgttggaaaggacaactagcttaaaacattgatttatatagtttcagattggaaagagagctttcctgcatttgggggtcacacactgagacagagtctcacannnnnnnnnnnnnnnnnnnnnnnnnnnnnnnnnnnnnnnnnnnnnntgtttctacaaaaaataaacagttagctggatgtggtggggtactcctgtagtcccagttactcaggaggctgaggtggaaagatcccttgggcccaggaggtcaaggctgcagtggagttgtgatcgtgccactgcactcctccagcctgggtgacagagggatacctagtctcaa

SEQ ID NO: 448514 - DNA, 291 bp, Homo Sapiens
ttttaacctttgtaatgtcttaaaaagtagcttttatgtttccttccttatgatagcaaagcagccaaagtgagaggctgcagggagcagggcaaggaggtgactgtctccatcagcagcccctggggtcaccttagggttctcagggaaagcaagagagggttgcaacagggccaacaggtttcaagtggggtggaagggtccagaccagcacagctctggtgcctggaggattcagtccagggctgagtgtttcaaggcttcttattccttaaaaccaaagtaactttt

SEQ ID NO: 448515 - DNA, 487 bp, Homo Sapiens
gcctcggccccaaataagactggggagatgggtggcaagtctaatctattcgaatctttacaggcacttttctttttacaagttggaaacttgagggatccttgaggaaagcccagggcatgaatttcagttccggagtccccgactcagtggcccacctcagggatccgtcagtccttcgtgccaaggtcaggctcaactccagcctgcggtgccgctcagccgcactcctcgaagatgtctgggtagtgccggaagagcacaggcgggtcccggtcacctcggacgggggcccgaggcacagcccggatcccaggcctccggccccgccgccccccggagcaggagcggtggatccactggtgcgcttccactgcgaacttcctcttgaagcgcatgccacactcggggcaggggaaaggccgctcccccgagtgcatgcgcctgtggctgaccagcagtgaggggtaggtgaagcggcggccgc

SEQ ID NO: 448516 - DNA, 583 bp, Homo Sapiens
ggtggacagaatgcgtttatttctccagtttggcctattttaactcctacatacatgaacagccaatacaattaaagtagaaacacaatttttaatattccttatcacagccatttgaagctcctttctgcccaaaaggtctagactgccagcagaggccctgagacaaaggcactgctataagatgcagactgtatcatggcacagtgggaaagtcaccatgtgcaaaatccacggcttgcctgcctctatgcctcagacaggaacaaatcatgggatggatctgggatctatacaacagctccatgaggcaggacaatcatatgaggttttatgctgaattacacccattttcccaatgaggacacataaaacctcccaaacatgtgagaagtttcagacccaaatataataagtgatgtataggcatgtgacctgcgaagtgagtttgtcaaccttgtttcacttgagtgtgaaaaatgctttataattttgataatcttaccttcagcagctttgtaagaaataacttgctccaggggccgggcgcagtggctcatgcctctaatcccagcactgtggg

SEQ ID NO: 448517 - DNA, 473 bp, Homo Sapiens
  misc_feature (283)..(301): n is a, c, g, or t
tttttttgcagtgcagacagtttaatgctctccacctccatcaccaccaccgaccatcctccacaaggccctcagccccagggcacccttcacactggagccccagagagtgtgcacaaaagcatgccccaactagcatcactttctcacccaatgcccaggacttcgaaggctgccttctcacttctgggacacctacaggcaggaggaagagaaggcttcttctgagagagaagagctgggattccagaggccgcagagtgaacagacggaagaaaggtgnnnnnnnnnnnnnnnnnnngaggtgaacaggacgtgtgtggggaatgacagggacagaagaggtgctagaggcagggggtggaattgggtcagatttctgacttctccaggtgaagggcctctactgggaggcaggctgatggtcttggcataactgcagctctgaaggaccagcatgaaaagctggccag

SEQ ID NO: 448518 - DNA, 407 bp, Homo Sapiens
aaagaaaatcaaagtacatgtcttgcctgaatgatttccccctttatgttgcattttcctgtttgaatggaggatccaggctgctaccagggaactggtctatgccttaccaaagtgtgcaaatggtcccggtaacggtgcagctgtggaggggaagaggaagcagtgagcaggctcaccctcatctgtgggcgcctgcaaatcacctgctctactcttgttattactttttcgtccatgccttttcaagtctgttaatttggaagaagcgtcagttcctctgcacttcccatatttgtgagaatacctcagctatgagctggacttcctgtctctttctctgaattctgagatccaacatttagaaaggaagtgacttgtaaataccccttgcaaatcctcttcct

SEQ ID NO: 448519 - DNA, 532 bp, Homo Sapiens
gtccccgagggcttccggggccaggcaccgcggtgttctttgcccccagcgtttctgagagcaaactcccaaggaagtaaatcccctctctccctgccacttaagtagcaagtaaacccgtacttagccttagaactcgaggttcagtctcggtggagacgggtcagcccttgtccccgccgtccccgtgttttttctggtggtcagcgggctcttctgccttccctagttcccgagggagggcaccctcgtgggcatgggagctgccccggtgtcctcccgtgcattctgtcacccacaaagggggacgcgggcagggcgccggagtgggtcccctctccgggcttcccgagggccgcagctgcctgctcggcgcctggcccggccgcgggcgggtgttgtctgacctggtggtttgttttgggttgttgatcaagcatgtcttgagtttggtcggtggcgccagttagtctgcagcgagaaggttcacacaccccctctattcattcctcttccacaggtgtgcggccgc

SEQ ID NO: 448520 - DNA, 571 bp, Homo Sapiens
acgtttgtctgaggttaagccttcttttgggatttgcattgtaattgaggggcctggaagatctctgagactcaaaatcaggtgaagctaggaagatggagctttaaggagcatggctagtgctctgagtaggaccgtaaccgcctccgtgcgtggcatatggtccctgcatgctgttcactctgtatagtacttagtattcgctgaggctaagaggcctcaggtgcctgggcttctgcccttggactcctggatatccagcctagtgctaattgaatgctaagcagtggtaattcaaaatgagagggtcccctgcctctagagtcatcatctaattggggacaggcagacctagataagaaaagcagagaactactttggaaaacagtttatctgctgtaattgaacattcagctaccctataacccagttaatccaatactggggataaatcctagagaaactcatacatgtacaccaggagatgtgtacaagaatattcatagcaaccctattcacaaagcaaagcctagaaataacccagatgccattgagccaaccgtggactagt

SEQ ID NO: 448521 - DNA, 864 bp, Homo Sapiens
  misc_feature (91)..(92): n is a, c, g, or t
  misc_feature (95)..(361): n is a, c, g, or t
  misc_feature (818)..(818): n is a, c, g, or t
ttgggcccccgggccaaacgaaaaggtgtagaaaagtttttcgagggccgaaggcggccgaaatgtagatgttggtataagtaacttgttnnagnnnnnnnnnnnnnnnnnnnnnnnnnnnnnnnnnnnnnnnnnnnnnnnnnnnnnnnnnnnnnnnnnnnnnnnnnnnnnnnnnnnnnnnnnnnnnnnnnnnnnnnnnnnnnnnnnnnnnnnnnnnnnnnnnnnnnnnnnnnnnnnnnnnnnnnnnnnnnnnnnnnnnnnnnnnnnnnnnnnnnnnnnnnnnnnnnnnnnnnnnnnnnnnnnnnnnnnnnnnnnnnnnnnnnnnnnnnnnnnnnnnnnnnnnnnnnnnnnnnnnnnnnnnacctagcccaatttagtgaattttaagaagcattttaaaaaaatgaaaactaaaacatagaggatatccgaggttctaaggttaagaatttctttatgaaacctgcttggaacacagttgtaaacaaatggactgatttatgatggaaggcacgtttcttgctgcagatcatggtctgaagtttgaaagccaccagcctagagggttctgaaaacttctccttcctaacacagctgaaggaaaaggggtgggtaggggcggaggcacagggacatctccaggtttggacttttccaacatgatttgcagaaggcacttgattctggaaagtagacctttggcatttcgaccctcacccacactcccacacccactctgcacagatcggtggtgcatccgaggcagggctgagttagaacaggacatcctagactcggcggcagtgactattattcanaaatggcacatcaagggccggcctgcccttcatcctgcaagggtac

SEQ ID NO: 448522 - DNA, 494 bp, Homo Sapiens
caccgcgcccggcctatacctcattttctacatgtcgcttgttggagctgctggttcaagttcccagccagccaatggatgccagcaccatttttactcccctttcccaagcaaatcgtgcatttttgtctaacgagagacatcagtttctcaggatgatcctcaagaacgttatggagtccatgttgcaataggttctctttgggacctaatgactcattttccaaaaatccgcttctacttttggtacccggttgctacggtgaaatgaaggtgccccgcatccagaaagacgcactcctggaccacaaccggcggctacctcagccccacggctctgcaggatcagggctcgggcaggccccgcggagatgaagaatttgcagggagcctccctgacttccgtcggctgtgaatccttgtctgtcaggggcgtatccacaaaatcaccaaattcatacagatcgtttaaataaatgaacatcattaaagtc

SEQ ID NO: 448523 - DNA, 1102 bp, Homo Sapiens
  misc_feature (421)..(1005): n is a, c, g, or t
  misc_feature (1014)..(1058): n is a, c, g, or t
gcagaaataaaggatcagaaggctataaacccaagtatcattagcatttatatctaggtgcagcattaagcctgaattcccctttacactttattttacactgaacgtgtatcctatgtacaatagagttaagcaatagagctgtcttcatttggagaatcaaggcagcattatcatccacatcttcagcaggactgtggttggggaccaaggggagtagggatgaagatgtccctctcagaaaccaggaagagccaagccgcgactccccgctccccaacccatcctcatttctcctttactgcctgtggccatcaccgtggggcctgtgttagagacaggtggggaaaagagcccaagagccgtctgcctgcacagagggcatcataaatgagaggggaggccgggcgcagtggctcannnnnnnnnnnnnnnnnnnnnnnnnnnnnnnnnnnnnnnnnnnnnnnnnnnnnnnnnnnnnnnnnnnnnnnnnnnnnnnnnnnnnnnnnnnnnnnnnnnnnnnnnnnnnnnnnnnnnnnnnnnnnnnnnnnnnnnnnnnnnnnnnnnnnnnnnnnnnnnnnnnnnnnnnnnnnnnnnnnnnnnnnnnnnnnnnnnnnnnnnnnnnnnnnnnnnnnnnnnnnnnnnnnnnnnnnnnnnnnnnnnnnnnnnnnnnnnnnnnnnnnnnnnnnnnnnnnnnnnnnnnnnnnnnnnnnnnnnnnnnnnnnnnnnnnnnnnnnnnnnnnnnnnnnnnnnnnnnnnnnnnnnnnnnnnnnnnnnnnnnnnnnnnnnnnnnnnnnnnnnnnnnnnnnnnnnnnnnnnnnnnnnnnnnnnnnnnnnnnnnnnnnnnnnnnnnnnnnnnnnnnnnnnnnnnnnnnnnnnnnnnnnnnnnnnnnnnnnnnnnnnnnnnnnnnnnnnnnnnnnnnnnnnnnnnnnnnnnnnnnnnnnnnnnnnnnnnnnnnnnnnnnnnnnnnnnnnnnnnnnnnnnnnnnnnnnnnnnnnnnnnnntccatctcnnnnnnnnnnnnnnnnnnnnnnnnnnnnnnnnnnnnnnnnnnnnnagcagcaccctcgtgccgaattcgccacccaggcctcgctacct

SEQ ID NO: 448524 - DNA, 881 bp, Homo Sapiens
tgcgccctggggccaggactgctgctgtcactgccatccattggagcccagcaccccctccccgcccatccttcggacagcaactccagcccagccccgcgtccctgtgtccacttctcctgacccctcggccgccaccccagaaggctggagcagggacgccgtcgctccggccgcctgctcccctcgggtccccgtgcgagcccacgccggccccggtgcccgcccgcagccctgccactggacacaggataaggcccagcgcacaggcccccacgtggacagcatggaccgcggcacgctccctctggctgttgccctgctgctggccagctgcagcctcagccccacaagtcttgcagaaacagtccattgtgaccttcagcctgtgggccccgagaggggcgaggtgacatataccactagccaggtctcgaagggctgcgtggctcaggcccccaatgccatccttgaagtccatgtcctcttcctggagttcccaacgggcccgtcacagctggagctgactctccaggcatccaagcaaaatggcacctggccccgagaggtgcttctggtcctcagtgtaaacagcagtgtcttcctgcatctccaggccctgggaatcccactgcacttggcctacaattccagcctggtcaccttccaagagcccccgggggtcaacaccacagagctgccatccttccccaagacccagatccttgagtgggcagctgagagggggcccatcacctctgctgctgagctgaatgacccccagagcatcctcctccgactgggccaagcccaggggtcactgtccttctgcatgctggaagccagccaggacatgggccgcacgctcgagtggcggccgc

SEQ ID NO: 448525 - DNA, 288 bp, Homo Sapiens
  misc_feature (113)..(125): n is a, c, g, or t
gttatctacaaaaaattatttttgcctgatgcctagagttcatattttggtaatttcatttttaacggtgcagctgttattcagatttttgttttacttcagtcctgaacacnnnnnnnnnnnnnctttccaaacggaaataatgtttcgttgtgttttttctcagcctgtctgagaaacattctaaacattctttgtgactacctattcattcattcattcattcagcagtcagcaagcatagagcagattttgtaagccaagacagtgccatgctgaacgctgccc

SEQ ID NO: 448526 - DNA, 468 bp, Homo Sapiens
taaatcaacttttattttaggttcaggggcacatgtgcaggtttgttacataggtaaactcgtgactcaggggtttagtgtacagattattttgtcacctgggtagtaagcatggtacctagcagtttttcttccctgaacttctccctccttccaccctcctctgtctcaagtacactccgtgtctgttgttcccctttttctgtccatgtgttctcagtatttagctctcacttaaaattgagaacatgtggtatttggttttccattcctgtgttaagtttgctttggataatgacctctggttccatccatgttcctgcaaaagatatgatcttgttcttttttatggctgcatggtattccatggtgtatatgtaccacttttctttatccagtctacagtggatgggcatcaaagtgactttaaagtactggcttcatttcattctaatagaaatattacac

SEQ ID NO: 448527 - DNA, 418 bp, Homo Sapiens
ttacatttggaaaaataaaactttattaaatcaaatgaatgagtatgtctgtttcctaagaaagacaatgataaagaatttggtggaaggtataataggggtttgttgactttgcttttagcctcatggtagttggtagagagcatgattagcttttttctgtatgtgactgcttcttcattgctgcagcttcagttttgaattgatgtctggactgccagcggcgtccattattccagacgcggccaaaagagggcagccagcctgcactggtcctggagctgtgatcaaagttggccccaactcggtctggggggagttttttcaacttctgtttttccttttctttaagaaattcttcataggatggtcctatttcttggttcccagcaatgtattcttcatcttggatcatcca

SEQ ID NO: 448528 - DNA, 518 bp, Homo Sapiens
  misc_feature (101)..(166): n is a, c, g, or t
  misc_feature (345)..(442): n is a, c, g, or t
ccacctcagcctcctgagtagctggaacttgaggcacataccaccacacccagctaattttcaaattttttgtagagatagggtctagctgttacctacannnnnnnnnnnnnnnnnnnnnnnnnnnnnnnnnnnnnnnnnnnnnnnnnnnnnnnnnnnnnnnnnngtatgatccaccacctccagccaaaatctcactttaagtggggtccctaactccagacatgtgataagctgtggttcacaggcataaagaacatccagcctggggccccggggtcagagttttccctcgcattgtcccctgggtccttcatccctcctaatcttgcaaaccagctgtcnnnnnnnnnnnnnnnnnnnnnnnnnnnnnnnnnnnnnnnnnnnnnnnnnnnnnnnnnnnnnnnnnnnnnnnnnnnnnnnnnnnnnnnnnnnnnnnnnngtatggagtaagttgtaacccttattattattgctgttgctgttagcaacagagtgaggaatgctaggagtgacca

SEQ ID NO: 448529 - DNA, 799 bp, Homo Sapiens
  misc_feature (362)..(362): n is a, c, g, or t
  misc_feature (523)..(620): n is a, c, g, or t
  misc_feature (657)..(657): n is a, c, g, or t
atcgagccgtgaccccccgactagcccgacaggctcacaacctcagaaacctaaactatatagcagcggggtggtggcagcagccacccacaaaaagcaagaggcaggtgaattcccagcatccccctccacccacctgcctcctctgcttctgagagttaaggtcacgccaccaccttggtccctattctcacacactagaagacgggttagcagtttggcactccatgtggaaaagtggccaacccctgcccttcaggcctggagtcccacattttccatgatgctccattaagcagctgatagcacccccacctccagggaaagtgagttcagagtcctgggtctaatgcatctgtgtngaaatggaggccttcccctgtgttcacctttctgctctttttcttttagcccaaggctatgaaggcctcattcggtgctgggcatggtcactcctagcattcctcactctgttgctaacagcaacagcaataataataagggttacaacttactccatacnnnnnnnnnnnnnnnnnnnnnnnnnnnnnnnnnnnnnnnnnnnnnnnnnnnnnnnnnnnnnnnnnnnnnnnnnnnnnnnnnnnnnnnnnnnnnnnnnngacagctggtttgcaagattaggagggatgaaggacncaggggacaatgcgaggggaaaactctgaccccggggccccaggctggatgttctttatgcctgtgaaccacagcttatcacatgtctggagttagggaccccacttaaagtgagattttggctggaggtggtggatcatac

SEQ ID NO: 448530 - DNA, 590 bp, Homo Sapiens
cgcacgtgctggccagccacctgcgcttcgtttgtgcggagctggagcgcctcatgccggcgagcaccgtctatgtcaccatcctgcgcgagccggccgccatgttcgagtcgctcttcagctactacaaccagtactgcccggccttccggcgcgtgcccaacgcctcgctcgaggccttcctgcgcgcgcccgaggcatactaccgcgctggcgagcacttcgccatgttcgcacacaacacgctggcctacgacctgggcggcgacaatgagcgcagcccgcgcgacgacgccgcctacctggcgggcctcatccgccaggtggaggaggttttctcgctcgtcatgatcgccgagtacttcgacgagtcgctagtgctgctgcggcgcctactggcctgggacctggacgacgtgctctacgccaagctcaacgcgcgcgccgccagctcgcgcctggccgccatcctcgcggcgctggcgcgggcggcgcgcacctggaacgccctggacgccggcctctacgaccacttcaacgccaccttctggcgccacgtggcgcgcgcgggccgcgcgtgcgtggagcgc

SEQ ID NO: 448531 - DNA, 537 bp, Homo Sapiens
  misc_feature (505)..(505): n is a, c, g, or t
gtagttgtaaaacagatttcattgtgttatacatcacttcataaagtaagcatagttcccattcttccacatgatgctttttgcagcattgtaccacagaataatgactccctaataactcagctgaaaaatatttagatctacttgctctaagaataaggtcaacattaaacattctcagatgaaaagcttgctggatgaaatagtgcaccatcagaataaagcatgcaatatatttacagtcagatgaaacaagtgtgtccataaatcaaccaaaagaccatctcctcctttagggaaatacatgtattgcttagccagtaccaataagttaacgtcgtgtgaataattttgggtattctggccttcctgaatctcatacagccaaaccaaccagaaggcttcccctctgggttgatggtggcttatcatttggcatctgggaaacttctcttattttgctggatatggctgtctagtgggtggcttactgacttgcctaagnaaaaataaggcaatcattcagattaatctggg

SEQ ID NO: 448532 - DNA, 1500 bp, Homo Sapiens
  misc_feature (407)..(447): n is a, c, g, or t
atcaggccaaatcggccgagctcgaattcgtcgagagcggggcgcggacttgccccagacctacggggagcgccccaggtctttaatgacagcttaaatgtggctgttggaaaagtcgaaagggatgtggctgacgtggggcgtgtttcgctcctttgcaagagtcggaaagggagttgggagccgcgcggctggccccaggcccccgcgcctcgccgccagcaagtaggtgggggagccgccgccgccgccagccccatcccgctcccaagcctcgcccgctgcgccctggccgcgggcgccgagagggtgcggggcctcgccgtgcctcctccaccctgctcattaacctgcctgctccgctccgctccgggcggccccagacacgggtttcccgcggcagcacnnnnnnnnnnnnnnnnnnnnnnnnnnnnnnnnnnnnnnnnnctccggggggcaatgagggggcagtggaaggggcactgctcctcgggcattacttagagaaacgagaccgtcccagccctctcgccggccctccctctctcccgcccgggcccgcgcaattctccgccagagggacagtcggcccaatatgtcaagacctctgatcactagatcccctgcatctccactgaacaagcaaggacatccctactccagcgcaactcacaaaatccaatgcgcctgtccacattgatgtgggcggccacatgtacaccagcagcctggccaccctcaccaaataccctgaatccagaatcggaagactttttgatggtacagagcccattgttttggacagtctcaaacagcactatttcattgacagagatggacagatgttcagatatatcttgaattttctacgaacatccaaactcctcattcctgatgatttcaaggactacactttgttatatgaagaggcaaaatattttcagcttcagcccatgttgttggagatggaaagatggaagcaggacagagaaactggtcgattttcaaggccctgtgagtgcctcgtcgtgcgtgtggccccagacctcggagaaaggatcacgctaagcggtgacaaatccttgatagaagaagtatttccagagatcggcgacgtgatgtgtcaactctgtcaatgcaggctggaaatcacgactcgacgcacgtcatcaggtttccactaacatggctactgtcagctcaactcagtccagggtcctcgagaggttgcagcaaagaggatttgaatcgtgggccctgtgggggaggagtagactcgtcccagtcagcgaatacgttcctcggggggaactgaagcggacgccccgtgtaccctcgtcaccggataaagcaagagcctcctggaccaatgggcatatctcttatgcaacatagggaaaccacacaagcaatagtccaacaaaaagggcactttttgccagttggcacagcaaaccagtccgggagtaaccgaataacacactttttccctgaagacac

SEQ ID NO: 448533 - DNA, 1174 bp, Homo Sapiens
  misc_feature (65)..(111): n is a, c, g, or t
  misc_feature (611)..(611): n is a, c, g, or t
  misc_feature (1131)..(1131): n is a, c, g, or t
gattttcgggatgcccgccccgcagggctgctacgccgaggctctgaacggggcggcacggcacnnnnnnnnnnnnnnnnnnnnnnnnnnnnnnnnnnnnnnnnnnnnnnngccgccctcgctggggaacacttacatcctccccaaagacagccaggtcgggcccgacgtgaaatccgaggctgcgcccaagcgcgccctgtacgagtctgtgttcgggtcgggggaaatctgcggccccacttcccccaaaagactttgtatccgcccctcggagcctgtggatgcggtggtggtggtttccgtgaaacacgaccccctgcctcttcttccagaagccaatgggcacagaagcaccaattctcccacaatagtttcacctgctattgtttcccccacccagggacagtcggcccaatatgtcaagacctctgatcactagatcccctgcatctccactgaacaaccaaggcatccctactccagcacaactcacaaaatccaatgcgcctgcccacatggatgtgggcggccacatgtacaccagcagcctggccaccctcaccaaataccctgaatccagaatcggaaaactttttgatggtacaacnccattgttttggacagtctcaaacagcactatttcttggacagagatggacagatgttcaaatatatcttgaattttctacgaacatccaaactcctctttcctgatgatttcaaggactacacttgggtatatggaagagggaaaatattttcagcttcccccctggtgttggagatgcaaagatggcaactgggacccaaaaccggggcgatttttcggggccctgcgagagccctgagggggcgtgtgggcccagaccttccgggaaaaggtcccggcccatcgtgggtacaattccttggatgaaaatacgattttccataaatctgcccgcccgctaccgtctatatctcggtaaacggccctgtttggtattactatttccagctaacgtccacccgggtcgcacccttagagggattgtgttcccctcaccttaaccacggttcgctctcttaactgctctgtcctctgtcggattcgtaccttctccccctccgcgcgcgtatagtacaatnttatctgtcttatgtgtaatcttaagcacctctcgttttgggc

SEQ ID NO: 448534 - DNA, 1027 bp, Homo Sapiens
tttttacaccttgaggatatcactattccaattgttcccatatgaatacaggtgtggtctctattggatataaatgtgtcttttattcgattttacgtccaggacttggtttgctgtcccaactgcacataaatgtcccttttttgtttgagttattggttgtgtgtgttttcctttttgcataagaaatatgtccatttagtccagaggctcttgctttatccggatgacggagggtacacggggcgtccgcctcagttcccgccgaaggacgtattcgctgaactgggacgagtctactcctcccccacaggagcccacgatttcaaatcctctttgctgcaacctctcgaggacctggactgagttgaggtgacagtagccatttagtggaaacctgatgacgtgcgtcgagtcgtgattccagcctgcattgacagagttacacatcacgtcgccgatctctggaaatacttcttctatcaaggatttgtcaccgcttagcgtgatcctttctccgaggtctggggccacacgcacgacgaggcactcacagggccttgaaaatcgaccagtttctctgtcctgcttccatctttccatctccaacaacatgggctgaagctgaaaatattttgcctcttcatataacaaagtgtagtccttgaaatcatcaggaatgaggagtttggatgttcgtagaaaattcaagatatatctgaacatctgtccatctctgtcaatgaaatagtgctgtttgagactgtccaaaacaatgggctctgtaccatcaaaaagtcttccgattctggattcagggtatttggtgagggtggccaggctgctggtgtacatgtggccgcccacatcaatgtggacaggcgcattggattttgtgagttgtgctggagtagggatgccttggttgttcagtggagatgcaggggatctagtgatcagaggtcttgacatattgggccgactgtcctgagacattgaagcacaaagtctctctccaagtcccccc

SEQ ID NO: 448535 - DNA, 848 bp, Homo Sapiens
  misc_feature (391)..(563): n is a, c, g, or t
aactcctgccgcatcctttttcttgtgttcacgtggcattctctaacccagggcagtggttccttcccaggccatgcacagaggctgggtgcctgccagacccacggagggttcgcgaaggaaggggcatcctccttcttgagctgcaagctttagctgaggcagtaagtcacacagtagttagttcagcctgggctggcacataagtaagtcccaagtgtccctgttgagaggggaaaagttgcctgctggttgaaaaactggcttttcctttctcgctgcctaatttcactctcagagtgaggcaggtaactggggctccactgggtcactctgagagggttgtggctctggttcttattaaaccagggccaggtgcagggctcacacnnnnnnnnnnnnnnnnnnnnnnnnnnnnnnnnnnnnnnnnnnnnnnnnnnnnnnnnnnnnnnnnnnnnnnnnnnnnnnnnnnnnnnnnnnnnnnnnnnnnnnnnnnnnnnnnnnnnnnnnnnnnnnnnnnnnnnnnnnnnnnnnnnnnnnnnnnnnnnnnnnnnnnnnnnnnngaggcctccttactctgttttggcagtatgggcagcagacagtgagactctgtttctacaaaatattaaaaaaattaattgggtatggtggcatgtgcctgtagttcccagctaccgaagaggctaaagcgggagggagttgaaattaggaatgggctcatgcagaaatatttgtaataatatttaaacgaaatcctttgggtaaaaaaagcataatataaaaaggacacctctcttcccatgtcattccatagttgctcacatgaagagagtctccgtcgaact

SEQ ID NO: 448536 - DNA, 744 bp, Homo Sapiens
ttttttactgtgttttttgctttatttattcagagagtgaaactgtgttacagtgagctaaatttttagctgtacttagaatgtgctccctcctacatttcactctggaaaagtgaagtatcttatcatttcttagaaacctggatgtgaaactagtcaatattaagatcttatacacatcctgagtgatgcccaatttaaggctttgaatagctattcatgtaagttgacttttctgtgcatttgtatcggggaggatccagttcaggttgatgtcctgggaaccagtgaggctctcgcttaaatctatgtgttgaaagtggcattttgttgttgtagcttgtatcatatgttgtttcaaagtagtgtccaaactgggaaggcaagggtttgggctgcacgatattcctcaggtcatatctttcctggttccagttgcccatcagggtacggtttgaataggtattctcattagtggtgcatcgccatccatactggaaaaacttggacatattattccaatctgtccacacttcaccatggccatctgcattaacaaggctgccacagtgtgggtttgtgaggaaacaggcgaggttctgtctctggaagagaaattttgagcagcagagacactgggaggcagccatttcagacgaggtgaaaaaaaggttcaaaaccttctgcgtcaggagcatgcgagacacagtccaacctcttccttggcctcagccccgccccccc

SEQ ID NO: 448537 - DNA, 794 bp, Homo Sapiens
  misc_feature (264)..(264): n is a, c, g, or t
gcgatgctaaaatggcaaacagcccctctagcacctcatagctctatctatggtactgaggtggcccaagtggcttctgtggtagccactgcactctccatggtactgaagggatgaccattttttttaacatctctctggggtccaaaagagtcctgtgacttagaatcacaaacttttttcgagcaggaagggactaacactataaattagtccaatccccttattttactgatgagtaaactgggaggttaagtgatttangtaaaggttgtagggttatcaatgttcagactaggcctacaatagccttgtacccttcaagtcctattctaattcaccttttgtggacactattcagtaagcctggctaaggctcttaagtccccaggaaaggatccagaggatgagagtgggtgccctaatttgaagctacagaaatacacatattaagtggtagtggaggtcggtctagtgacccttggacaaggacactttgttaattaatcatctgctaataataatcctatagcccagattccacatgtaacaggtacctgccccttcatggagttttaccacatccactaaatgtcaaaaattaaagaagccttggacctccagagccttttctctctgctgacaggcaggttgactcctggcacagttcttttctattaaagatccttaggcaaagtaatgcttgcatctttttctttctcagtaacccatttcagttttgtgatgcctattgtaaggaagttctttatatctcaaatatctaaattagacaa

SEQ ID NO: 448538 - DNA, 550 bp, Homo Sapiens
  misc_feature (22)..(22): n is a, c, g, or t
  misc_feature (195)..(195): n is a, c, g, or t
accaatgtatccggggctcccnacgcgtccttcaaccccaagcagcgcggtcaccgcggggtccccgggcgggccgggggcgccggtgacgcaggaggcggtggggccccggtgcggcgggcgcggggagggggctgctgggcgcgggcctatcaggacgcgcggtgtttcgggcgcggggagggcggggacctncaggtttcctcggggcccggcgcagcgccgcctgccgagttccgagcgagcgcgcgaagcgcgcaggggtctcgagacgtttccgccggtcccggttttcctccgcggctcccccgccccttcacgtccgcctctttctccaaccagacgcggctccgacggcgctcggcctctgctcttccggctccccggctctgccgcagcgcgcgtcgcccggttgctcttcgcctggtgtccgcgggcccggcgggggcgcctcaccccgggcgcgcggcggtaatgccgctgccgcccttgcggccaggcaggcagctggcggcggccggagtcggagcgcgttcgtcgctggccggga

SEQ ID NO: 448539 - DNA, 358 bp, Homo Sapiens
ctcctcctggagtggcaggaatgactagtgacctcccaccgacttcctccctgtcgcttgcatgattcctctgcttctacaccttcccctgtctactcaaactccggtttatctagaagattatgagtgcttttaaaaagatccaagataaagcttcaaaagaagtggcccataaaatctatacttttctcttccaaaaggtgatggcatctctcctacaaaagaggatgtaattcactcagatgtacaagatgaactggttcattctgcttgttacgtatgcatctaattagtttgaatctatgcagtaccaccaccttaagatgtttccaaaggccaactctaaactcttactaat

SEQ ID NO: 448540 - DNA, 529 bp, Homo Sapiens
ttttttttcattttaaaaaagggaaaatgttttattacgaaactagtttgtataaaacagggttatacatatttttgtaagtttgtaataaaacagtaagaaaaaaaaggcagtaatagaaatctccaaaaggcaacctatcaaaaccaactggctgccactttgagtttggacagtagctgcataaactttgttcttcttgaacagtatttaataacatcattaatacattaacaacatttctattaagtaagacacattggtgctgaagtacaactggtggcctcttgatctcacctatgaggagagttctttacaaaaccacatagggaaaattgcagttgtaaggtgaactacacatctaaaatatgcagaggtaatagcattacatgttaaagtatcaagatatacacattttaaaccatttgtacaaaacttctataaatttttctctctctttctctcttatgtacaaaaatatcttaatatatccccgaactggttaggatagatacaaatagatttttta

SEQ ID NO: 448541 - DNA, 495 bp, Homo Sapiens
aatacatctgagcctattttagccaaatcaaattttgcctgtgagacacaccaatagccacaaagaatctcaatataaatgttcccagaaatagtgtatttgtttgtttacattttcagaggcaacggaccactaaatgttttgggtttaaaaacaatgtttaaaattatcaaatggtaaaagacatcatgaccaaagcttgggagatcagtgcctgtgtggagacccttcccaaaacagcttcaggcaaaggaagcctggccccctccgtgggccgagtgagatgcttgtgtgtgcagcaggtgcctctgtggtgctgggtgaagagcagacgacagggggggctttagaagtctccctggggcctacgctcccaagggcagactgctctcctccccatcccccaacagaggggcctgtgctctaagcactgcccgctgagcccagagctgccctccaggcacccgccgtcccaacggcccccatttacttgtc

SEQ ID NO: 448542 - DNA, 314 bp, Homo Sapiens
agagttctctcttctgttggtaattatttaggatttttggaatgtattcaggacctgtagcttggttttctaaagcacctcgtaaaatgatatgattactccaagcccctctgcatgttttcagacagaacacattgacatattttgagacaaactgactattaatcttgtatccagtatcctgagatgaagtaaatgcagtgttctactgcctgatgtgaaagagagctatgtatgataattaaagaaaataattttctgtgtaacaagcaatctttatttaataaaccaataacattgttctgaaaagttaa

SEQ ID NO: 448543 - DNA, 131 bp, Homo Sapiens
ataaactggggaactggttttggtgagatttatgctctttgatttgggacaggaatagaaaaacaaaagaacatggccaaatgctgctcctttttcccagagatagaaagcatcttttaaatcatcctcca

SEQ ID NO: 448544 - DNA, 420 bp, Homo Sapiens
  misc_feature (354)..(354): n is a, c, g, or t
  misc_feature (391)..(391): n is a, c, g, or t
gacaaacatccactttaagctttattacaacacattgtctccaaatacaaagggaggggccgggagcagaaggtgcggctgtggcgggaggggctccaaggggggctgaagggccggcagcccagtctacagagactggaggctcagcgggggacctgcaccctctcctccgctggacttcccagcaaataacaggaggggccgggtccattttggggcgatcccaatgccaggcagtggccaggtgggaggggccggagagaggcttggaaaggactcagggttgggtcaggtgaaagccaccaggtggggccctggcccgcctcccgcagcactggaggaggcagtggccangtgggaggggccggaaagaggcttggagaggactcanggctgggtcaggtgaaagccaccaggtgg

SEQ ID NO: 448545 - DNA, 426 bp, Homo Sapiens
ttcacacttctcaggcactttttatttcatgctgtgcgggggccccttgtcccagatttgtggccacgtgtccaggtgtctgggggagtgggccaagcctgagagaggagggccctgctccagagatccccaggttgtccctgttgacctatagggaggtctgacttcaggcgttgccctcctgacccgtgagcagtcctgagtcgctggctcctattctgtcacacggggtgggtagtgccaaaagcagcctcctgcagcccttggcgtccggaagagtgacagccacattcaagtctccctggcacgttgaggtccatggtgcccctgactcatgtcctggctccagccaataagcccagacccccatggaaggttccagcatgtgcaaaaatgcacattggccaggtggctgccccccggaga

SEQ ID NO: 448546 - DNA, 711 bp, Homo Sapiens
  misc_feature (462)..(519): n is a, c, g, or t
ttctgtttttgtttttactggaggcttaggtggcacatgacagatcataacatggcttcagaggtaggggtccgggggaaaacaaaaatagacttgggttgggggcaagaaaagcaaccaggaggaggtaagagctggctggttccttctcagcctgagttacgggagggagttgctgtctctgaacagtaaggatggctcccttccttcaacccttgataaggggagggaagaaaaaagaaaaagcaaaaggctgctgctttggtcctcctgagtctcaaggaaaaggtgaaaagctggtgttttgatgtcatgaattatgggaaagggggagcagggtactgggtagggtacaggtcatttggaaaaactggcagataccagatggcagctctgggtgtcctctgagttgagttggaatcactccaggatggtggtggtggggtccccactgttgacacnnnnnnnnnnnnnnnnnnnnnnnnnnnnnnnnnnnnnnnnnnnnnnnnnnnnnnnnnnggggcctgctgccgtctccgctggaagtaggggcggtttcgtgggcgctggggctcaggccgggaaccatcagcgggaccttggctgggcttggtctcaccatccccaccttctgtggtaggctgctggcgtggcctggggcggaaaggccttcggtacctgggccggaatctgggcgggggactcgctcat

SEQ ID NO: 448547 - DNA, 1351 bp, Homo Sapiens
  misc_feature (208)..(233): n is a, c, g, or t
gtggtccggtccggaattcccgggatggttcgcgagccggggggaggggccggggcggtggcggctgtggccggtactggacccggcgggatgagcgaggtggaggcggcagcgggggctacagcggtccccgcggcgacggtgcccgcgacggcggcaggggtggtagcggtggtggtaccggtgcccgcaggggagccgcagaaannnnnnnnnnnnnnnnnnnnnnnnnnagccgcctcgggccccgctgctgggaccccctcggcgccgggctcccgcacccctggcaatccggcgacggcggtctcgggaacccccgaccccccggcccggagtcaggcggacaagccggtgctggcaatccaagtcctgggcactgtcaaatggttcaacgtccggaatggttacggattcatcaacaggaatgacaccaaggaagatgtctttgttcaccagacagctattaaaagaaacaaccccaggaagtttctgcgcagcgttggagatggggagactgtggaatttgatgtcgtggaaggagagaagggcgcagaagccactaatgtaactgggcctgggggagtacccgtgaagggcagccgttatgcccccaaccgacgtaagtcccgccgattcatcccccggcctccctcagttgccccaccacccatggtggcagagatcccctcggcggggacaggacctggcagtaaaggggagcgggctgaagactctgggcaacggccccgacgatggtgccccccacccttcttctaccgacggcggtttgtgcgaggcccccggcctcccaaccagcagcagcctatagagggcactgacagggtagaacccaaagagacagccccattggaggggcaccaacagcagggagatgagcgagtccccccgcccagattccggcccaggtaccgaaggcctttccgccccaggccacgccagcagcctaccacagaaggtggggatggtgagaccaagcccagccaaggtcccgctgatggttcccggcctgagccccagcgcccacgaaaccgcccctacttccagcggagactggcagcaggcccctggccccccagcaggcccctggccacccggcagaccgaagcaccctgagacctcagcgcccatgtcaagcaatggggacccgcgagcagcacacatcctggagtgattccgaaactcaacgtcagaggacacccagcagctgacatctgggtagaaggaagggagccagtccttactgtatcagagacagcaactccctcccgtaactcaggctgagaaggaaccagccagctcttaactcctcctggttgctttctttacg

SEQ ID NO: 448548 - DNA, 551 bp, Homo Sapiens
tttttaataattcgtggttacgcagtggggccgctcccccgctccaggagcggggcggtggtactgggccgcgagcagacgttgggggttggcgtgtgggctgtggcgcggctaatttctctccggtgtttacacctttattgtccggtcctcccaccacccccaaggattcctgggttcaaaatagcccgggcactgaggcccaattagccagagccgctgcaatctcggtgggtggggcccttgaggttccagccggctgggccacattccagccccactgggcgggaagtagagggtggagaagggggaagtggtgctgggaccctagcccctcagctctggatcaggagagtcagcaggagcaggaagtagactgcatgcggggatcccgaggccttggccagttctggggggcagagattgctgcctccagtgggccagtgtggggagccactggggggcaggaagttggcctctcccactgtctgggagatccaggcctcttcaggaccaatggcagcaaacagctcccggctcccttgaacacc

SEQ ID NO: 448549 - DNA, 455 bp, Homo Sapiens
ttttttttcccaatttaaaaaagcctttattcatacttaaataacagcatacatgataatttgatgagtaaatcaaactatataattttaaaatttgcatattttaaagttttatcagttacttacagactgtttgcaaaatagagggaggatcactcataatcttacatagcactgtcagcagtctgctgtcctgtgcccagtcgaatggattgacactagatatgcatgtctcatgtcattcgtatatttccgtttccccaagtcttcacctgtccccatctacccagatcatttgggaaatgtaaatgtgcagtcctaagcgctgcccgcagggtcggcgatgtctgccaggtacttgctggctggctctagacaccagcagcagtgataagaaacaaagcagaggagacagttaaatggtagagaagagaagggggagcagaggtggtagg

SEQ ID NO: 448550 - DNA, 900 bp, Homo Sapiens
  misc_feature (25)..(25): n is a, c, g, or t
ggcaaatggagaaatttctacaagncaagcactgtttacaataaaataatatagacttcaatacataagtgcttggacatagtgtattaggtatgacagcataatagagtacttacaatgaattattaaagttataatgaacaagtgtgagttgggaaaaataaaattataagccattccatacaggtggcataagaacactaaaaatgagagtttggggtggatgtatgcacaaaaactagtgttaggataataataattgaccagacttatttgtgtatgaatgaaaaagagggaaataacctttactgaactaaagacatgcctggataaattacacacagttaaaggagagaaaattagggaatgtgatatttttgctaacaggttgggccttatttataatgtagtgtcaaggaaactcctagcgtcgcaacattgggcagggtaatgacaaaacatcccagcagacatatctactatcttgaaacccttctagatgtcgagttatacatttagtttctattagtcaaaaagaccttggagacatttccttcattaggtggcaagaaagaaaagatggagaaaaggataaacttaatataagaatccacagagcagtagtttgatagatatctgagaatagtaggaaaaaaattgggtaatcccaaaataaatcagtgatttcagtatgaagttttctcaacataaatctgctataattaaaaattacaggccttcaggaagtgtcgagtctgggacgcccagcgcgggcccgagcagggggaagggaagcgcagctcggtccgcgtgggtggaggggacgtgaagccgccctgagatgatggttgaggaagggctctacggctcccaagctaggcctaacctgccggcggtcgc

SEQ ID NO: 448551 - DNA, 880 bp, Homo Sapiens
ggtggtgacgctccgagaggagcagcaccagcagcagattgccttctcggaactggagatgcagctggaggagcagcagaggctggtgtactggctggaggtggccctggagcggcagcgcctggagatggaccgccagctgaccctgcagcagaaggagcacgagcagaacatgcagctgctcctgcagcagagtcgagaccacctcggtgaagggttagcagacagcaggaggcagtatgaggcccggattcaagctctggagaaggaactgggccgttacatgtggataaaccaggaactgaaacagaagctcggcggtgtgaacgctgtaggccacagcaggggtggggagaagaggagcctgtgctcggagggcagacaggctcctggaaatgaagatgagctccacctggcacccgagcttctctggctgtcccccctcactgagggggccccccgcacccgggaggagacgcgggacttggtccacgctccgttacccttgacctggaaacgctcgagcctgtgtggggactcttcaacaacaccaatatcaggaccaggatcagaggacctcgaggaaccacatgcacaaggattattccataccacttgtaattaacacttattaaggagacaggcagcttctcacttaacaagatcacaaagatcacagggtctgataacaccagtgctgctattctgaaatgtggtacctttgttcttcttgaagttgtcaagtttatcctctagaccatccacagctgacacagaatggcttctaggcaacccccgctttagtgatctctttgaaggggaaagcaattcctggttgaaaagatttcttcgaactttggtcccttctggaagcatcaat

SEQ ID NO: 448552 - DNA, 629 bp, Homo Sapiens
ctgtcataattttagtgtttatgtagcttaaaaatggcatcatacaaaaaacctcatacatggctgtaagctcaattatcaacagaggtagtaaacaaaggaactcctaagaatcgattttaaaatgatcaaagtgtgactatacattcaaaaccctagagccacataatcatccccaaaatgaactgttttaattttaaaaagtttaaaaacacaatgacaatgaagcactgatatgccttaggaacagtcccaaatcagtgctgacttaaagctaagtcctctctttccaagaaaaagaaagcagagaacaaagttcaatctacaatgggagggaacagattgaaaacaaccaaaagggtgctttccagcagcctaggttattctttgttttcaggccacaccactggaaatgcttttcttcttatataagtcttttcctcacaacctttattttttaaaaactgccatctgctgaacaagagatgtccacatttccaccagcaggtgatccacttctgtgcacagtttttgcttcctcactgtgagtcctccttccccgaaagtgcaaagagagcaagctgattcctgcaggccccagagccccgggcttttcagctccactttta

SEQ ID NO: 448553 - DNA, 517 bp, Homo Sapiens
  misc_feature (304)..(314): n is a, c, g, or t
tgaaatattaaatcaagtctttcttcctaccaaagtagaaatacactttacagaacatacaagtgagaaggggtgaagagagtgaaattccaaaatcactctagtttattcacataatatagtatttgattccattcttttgtactgttccctacttttacaatgtgtacaatgtttcaccatgttccaattaatggttgagctttaaatgaaaatattctggatcttccatttattggtatcaaccacaatagcaagacccccaagaaatacttgatctaaactggggagggtccaacacaannnnnnnnnnnaatggacttgccaccttaagaaacttcaagtgtatctttttgttggcaagaaaattatttcccaagaggtaatcagattcccctccctgcccccgctctttcaaccaaccctcctcctaacatacacatacagagttacacatttcatgaaactgaggccaagtccactgcaagcagagtcttaacattttcagaaatgatcc

SEQ ID NO: 448554 - DNA, 750 bp, Homo Sapiens
  misc_feature (130)..(146): n is a, c, g, or t
  misc_feature (567)..(567): n is a, c, g, or t
  misc_feature (602)..(602): n is a, c, g, or t
  misc_feature (620)..(620): n is a, c, g, or t
  misc_feature (666)..(666): n is a, c, g, or t
  misc_feature (710)..(710): n is a, c, g, or t
cataagagtaaataatcaaaagtagaaaataaaaggggcatttcattagaataagatgttatcatggataccatctcccatgatactctcccctccccctccccaaagcagggccctgccctgttatttnnnnnnnnnnnnnnnnnctttgtaagtgccaaaggttgatgcgtgaaataattaccatttttttctcataaaagttatatacaaaatggaccccaaccagtgaggcctcctcatctcaacccacatcagtcaaaatttaaacccagttagtgcacgtgcttcctctggcgtcgcgggctgcatccgcctcaggctctgttcagaagggtggtcctgagggtcttccagctgtctttttccatgtggttctcgggaccctcactttcaaaggaggcgacgaagagagcttcctcgctgtagatgggcgccgtgagcaggtaactctgaatcttcttgtccttctcgaaaggacactctacctgtgtccatgtcatgaactcatggatctgtctggagatctcccagaatgtcttaaagttaatgtgcccgttggagagntgggttggtatggattttgtggcaggaagtagatntccttaacgaagaggttnaacacagggatgacgatcttttcacggctgctgttggccatctggnacctttgcgtggcccctgcaggctgtacggtagtgcagaagttnctggacgggtcatgtgatgctccaaggcatcaacttggct

SEQ ID NO: 448555 - DNA, 472 bp, Homo Sapiens
tttttggatcaagatcattgctttaatcgacatcaaatgattaataagttaataattcaaattaatacatttgaattaatatcaataattaaatcatgtctattaacagacattcaaacacaagctttaataggagatatcaaggcacagggtggagggagggggttgctccagggaattctgaatgtcccagttcatgcagaagttcaaggtgtcttgtacaacccactggggaaacaggatctgggaccggtgcgggcacattctcctggcccagcacaggggcggtgccacccacattcggcccgggtcttgcctaatacatgttttggtaaacactcggtcagagcaccctctgttttttccagtcccgaagctccccgcaggaatccacacccccgccccacccctctcgggacacggattcaatgtccctggtgggtcatctggccttttcggcctgtgatgtgat

SEQ ID NO: 448556 - DNA, 581 bp, Homo Sapiens
tgtttaagaaatattatatttctaatatccacacttaaacgccaagcgagtgtgcggttgggaagtacaggtgtaatataatctggtggataagccctgtaaggcctgagtacatcacatccaatgagggagggacgttatgctgagtaagcatgcatcgcaggtgaaacgaaaggtgctccacaagtctgtacatgatgtgcctctctgcccttctgaacttgttcatgtaacaagtcactcagtcccagtttctttgttcaatatccttaaatcttggagaggccactgtttcaatgagtacagctatcagcataccacagggatggaagttgctttgtggctgcatgcgagacagttcaaagccaaatcacgtccaggcgggatgaagtaaacctggaccgaggagcctgacccagctgcggagctcacacatgccccatagggacggtcctgccatatacacaaacagcacactcagcatgtgtgcagaggcaggcaactcctgagcttggttctcgcggggtgggggtgaacaatatactttaatggccaagaagatcccagctctctgcatgaga

SEQ ID NO: 448557 - DNA, 540 bp, Homo Sapiens
  misc_feature (29)..(29): n is a, c, g, or t
  misc_feature (55)..(55): n is a, c, g, or t
agttgtttggctcctgggttagtgcctanatgggagccgttcatgcctgcaaaanaatgcaatggcctcgttgacgggtgtgcatcctaagagtaacctgctcccacagggtttgtggtggggagacgactggttaactttttggaaaggccaagctggcgtctttctaaatggcatgtgtggtggagtgttccaccacctagaaagactggagtaacgatggagtcactccagaaggtgagagctctgcaactgagggcctgcgagctctgttacgaaggaaatcgaaagctgcaatgggcctcgttaggatgctgttagggtttaggagggtcctggcctcattgcacaccctatcctgggtgtcccagtcagagacacacccacaatcacgctccctggcatcatgagggtagagggaggagctctctggatcaactggagcaggaaggggcactgtggacaggtgtggctggtgttggcctgattctggcacattcccaactctggggctccttcacagaaaaacttcagtgcaaa

SEQ ID NO: 448558 - DNA, 495 bp, Homo Sapiens
ttaacgtactctgcagcttcattttatttctcaagaaattccctccgccgccccatcccatagactaggcctttaagaaagtccctcttacctcgatctggaaacgagctccgagggccttccccagcctcaactaaactttaccggggtccccctggccctggctcacctcgacaccgttaattcgctcgtctcctttaggaaacctttccagactgccccccggcgggaccgcagccatcccattacccgggagagcccagggcccagatgaaggcagagagcgagggcgcccagagcgagccgaccgactgccgccctcccccgcccgagtgaagtcaggcagtggctgcagacacggctgtattgggaagcggaggctcctacacagtaggagaggcacgtcccagacccaggaggcccgaggactctggacacagcgcgcgcggcccgcccggggcacagtctctgggggagccccgaggggcgagttaa

SEQ ID NO: 448559 - DNA, 550 bp, Homo Sapiens
ggtcattgccatggtgacaattaggctgggaaggcgcctcattaaggtgcggttttaacaaggccagtcgtttttaacctgacatccacgtgaaagagggatttttcaagttgcttccctttcttcctttgttgtatttcagatccatttctagacacttcctgttgaacaagacagaggagaattcctgggttgagtccccctgaaaaatcaacagggcaacaggtttcttctctgtggtactactctggcatctgaaaggaggcctggttggcagaggcttggagagggagggggagggttgaggtcatgaggtcagaggaggaggtgaggaaaggactcatgttgaattttattcaacatggaactggagaccttttctggtcggtggcagggacagtgtggatggcagtggggtcgggggtagtgtcaggcctgtttctcccaagttgaagggaggaggaagtcaggaggctcaagccctgtcttaattcagagcactttgaaaagtatctatttttttcttatttccataataatacaaaaattg

SEQ ID NO: 448560 - DNA, 154 bp, Homo Sapiens
tttaagtattattgctacactaagaaaagagaaaatgaaatcattaaaaatgctcaattaaaaacacaactggcagaaaaatgagttgaagagaaaaataggcagaaagaacaagagcaataagtagaaaacagtagcaaatatagtagatatt

SEQ ID NO: 448561 - DNA, 502 bp, Homo Sapiens
gagactctcccgaacctttaaattgagtttcttagggggctgtatactagtttctcttctctttttctaagctatctcattcatgcctatggctttaactaccatctataagactcctgtatctataaatgcagttttacagtcttacctgagcaccaacctgtgtttactggacaccttacccttactgccccacaaacacctcaaaactcagtctatacaacattctgtttcttcaaaaactccccaccttccttctacagtctccccgtcacccccatcttgactggcagaatgtcccaacacactcctatggtcaaggagaaacctgggagctaacctctactcctgtcttctcctcccaccagccatcgagtcctattaattctacctcgtctctcaaatctgtcccttcctccctatattcgttgttgtagccttattccactccctcattatcttcctcctatgccagggaagatttgagagtctccgtcgaact

SEQ ID NO: 448562 - DNA, 484 bp, Homo Sapiens
  misc_feature (307)..(307): n is a, c, g, or t
  misc_feature (329)..(329): n is a, c, g, or t
  misc_feature (399)..(399): n is a, c, g, or t
  misc_feature (405)..(405): n is a, c, g, or t
  misc_feature (414)..(414): n is a, c, g, or t
  misc_feature (427)..(427): n is a, c, g, or t
  misc_feature (433)..(433): n is a, c, g, or t
  misc_feature (451)..(451): n is a, c, g, or t
  misc_feature (459)..(459): n is a, c, g, or t
aataacagctttattgagatacaattcataccttacatttaaaatgtacagttcagtggatttgaatatattcaagagttgtgcagcctacaccacaagctaactgtaggatattttcatcaccctgaaaaggaaccctacacccattagcagttactccattccatctacagccaggctaggcaaccacttatctttctggctattctgggacatttcgtatgaatgggatcatcatgtgatcttttgtgacccggcttctttcacttaaacggttttcaagggtttatcccatggtttaagtatnataataaagtccttcggtttcntttttaagtggccaaaataatgggctatggggcatgggggtaagaagtgctaactccatacagcagctgntttccnccttttganggactgaccgtcnggtttnccgaagtggctaaaccanttttacantcccaccagcaatgtatgaaggggt

SEQ ID NO: 448563 - DNA, 1153 bp, Homo Sapiens
  misc_feature (365)..(365): n is a, c, g, or t
cattcatctatctaacatttattgagcagttccacgcaaggtttattctggatgcagggaacatggaacaatcagatgtgggcttggcttttaggaggtcctgggctagtagagaagaaaaacatcctttttcctcaaacatgagctatttttcctagtttcctttgaaagatcggaccgaaagtcaagttttcgtggtttaggctcacccttcaaaacacccgaaataacttttgcagaaatcttcctcatgttcaagttttctttcaaaatgagcctaacagtttctttgtctaaatttaactcttcagccatcatcctcacggttaactgcctgtttgaacaaaccaagtccttgactttcntggatattgtcatctgttcggtggttgactgggacgcccacttcggggcatcatctcgaacatcttcccgtccttctttaaaccttttgtgccagtcaaaaactctggcccttgacatgacttcatccccataagcttcttttaaaagatggtgggtctcacttgcagacttgttcaatttcacgcaaaatttgatactaatcctttgttctaaatagcggtcactcattctggcactgaacaacacaggaacgtttaacaggccacgactgtaagggaaagacggacagatcaatctttatagggctgcaggtgtaatcatatcgctcttcttgctcttctagaagcctcgccgggaaagagtaattgcttttatgaatttttgtccctcagcttccagtcgaggctggggagatccgttctgggaagccaacagtcgctgcaaagctgggaaaaattaaatcgcctacaaccacgtctgcatcaaaccagtgcacgcacatctgccgagagtttgccagtcaccaaggtcgctccgattccgcggcccttaaggagtatatggcgaattctgcaagaaaggcctaagtggtggcaaattaagcaagcaagaagagatgcatcggtgatgtaacgtgcaagctcgccctagatctgcagaaacccgcgcacgccaaacctaccggagcagcccaggaaccgcctgctctagcgtcccgggagacaggcgcgcatgcgcaattctctctccccgcggattagactgtgcgcagtcgcactgcggcccc

SEQ ID NO: 448564 - DNA, 1085 bp, Homo Sapiens
aaaaggtttccccttgggttttcccaagccccaattcaaggattaattggggttttgtggtgggaaaatgggcctgggaattctcccagccccttggctttttcactgcccccaaatcatatgctcgaggacactgtagaactccctaccccactgccattgttcagcagatgggtggctacagggaatgacttgccccaagcaggacagctgagattgccagaagcggtggcggcgtgaaatgggaaacacagagctggagggaccagaggaggcgatgagaatcagcggagagccagggagtttgcttggtttgttatgagaaagcacacccacagcagggtcccagggcctcttcagtaggagagacaaggcctcagctcctgcagccccagtctttgtgttggatgacacaagcatccggtcaatcaaggttgggatcttccccttcagcgtctgcaaagcatccaggtaggctgccagcatgggcagactcaaggtctccacaagggtggtgtgcagccactggatcagcttggtatcccagctcacacttgccagagcctgccgcactctccttgcacacttgtccacagcaacacggcgcagcactggctcattacaagccccttcgttggccaagcgggcaagccggtcagactgcagggctttgaggatcttgttgaatagcttgttctgggccattgtccagccagtcctgttgacatgctcctcccagtcctctggtggaggaggggcttctgcatcagtcctggcaaagatgacatgccgttcacactcattcatcacgctgcgtgccttctgattgtcatagagtggcataggcgttgatgtgaccgtctccacatctattgggacgtctgattcacttgtaacaggtgaggaaataggaccgggccacacatacttcacatgtatttaacaatcatctggttgacaaaaaatgtatctttaatacagtcagctttaaattacgcataagcacattatattcacaagaaaattttgatccaaagtcatctttcccacacttgtctagatctctgccctctcagacatgatgg

SEQ ID NO: 448565 - DNA, 540 bp, Homo Sapiens
ttgcactggacaataactttttattttttatagtaagaagtcgatgtaattaacattccattttaaatgaattcaagtatatcaacataaacatatgccaagacatagctttgatgtcaaataccatacgttctggttcacacattgttcatatattgacccaaaaaactgaaatacgatccaatggcagatccgcctgcaaggaaggtgattcagttttcactgattaagctttatgttcatcagattaattgctcgcaatagaggacaccctacaaaaaattattctccttatccttcgtcttgtctttgcaaacaggactttcaaacacagaacgccccagaagtatttcgaaacagttacctctcctaagaggagctgctgaaagaatttgttactaaacatgcttcgtgtatattctggagcaagctctcacgcctaacagaaacaagagctacttgatgtgagacactttgtcacttaagtgtgataattgccacaacttcggagtccgagtaacttggaagacagcccctctg

SEQ ID NO: 448566 - DNA, 1237 bp, Homo Sapiens
  misc_feature (65)..(65): n is a, c, g, or t
  misc_feature (531)..(558): n is a, c, g, or t
tcaatggatttgatgctgtttgacaaagttactgattcactgcatggctcccacaggagtggganaaacactgccatcttagtttggattcttatgtagcaggaaataaagtataggtttagcctccttcgcaggcatgtcctggacaccgggccagtatctatatatgtgtatgtacgtttgtatgtgtgtagacaaatatttggaggggtatttttgccctgagtccaagagggtcctttagtacctgaaaagtaacttggctttcattattagtactgctcttgtttcttttcacatagctgtctagagtagcttaccagaagcttccatagtggtgcagaggaagtggaagggcatcagtccctatgtatttgcagttcacctgcacttaagggcactctgttatttaggactcatcttactgtacctgttccttagaccttccataatgctactgtctcactgaaacatttaaattttaccctttagactgtagcctggatattattcttgtagtttacctctttnnnnnnnnnnnnnnnnnnnnnnnnnnnntccccttcctcactgcccaatataaaaggcaaatgtgtacatggcagagtttgtgtgttgtcttgaaagattcaggtatgttgcctttatggtttcccccttctacatttcttagactacatttagagaactgtggccgttatctggaagtaaccatttgcactggagttctatgctctcgcacctttccaaagttaacagattttggggttgtgttgtcacccaagagattgttgtttgccatactttgtctgaaaaattcctttgtgtttctattgacttcaatgatagtaagaaaagtggttgttagttatagatgtctaggtacttcaggggcacttcattgagagttttgtcttggatattcttgaaagtttatatttttataattttttcttacatcagatgtttctttgcagtggcttaatgtttgaaattattttgtggctttttttgtaaatattgaaatgtagcaataatgtcttttgaatattcccaagcccatgagtccttgaaaatattttttatatatacagtaactttatgtgtaaatacataagcggcgtaagtttaaaggatgttggtgttccacgtgttttattcctgtatgttgtccaattgttgaccgttctgaagaattctaataaaatgtacatatataaatccaaccacaaaaaca

SEQ ID NO: 448567 - DNA, 471 bp, Homo Sapiens
cgctacgtggagagcgagtcggacctgcggctgcagaactgcgagtcactcacgtccgacagcgccaaggactcggacagcgcaggcgaggcgggcgcgcaggcctccagcaagcaccagaagcgcaagaaaaggcggaaacggcaaaatggcggcaagcgccagccgccggcgccttgtccaagcgcgtcgagcccaggcggcctggacgcgggccttggtggagcccccgcggctgctgtcctcccccaacagtgcctcggtgctcaagatcaagacggagatctcagaacccatcaatttcgacaatgacagcagcatctggaactacccgcccaaccgggagatctccaggaacgagtccccctacagcatgaccaagccccccagctctgagcacttccctgtccccgcagggcggcggcggtgggggtggcggtggcggggggctgcacgtggccattcccaact

SEQ ID NO: 448568 - DNA, 874 bp, Homo Sapiens
ttttttttgtcctcttgcacttgctttgcagaacctgcctcccacacaggggcagccacctcggggatgggtgactcaacctctcttcccggctggcttcctcactgccgtggagactcaggtgtgtgagggctcgtccaggctgcagctggacagagtggcagaggcggctgaggcttgggcagccaggtcccggtaagcaggcgacttcaggaagcgtgggtaggagtccttctccatcagggtacgtgtcttcccctgagccgcatcaaagcatgtggctgtggcagtctgcaggttcatcctcgtcagctcgcgggtctcatggtcaatgttgacctctttaggggcctcactgcaaatgaactcctcaaagatctggtgtgccctggaggccagcttggtagctgatcggatcttcttgaactcctcacaggccagccagaactccaggttctcctcactgaactctgtcttcaggaaagcgtggaaggcagccactccatttttactgctcagcagcaggtcgaacgactctctccaccccagcacatcttctgagaagtttctattctctttgctgtgtttactgccccactcgaacttgccagtactcccagtatcgcagcccagctctgatttgtgaagaaagatccccagacgtgtcttgaactctttggctctctccaggcaggtggtggggaaggcggccagggtgcggcacatggctgcgggcgcagggcagcacgtagtaggcaggatggtggcaggctccaggaggctccgcgtgcgccaggaagcaaaggcgcggtagcaggtgctagtcaactgcggttgggtttagcagccatcccgggaattccggaccggtacc

SEQ ID NO: 448569 - DNA, 737 bp, Homo Sapiens
  misc_feature (562)..(584): n is a, c, g, or t
ttccttttacttttatcgtattatatcattccctccagttgtttctctggctgaacattatgcctatttcgccagtttcttttcagaggttcccagttacgttgataaatatccttgttgagttacctctctcctcttatatctccatgcatatcccaagtctttatctcgcctgagatagcttccacatattatgccacctatatttgggttcttacactctttcatcatgatcattttctgctgcaccactgcaaagtcttctcctgtttcccatgttgtattactttaattgctgctaattcaccagttgttaacattccgtgccttgtagacgtcgccgtaggtgccgctgccgatgcgctgaatcagctcgaagtcctcctgcggtttccgtcggtgacaaaatcgaatgccggggttcatggcggtgccccaggtgccccccgcctccctcccgggtcaggggagggggtccgctcagggggccacacggagagagggcgccgcggccggctcccggctcccccggcggtcacaatcacccggctccacgctgcgnnnnnnnnnnnnnnnnnnnnnnntcccctcacgccgctgcggacgacgacaagcggccaatcgtccccgccccccgcggcccgccgccgcgccgaacctggtcacacccacaaggagaggagaaccctcgcagcccctcgctcggggtgaaactccaacatggcttccgctccgct

SEQ ID NO: 448570 - DNA, 1388 bp, Homo Sapiens
  misc_feature (948)..(993): n is a, c, g, or t
  misc_feature (1006)..(1039): n is a, c, g, or t
tgtcaacaggtcccgctgtgttggtttgagccacctggtttctgctcatgtgcctgcttggaccacgagaggtggcagtgcccaacgtgcgccacatggctgatgcaatcgatgtattctgccccctgttcatcgtaacatgtactgccctggggcccggacaatcttaacaggatccctcgggaaaaaagagtcctgcaggaagagcttgtctgctccactccacaggtggttgcaaagcaggaagcagattggggtaacaagtcgctgaaacttcggattgtttctgaaagcattttcagcctctgtggcctccttgctcatttctgcaatgtgtccgcgtcaagtctcccggatcctgagaaaaggtggctgccccgtcccatggggactccataaggccgcgtgtcttcgatgggatgggacagggcaccaaccttaggtgcctggctctcagccctaaacagctccttgccagccacgtggtcctgctgcccctcgctgggtgccagccctaagctccagtgggaggcgacctcacccaccgtcccaccgagggccccctcacaggtcaagtgtgctgcctgtgaaccgactcccccgactctcccttgtctgccactttcagccccctcaccaggtcactctcgagccaggcccaggtgctgctgacgggccaccctgggtgaggtcctactcaggcgccagggtgaaggtcttctccggagtaaaaggctgcacaagcgaggctgacacagccgaacagcggtgagggcggggccgtctcctgaactgggcggcctggagacggcgcatgtcggggaggcggccccggagaccacccgccgggactgcccaacggcgccgcccgcctcgggccctagaagctccaaacggggccggggcagcggccggacgggatgggtagcagcggcttcctagccgagnnnnnnnnnnnnnnnnnnnnnnnnnnnnnnnnnnnnnnnnnnnnnnctctccgcgcagnnnnnnnnnnnnnnnnnnnnnnnnnnnnnnnnnnggtacctgatgagccgttgcctcagggccagcggtgtcggccttcgggcgctggtctgcggccactggtgtggtaggccgtcacttcggtgccgtgaccgcacagcggagacgtcgccgcgcgggctggcctgccaacggccccagctcccgggccccgcccctgccgtgggtcgggatcttggggactcacggttcgcactcggccccgccccgaatgcgacccgcattgtcgatggttcatttcttcgacttgcccaactcgggcctggcagccttccggcccgtgtcgtgccttgtcaagtcccgcgcagaactcgagcatcccttaattccggccgtacgctgcc

SEQ ID NO: 448571 - DNA, 1093 bp, Homo Sapiens
  misc_feature (865)..(916): n is a, c, g, or t
ggaggttgggaagggcccccagaaagtgttttggccttacccgggccaaaagcccaaccctggtatttccatttgcaaccaaagaccccccttccggcctgtgcggatggtgctctgcccacttggagaaagtagccagccagggggaatgatctggccctcccacactggggcagagactcagcgaaggaaggctgcaatcttcctggcccttttccctgtgcactgctgaccacacgtttcaccctcgttggcataggccatagctgggttggggtggtcctcccggtaggggcccccggtaggtgtctgggagaggtgccacgtggacccactccttctggccatccaggttgcggaacttgtagggactgatgtcaatcagggagctcaggtggccgtgatacgcatgatctaataccaccacgtcctggtgtcccgtgtagtggcgagccagcctcagggccaggtcattggcttctgacccagaattcaggaaatagaacacacagagctgctccggcagggtctctgacagcctctgcgcatagtccacgatgttgtcatgcaggtaccggctgttggtgttgagcacctggttctgctcatgtgctgcttggaccacgagagggtggcagtgcccaacgtgcgccacattgctgatgcaatcgatgtattctgccccctgttcatcgtacatgtactgcccttgggcccggacaatcttaacaggatcctcgggaaaaaaagagtctgcaggaagagctgatgagccgttgcctcagggccagcgtgtcggccttcgggcgctggtctgcggccatggtgggtggccgtcagtcggtgccgtgacgccacgcggagnnnnnnnnnnnnnnnnnnnnnnnnnnnnnnnnnnnnnnnnnnnnnnnnnnnncctgggtcgggatttggggctcaggttcgcactcggccccgccccgaagcgcccgcgttgcggtggttcatttcttcgcttgcccactgggcctggcagccttccggcccgtggtcgtgccttggcagtcccgcacaggaactcgagcgctgatcccgggaattccggaccggtcca

SEQ ID NO: 448572 - DNA, 1168 bp, Homo Sapiens
ttgggagaagtaaccaacaggggaatggatttgccctcccacactgggcagagacttcagcgaagaaggctgcaatctgttgttgaattgggcagtgcataccacgtggacccactccttttgggccaatccaggttgcggaactttgtagggactgatgtcaatcagggagctcaggtggccgtgataacgcatgatctaataccaccacgtcctggtgtcccgtgtagtggcgagccagcctcagggccaggtcattggcttctgacccagaattcaggaaatagaacacacagagctgctccggcagggtctctgacagcctctgcgcatagtccacgatgttgtcatgcaggtaccggctgttggtgttgagcacctggttctgctcatgtgctgcttggaccacgagagggtggcagtgcccaacgtgcgccacattgctgatgcaatcgatgtattctgccccctgttcatcgtacatgtactgcccttgggcccggacaatcttaacaggatcctcgggaaaaaagagtctgcaggaagagctgatgagccgttgcctcagggccagcgtgtcggggttcgggcgctggtctgcggccatggtgggtggccgtcagtcggtgccgtgacgccacgcggagacgtcgccgcgcgggctgggcctccaaggccccgctccgggccccgctcctgcctgggtcgggatttgtggctcaggttcgcactcggcccggccccgaagcgcccgcgttgcggtggttcatttcttcgcttgcccactgggcctggcagccttccggcccgtggtcgtgccttggcagtcccgcgcaggaactcgagcgctgccccgtctctggttccgggacgcgccccgggctcgccccgcaggccccgccccgaggcccctgcgtgctcccttccgggaaagggtcccggacgaccccgccctgctcccggcgcccaggcggggctcggagactcctgcaggccttctctgggccagactcagtctttgagtcgccttgtgcataaaatgggatgaactgtgagggctaagtgcgagtatgtgactggtaccttaccgggcctgtacacagtaggggcctcagggtgggagaagcaggtactagatataccaaccccaatgaagggcaccaggaaa

SEQ ID NO: 448573 - DNA, 551 bp, Homo Sapiens
  misc_feature (367)..(375): n is a, c, g, or t
acattaagcttacaattttattgagcaaaatttatttttatatgtacatacaagagacatattctttgacatataaaaaatacagaaatatttacatgtatacaaaaatattaaaacagatttcagaaataaggaaaacaagcaagtttttacaaaggatactttcttgggaaatacacacaatgaaaaaaagctttagaaaggtgacaacacatttaatagactccagaagttgatatttctgttggtatcaattgagtaagaggaacataaaatgtctgaaatgctaacagatggaaaaccagacatatttaagactgtctaggtaaaattgcatgggtttcctttaccataaaattgaatcaannnnnnnnnaccctcagtatcactatctacttttccttttttcttaaaatatttaaattgtttgatttgtattgagaattttaaactttttctcattaaattgtaaaaatattttaagaggttgtctatcctctttatcttctggggggaaaaaaacctcaggatactacaccgatttcaacata

SEQ ID NO: 448574 - DNA, 822 bp, Homo Sapiens
ttcctaaaccctaccaggttccccctcaaaggaccatggaggagtctccatacggttgttataagtggtccacaacctaccaacgttttcgtggggcatcacaagatccctatagggtagtattaacccatttttcaagaaggaaactatgtctggaaattgtagaatgcacattaaaaactctttctgacgagcgtttctaccggatccgatgttacccaaagtacaaaattaaagaggggaagtcaatcacaagatttcattgaatcttcagtatcaggcaactggcttctattttatggccgcaaataactatatattgggccccttttctcacctgtaaaataggaacgaaaagaccttctccacaaataagatgaaataagaacaaaggctgagggtgaacctaccacgtcgtagggcctcaaataaattccttctccttcttgcccttgacagagatagcacgagatatcactaccattcccacttcacacgtggaggaaatccaacgcgagaacgctcggatttccccttctttacttgcaacaactccgtaacccgcaaatcggctacggacaactgcgatgtccactatgttagttctcgtagcgtggattctctctcctcaagatgccatctggggggctagaggccactaataattgccctcacgatcgaagaaactcgatcctaatcctcgacggcacttcaggaacaaagctgctctcccatcgtccctaacctcactaccgtaaaggtcgcagcagagcccctgctccaaccgctcctcgtgccgaattcgccacccaggcctcgctc

SEQ ID NO: 448575 - DNA, 530 bp, Homo Sapiens
ttttttgaacacttacatccatttatttgggaaattgcttcacctgtaaactcacaactgataaggcacattattgcaaaactgtcggggtggagggagggaggcaactctaaggatcctgaaaaggggcaaagggcacacacttgcgatgatgtggaaaacatgtttctccttccctccccctactccagaacaccaaaggccacagtcttcaaagtctgctgcctccttcccccactctcgttatcaaggcttcttttaaagaaacacgttttaaacaatgaaatcctcggtgtgaaaggatcataccataaccaaaaaccatcacctggggatgcactcttcctatggaacgtgagtaattcccaagaattcatgtagaacaagaggcatagattaaagtcttggcaagactcttggccaaaccaaatcatcaacccagcagatgatgcccaaaagcagcagtctggtaagtcctgatgagttactcctgtggggtgcaggatcacagggctggtcagtttaggtgc

SEQ ID NO: 448576 - DNA, 444 bp, Homo Sapiens
  misc_feature (186)..(186): n is a, c, g, or t
  misc_feature (410)..(410): n is a, c, g, or t
  misc_feature (426)..(426): n is a, c, g, or t
gaacacttacatccatttatttgggaaattgcttcacctgtaaactcacaactgataaggcacattattgcaaaactgtcggggtggagggagggaggcaactctaaggatcctgaaaaggggcaaagggcacacacttgcgatgatgtggaaaacatgtttctccttccctccccctactccagnaacaccaaaggccacagtcttcaaagtctgctgcctccttcccccactctcgttatcaaggcttcttttaaagaaacacgttttaaacaatggaaatcctcgggtgtggaaagggatccataccattaaccaaaaaccatcaccggggggatggcacttctttcctatggggaacggtgaggtaaatttccccagggttttcatgttagggaccaggggggccntaggtttaaagttttngggcaggtttttttgggg

SEQ ID NO: 448577 - DNA, 869 bp, Homo Sapiens
gtcccctgccagaggccaacctagcttgggcaagtcctccagtcctggccgtagcccatggggaagcggggccggggcagcagggaggaccatgctgccacacacaggacccagggtcctgggacaagtctgcttggagatttgaccaacaagagggcaggaccagcgtactgccgcaccgcaccaagcccagctcagttatcctgggcagctcggcggagctctcaccgcctcgtggtcatgggggaaactgaggcacgggaggtcacctggcaagcagctcgtcctgccttcccgcggggtgctgtgtggatgcaggagcagcaagaggtgcgctcactgggtctgagtccccggggtctcgtgaggccggccctttcttcgccagtttcactttgattttcttgctgccaaacccgctttattttgcagataagcaaaagggtcatcgcatggcccgaggtggtaataataccaccaacagcacaacagtacgtcaggcacctggggggcactgctgggggaaggtcctgatctcaccaagttccccagaactccagggtcattcccatcgtgcaggtgaggaagccacctgccccagagccagtgagaagcagcagaagacacagggcttggccctacactgctctgctccaggacggcctacctgcgcacccacgtgccccacccctctcccctgagggctcctgcccccctgggagccccacagctcccacagcccatcctggagacacagtccatgcttcctctagaacacaggggacaccagaatgagaggggacgccggggacgttagatgatgcctcggaatggcagatgggaggtggagggacagccagctccccctt

SEQ ID NO: 448578 - DNA, 707 bp, Homo Sapiens
  misc_feature (642)..(642): n is a, c, g, or t
  misc_feature (644)..(644): n is a, c, g, or t
  misc_feature (661)..(661): n is a, c, g, or t
gctggtccggtccggaactatgggatatcgtcgacccacgcgtcgcgcagtgccccccactgctctgcttcagtctaaacagcagtctgtgtgtaggtgtgtggaggtgcatgtgtgtacactggacacacagacgtgccatcttcccgtttctagtgccatgagctttcacatttgagcctcatggctgtcctgtgaagacactagatcaccaaacaagcattactgtccctgttttatagattatgaaattcatgtattgacttgttcaacattacaaaactagtgaaggcagagggaggagccaggactcaacctgggccatttgccttaaaattcagtgcttttcccattgcctcggacagggctgctgaccctccccctcaggccactcatgctgactcatgtctccacccatgcccagggttgagagcaggccttgactccacttcacctggtggtccccggggtgtccatgagggccagaccatgagcctgttaggttcttctcacgggcttcagctctccccaagtcatagagtgtcgatggtagagcttggctggaacttaggtgcacctgactgtttgtcactccctgctgctcatttagtcctcgggggaggggtggtggtggtacccatngngggcacttcttgcctgnggtggaagaaatcaggatcacgaagcgctgctgcccgtcgccactg

SEQ ID NO: 448579 - DNA, 459 bp, Homo Sapiens
tctttgaaacatagctaatgtttaattatatgtttgcagaagatttggcttattattccaaatcctaatagtttcaaaccaggactttgcttacgtgttggtggtgtagaccactatttatgtgtgtggtgtgatttcatgacaagagtccatggccctcagaaatctccctccatgcttgctgtgtctgaaacgtgaaactccatcatggaaacagagtttcgagccggttaaaaatcacattttctaggaaaagtaaaaaattaaactgttagctaaattcttcatggtttatggtgaacacagtagacctctccaggcaattggggtttccccagagttgccacagtaattagagataaaaatagccggagacctatctggtcagttttattttccatatctcttggtgtagccccttggcagtattacacaaagaggagggtggagtggaaggat

SEQ ID NO: 448580 - DNA, 603 bp, Homo Sapiens
  misc_feature (50)..(51): n is a, c, g, or t
  misc_feature (87)..(88): n is a, c, g, or t
  misc_feature (102)..(108): n is a, c, g, or t
  misc_feature (110)..(122): n is a, c, g, or t
ccatgttccactttaccctactggggccccgcggcgcccaaaccgaatgnngttctagaaaagctttcttcgaaggggccgaggcgnngccgacccatgttnnnnnnncnnnnnnnnnnnnnagggtcttacaactctattgtaaactatactagactatagagggacttctacatctttcaagatgtgtttaataaaggtctgtttataataacttttgaggcatgaatctagcaaatagtactttatacaatgtcccttgtcattaccaactcataaatattaagtgtttttcagtgacttatgtttggatgtggtagtgctgatcagggccatgtgctgatgtcctggagagcaaaatcaatccaaagtggtgctgctatttgtgacagaacatgtttatttactcagccccggagacaaaaggaaaattgatatgggggagcgggaaataggagaactattaaatgtagtgaagaaatttcacaggtctaaaggaactattcaaaggaaggataaagtagattctatactataaaacagaatcctacctctgataaaagacaaatcagcctgaatttttgaataatcaataggattccc

SEQ ID NO: 448581 - DNA, 756 bp, Homo Sapiens
  misc_feature (30)..(30): n is a, c, g, or t
  misc_feature (64)..(64): n is a, c, g, or t
  misc_feature (71)..(71): n is a, c, g, or t
ggcttggaaaatcctaaaagttgggattgnaagaagaagaaaaggacaacatcctccccttttnacttaancccaagctgtgaatttaaaaatacctttcgtttttgtttgtttgtgcctatcaactttgacccatagctcccagaataattttgatattttctgaataaattgacactagactttatacatcactcatgtctttatttagggtaggccactgtcctctaattccatactgattcttctgggtactctggtgagccactcaaaaaacaatttctgccaaacctttgggaaagtatcagtggtttggtggccaaattcctcatcaaatagtgcaaactggtttcctccaagctgtgacttctgcagagacagaaatgtccttgttaagtaacactgtcctcaaattttctatgtgtatcatagcctacttcctcctgaatactacctttctccaaatcaagactcaaaataatatgttttctttttaatttctatcctaaatcccatatagaaggaaggatgcaagacgtggtctccatgggagacagagtataatcaccaactaggtccaaaagaaaagcaaagtcgtgtcctgggttcctttttccaagttccgagttgtgggaagatgggttgtggcagctccgggagcagacacataggatttcctccttcctcagctctcaggagggccgctggatccaaggcaggggtcaggtatttccgagatgaagtgaactgaatagg

SEQ ID NO: 448582 - DNA, 523 bp, Homo Sapiens
  misc_feature (383)..(399): n is a, c, g, or t
tttttgtataaaaatattttcattttattacattccacacaatacattttcaaataatttccaacgtccacaagttattttgacacacaggcaactgagcaatgcaaggggtgtcacagtaataaggaaaggaataagaataggaagtaaaaatctttaggttttcttgtttcgttgttgttctttggtaattttcgattatttaggtgtttgcctgctagtttcattttaaagacagggtcttcttaaagatcggctatcaacttcagaaatagtactgtatttcctattcaattctggctttaatcccaaaaatgtgggacaagggaaaagacaattttactttatcttcagcatccagttttgtcaatgacaatgctgannnnnnnnnnnnnnnnnctgccttcgccaggaactaagtgatggcaattgctagcataatatcatggaaggggagttcaacccagaaataagggcttccctcctgaaggtgttgacataaaacctctactaaggcaaaagc

SEQ ID NO: 448583 - DNA, 543 bp, Homo Sapiens
  misc_feature (328)..(328): n is a, c, g, or t
  misc_feature (465)..(465): n is a, c, g, or t
tttaggtttttttcctcgcatgacttttcccatcctaaggtaaattttaaatgccttttccctttattctgttgtttttctttttctgccttggaagagcacattgttaaccacccatacactgtgtgtcactcctgtgtattcactaagatcttgctgtcaggcacctccttctgttcgccattcactgctcagtccctttcggtatttcttctttccagcatactgtgctgaactgctttagttctctgtttgttcccttggtaggatgcctgccacttgccttgttttatgtccacttcactgaatgtgttgctaatctttctgntccgttgcactttttaatgcaaatgtactttcctggacactgtctctcttatgtccaatttttagttatcattttatcttgtccctttctttctcccttgaagaactgcctacacagttttcttcctgactcgactnttcaagtacaagcaattttcattatcctgtgtgcttgaataataatttttagtagcaaacacttacattgcattatct

SEQ ID NO: 448584 - DNA, 358 bp, Homo Sapiens
gcggccgcagtactgggaggcttccggcggtggcgccagggccagaagcaacaaggccgtcaggaggcatcgtccaggccccatctggggggccgtgatagcgggacttccaaacacagcgcctctgctacactttccggggaaatcgggcagaagaaaggacgcggtgatgtggtggaacagaattctcacgcctcttcggaagccgggaatctacccccgagccctcatcccccaactgagccggttatcagagaagcccacaaggccactaggggactaacagggctgcggatctagattgcaagaatgcatatcccacctctgccgtgtcctcacccacccaccctcccttttc

SEQ ID NO: 448585 - DNA, 556 bp, Homo Sapiens
  misc_feature (183)..(183): n is a, c, g, or t
ttcttcaagttcttttttggcagctattttctttgcttgcttggctttttagccttccaggcctcaaatgatgctaatgcttcttctcttttagcagcttttttctgttcattttggatccttaagttttcactttcaattctttttattctgtgcatttcatgtaaatatacatttttcctntttctaaccactcctgaataaacagctgccccttatgttatctgctctatcaggttcctatgcctctgtttctgtgaaaggtttttggtccaagacttttaaagtccctaaatagtgagaagaggtagttgtcgatggagttctccttttagaactagatttcttcaaaaactcagaggtcattaatctggcagatgcactggatgctctattatttgttgactttttattctttatatttctatcttcaattgttttctttgaagatgctgttgcactggtagatattaagatactctgagatttagatagtagtggatcaactgttctgtcatcatccataatcagttccgcttttgccttttcttcttca

SEQ ID NO: 448586 - DNA, 1311 bp, Homo Sapiens
  misc_feature (212)..(212): n is a, c, g, or t
  misc_feature (354)..(363): n is a, c, g, or t
  misc_feature (425)..(425): n is a, c, g, or t
  misc_feature (567)..(567): n is a, c, g, or t
  misc_feature (569)..(577): n is a, c, g, or t
  misc_feature (920)..(989): n is a, c, g, or t
  misc_feature (1239)..(1257): n is a, c, g, or t
aaaggacaggtggggggtgcgtgcggggaggggaaaaacatgtagtggtgggtggggcgccggagataaacgggaaagaagctggtgtgtgctgggtggggtgggaaagaggtgaagcacactatggggtgtagtgttttatcccggcggggggaggaaaaagaaatgtctagcgaggtgaagaaacgaggggttggggagatgggggtatnaatatggttttaccggggaaaagtgtggaaatggtaagaagattatagaaaaaatatgatcatgtggggggggacatcgcgtttttacaaacccgcacaaaccgcacccgccgagataaggtggctgcgcacgttacggcannnnnnnnnnagtatattttcgtaaaggagtgggggggctctcagtggaaggggcccaaggaaaaaacgttnagctgcaggcgggaagaagatttatcttattgggtggggtgttttgtgggtataggggggtgatagggggaaagagatggtggtccccggagaaagggggggtggagggaggaagtggggacgaagcactccccggcgggtntnnnnnnnnnaaagggaacattaaaatttctctctcaagtggaaagggggggacaaaatcacgggtgtgaggatgaagaaaaggctgggtggataatcacattgagaagccgtgacagagtagaataataaacccgccgcacgtgggcgggggagtttaatttataattcgttacggcgggaggggagataacaaagagacggggtgggttatctaaaagggcaacatagtggggtatcatcttatgggggtaaaaacaacattaaggggccacgggggggtgaggggtacaacaaattgtggaggcggggccccgggaggggtagtgttgttgggataggaattattattcnnnnnnnnnnnnnnnnnnnnnnnnnnnnnnnnnnnnnnnnnnnnnnnnnnnnnnnnnnnnnnnnnnnnnnggagtagtaggggggagagaggcggataggagatagatgtttttttaggggctacggcacgttggtggataaaaaaatagatatgtgtttattccatggtcagtacagaccaggatgcatattcgcggtatgaaagtcaagccagtcagtgactccggagtttggccaacagtgaggcaccagcgtggtggtgtagagtgggttctcatggcacgcgtaacctcaccaggggctccaattataaaagttnnnnnnnnnnnnnnnnnnngcatgggcaggagcggccagctggttggggctgggcgccaggtaggggagtccc

SEQ ID NO: 448587 - DNA, 453 bp, Homo Sapiens
cctccctttaaggaatcatgaaggacagagacttttgagattgtggcttaggaaggccatacctgctccctgggctgtggctttttctggtccctgctgaggccgactggcccctggagaaggatggtggggcataggctagggctgcagttggccagtggggctgccagtttctttctgggaccactctcgtcctcgggcattgcactggaaggctggaaccagcccaaactgcccacctgcttcacttccaatgactaggagccagcccagcctcttgccctgcccacacccctgcgccctgggccagtgccttgcgtttgatgttacctccacaccatctgccttaagaggaagggccgggcaaggcccctactccctagagaaatgtcttgggtaggagagggtgtgggatggtgggaggggaagcattaaatacagcaacttcttaga

SEQ ID NO: 448588 - DNA, 612 bp, Homo Sapiens
ataaacaaaattttttattacagtgcgcttattgtagttgaaaacatgcagcaccatttgaaacaaagaagattcagaaacatggaaataagttttgtatctaaacataaatggatggtaaaaattaaagttttcattttttaaggaaaagcatattcatttttgtcaaacatttacagtaatccgggttaaaaagctatagttttcatgattctgttaagtctattcttcaaagtatgctatgtgaggttgacctagagaacacttgaccacatctacttctccacctccattctttgcccgttgaaagtgaatgttaattaaatcctccacaatttcttcatccatttgaatgccttccattcctgtcagaagcactgtcctcttagatgttcctgaaaatatctgatactttttcaagtgtatttctgtgtatggagaaacagtaactctatggcaggtttgatttatataaagagggtattctttctttttcaaaatcttgtcagccactccaatctccacaaacgtgatgactgcactcccggactgtctgtcatagtccacgcggtccacctctccgccttcatttcgggactttgaaaagctcag

SEQ ID NO: 448589 - DNA, 435 bp, Homo Sapiens
caggattcagtggagtccattaatgcataccaggggcaaagatcagcccagggtaaggcaagtctgggaggaagcccaccctgccctacagcagccctggaactcagaataggtggtgagtctgccatggtttgctactgggcagcacactagaccaacttgggaatgtggaagagtgagtctatgttccctcagccatccccaagtttacacacaggcatagcagccctactgtgagtcagcaatcattcctgacttgcagtaaggacaatttgcatttacggaaagcaaactggagggggtagcctaagtccgcactgcccatgttattaccctttgcaatgtgaaaaaccatggtgaggtaggttgggcaggttttatcctctccacaaaggtgagcctttgctccacagccagcacctggcagagtgggag

SEQ ID NO: 448590 - DNA, 519 bp, Homo Sapiens
aaaaaacctattttaatcctaattgtatttctctattcctgaagagttctgtaacatgatgtgttgattggttgtgttaatgttggtccctggaataagattctcatcatctccttcaatcaagcagtcccactgatcaaaatctttatgaagtcctaaatgcttttgtaagaatgctaatgaagctttgttgctaagatcaatagctgcatttgaatctatgtctccctttaatttgagcatgtgtccaattattttgcctgttgcaaaagtgaagtcagcaaaattctggtggactgaacccctgattgtaatcatctttctttctttatcaggtgagtagcattttttcatttttatgatattagcaggatattggaaatattcagagttgataaaagagaggggctgaggaattctggaatatacttcatcacccagtggaaacatccatgcatccatggctatacctcatctgaatctctgatcttcactaggagtctgaataaccgttgctcc

SEQ ID NO: 448591 - DNA, 524 bp, Homo Sapiens
aatagtatcattcatttgtacagagaaatcatttggatggatctatttacagtcttttctgattatcatttccactggccaaatatatttcacagaatagtcaacactgacttgaattgatcaccattataatcgggcttttactcctcctcccccctttcaaagatgatgatcccattttaacagaaacattttgtaataaaagattcaccagtctttttccatcttatgactaaatccaccaaaatttatctaatatggtcaaatttttaacacatttcattgtttcttttcaaactcattatttgcaggtattgcaaaccaaggcaaataagtccacgtcccctcgagccttctacaacttactacacgccctcaagttgagcttctcctatctcctttcacacttgtgaaatgtctggcacaaccagacattttacttgaagacaaaactactctcttttcctctctttttcttttaactcactaccaatcaccttccctcttgcatttcagacaacacc

SEQ ID NO: 448592 - DNA, 572 bp, Homo Sapiens
  misc_feature (123)..(148): n is a, c, g, or t
aatcttgaactatgatgcgaggctaagctgggaacaattactggaaacctgattttgtttttccttttccaagactctgaaaaatttcggggtacctctcgcctaaccaagaggaaaggtttnnnnnnnnnnnnnnnnnnnnnnnnnncaatacacctagcaaagcagacgccttgttttccagaacctcggactccggcagaaagaggtagagtaaaagtgctgctagattcagcttcaccttcttccctccatccttttctcttgcattttctttttccccaaaaacatgaatctggtttttctttctatagactgagtcagagaaagcgttaggaagaagccgcaactaatgtctgtgaagggaggaccatgaggcgagagtgaatacgattcgttccgctgcttctgactcatccggcagatcggaacacctgcatttctggatgtgtcattcccgtatgtcgaggcgcctccagaacccgaaataatgtgtagacagacctgtgtctaacatcccctcggagggagctccccggggtaggagcccctggctggaccgccgcggccgc

SEQ ID NO: 448593 - DNA, 631 bp, Homo Sapiens
agactgcagaggaactactcatttatttgggatccaaggcccccaacccacagtaccgtccccaataaactgcagccgagctccccacatgctggactatcaccccatataagggttgcggtcagtgggcaggggtctgggtccaaggccgcagcaggaggaactggacagcggaggaagtagctagggcatgtgcttggccactgcctccagcaccccaaatccctgcctgaggctggggagagacctctgccggcggctcctcaggcctcccggacccggcctaggaggccagcgttctcctggcggagggctcggtagtcctcccggatcttctccaggttgctgagggtcttcttgcccagctctgtctcgatctgctcctcgaggtctcgaacctcccgcatgatggtgcctgtgtcctcgatggtctggatgagctggctgcagttctcgtgcagagcagctagatacttataggccttccgaacagcatcgtccttcttggcctccctttaaccccagcccactcacgctcaccgcaaaaccgtccggctccagcgtcccagataggggagtcacctcccctctgcaacgctcctccgctactacacacagatcttggttgatc

SEQ ID NO: 448594 - DNA, 849 bp, Homo Sapiens
gagtaacacctctttactcagcaacgggctcctccctcgggggaccttccccagtgcccctccatgctcgaagggcctggaaggatcagaatgcaggcctttcccaaggacggcacaaaacgtgatgaggagatgccactgggggtgcagaaagctccccatccccctgggaagaggcgtcagcgtgccctcagggtagtcaggtcctgagctttggactcctcgcttggtttaaggcactgtcccttgtgcaatctagaggaatgctcctcaaagcatctctcctggggaccaggagagccgcccctgctcccaatgcaacaagatccctgatcgccagcctcttgcctccctcagagggagacaagtccgcactggagggagcacggctgcctagctccctgtcacctcctccacctctctatctgttcactgggacaacagaggatccctgaagccgctggaggagctggctttgcaggtcttcctccatcaccttccaccaagagaagttctcaccccgaacttttgggggttcatcctggatccctgggctccgaaaagccacggtcaccagcacattcaaacagatgccatcactgtgatctcggcccaggtgctgcagtccaagcaaccccttgatctccaccaccaagtggtgcagggtcagacactcctgcagcagccgcaggacggccatcttcatgccacccctctgctccacagggtcgaggccacaggcagtgacaggcaagtgaggcatccccactgtgcccactaacacccacactgtctgggcgctggtaaaggtagccacgacgcagacgcgcctaatggtacgagctcgac

SEQ ID NO: 448595 - DNA, 659 bp, Homo Sapiens
aaacccttcttatttattaatatctagtctaataaacgctgatgttataggacctctgcaccttttttgactttttattcatccattcttaatattctacactatgacaaaatccttaaaactccattattgatgaaatgggaacagacttttgtttttgtatgttggtgttctctgagtggtgaaggcccagggagaatgttttgtttggtggtcacttagcatttgaaaacatccacttccttgtgacttagctgggtatcttttaacatctggaagccacgtccctgattgaaatctctggagacaacttacctttcaccaacttgtctgccaaattgcaccatggaccaagattgcagtggctgcatcaagtctaggcctgccctgaagtctggatttgtaagtcccccatttcaaatggggcagaaggcagaggagcagaggagccactgtgcctttcgctgtcctggagccagttggccttctggttttggtgaaccctgcttttataagaggactccctggcatcttccagtttcccgctacttgttttatgtattattttatgtctgtgtttgtcctggagtgctgtaactcctttcactgtctgctgtaagttcaacttcttcaataaaagaaatgtttcaaattggatg

SEQ ID NO: 448596 - DNA, 680 bp, Homo Sapiens
  misc_feature (145)..(145): n is a, c, g, or t
tcatcctcaggaaatgcaaccggatgctcggaatttcgcccctaaagcgactcagggcagtctcagctcaggaagacttctttttttgaccttctgcttaaagccacaaccccaggctgaggatgccacatcaacggcgtttccntcgcccgctgcaggcgtgactcacgtttctaagcctgcagggtccccgggccaagcgcggctactgagagcacagcgtcctccctcagcccctgctcatctgcacggagcaaagccgcagctttctctgctgtcagcgctttatacgactcggatgtaggctctgagcgggcacgggcccgccctcagacggcgacccgaggggcaaacaggatggaggcgcgctcccttgcaggctgtggtctcgattttatctgctcctgggtggtgcgggtggtttgctctctaggcgtgagcaaaggccacaaggggcccgaaaaaatcacccaaggatgcaagcccgccattgcgctgagcaggggcctccccgccgccagagcccgcgcccctccagggaggcccgcgcgatcgagacccgccgcctcccggccaggcgcggggcaccaggcgaggggagccaggagccgggaggggcggcgccgggcccgcaaccccaccctgtcctgcctccgcctcctcaaggcaggaccgtcccc

SEQ ID NO: 448597 - DNA, 739 bp, Homo Sapiens
  misc_feature (485)..(485): n is a, c, g, or t
gttgctctcgaatagaaatatagttgattttgaatatggggggtgtacttgcatcttgatgaagtcagtggttctagtagcttttttgcagaatcctttggatttttctatgtacatgatgatatagtctgtaattaaaagcagttttactttccagtagatataccctaaatgtttttaaaacagctttattgaggtataattgacatatgatagctggtcatatagatgaagtgtaaagtttgattagttttggcccacctgtaaaaccatcaccagtcaagataatgagcatatccctcatccccgaagtttccctgtcctccttggtaatccctccttccttcgtctctctttgcccacatcccatccctaggaaaccactaatattctctggtcattatggtttagtttgcattttctagaattttatagaaatagaaacagagttggttctgtgcctaggtcttaatttatgcggttgnctgagtgatgacacagatcagtgccactgaaagaagaatttatgactaatacttccttggagaagaggacaagtcacatcacacagagccacaggagagatacagtttggtcaggcagaagcaggactgagggtaaagcctaggccatcgcttttattggggtttctatgggaaagggaaaaccaggcagagtttaaaaaagaaaataaataaacaaaatcgaaagacagttgatacactggagaagatatttg

SEQ ID NO: 448598 - DNA, 139 bp, Homo Sapiens
taattttttagagacagagtctcactatgttgcccaagctgatcttgaaatcttggcctcaaatgatcctcccacttcagtcctcaaagcgttgagatgataggcatgacccatggtgcctgaccttaaaaagtctttc

SEQ ID NO: 448599 - DNA, 594 bp, Homo Sapiens
  misc_feature (473)..(473): n is a, c, g, or t
ctccacggtaactttaataagtctccatttcaactttctgttctcaatcccatctacagctcaaacatatgcagtatctgccagccctgtccatgaattcctgaagtcccagccaagtgcctctcagctcaaaaagccccttgcttgccaggggtcagccatgtctggaaggctctgaaagaggtctgctgggcagtaggactgcttctgtggatgagaggcctcttgttggactggagagaccaggagccgagataacagcagaagcaaaaatccaccggtgcgtcagcaagcagggcactcggccattcagctccatccttccttctgagctgttctccagcaggctccggccgcagctccaggccactagagcagatagataatgtaggacagaatgaccaggcctatgatggcaaagaacatcaggatgaaaatatccagcattgtggattcctaggccgaccaagccnctggattctggtgaaccgtgagctgtgagcacggaggttgcagtcggtggagagaaatggctccccttcactccacagctcagcctggttctttcccctccccctcccaggggcctccgct

SEQ ID NO: 448600 - DNA, 828 bp, Homo Sapiens
cgttcctgtcccagtctccctacttattttaaggatgaacccccaaatgttgctttggtttcagttggacacctgaaacatgcaacgtcagcagcatgtagaagacacagaagaggttatgagtataccacgaagatatcatagttagaaactcttattgcatatgtagaggctgtgatcatgaggaatagcaccaccaccatgcagacccctgtcaggccaggcacagttgtgaagagaagttttctaggatcctcatctcggtatcttgctgcatgtcagttcaacaaagtcttcactgtaattcactgagaagttgatgggcattcaccagatgggcagccacatgcacgcctgagaaaatacagatagtaacaccacaggtaatatcggaatgttctgctatttatccagcaatctcctggttctcctgcttggaaccttctgtgatcctcggaggtaagcccagcagtgttcggcacatgggtaaaacggataaggactgcacgttgaggtctaagaacagatgctgaggctctgcttagacacaatcctagccccaacatctggtggaggtagtgatactctggcccttggttatacagcaagaaggttttccagaaaagcaggacacttcatggagagccagatgaacatggcagaggtgtttaaccccttcgttggcgagccagctcctccaggacacagccatgccgccggccccgccgcgctgcgctactgtgcccgccggcccgagaaggagcgggcggcggccggggcagcggttacagtctgtgcggcctgccgggccgctgagcgaggaccgag

SEQ ID NO: 448601 - DNA, 1332 bp, Homo Sapiens
  misc_feature (433)..(506): n is a, c, g, or t
  misc_feature (1195)..(1225): n is a, c, g, or t
ttttttttggtcatttcctttttatctgtcaggcagccagctctgacttactctctgtttctgtcatctctcccccacataccaacttcttcaccatgatgattataccaataatacagttccttatatgaggggctctggaaaattagacagtgaagcatgttgcagattacatgttaaacaggtctaattcacaatgaatgacaacttgagacaatatgagacagttttcagacaacagttttgtggcaggtaggggactcctttctctgcatactcttcttggctgaggttgtgttgcactggctgaggttgctgaaacagtggcccatggatggagatgtagaatcagaagcaaggagacacagttctccgctggagtcttctaaagaaatcaagcctgcccatacttttgattttggccttctggtcnnnnnnnnnnnnnnnnnnnnnnnnnnnnnnnnnnnnnnnnnnnnnnnnnnnnnnnnnnnnnnnnnnnnnnnnnnagcccatcagttccttcgtcgacagcgccggggacatccagactacaatttacagttcctctatccatgtgctgggttataaattatgccatcctccctagaatgagaatgcacagcaagcggcagacaatcacccggcattcggcatctctttcttttcacgcgctccctcgctccgcctttctccagctctgccttctcaggcagatacatcagataccttgtttatccatcttcagctccactctgaggtaaaatgccaccacatctcgccatgggttgtccccccagactaaatccctgggaacagcctgagctgggtgcacgcggccgaggcgacggctgcccttgccctgcggagcacgggtgggcattggatgtaaggtattcctaacttccccttccccagtccttggcgtcctctctagccatcccaccccaggtcttctgcagcttcaccctgtcctccaagtcccctcgcccagctgcgaggcaggagaccccggccggactccgccagcaggtccttctttcgcagggcgcagacgcacgattccgggatcgggtgcaccacggcgaagcccaggcgggagacggcaggagcagctcaggtaaccaggggaagcttgcgtgcccacggagatgcagccgtggagctgtgaggaaagacggtctggcttcagaatttnnnnnnnnnnnnnnnnnnnnnnnnnnnnnnncaaaggaatccacaaaacaggcgcagctgccgggcgcccaggcggggggtggaaaaaacagacaccaaaccattaaaaaaaagcaagagtttaaactcaattttcac

SEQ ID NO: 448602 - DNA, 531 bp, Homo Sapiens
aaagtaattatttattttttatcaaccgtatcttatctgaaagtggatttaatgctatacatagagctcagacttggtaataaaactgtttgcctttgctcagcagtgtttgtgaataacctatgtttttctgcaggtcagacatggctgtgatgccacatgctggggtccgggacctggtgggtgccttcagacgctcctgcacagagccattgatgaaaacaacgagcccaccgcctgctttcttattcgcaggtctgagagtccccagtatctctccacagctttttagtgagcttgttgcaaactggctctttcctttttaaatccgtctatagtcttggcatgccagtagccggcttgactttcacagttaaggttatcagagagtcactgttctgtcatgtcaagtcagccaggagccaggctcacttgtgacgggaggagctcacagccctgaatcaaagaatctgaaagctggagtcagcgtcctgctttgggagctgcctgagctcctgtagtcacggcaga

SEQ ID NO: 448603 - DNA, 806 bp, Homo Sapiens
  misc_feature (93)..(184): n is a, c, g, or t
  misc_feature (505)..(538): n is a, c, g, or t
  misc_feature (604)..(612): n is a, c, g, or t
aactccaatgatcttctcacctcagcctgccaagtagctaggattacagatgtgtgccgccatgctaatttttaaaaattttttgtatagatnnnnnnnnnnnnnnnnnnnnnnnnnnnnnnnnnnnnnnnnnnnnnnnnnnnnnnnnnnnnnnnnnnnnnnnnnnnnnnnnnnnnnnnnnnnngagccaccacgccagccgtcactctcatttttgagcacaggaattgtgcccaaaggctaggataaggaattaaagatgcatgccaagaaatacccacaaacattaattataaaagggagactatactaatgtttgtgaaaagcttatactaacatagagcaatatttaagttataaagttaaatgaaaaagggtataaaactgtatgaacagtacaatctcaactatgtaaaaaccaaccaaaatctgccctaaaaaggctggaaggaaatagctcaaaatgttaatgtgattgtatttaagaagtgtatctaatagggannnnnnnnnnnnnnnnnnnnnnnnnnnnnnnnnncaaatgtttctctactggggagatttttttaaaaagctattagggaaggagtagaacaaaagtggnnnnnnnnntctattagttacaaaaaactgagtctgatagaagcattgaatttgagttaatgaatctaagtctagcctataagaatttgtacatttagaaaactatgaaacagtccaggctactccatgaatccattggtaggaccagaggctggaggtggaagtgccacctggtcctgcctgataaaaaatgctgaatcagc

SEQ ID NO: 448604 - DNA, 586 bp, Homo Sapiens
  misc_feature (72)..(147): n is a, c, g, or t
  misc_feature (574)..(574): n is a, c, g, or t
atggataaatgaaaaatttattgtcttcattgctcaccattttttagtagaaaagctgttttaaggtcaggnnnnnnnnnnnnnnnnnnnnnnnnnnnnnnnnnnnnnnnnnnnnnnnnnnnnnnnnnnnnnnnnnnnnnnnnnnnnttggatcataatgcatatgctcacatgtgccttccaaatcacacttgttatgtagacatcataaagaataaaagttacccattaattatatggcatgcatcagcagtgcattggtgggcttaaacttggttttcagttatgtgtatatacagataaatctcttcctgagttgagcttcatcttcagttgagacccaaatcatttgctttcctttatttggcaaggtacttgaccatgtgataaggcaatcaaatgtttcaatctccttcccttttcagcggcatgggccctcctctgtgagatcaccaatgtgacaggtatgaggacagaccctaaaatatggtcctgtaaaactagagcaggtttctttgttcattagtctcaaggctacagcactgtctcttcatatatttggggatcttgaggntttcagttgaac

SEQ ID NO: 448605 - DNA, 536 bp, Homo Sapiens
  misc_feature (451)..(484): n is a, c, g, or t
ggaatagaccatgagcatctccagccacccactgacgatctccttggtctccgcccggatgaaatgctccttctcaggcgtcagaatacacaggtagaacttctggcccgtgcggccctccccatccaccacatctgtgcactggttcatgttgatggtgccctgaggaagggtcgtgggcatctcatccagggcgtagcgcaagaggccgtgctcgtaaaggatgaagaaccgtcgctgccatttccgagaccggtgcactgggttgtcatagtcggtcccatctggagccaggagcagccaaccgccataaatgggttttgcctgcgtcaggtcctcgtcgttgagcagatgcgactcgcggggcttgaagcagttctgacacttgctcttgttgaagatgttggcctggaatttcctgcacgggttctccttggctgccgacatggtnnnnnnnnnnnnnnnnnnnnnnnnnnnnnnnnnncaggcctggccggcctggcgctcccgacgggataggggctcagcgcggccgc

SEQ ID NO: 448606 - DNA, 635 bp, Homo Sapiens
ccgcgtttgcgtagggtgcgtcatgccaacatacatccagctggtggaggtgttcgagacacaggagcgggtgtacatggtgatggagctggccactggtggagagcgctttgaccgcatcattgccaagggctccttcaccgagcgcgaggtgtagacggggcactgccttcagagcaggtcctgccagcctcgctggagaggatgccctcgtgtccgtgatgggctgtgggacaagcaaggtccttcccgagccacccaaggatgtccagctggatctggtcaagaaggtggggcccttcagtggcactaagagtgacgtgtacaagcacttcatcacagaggtggacagtgttggccctgtcaaagccgggttcccagcagcaagtcagtatgcacacccctgccccggtcccccgactgctggccacacggagcctccctcagaaccaccacgcagggccagggtagctaagtacagggccaagtttgacccacgtgttacagctaagtatgacatcaaggccctaattggccgaggcagcttcagccgagtggtacgtgtagagcaccgggcaacccggcagccgtatgccatcaagatgattgagaccaagtaccgggaggggcgggag

SEQ ID NO: 448607 - DNA, 1051 bp, Homo Sapiens
gccacggaaatagggggtaaaatatttggaggtcctttttatgctctgccccagtctgctgtatcagaatatggacacattccaagctttcttgtcgatgcttgcacatctttagaagaacatattcataccgaagggctttttcggaaatcaggatctgtgattcgcctaaaagcactaaagaataaagtggatcatggtgaaggttgcctatcttctgcacctccttgtgatattgcgggacttcttaagcagttttttagggaactgccagagcccattctcccagctgatttgcatgaagcacttttgaaagctcaacagttaggcacagaggaaaagaataaagctatactgttgctctcctgtcttctggctgaccacacagttcatgtattaagatacttctttaactttctcaggaatgtttctcttagatccagtgagaataagatggatagcagcaatcttgcagtaatatttgcaccaaatcttcttcagacaagtgaaggacatgaaaagatgtcttctaacgcagaaaagaagggcgtgtaccagactttatcctggaaaagataccagccatgttgggtattgatggtctctgtgctactccatcactggaaggctttgaagaaggtgaatatgaaactcctggtgaatataagagaaagagaagacaacgtgtaggagattttgttagtggagcactaaataaatttaaacctaacagaacaccttctatttcacctcaacaagaaagaattgataatgaaacaacccccatcggttaaatttgatccaaaaatattgcatctaccagcattttcagtggataagttataatttctgaaagaccaagattggaatgactttttgtaacaagtgtgctcgcagatcgactccagtgagaagagctcggggacctcctgagccaagtttaatctcctttgctatttgtgcatggtggctggtcaccaggaggtggccaccaggcttctcctttccccgctgttctaattgctaatcccagtatttgcggatagctccc

SEQ ID NO: 448608 - DNA, 505 bp, Homo Sapiens
ttttgatgataaacgactttactctaaaagcggctggaactcagtgacatgagcgtgcgctgaccccacatggggccccctgtgcaagcagagctggccggcccctccttgctggcagaggcacgggaggcctgctggggatgaggccactggccagggctatgctgcaccagaccaatggcaccgcccccacccctcccagcgcaggggcagcttggagcagaggcagcactggccaccgctgcggggggaagtcagcgtcaagagagtccctgagtgagaaggcccagataagcccaggccccccaggccagcggacaggcacaggcagggcctacagaggtgccaaggccccaggccagttgtgctaggagcctggacctgctcttccacacccccatcccgcccctactgcacaggcttgtgccttggtgccccctggaggcagcagggaggaggcttctcaggcagaagtcttaagttgcatcccattccccagaatccc

SEQ ID NO: 448609 - DNA, 484 bp, Homo Sapiens
  misc_feature (374)..(374): n is a, c, g, or t
  misc_feature (407)..(407): n is a, c, g, or t
  misc_feature (441)..(441): n is a, c, g, or t
ttttttttgatgataaacgactttactctaaaagcggctggaactcagtgacatgagcgtgcgctgaccccacatggggccccctgtgcaagcagagctggccggcccctccttgctggcagaggcacgggaggcctgctggggatgaggccactggcaggggctatgctgcaccagaccaatggcaccggccccacccctcccagcgcaggggcagcttgggagcagaggcagcactggccaccgttgcgggggcaagtcagcgtcaagagagtccctgagtgagaaggcccagataagcccagggccccccagggcagcggacaggcacagggcaggggtttacagaggtgccaaggccccagggcagtttnttgtttagggagcttgggatctgttttttccanacccctttcccgcccttattgcacaggtttgtgnttttggttgccccttgggaggcagcaggggaggaagttttttt

SEQ ID NO: 448610 - DNA, 529 bp, Homo Sapiens
actctttgtggcttctttttattttgaatcaataatctagaagtgaaggtctccacagcccattatgccttcactgatccacctacttcccatgaacacctgccgaagaaagaaataaggcagcatgtgctaagatgcagtgctgcttctaaacataatttgtggggggcaggcatgaaacccaagttcagaagtgcttaagtactgaggtgattactcaactatgaagaggtctttcaagcgcacagttgatttttagcaagtacagcgtatgaagaccttcattttgattttataaaagtaggctatgttgcatgagtatctaaaagtggctgaaaaaccgactgcatgcttttaagcctaaaaataaccaaggagtaggagcccaaacatgtacatttcagcaggaaaagtgataaacagaaagcgaagcggataatatgctgaagaatgaagaaagcccacatgatggcttatgctgactttacaacagagtgaaacattcaaacattaaagaagtcaaaacaaa

SEQ ID NO: 448611 - DNA, 377 bp, Homo Sapiens
  misc_feature (190)..(315): n is a, c, g, or t
cccttttaaaaaaacagtaaaattttatttattatgcaatcatttccaaagtagacagagaaatagatcagatatcccaactgtattgactacagaaaatagtcacaaccacttcatagaaattgtactgtttttcctaaattaacagcatatctgggtacacacaacatgtttgaatattttaatcccnnnnnnnnnnnnnnnnnnnnnnnnnnnnnnnnnnnnnnnnnnnnnnnnnnnnnnnnnnnnnnnnnnnnnnnnnnnnnnnnnnnnnnnnnnnnnnnnnnnnnnnnnnnnnnnnnnnnnnnnnnnnnntgagccactgtgcccagccagaaaatctttaattgacaaatatttaagggacaagagggttt

SEQ ID NO: 448612 - DNA, 1586 bp, Homo Sapiens
  misc_feature (162)..(164): n is a, c, g, or t
  misc_feature (167)..(171): n is a, c, g, or t
  misc_feature (1297)..(1480): n is a, c, g, or t
attcccagggccctggtccctaggccccgcggtggttttaggggagcacggctgggcccacatgtccatttgacttactggggcccccccggccaaagcgaatggttttagaaaactttttgaggggccgaggggggccgccaaggtgttttttcgttttcnnnggnnnnnggggggctaaaccaataatcagttttattttttctcatgtgatagaagtctggaagtccagggctgctgcagacactcaaagaggccacaggggaggccagggtcgctgtgagctttctgcagtcacttccttagactgtggttttcatatgcacggtcgttaaggtggatcttccaatactaggtactggatctctttgcaaggtgaaaagtaaagcaaagaacaaaacatacagggaggaattcatgtttaagaacgatccccattcaagagctttctcagaagcccatgtggtgacatctgctgatctgtcagtggccagggctgtgagacatggatggtaccagctgcaagaaaacctgtaagagattttttaaaatttagattagcacaccttactaatctgacagaacctggattctcttgatattggaagaagatgagagtggataccggggaagtcactagaagtatctgtcactcttggctggacagcaggctgcaaacatattaccacttgatggaggcatcatgctctggtcgcaatccgtgtgcatcaggtaccagtaacaaagtggtactgagaaatatcctcatgtcacatagatctcaatatgccattggtcaaggaggttgtccagaaggaaattaggacgttatcaaggatgaggctatagtaaaaatccttttaaccaaacctttcttgatgagggtttaagggttatttagaggaagtataaccttaaaaataaaagatgaaaaaatttatgaacggggctctgttttcatgatgatagagtacgtgcagtcccgtattcacgggaaaatctcgttggggcttctctcgggggtctgtttccgtgatgaaagagtaagtgcaatcccgtattcaccggaaaatctcgctggggcttctctccgtgagaatattcacatgctcaagtgaggggaccatggctggaatcatttccacataggaattatcagcactaattgtattttaaaagttttgtaaaagaaatttctcctagcgtaagtgctcacaagattcataaaaatggaggaattgctgcaggcagtaattgaggaatgactgcatgattattttcaacctcagcaacagtnnnnnnnnnnnnnnnnnnnnnnnnnnnnnnnnnnnnnnnnnnnnnnnnnnnnnnnnnnnnnnnnnnnnnnnnnnnnnnnnnnnnnnnnnnnnnnnnnnnnnnnnnnnnnnnnnnnnnnnnnnnnnnnnnnnnnnnnnnnnnnnnnnnnnnnnnnnnnnnnnnnnnnnnnnnnnnnnnnnnnnnncgtgctgtagaccaagggtcggccaagtttttctggaaaggggcagatgacaggaagtatttcagacttcattggccacaaattttctccatcaaacattcttccc

SEQ ID NO: 448613 - DNA, 1105 bp, Homo Sapiens
acaggcagttttcaaaaaaatattgatctggatcagatgggctgataaggcccaaacacttataaaccaaagctgcaggtctctaaggtcttcagagaagctacacaaaatactatgatttcattagcatccacatatgtatcattttccacaacattttacaattctcttgtttcacagggaaggtgaactaattataatgaaatatcagtaatgtatcttaaataagtaacatgttgctggaaaaaatttaagttaaaatgcactacataatagtgcagaaacaaagtgcaggtggcaattttaagacatgaaaacaatgctgaatcagtagtgtttggagtgatacattttgcccatttttggccagtcctagaacagtactcaccacaagctgcatgccaaatatgaactaatgaggctaaaacactgaagaccaaatagaaccactctagagtctgtttcacaatgagatactcctccccgttctggaaacagcgatctgctgtagttcctatcctcctgtggcacctatccctgctacagtacctataaccagatgtcttccatcatccagcttccaggacaagtggtgctcagtgagtcacaacctgaggaacagctgctggtttaccgatttgtattcctgtatatactcgacttgggtagccaggattttctcgtttgtcttgaatatatttacttctaaaaagactgttagtcttgttgggaggtgagcagaggaatgtttacttgctggagaacatagtaacaaacatcacttctcacccctcataaacagaaagcccattgtctgtgccgtgaaaagaggactaccttgtcaggaagattttacttacctctacaagaaaaaggactcgtattaaaatcgacctgtggttaccacccttagaaatgctgttttcagatattcctattcctagtcttagaggcagccatggaatatatagtctcctctgaccttggggtcaggaagaaagggaaatctattcataaaaggaatttaaattctggcctaggcctctcaaacctgcttcaagtgaaagaagatagcttaactaacaggagcctcaagttgaatgtc

SEQ ID NO: 448614 - DNA, 534 bp, Homo Sapiens
  misc_feature (272)..(296): n is a, c, g, or t
atggcaaagctatgggagcagatacagcaaacccatattgtcatcacacatttcttctcttgtatcaggagaacctggttgcttctaatgacaggtctctctttttttgcaggatagaatccaattgggtaggagaataagagaagggaaaaggatcctttcgagatcatgctcccacatctattaaaagatacataagctttgccaaacttaaaaccaggagcatatcatcattgcacaaaacacatccctaataagggctggatcactcnnnnnnnnnnnnnnnnnnnnnnnnnctctcctgtcttgtctgaaatggcttccccacaggacatttttaaatgattcttaattgcagggtagccaagtggagtaggtctgttgctggcacgtgaatactggctgaacctgtgcaatgtagtaattgctaaagttggcatctgctacatagggggctggctggtaatagcaagtgacattagccacattaggaatgacatttttggtcagctaacacccggatagccagcatgg

SEQ ID NO: 448615 - DNA, 136 bp, Homo Sapiens
tgaatgtaagaattattgttttttaaagtacagctttaaaaatgccccttacaaatacatcagtgttatattaaggcaaacccacttcagaagcacaaagttaatttcttataattccaagaaatatgtgaatgtt

SEQ ID NO: 448616 - DNA, 341 bp, Homo Sapiens
gtgcgtaccactgtgctcagctcaaatgtctctattttaacgtcctctgcataacaatgacatataacagctaactcctcaagaaataatatttataaatgatactacctgtgttcaacatgtgtcccctcttaaagattgcttcatttgaaaagaaagtgttccatgccttcctgttagaccctgtcctaaattccctatttcccaggcccctcctatatggttagaggaaatataaagaacatgcaatcacccaagcaaagtgaggacaaagatggcttctcttcagtgctgagtctagagagcagagaagcagggcaagccggagccagatatgactg

SEQ ID NO: 448617 - DNA, 1278 bp, Homo Sapiens
  misc_feature (884)..(884): n is a, c, g, or t
  misc_feature (1038)..(1038): n is a, c, g, or t
ccagagagagagggaaggaaagggaaaatctaggacaagagatcctggtgaacaaaaacagctgaagtgagagagatgtggagacaaagcacagaagtcaagacaggagggcgttccgcacacacacgcacacgcacacgcagccagggttggccgctgctccagagaggacgctgggaaagaggcctcacagctggagcccagcggggtgaaggggatggctcagtggcccctgcacagcaggagtgggctaaggcctggaggcgccccttcctggccccctgaagcaggactgggcaggagccccagggtggggctctcgacttcctcagatgagagcttcactcccactggagggcccggagttgggctgtgacccccaggctgtccctgaccatcccagccttctccctgtaacaggggcccagcctcgcttccagggctgagaaactggtacagccttggttggggggcctgggagagggaggggaccctgataggcaggagcatgtcccctactgcaggagagactctcaacagccgtgtgtccccattacaggcaacataaacacccactcgtgtgtatatccttgtttgtatgtgcctgaggctgcacatgtgtgggagagacagcagaaatattaaaacagactttgtgaagacacaacagaagctgacagaggccgacgtgggtggggaggaggccccgcccacacaccccctgcactcccaccatgggccacagtgggctttgtcccagaagcccaccccgttcttgtcccctgctggacaggcaggcggggctcttgcctggactgcaggctcttaattcgggacagcatgtccaggtggcgcttgaatactgctcgtggacgtctcaccgntcgagggccgcagctctcttggactttcgcttgacaccggacccgatgacacacacgtttgatctgctttatggccgggggaaaggcccctggcaaactccaaggccggtttgttccccaagttccccggggaggtgtcttttttaagattttngcccgagcggcccctatgagagaaagggggggccgcgttttggggccccaactccactctgtccctcttgggggggtgctcagaattttgtggggccggggggacccccacaaactgggctgcgggggacccttttcctttggagcacctcgggggtgggggaaaaccccctcgccccaattttttggctcagggccaaatcctattgggggcggttaaaattctaacattgtaaacctg

SEQ ID NO: 448618 - DNA, 533 bp, Homo Sapiens
  misc_feature (76)..(76): n is a, c, g, or t
ctctggttggggcccccaattttgcattttaaataagccctcagtcagtctttagcacactgaagtttgagaacanctgcttgatggtcttggaagcccttatgtgccagatttctaaggcatgtgcattttgttgtaaaacgtgactcatgtcaacagggtccaagtgtctgtacaatacagtttttgtcttagtaagaaatgttctttctaaactgtgaaacataggtaagaagtaagacaaaaagcaaaagaagtaagctttatgaccccaacaagagttccgtgctagtgatggagatgtggaaaccaggtcaaggtgctgacttggggacgtgggtggtgactggggcatgtttcagtttaggtgcttgttcctccggtggggagggattgagaagaatgtgagttgcccgtctaatttggcaagttgtctttgttaggatgagctgaacttggagtgagtaggactgcctgagcatgtcctgtcttttctgggtatgcacttcctacctgtctgtgaaggcgttacg

SEQ ID NO: 448619 - DNA, 389 bp, Homo Sapiens
  misc_feature (241)..(241): n is a, c, g, or t
  misc_feature (304)..(304): n is a, c, g, or t
accagtacaaaacttttattgcatcccaaccaagctaagatgaatacagaattgtttcaagagaagttaccattatcataattcaagacaaaaatcagccggcaattatatgagttggaaaacaaactactcttatgtcacagtctaccctaaagctccaacttatgtcagaatttaaaatacacacacatatacacaaccctgtggattcctcctcatttatgtaaaacctacttttgtngatgatctgctattttcttgagtcttctggaatgaacactgtagccccactcccggataaggnagaagataccacttccagggcttagcactgcccctggcttgaagcagatactcaaatatttgttgggtgaatgactgattgtctg

SEQ ID NO: 448620 - DNA, 426 bp, Homo Sapiens
tttgagtatatgaatctttatttgttcacaagtagcaggaatgggggcaaaagtctgggtgccgagcagggaatgcatgaggtaggcaagggaatagggatgtggggcttctcgtcttggcttctcagctcctgctgtttcttagttgattcactgcagtgtcgtcctgtgattctgggattttgtgctctatagatataagagggtactgggaaggtcttggatgatgcttggagagtacaggcgtcttctccagaacagcctgcctagtctggtcaagacaattttctcaaatcaagggaagctgactgacagcatttgaggtggttcacagacatggcatttaactaacactgactcgcaaagtaaaaacagcacttcccttttcgattctctttcaaaccttatgctatatcaaggagaaag

SEQ ID NO: 448621 - DNA, 1034 bp, Homo Sapiens
  misc_feature (175)..(254): n is a, c, g, or t
gaagcagcagcaaaatttattgtgaagagcaaaagaacaaagcttccacagcatgaaacagcaccccagcggattgccactgcggcttgggtggccagcttttattcccttacttggccccacccacatcctgctgattggtccattttacagagaggtgattggtccgtttttnnnnnnnnnnnnnnnnnnnnnnnnnnnnnnnnnnnnnnnnnnnnnnnnnnnnnnnnnnnnnnnnnnnnnnnnnnnnnnnngaaaagttacccaagtccccacccgacccagaagcccagtcggcttcacctctcctaaggagatggtaattgtgctgtagaggtctatggcagcactgcctgctgaagtgggggacaattgttgcacgtttgtaagggcatggctgtgccttggtttgttgaggggctcgaggcaggcctctcttcccgtttcctgaaagaggttgtccatccttgttaaatttagaatgacactgacttgcccagtgtttgcttttcttacactggagacatataccgggacttttctgttgactgatggtagtaatgtttgccttttgatttccttttctacattcctttctttggtgtccaaattggccacaattaaaagcaagggcctgagaaatggggtatattctttcctactcttaatccagccatagcctgagctaaaagagttgccttatgtaagttacctccaatgccatcgcaatccttaatatatttagctaaatgagccgtccctctcaggggtctaatagcagtttgacactgcactagcattttcgtatgcaggaagctgtattacaacatcctgagccgttttattagtaatggctttatacacagcctcttggagctgagcaataaaatcaatatatggttctttaggtccttgacggatagaactgacagaaggatgtttttcgcctgtaacatttatcctttcccatgcccataagcacacaaagcgcagctgaacaatggcagcatcctccattactgcttgatttctcc

SEQ ID NO: 448622 - DNA, 593 bp, Homo Sapiens
ttttaaacaaggatacaaagtattattaaatgtatatttttaataaagccaatagttattttacttataggagctttaaaagatacaaaatgtagagttccagtttggaagcattgtaactatacacacaatgtcctgctgatgccctagcaaggcacccacgcccaaccatgcaaaggacacacacgttcacacatgcacacacatgcgctttggcgagacccctctgccaagcgcagcacctggaattaccagtgttcagagcaaggcggtgccgggaacacagcacctacatggagaccacacaaacggcttcacacagtctcacagcccatggagatgcaattagaaaatgtcttccttaatagagaaaaacaaactggaaagtgacaattagtgacgtcacctgtgctggagcatcaaggattgacctctgtccaaggtgaggcctttggagaggcactattaaaacatggggtacttcagtataatggaactcgaaatacagggtactgtggacacattactgaagggaataggaaactatcttacaagtggacagccctggacacttttacagggttagtgtgccc

SEQ ID NO: 448623 - DNA, 471 bp, Homo Sapiens
  misc_feature (53)..(53): n is a, c, g, or t
  misc_feature (456)..(456): n is a, c, g, or t
tctacaaagaactgttttgtatatagacattttcaggcacgttctttgcacanaccctgcgtggctcttgtctgtgttagctgtcacggtgtgcacactaatctctgttaaagttgtctatggctgttctacttgtaagatagttttctatttccttcagtaatgtgtccacagtaccctgtatttcgagttccattatactgaagtactcatgttttaatagtgcctctccaaaggcctcaccttggacagaggtcaatccttgatgctccagcacaggtgacgtcactaattgtcactttccagtttgtttttctctattaaggaagacattttctaattgcatctccatgggctgtgagactgtgtgaagccgtttgtgtggtctccatgtaggtgctgtgttcccggcacgccttgctctgaacactggtaattccaggtgctgcgctgggnagagggggctcggca

SEQ ID NO: 448624 - DNA, 460 bp, Homo Sapiens
attttcatatatgtatatatttattatgtcacaaatagctacatactggataagccagaaagatgaggaaacatgtttgcatctcacactagtgcagagattctgaaaaagaccccacttggaataccaaaccacacattagattgttctgttcccaattgtgtgccaaagtgcactctgaactgttttggtaaagccgaccgtggagtcatatgaggctgaataacttgggagaatgtaagtctgcaaaataaacctaggactggattgatcctcaggccacttggcaggtgaatgtctcgggagtgaatatgagacaagcttcctgaaaaggcttatatgacttaaagaactttttgtttaagtgtttggtcccaaataaactattaagatatataaagtaattcactgctcaaaaattaccgtcagataaatattaagggaagaaccactttaaagg

SEQ ID NO: 448625 - DNA, 717 bp, Homo Sapiens
  misc_feature (31)..(31): n is a, c, g, or t
  misc_feature (37)..(37): n is a, c, g, or t
  misc_feature (534)..(534): n is a, c, g, or t
gaccatgttgtaatttctttggggggtttgntggggngtattcaagcatgttcttttattaagcgtaggatgcgaggcacagcaggaggtttaagtacaatgtgaaagcaagagaactgagactgtgattgacagacaaagggattaactaacgttttattctctgccccccaaaatatcctgtgtattcttaagtatatacgcttcccttcctgcctttcaaggtatctaaggaatgatttgaaaaatttgttataatctctaaagaattttttgtatagcattagcaaaggagtctatgacaagtactttgccacctggtagttctgcgtattctactccctctgggtgtcactgtcatcctcactggctgggacaaggttctgagatttgtctccccagcagttgctaagctggctcagtcttggtcaggatgaatgaaacaattatctcctggatcaatgcagcaaggagcagtgaacacttgctttttcttccctaagtaggagaaggccagcccctggctgcagtggnggccgtgtggtagctggatgggacgaggggacctcaggctattctataacagtaaaagaaagagaattgctggtgcttctccagggagataccgacctaacgccaaccagttttactttcaaacagccacaccagaagcaagaaacctatcctagcccagccccagaagtgatctttacccca

SEQ ID NO: 448626 - DNA, 1054 bp, Homo Sapiens
ggcctgggtggcgaattcggcacgaggcaacagggagctgccaccaccgtgtactgtgctgctgtcccagaactggagggtctgggagggatgtacttcaacaactgctgccgctgcatgccctcaccagaagctcagagcgaagagacggcccggaccctgtgggcgctcagcgagaggctgatccaagaacggcttggcagccagtccggctaagtggagctcagagcggatgggcacacacacccgccctgtgtgtgtcccctcacgcaagtgccagggctgggccccttccaaatgtccctccaacacagatccgcaagagtaaaggaaataagagcagtcacaacagagtgaaaaatcttaagtaccaatgggaagcagggaattcctggggtaaagtatcacttttctggggctgggctaggcataggtctctttgctttctggtggtggcctgtttgaaagtaaaaacctgcttggtgtgtaggttccgtatctccctggagaagcaccagcaattctctttcttttactgttatagaatagcctgaggtcccctcgtcccatccagctaccaccacggccaccactgcagccgggggctggccttctcctacttagggaagaaaaagcaagtgttcactgctccttgctgcattgatccaggagataattgtttcattcatcctgaccaagactgagccagcttagcaactgctggggagacaaatctcagaaccttgtcccagccagtgaggatgacagtgacacccagagggagtagaatacgcagaactaccaggtgggcaaagtacttgtcatagactccctttgctaatgcctatgcaaaaattctttagagattataaccaattttttcaatcatttccttaaataccttggaaggcaggaaagggaagccgtatatactctaagaattcccggggatatttttggggggcaaagaataaaaagttaggttaatccccttgggctggccaaaccccggcctccagttcctcttggctttccccttgggaactttaaaccc

SEQ ID NO: 448627 - DNA, 812 bp, Homo Sapiens
  misc_feature (723)..(749): n is a, c, g, or t
ccctggagctctggagtgttgttatggttagttttaggaataaggcttgtgactgtcccaggctggagggcagggtcagaggtagctgacatcattgcagatgatgggctggcggctacgacagctcatgagagctgcaaagcgtgagacatccgcaggcagttcaggttctgggcgagctgggcatgacagccgctttcctgccatagctgtccgccgagccctggccagccggcgccgaagctgctcagagaggccaagcaggaactgaggggggcgagcaccgggcacggtgcccacctccgtcacccccttcactccctgtctcaggcagctccatccagttgtgcaccaagtcagcaaagcaattgtcccctagtaccaggggctggcgactgcgacccctgttcagtagggctgctgtccagtcctctgcttccagtccctgccagtgctccaggcaggcgtctggggtggacttgggccgtggatggtggacaggtggtacactggctacaggggccctgctgggcatggggaggccactgactgagaggcactgcctacgaaggggctgtgctgagggtgctgggcgctgggatacaggcagttcttcctctcgccatgtgctgcctgacacctccgagaagccagagtcccagtccagggcatgctccctggggcctcccaaggctgcatccctgtcttctgtcaccactgctnnnnnnnnnnnnnnnnnnnnnnnnnnnacacagcagactgagtcctcttccaaggcacccgaggccctaagctggtggctgggctgcacc

SEQ ID NO: 448628 - DNA, 814 bp, Homo Sapiens
ctttctttctttccttaactggctacatgcttagaaactgcactggtcaaacttgattttctttttaaagcctcaaaacatttttattgtcaggaaagcttttcagtggccagggatcagtctcatggccgtagaagcagccaaattcctctgcctttgccttcccttcaggagtcacatgctaaggcatccttgggcatttggaaaaggccgcttggggtgagagtgctctaggccactctgcaatgtccctgggcccgatgagtaacaaatgcaccccgggacccagagaagtggaaagacatgaaagggatttggaaacagatcgtaaaaataacctgtatgaaaatcacacagacaagaaaacaaacaaatccagctagccccttggatcctgccatccgtcttttctcccgggactgcctttgctttgtggagggtgagtcctgggacaggctttgggtgacaagttgtgggcatgttccatccaagcctggctctcccgactggcagagggaaggtggctgacaatcaattcctctggatacattttcctgtgattgctcctgtgatcaaaggcagccaccgaccggtgcgggagcggttagttcaccacgtcatagtagtaattgcgcagccgcagttccactgctgcgaatccgggcctgttttccacatcgtatgtccagcacagattcatgagatcgtacatctctcttggacaccctgcagggcaccccatccgctctcctttctctaacatagcggtgacttcacttcctttcatccctcgatatggcttctgcccatagcc

SEQ ID NO: 448629 - DNA, 212 bp, Homo Sapiens
gaaaaatattctcagggtatctatctccaggttcctgtttggtcgcctgtggtcccttgagggcagccctgacccaggccaggacctgcacaggcatttgggaggtgcagatgggggcttgtgatgcccagccctggctggggcatgggagttggagaaggatctgttcatgaggaactggctgcttgctggggcaggagaattgcttgaac

SEQ ID NO: 448630 - DNA, 326 bp, Homo Sapiens
gcattctttacttttattatttagagtctgaagatgctcatggtaaatgcagattatagagctaactttttgcacaaaaagcccacaaaacagtctttgagagagcatgtcagtgttacgtttggattttaaaagacagtgaagcttagctgagattctgttttacagattttgcgaataaataaaaagacagattccgtttgctctggactgtgttagctgcagtgcggagggcggaaccggctgaaggaactgctgtgtattttcagcacatctcagtcagcttccgtttcagtcttctgtttccatcacccacacaggcatat

SEQ ID NO: 448631 - DNA, 578 bp, Homo Sapiens
aattcaaagcactttgtaattattatgtaattagtctgcataatagcctaattgataaggacatgagggcagcctcattgttacagatagagacatacaaatgtctatgtcgtagtgttgtaggaaaacccgggttcttgtcacacgaccaagataatttaggcatgcggatacattgtagggtgagaagggcagcatttattgtgtgaaaaggaataaaagggaaacagggactctcagcaaaggtgagagtcctgctagcaggctttgcgcttcacagattgaatccccttttaccacccaggaacaggagagggcaggctcctccttcctgcaatgggtgctaactccccaaggctccaccacatcctcccaatgcacaggcaggttggagattctccagggagccctttttacttcactgtctcaatagcttacataacattatgttattattagacatttgtcttatttacttttatgacttttaatacactcaataataatgactaacatctattgagttgttatttcttgcagccactgtgctaagcccttaacattcaggatctttcttt

SEQ ID NO: 448632 - DNA, 299 bp, Homo Sapiens
tatgtccactgctaccatgccacctgtgctgatttctccactatgcttcccgcctgttttaagagttcatactaatggatcattgggtacatgtccttgtgtaaggcgtctttcccttagcgtcatgtttctggagattcttctgtgttgtttcatgtctcaggagtttgttcttttgattgccaagcagtccagtgtaaacacaccggtgtgtttatctgctgtattcatggacacttggagctgtgtctggctattggcgatcacgaataaagttgctgttgactttctttttgaaa

SEQ ID NO: 448633 - DNA, 518 bp, Homo Sapiens
  misc_feature (167)..(241): n is a, c, g, or t
tcattcctttaataggatcagcagtgagttggggtacttgggaatggagccatcggggttagggaaagaggaatgccttaattcataagatattcactaatttttacataaagggaaaatacatttttcttcattttttcaaggcacttaataaaaacataaattgnnnnnnnnnnnnnnnnnnnnnnnnnnnnnnnnnnnnnnnnnnnnnnnnnnnnnnnnnnnnnnnnnnnnnnnnnnnagaacctaggtctctcaaggctgaagcagcatggttaagcattcttgtccacagtacttgcggacttctggttagaatcagttcttgtacatcctagctctgactctcccgcaaggttgacatgcgtgtttcaacccaacaggagaagtcggtgtatactagtctaggatgagagacaaatgcatttcaaagggtctctgtgataccctgctcagccttggcccgtcatatgatcacagacgcttgggcttctctttccctctcctccgttctcctt

SEQ ID NO: 448634 - DNA, 521 bp, Homo Sapiens
  misc_feature (508)..(508): n is a, c, g, or t
ttgaggtttggaaatgtgcttttattttcaaactcaggtatgtgacactctacagttcaatgctagcacacctgtgtgaggcttaacaacatgaggaactgatagccagtgatacacaaatccagcacttcctctccatttactctgtcaggctgtatatggggagcaacacatatggctttgtggcagccagaaagtgaaggtctttttaggaggtgacatcaacaatgacacaaacacatcactctgcaactgaaggcagggaaccagactcctagggctaagcagagatgtcagacttcagaggcatttgggggactcttcagatccacatcctcactgaaaatccagggcctgtttctctccagttcactaccgcttgggcagcagctcccactgcttcaggctggtctttgctttccagaaaagatggactcatgagcactttttcagcccctgtatatatggctaatcttatgctcccctttggagatgtcctttcctcganctcccttggctta

SEQ ID NO: 448635 - DNA, 431 bp, Homo Sapiens
  misc_feature (311)..(341): n is a, c, g, or t
gaggggtctgagcctgggcctttccaggtcaccactgtccttgtcacccagcccaaagctgggcttacgctgcgcaaatacacacagagggaagggagggaaactggaaaatgcctctggggtgttcaatgcaattactagtttagcaacaaccataagcacagcagcacttatttggcacctactgtataccaggtgtcggactaaggtacatcgatgtctctgaggaaagtgccattatgttttttattttatgttggcggagaaatggaggctcgggaagaccaaagtcccgcctctcaaccgaaaannnnnnnnnnnnnnnnnnnnnnnnnnnnnnngcaacaggtatttattgggcacctactgagtaccaagccctgcactgtggacctcagaaatgtcctgcctccccggaggctgcagtgagc

SEQ ID NO: 448636 - DNA, 620 bp, Homo Sapiens
  misc_feature (62)..(62): n is a, c, g, or t
  misc_feature (87)..(87): n is a, c, g, or t
  misc_feature (164)..(164): n is a, c, g, or t
  misc_feature (223)..(223): n is a, c, g, or t
agctcatctgggaacaagacagaacccctgctcccggagggcaagctgggaccagaaaaccnaagcacccatatcagtcacctttcnaagtgtcctcgataaagaagagagtgtcccgtgtggcccaggctttccctggcatgcgccagcccccagaggaatcnatggcgccacctgggaaggagcgcacagcagaggttacccagggcacttacctgcgttnccccagcacaactcagatgaacaaagaccaaactaaaacctgaagacccagacacagggaggggaggtcaggtccggtcagtccctaggggagctgcttgggctccagggagtgcccaccaggggattttcagtttttcacagactgtgagtgtgggtctggaggccaggtggtccacaggatagccacctcccagcagtgacatcaccaaaggctatcagaaaggcatgctctttctggtatctcgtgcctgcaaaggagaccagaacgaggggcacaggaccccaggtagggccctgcctggctccctccattcctgattcaaccagggaggtgtggtgggggccctcaccgtgtttctgtcccggttcaatccagggaggcccctcctaccctc

SEQ ID NO: 448637 - DNA, 350 bp, Homo Sapiens
acaggatgcaaaaaacacttcccattggtgattttattggttactcatgataaccttgttagacagtaggacaggcattagacaataggacaggcaaaattatcccaaccttgcagatgaggaaactgagccttggaaagctcacagtccagtctaaggtcacagttaatgagcaacagagtggcaagtgacagagttccaaagccccctatttcacacattccggcatttaaacctagggcaggacctgacctttcatctttggcttcacctgtagacttcctagagggaatgatccaacttgcagttcccatgtgtaggggatttgtcttggcttctctgctcttgga

SEQ ID NO: 448638 - DNA, 536 bp, Homo Sapiens
ccccgagcccgacagctcgccaacgtgttatcccccgactagcccccccgactagcccgacagccaccttccccaaggttctgagagcaaagagggcacgtccttgaagagtcagtgggggaagggtggtggatccggggacctagagccaccagaagtaggcgctggcggaactcaggctgatcggggccgagctcttcccaggcctgggtgctggagtcaggaggaaggggtcccccagtctttgaaacccccaccttcctccagaaggtccacggagccagggttggctctgtcctgagtgtgggagggggtgtcctggcatcccacccccggcagaggctcttgtgggcagtggtgagggccgggcctggaggtcagatggcagactccctgcggtaggagatgttgtccagcgggagggaagcctgcatgcgctccaggtccaggtggctgccgaactccagcatccggatgatgcccgcctcctccttggaacccgcctccaggcccaggcctgcggccaccgcggccgc

SEQ ID NO: 448639 - DNA, 564 bp, Homo Sapiens
aaaaatgatctcttctcctttattgccacattcacataaaacgttttgatatatttgggttggtaaaagctaaagaaaattgaagttaaaatatatatggttttagtgttccgaaaagcagttacagattgcttccttggtttaattatcgaagcggtcgaaattctgggtttgaaactcttggaagtcctcagggatggtgtcattgcagcgatacttgaggttggaccagatgatgttttcttgagagaagcagaaaacgccaagtcggcctccacgcattgtggtgtctatggtgacgccagagtcagccaccaactcagagccttcataaaatcgtaccctgatgtagcccacctggggcctgtgctgtaggaaccagcggtaggacaccttgtccttccagcccacattccctggagtccttccacagcagcctgacctggtcattgggtgtccccgttggccaaggggaggtccggagatgctccctggacctgtcttagacttcacagccttgagctgaggcccagggtttgcaactgctcggatgggggtgcttgc

SEQ ID NO: 448640 - DNA, 740 bp, Homo Sapiens
acttttttcaatttttattatggaaaatttcaaacatatacaaaagtatagagaatagtataatgaactctcaaacatccatcacacagcttcaacaattaccaatttatggccaatcttgtttcatctatgtactcaattaccccacactcagatgattttgaagcgaataccagtaacatatcatttcacctgtacatttttcagtatacttctctaaaagataatcattttttaaaacaacataaccacagtaccatatcacatcttaaaaaacaataaatcaagaagttatatttttatttcaaattatgtaacaactgggggacacaatcaatacatttcactgggtatcatgagggaagagtgtcacactaaaatggagtccaagcttttatcgatgcaattgctttataatataaaagaaaaaatcaaacaaactagcatattagaaccacttttggtaatttgtaaggagctgaagactgctgatatcacacatcccatggcaaactccgtaagatttcttctaaacatctttgttattttcttaaaattgttctggaggcagctgatgcaagtcctcttttttaaaaaaaccttcactttgtgttcccctctaatagcagcctctttcctaaatgccttttctaaatgacaacaattttgccctctctcagccctctgcattctcatatgcagaaaccaggtaggatgaggagctagctgtgtgtactgcc

SEQ ID NO: 448641 - DNA, 479 bp, Homo Sapiens
  misc_feature (445)..(445): n is a, c, g, or t
aattgtaaaaataaatacagtggacgcaaaataatgttgtgagtttttataaaaataaattttaaaatgatatataagacatttttttgcaatgcctgccctaaccacttcttacatgtcatcttaacatctctttgaggaaacactgtttcctcattttacagatttaacatactgtattatttgatgccagagccaacaggctatatcataggcagtttccaaacttaattatgccatttagtttgtctagatttcttttgcctctctcactgatccatttggctgtagttttcatcccttttccagtacacacagctagctcctcatcctacctgggtttctgcatatgaggaatgcagaggggctgaggggggggcaaaattgttgttcctttaggaaaagggcctttaggggaagagggctgctattaggggggggaacnccaaagtggaaggggtttttttaaaaaaaggggg

SEQ ID NO: 448642 - DNA, 452 bp, Homo Sapiens
attatacaaattagtagtttatttcttcctttagtattacagttccaaaacgtaacttgaaggtcagcacaggagctgctgtgatataaaaggagagagtcacctggcgccccctgcagtcctccagttgcccagcagcagtgggacgctcagtggcacacagtgggtctttgtatggcctcccacctgcaaggacttccccgggcaggcccagctgcccagaagccccggaacacacaggaagacaacactataggatggcaggtggggatctgtgcaatacaaacatgtagctagaaaacccaaccgaggatctgtctagaatacttccgatatcaatataccgtagttgaaaccagaaccgtctccagctgtcagcagtcttggcggctactgtacagctgtcagcatgactacaggcagcgccgaggctatctggggtaagaagtggg

SEQ ID NO: 448643 - DNA, 826 bp, Homo Sapiens
  misc_feature (397)..(409): n is a, c, g, or t
ttttcctcctggaatttcctgggctttgttgaatttcgaaccaaccaaggttaccataaaaacacaagactcaccatttaaatatttcttttgaaatcagaaaaacaatagctctttgaaatgacgctggaacgcacacaatagattctactgggtcaatgtattatttatatactcatctgaactttcaaaagaagttaaatgggagatattctcaacaggcaaaaataagatattccaatctattgttcaagtttatggctccgatataaataatgggctataaacccgtatctggaaaacagttgcgcagtgcgtgcttaatggccagccaatgaaaaccaacgtctcattctactccggtctttcagcacgtcaaggacatcccactccgccnnnnnnnnnnnnnctttttaaagaggccaaccgctggggacacctggttttggcacctttatgaggcctcccagcagcacaggagctctaaggggcacgctctgcagttgagctatttgcagagctccatgatcgctcaaagccgagcacgcgcacgggtttgctactggcaccagcacaaggctttagacaggcacttcccacggctgagttctaggcatcccctttttgaaacgtgttctctccaccctgcaagggtggggtgagaaatctcactttcgaagggcttgcaaggaggaagagagtcggcgccttgcggattccccggccgcgcttcaaggttcacacgccgcgtggcagctcggatgcagcccggttccgaggcggtcggcggtcgagactggggcctcgagccgagaagcgaagaaca

SEQ ID NO: 448644 - DNA, 1056 bp, Homo Sapiens
gcatcatttgatgttttccatgcccacctcatacaatgtctcttaatatttctgcctattcctcattgggaacctgcctctatctacaaacatgctctaaaacgcagataccccatgattttagagtactattcaactttggctacttcttatataataggcactcgattcccttttctagttcacacgcacttgcgcaagtagactcttgttaaacccccgtgggggaaagcatcactgattgctggtgaattaggtctgaaattttatccaattagtttagatcgggcactgtccctgttgccttgccatgtgtctgctttttggcacgtaagggtcttgatgcatggggtacacatccagatacccacttagagcatgaatgcgcttctgtattgtatttcagcgggcgtgcaaagttccacagcgttagaacttgaagtgccctccaggaccttggccatcctccaggtattctaagggtaccttcttctggcagcagccctaaaaccttcatcctcacaatagcatgaggtagaattgcactataaggctttagttcattcagggtcattttctggccttatcccagtctccgtgtgcaggacaatgatttcggaatttggtagcagaaggatgttctaaacgacatccgtgacttcttgcatgaggagatctacagtctggttgagccctaagccattcaagtgctgtccgtattagcgcctaatgacatccgtcatctgacatggggagagccgctgtctttcttctgtgaaggctgcatgccccagttctgggggtgtgccaaggaaagaggaggcaggcaggtggtggcaggatggcagctgcagacaggtggcatgaggatgcagtgctgccagcccacagccagggaaccaccagttattgactattcaggcatgttgctattgttgctggcggcggaggggcaggaaggcaggagcccattgtgcgtgggccaggtcccccgcggacgacgacgacgagggggacgactccccgttctgggccgacaagcaggcgagttccggc

SEQ ID NO: 448645 - DNA, 403 bp, Homo Sapiens
aaatgtaaagtcgtgagtttattgcatatgtaacaaaatgaacctgacctcctgggcccagcctgctgtacaatcactgtttgttttgtgtttccagctggttccataaccacattaaatagaactagtatttcattaaatacttttgattttgacatagaacattagtgtacaactttcacaaaataaatcagtgataaaaacagtgggaaggataacaaggatagcagcaatacttcaaaacaagacattacaaaataaattaaaaaatacgttataaagtggttgagaaacaaaaataaacacatttttaaaatccatactatgtttcggggaagggctgccgtgtggcacacacctggggctggcagatgggcgggtggggggggacctttttctctgc

SEQ ID NO: 448646 - DNA, 1102 bp, Homo Sapiens
  misc_feature (266)..(266): n is a, c, g, or t
tataaacaagttagttttattttactccctttcctcttgaggctgggtctgaattagggaggaggacagacaggccacaggcaggaacccagagccccattcccccagcatggccaagcccccaggccctgaccaccacccattgggtccaagctgcaaggcatatcaacatctctgcagaacttcaagcctcccagaggaacggaaggccggcatcgcagaagctcaaagagggtatggtcctgtccaccccaggctcccagctncccagtctgtctcagtttggggctgggaaggggagggctgaagaaggagccccatttgctgttgcagggaatggggacacgcacccccgcacccccaccaactgatgcccataccaggcaccctgggccctccatgggttgctgcagggaagcacaaaggggagagctggcatcccagaggacctattccagctcaggacaggggtggagtcaatgccccactccccctggggttcagaccacagcagagggccctttctggctcctaggcctctctccaccccaccttggccccagtggtgaccaagccagggcactcctctgccgctttcagccccttccctgagcagcctggctgcccctctgggcagagtctgcctgaggccatcggctaaggagaaggctgaggagaaggggtcgcaggtttccaccggagccccccaaccctcctcctccctggcccagctcgcaagccagcgccctcagatccacacggtggtcttcccgtccctgctgctggcactgcccttctcggagccagccctgggcttggctcctggccgctcgtgggtgccgggccggccctgctccccgacagtgcccgcagaggtagcactgcccgtccgggacgcgggggcgcctgctctggggggcccccgggaggccgcagggaggccgacgcacggcgaactgtcccggtcgcggtccccagccgctgccccgtcgcgcagcgcctgcagggccaggtttgccaggttctggtcatgcgcccgagcgcgctcggccgcccgcaccaccaggctgtagtcgggcgggcaggccaagccagcggccgc

SEQ ID NO: 448647 - DNA, 623 bp, Homo Sapiens
  misc_feature (20)..(20): n is a, c, g, or t
cggggagctgggtcctgagnccgccgggtgctcgcaggaagggcctggctccaggggcaggggctgggaggggaggcgaggggatgagaggtcaggccggtcctgggggcagcaagcccggccacactccccaccgcgaccggggctctgggctcgcttcctgcttcagtttccccaagctcccgatgagactccgctactaccaccacgtcgataacggaaacctagagggactcagggtaaactgaggcactcaaactgccgaggagctccgcctcccgagagacatttaatccggggggatttgcaggaaacttctaaattaagggtagcggctgctgcagctgagggggggcacgccggtccctgcgcccgggcagctgccgtgagctcacgccccgaaatagccccaggggccccagccgcagctgccactgggtccggctgtcactcagaggaagcacggagcccccagcccaagggtcccctccccttcgcatcgccgggttttttccagccgaccgtcggccactttttcctccgacggctggcagggaagagggggatgggggcgggaccccaagggaggcggtccccagtgggtgggcgaagggggcggccgc

SEQ ID NO: 448648 - DNA, 971 bp, Homo Sapiens
ttggtatatcagagtgtccttgcaaggaatgaccggcatttcaacggattgtctcctggaaggtagactctgctatatcttctttgtttgcatcaagactcaagaggaatgtggacacatggcattatcccatttgtagagtaaagcttcaagtgaccagtcagcactcctaacttgataagtagaccacaattggaccttgggattcttgtgcatcaaaatatatatgtagccaaaatgtcttcaaaatcttctggttcaaagaacacatcagatgcaaggataatatcttgtggtggtagagccagaagatcccaagatatatgaccccatgttagtcctaccacctgcagatgtggcaggttattcatttggcagctttgccgacagacttccagacagtgaggcagttctgagctgtctgacagtattacttctgcaccacatttggcagccaaaattcctggaaggctcactccagctccaatctctaagatggccttgcctggcagagatcttctgtgaaaccaaaggtactgggccaggaccacagcacagggccaaacatacattccatactggagatgcaggacctcaggcgcctcctggcgggtgctgctgcacgcacctgcgggacgtggacctccaggacagccccgtcggcccccggacccggctcctccgagaatcgaaagcgctgggcccggaccccctgtcctcggaaatcgtgctcgcccagtagggcgtcgttgggccccgggcgggcgggggaccgcggaaggctccgggctgccagactgcgcgagcgggaagccgcgggccacgtggccgtagcacctgacggcaagaaggggaaagcccagatctggtgataaccctgccgcgctgcgagcgaagaaagcccggagcaaggcgaaagagactcacacgcgcagaactggccacgggcggctggcgcgaccggaagtccc

SEQ ID NO: 448649 - DNA, 1180 bp, Homo Sapiens
aaatggggggggaatcacaatgcccttggtcacggacccaggcttcttcctaggaaaaccgcttatgtcccatgttaccctttacctgctgtggggccgccccgccaaacggaatgttttggaaaagctttttgagtggccgacggcggccagacagccagtaattacgttcgaatctgcatttggttccttgtaatacgtattttaatttttgtttcatatgagtttaagtgttgtctaggtgacatcaaaatctaaggcaaacagacttgaccatcttcagacccactgcattctcaagctgaagtggtctgctcatagtttgtgtgccaggttgctcatcagtattgatactgtcccagaacaggttgtaggtataattcagagactgtcctttgcaaaggaaatgaccagcatttcaactgtatgtcttcctggaagggtagattctgctatatcttctttgtctgcatcaaaagactcaagaggaatgtggacacatttcatatcccatttgtagagtaaagcttcaagtgaccagtcagcactcctaccttgataagtagaccacaattggaccttgggattcttgtgcatcaaaaaatatattgtagccaaaatgtcttcaaaatcttctggttcaaagaacacatcagatgcaaggataatatcttgtggtggtagagccagaagatcccaagatatatgaccccatgttagtcctaccacctgcagatgtggcaggttattcatttggcagctttgccgacagacttccagacagtgaggcagttctgagctgtctgacagtattacttctgcaccacatttggcagccaaaattcctggaaggctcactccagctccaattgagagacatttaatgcaccgaagggcttcatatccgacgtttttgctccgggggtcaacctaaagcaggaagctgcgcagctgagcgtccgcacccccggtccctcaggaacccagccaagtcagccgacatccgctcctgacctcaggcgcctcctggcgggtgctgctgcacgcacctgcgggacgtggacctccaggacagccccgtcggcccccggacccggctcctccgagaatcgaaagcgctgggcccggaccccctgtcctcggaaatcgtgctcgcccagtagggcgtcgttgggccccg

SEQ ID NO: 448650 - DNA, 460 bp, Homo Sapiens
ataataccttgtggtggtaaaagcccagaagaacccccaagatataatggacccccatgttaagtccctacccacctgccagatgtggcaggttattccatttggcagctttgcccgacagacttcccagacagtgaggcagttctgagctgtctgacagtattacttctgcaccacatttggcagccaaaattccctggaaggctcactccagctccaatctaataagttatgaaagatggcatttcacaattatacttggaactgcaaataattgggaatcttagtactttttcattatattcttgcatttttaaataagcatagagtcagtctttctggatttgtataaaatgtaccgtaactgaacattactataaacatgacaaaagtacattccttatgaatctactctgctaaaaggtaaaagcttaaccttcaatttcaatattaaagggcc

SEQ ID NO: 448651 - DNA, 557 bp, Homo Sapiens
  misc_feature (335)..(511): n is a, c, g, or t
ttttttttacccttctgcaaatggggctcgtttattcattcaacaaacatttattgaacccataatccatttggtgccagtctccgagtcaggggtggtgacattcaggttaacagtaactaagttctccaaagactgaggcatgttcacatgtttcctcaccccaacactcccctcaccccgaagacccgcctggctctcagacgacccagccccgaccctcacctccagtgaccaggccacccactccaggcattttaactgcagtggatgtttgcagtagatgatgctaagtcactgtgtttgtggttgaatcctggttccatagcccatcnnnnnnnnnnnnnnnnnnnnnnnnnnnnnnnnnnnnnnnnnnnnnnnnnnnnnnnnnnnnnnnnnnnnnnnnnnnnnnnnnnnnnnnnnnnnnnnnnnnnnnnnnnnnnnnnnnnnnnnnnnnnnnnnnnnnnnnnnnnnnnnnnnnnnnnnnnnnnnnnnnnnnnnnnnnnnnnnncatcatgctatgacttctctccatcaccaggttccagctcccttct

SEQ ID NO: 448652 - DNA, 1098 bp, Homo Sapiens
cctggaggaattgctctcctttactgagcacctcccatgtggctaagcagcctcctgtcactcaacaccctgcgaccccatacatttactgtccccaatttacagatagggaaactgggcccagagggaccccgaggtcctaaaaaggacagaagcggtgccatgccttagctggggtcagctctgacagtctctaaagtctgtgctcttgaccactgtgccatcctgcccccatcactgggtgtccgggtttggatggtggtgacgttggaggcagagtccctcagcactccacgccgtagcggtcgaagttgcggagcagcaggccgatctccaggtgcacggtgccaccagcagctgtgtgcaggcgatagcggtcggccccactgtagatggtgtccccatgcagcagctgcggcccaccacccacgaaagcccgtgccaactgttctcgccaactgcccaggggccgccacgtggggcaggccagctggtgggtgcccgggctactgggcacatggcaaaatccatagcctgcaagctggcagcggccaaagctgtcctgggaccacacctggaaatggagccggggccagccttgaagacctttggtggcgaagtgcaggtcgatggggtgggaccagtaagccatgtcccctatctgcggggtgtccacttgcgtttggccctcccgcacgcctgacaggagcttccatgccgcccctgtgtgaatgccccacttgcagaagaggctactttccgagaaaccgctggcccctatgatctgcccgatcacgtgcacctcagccatggcccttagcgcacttaacggttaggagaggagaaagcggcaaccggggttgtagttcatgggcttgactgcttcttttctccgcgggcgccgaccaggcctggctcgcgcctctcccaggacccgcctggctgcgagatatgtaagccgcgatacttccgcgaccgcgctcgtcttggtttccgtggttgttgctggggcaacagcaggccctcgtgcggaattccccacccaggcctggctcattagggcggcatccccgcggtctggaagcgggaagggggaaa

SEQ ID NO: 448653 - DNA, 666 bp, Homo Sapiens
  misc_feature (16)..(16): n is a, c, g, or t
tggacggcgcgtgtcntcactggaggcccactctgtggcttgaagagagaagacatgggaaaggctgagtctgaagaggtagttcctggctcccacgatgagctggtccccggaggggtccaaagccagctgggagaaatcccgggctccagggtaggtgaagttagagacccacggctgcaggtcttcaaaggccacggtggggtgcttgctaagggcgcacagctgctgctcactgctgggctcactggagacatcctgggagctggagaggtgggacaccagcagtgtgaggctgggcagcaacagcgagacagccagggggcctgcaagcaccatgataggcccctctgcagtcctagctccgggaggcagacaggggagaagacccctgaccagtgagagaagccagccccctactgtccatccacaccttagctgttgggctggggtatcaggcggcccagggacgaggtggtgggcaacaggagacggactgaagccacagggcatccaagagacacaggccaggcaccagctggagccactcactcccagaggcgggtgcaggtgcccggttccccgcggctcccgactcccgggcggcgcggagcggcgggagctaaccagatgggctggcggccggtctgggaatggggcggccgc

SEQ ID NO: 448654 - DNA, 1154 bp, Homo Sapiens
  misc_feature (21)..(21): n is a, c, g, or t
  misc_feature (100)..(100): n is a, c, g, or t
  misc_feature (134)..(134): n is a, c, g, or t
  misc_feature (1138)..(1138): n is a, c, g, or t
cgaagaagcaatttagttggnaatgtccttactccccaagtctttacaaagggagaaagtacattactgcttagatttcacacatctatctgcataagangcaactaagccttttggacatagactatgttaantttaataatattctttgattagattattttattacaacattttttccattaccagtcatttcctgtgcacagttacattcataaaacctgctcccccctcctttgtttgtttgtgaatgtaaaagtgaggcaaagtctctttccgtgtggctgtggctcgttaggtctgaaagggatggatgaataactaagcaccacactggacgggtttttcctagtcccctgcaccagtaaccctttgctataatgaggacacaaagagcctcgcatcaggccgctacccttcttcataactcaaaagcgtcacagtggcaatagcctctagtgctatttgtctttagtgcagttgtgacacttcggcatgatccataatttggcagctatttaccgtgacatttcccttcagtgcagccataacattcagtgaagccattatttggttccatttaccatataaattgtattgttgtgcatgcatgctagcagctacattaggtacctgaaaatgagtaaatcttgtaaaatagatactaacagctattcagcagtaggatttccttgctcctcagatggaaggaaagaaaaattaaatacagtccccaaatttcctagagcatctttaattgcgtccatatttactgagcaggttagatacaccgaaacctaagactttgaaaaataatctggtgggcttcaccttcaatcagaacgggcccatggggtttcagcgcaacggtgacagcggcagcagtcttcagggcactaaaggttaagagggaagccgatgagccacaggcgtgactcagaagagagggtgcaggtttcgctgcttttcctgtgtggtcagtgggtcaatgtgggacatcaggctatagtgccaaggagcatctcattccaccagaacacgtgggagagaaaaatggggaatgcagaatgagtgggctgctattctgtttccagatttcagaggtaacgcatagcttcttagttcggaacgccttttnagggagaagcaaatgt

SEQ ID NO: 448655 - DNA, 2161 bp, Homo Sapiens
ccaatgtgagtaggtaagcagattattttgcactggcttaacatttttagttacttgttccttaaattagatcatgagccatatggaaaaaccaggcgggcttaattgagcctgttggctgctcaagactggtcaggtggaactcacttcaagggtgacaggggctcagtaactggctggtacaaatggaactaatggcatttgcactgacatgaagtccccaactgcagccccaggtctatagagtttcaacaactttattggccaaatgcttctcctatgtttacaacttagtgtgagcctgctcactggcttctccttctaagcccctaagcgggcagcaaactttagtacaggcctggagatggggtaggggttaatgagtgagttggaaacctgctgatgctccacaattggacagcaggacagcaaatcttctacttcttattgccgaaaactgcagaaagacacgaacaggatggagacaggaccgagagtgcatctctgccactggtcccagtttccagtttctggtgcatccaacagagtataccctttgtattcttgcttcagggattgggtgatactatgtcagcctacgcattttgcagaagtacatggggccaaaattggccatgaggtttggtattaccagctccccaacctgacaggatgagaagaaacaaaatgtgtccatgaaaacccttcggaagtgagtcagatcttccacctgtacctggatgctgtattgattggccaggagctcaatggcaccttgcaccacatactcgttctgtaagtgtgagagtgagcaggtagaatagacaacatggcctcctggtttggtggcaaggagtccagccgcaagaagctgcacttgcagcacaggcaatatctgtcgctccttcttccttgaccgcttaaagatgttgttctcctcctcatgaagggagtggcggtctgtggtacagggcacatccaccagcacccggtcataggtgtccccctccagttctccccatttcctgccatcccatgaggtaactcgaacttgatttccatgccctgatctcttcaggcacatagctgtgaaggatcttctgtagtctggctattcgggacggggagagatcattggcagcaagattgcggcaacagccagtctgaagcaacgctagtgtctttcccccaggagctgcacataggtcaagcacgatgtccccaggctgcaggccgagggccagaacaggcagcaaggaggcagcatccatcaggtagtactccatgacacccaggctgccaggtctggcaggagggaagcgactgatatcccctctgtcaaaagtgaagcatcgaaggttcggactgcaggcccaggaggcaggggatggggctgcagattggccaccctcagactgcagttcccagtgggagatggcttcattcacaaaatccttggcactcagctgctccagcttagcacttacatgatcccaggcagcaaagttattgaccagtgcaccatacttctgctctgagaggagactgacacggattgatggccaaagatctccaaactgcacactgtaagtcatgtcaaaattctgcaaagccagtcgaacagcagggaatttgggctctgtggcagcccatttcttcttatatcgatgtctccgcgggaccgtcgcgaggtccacacgcttcagcagctcccggacacccctcagtgtcagcgcagccatatcggcgtgctccacggggtaattccgaccggaaccgcgacaggagactcgcgtgttccggggaggtggtgagcgccacccggcgggacacgagcgaaaaaagggaaaggaaatacatctgacgctctcccaggactccgcgcgcctctacagactccgcccagccaggagtcccctgaaggctgctggaaaaagagcaacctggcagcccggaataatgactctgcctggatgcttagagcagtgcgagggactcccagaagcccctagcccacttgggggaccagggaggattaggagttggtggttgagtaccgaaagagttagctaggcgaaaaggggcgggaagggcctcctaggccgaaattgcatggaggaagatccttaggtagaggaaaatgagaccaggcttgtagcag

SEQ ID NO: 448656 - DNA, 675 bp, Homo Sapiens
atgtatctgtaatagtttattttaaagactttacatttacaagtagaaacaacatgtgttatctgtgggtaaggtagagcaggaactctaatccaagggtgggggagatcagttggttccttcacagaaaataagcctgttgtgtgggcatcttgcttgcctgtagatctttgttcccagttcaggaggtttttattcagtgcttgcttcatttactggaaaagttcactgggcccacctgtcaactccttcccccacagcttccagctcagcagcaaactgtagggaacagatttactccccagttcctactgtaaataatgctttaagaacagcattccttttggacaatatgtcatagacccaatttttaatactcccaagtcagatatctaactagagagtttaggaaatgtttggtatgatcaaacttttcccttcagtacacaatttaatttacgcagaagagcatcggagacatttgtctcatagatatgattgacatgagtgataggctaaaactaaaattttagtggtttgtggagtggctagaaaacatgaattgtaagcagtttttcagaatttaaaaatctcttagtttgaacagtagaagatgtaaataagcatagagactgttggcaagttatgtttatcacaaaacaaagaagaaggccc

SEQ ID NO: 448657 - DNA, 439 bp, Homo Sapiens
attttttgacaagtttattgaacagtattcaagacttcatctttataaacaaaaacctctgctgagtgatgccaaggcagtatttgctggcaatgttgtggccatattggcaacaagccattttgttgtgtttggtttctaaagtctggactactatagaactgccagtaaaacaatttaaatgtgggcaattttgcaagggtgggaaaataatttttaaagtgaccacttccaggaaattctttccaaaaggatttgactaggcaggcaattttacattttctttacttcatttcccgagtgtttctttaaaattggatggggattttacacttgggccccatacctgtacacaaccacagactccagtaaaagggagctggaatttaaggctttcacgcatccttgtttttatgcaaggctgactatttccacctaa

SEQ ID NO: 448658 - DNA, 469 bp, Homo Sapiens
cagtctccactccagaccatccacggcctggttcccaagacccgatccttcccctgcaaccagacagtctacaactgccccctccagcccattttctgccgtgaaaccccagccagccacaccagactctggaaccctttttcgactgccccaactcttggacaccaggccaactagaacacccaacaccaaactgtacagactctcccaccccaacctccccagactctgcacggatgtcctaggccccctccccaactctaaccagaccccatccccctaagtccctttgtcttgacccccaagtcttcaaccagatatcctcggcaacccacctcccaccctcctcctcttctccttcaagacccaactgagcacccgctctgattccccacagcctttctccctgccaccactcccttagtctttcccaggcttactctcccaataaatgtgctagagcctctgg

SEQ ID NO: 448659 - DNA, 552 bp, Homo Sapiens
ttttatgcatattacaaaggtattgctttattgcccttgtctatgcagaatccatgacccaataggattcagttcctgaaagtttactattacttagcatttaatataaatccttctccactaggagatcagcgtgtaaagggaatacgttcttagacactttgatgaaaaaagttgggatggtagaagcagataggaccaaattatacaagattatatataaatctcatggacaaaaggagtttggtgctatgattttagtcacagtaaaccaaagacggtccaggatatgactgaagtgatcacagtaggatatttggccacaaaaagacaaataaataaattgtgctatgaattctttacagtgctctacagttcagatatcatttatgaattctttattgctattaaaaatggatgattggaaataattttcagctacggtatgcagttgtggactgttaagatgatagatataaaagtcctgagcatttataaagtggactgtctaatgttatatatgcacatctcgacatgttataacacatgata

SEQ ID NO: 448660 - DNA, 482 bp, Homo Sapiens
  misc_feature (433)..(433): n is a, c, g, or t
ctttcaattccctcttttttggtgttactaatataaagtttcttgtaaatatgtacagtcttttgagctagttctatatagcagaaagcagttcacagatgagacacacaatatacattttcagggctcaagaagcccatttctcatggagatcctaaatgaaatgccaagactgaaagacccattttcagtgacctttccaaatactgtggaccaagagacaaaacttcagcaaacattcaatcaaatctgccctggggacgggaggggagggagtacgaccccacagactccaagcaacacataaaacgccacagcaggacatttgccaaaggagctaccacatggaggtttgtaggcgtttcaaacaagaaagcacttaggttaagacacgagcaggaaggagcttggatgcaggccaggttgcaatctngaaagggatctgaactgtggacacagttgaaaacacggtcatgttcacc

SEQ ID NO: 448661 - DNA, 768 bp, Homo Sapiens
  misc_feature (353)..(363): n is a, c, g, or t
  misc_feature (730)..(730): n is a, c, g, or t
  misc_feature (755)..(755): n is a, c, g, or t
ttttttttaagtttagatcattgctttatttcactaattgttcaacaacaaagttcattcctctcaaaggtggatcttgaatcattccttgtgttctcttcctcgttctgaataaaaaaggtaatgaagaaaaagcctgtacttttggagacctagaatcttgattgatgctaataagcttttgacagcaatttcgtgttacggtatatcctgctggcatcttggtggtcacacggagctccccaccctccagtgaagatggctgtccacaactaccaccattgaaaccaaaagtaagtgttgaaaaatgcaccttttacaataaaaaagtagaaaccaattcaatttcctcnnnnnnnnnnnacgaatataaagtttcttgtaaatatgtacagtcttttgagctagttctatatagcagaaagcagttcacagatgagacacacaatatacattttcagggctcaagaagcccatttctcatggagatcctaaatgaaatgccaagactgaaagacccattttcagtgacctttccaaatactgtgggaccaagagacaaaacttcagacaaacattcaatcaaatctgccctggggacgggaggggagggagtacgaccccacagactccaaggcaacacattaaaacgccacaggcagggacatttgccaaagggaggctaccacatgggagggtttgtagggcgttttcaaacaaggaaaggcanttagggtttaggacacgagccgggnagggagctggggg

SEQ ID NO: 448662 - DNA, 232 bp, Homo Sapiens
ttcaaaggctgtatctttttgggtttccttttttgcttttgtaaagaaaaataaggttgtgttttctgtttgaaacaaaacataaaaccccctcccgctgggcctgttccctggctctgggggatgctgggaccgcaggtgtgggcaggagaggccaggctgcccggctgagaggagggagcgccctcagagccagagatggagtgcatttgggaatggagtttgattaagc

SEQ ID NO: 448663 - DNA, 404 bp, Homo Sapiens
aaagtggagaaactgtctttttggagtgtctttgacttgggagggtgtagggggggttctcatgtccagttccagtccacagcctgggacgccaggcccagcacaaactccccttgtagccctgttccttcaagccgttagcttctcacccagctgccctgagtcaggacccagggtacccaggtgtggagcaggggcctctggacggcgagagagcggcagggtgaggcccggccgtccgtggcatggccaggcctcagcgcgacctcgcctcgctgcttgcatgcggcgggagccccggccggccgatgcgctgacaggtgggcgcggcggagtgatccgcaaccggcgcgggcttcgaagccggtcgggctaacagggggctgccttgggaggcccgcggg

SEQ ID NO: 448664 - DNA, 635 bp, Homo Sapiens
  misc_feature (550)..(550): n is a, c, g, or t
gcgaccgctgctgggttccagcgggtctgtggggccgcccagccgggaggggtcccgggaggggtcggctctcctggtgctgatgatggcagagctacagggactccccgctgagcaggtccccaggcagcagggtggttagcggcgtggggctgcctatcaccctgctgtcgtcggcgctgggcgggccccacaggctgctggagtactggggcacccgccccacagcagctcactgctccccttgccacccaggcacggggcgttccagtggccagcgtcgctgcgtaccaggccatgggaagctgcccgctgcgctgagccgcggctggctggacgcgctgctggactgccagcttggaagtgggtggcagcgcttggccttgggttaagaagcgattcacttcttcttcaccagcgaacttcggcccaggatggtaagtgttttcccaggacgcacatgtgcagagacttctgggccttggcagcctcctccttggagctgtaccggaccacagcattgcttgagtcaattcaggtggatgtgatnagagccccatgttgcaacacatgtcgcagtgtagaccatcatctggggtggagtttcgaagacgagcactgctggtctctgagtg

SEQ ID NO: 448665 - DNA, 323 bp, Homo Sapiens
gcagtacaagagcgacatgtgccccggcctgatttgcatattctgtctagagcatgcatttgccagtgggttcctgggttggccagatgatctctaaatctgcaagagctctggaatctgacaacaatgactcccttcagactctaaaaaagtctgtgacctgacagttctgagccagggagtcccacccagccctctccacagagagggagtgggtccgaaatcaactgtgtgcagtggctatgcccaggccaggtttctctaagaggtcctctccaagttcaacctgggggaaggatgcctaccaggcactttcttacagc

SEQ ID NO: 448666 - DNA, 491 bp, Homo Sapiens
aatggacacaggaaaaaggtttaatggacttacagttccacatggctggggacgcctcacaatcacggcggaaggtagggaggagcgagtcacatcttacatggatggcagcaggcagagagagagcttatgcaggaaactcccgtttttaaaaccatcggatctcgtgacactcattcactatcacgaaaacagcacaggaaagaccccaaacctcagcagtttaaaacgattttcttttctctggattttatgggttcaggacacgtttggcaggacaggtatcacgtgtggttgtccaggcagttggaggcatgtgaagactcactgagacgtacagggaagctcttggggctggacactgatgctggctccccctgaggtgcatgccccaagctgagaagactcaaggttccagccagagcctggaatcactaaagacttgtttgctcacaggtctggctcctgggctggaagggcttagggaccag

SEQ ID NO: 448667 - DNA, 178 bp, Homo Sapiens
ttttttggctcatggcgccttgctttattgttccaccccagccccccttccctgcagccccctccaaatgacaaaactacccacatcccatggcccacccccaaagcggcgggattcagagctgcgagaacactggaagctccccctctgacagcagcggcgacaccttgggtgcaag

SEQ ID NO: 448668 - DNA, 685 bp, Homo Sapiens
  misc_feature (240)..(240): n is a, c, g, or t
ccctgtttttcctcttggccccagccctgagtgggaaatcattcaaccacccatcttttggtccatctgtccatccactatgtcagcaggtccagcccccagcgcctggtcacatgactgtctcccactcttcctgtagcagggcaggtggccgctcaggcccagaggcctcctcgtccaggcctgagcaggagcccgttgaggaacccatcgtccttgggagcagccatggcaggtggntgtggtctcgagggtctccagggctggggtccctggcttggcatggccaggcagctgagggtggccgttgggtggtggcagtgggcagtaggcgggggctgaggggcaggcccgagtcccacacgggggccgacattggtcacacttgtgtgggacaccatggggccgtagctatagctgctgctcccgctgcgtgccttttgcttgaagtccagtgccagtgtccagcggctccaagatttcttgatctcagcttgtacctcgccgttgcagaaacagtatatgattgcgacaaaaaatccctggaaggagttgaagagcatctcatagtgcatctggacttgccagagcgtccctgagaccttgttgctgctgtcctgctgcggagccctgctcagcgctggtctggctaacacctcctacaccagcccaggcctccagaggc

SEQ ID NO: 448669 - DNA, 646 bp, Homo Sapiens
  misc_feature (34)..(34): n is a, c, g, or t
  misc_feature (54)..(54): n is a, c, g, or t
  misc_feature (60)..(60): n is a, c, g, or t
  misc_feature (70)..(70): n is a, c, g, or t
  misc_feature (85)..(85): n is a, c, g, or t
  misc_feature (521)..(530): n is a, c, g, or t
gctgttagcaggaggaccctcaaggttcaaacgngctccattattaggcagaancagccngcttaagggntagagactgaaattngcaagtctaatacgcgcagatgcagggattcggattttttgttgctttttagtttaatgggactttaaaagtaattgaggagaaagaaccgtgatgttccctgtttctccagtaaaggactggcttttgcttgggcagaggtggtgctgctgggtgtgcagctgccacagactccaaaggcgtagaagtttgtgccaacacacggagtcattctggctctctgctgaggcccctgttttctggcaggtgccctccttggaaactggttttggctctgatcagcggttctttttgcagcaaagcctgcatctgtgttgacttgcaagattttgcgtttattcaggcaaaaactggtcaaaatggttactacatgatttgttcccagaggtttgaaacattcagtgaaactttttaaaactttgattgcatgatgtannnnnnnnnnagaaagttattgtttgagaataatgtctttttataccaggaaaatagttatcctgaatgacgttgaaaactccccctcccctttatttttctttaatcaatacatgtgaaagtaac

SEQ ID NO: 448670 - DNA, 123 bp, Homo Sapiens
tcatatttagtgctttttattgacagtattactaaggcaactcatcgatgctgaagtcccatccagtatgctatttttcatgcctcaggtctaataaatcttaataaaaccagaatgactaga

SEQ ID NO: 448671 - DNA, 756 bp, Homo Sapiens
  misc_feature (579)..(579): n is a, c, g, or t
  misc_feature (678)..(678): n is a, c, g, or t
  misc_feature (709)..(709): n is a, c, g, or t
gatttttgcccatggatttaattatcaaaagcaaattccatgttatgagctgaagagatagtcccagtaatacacattagaaaatgcagtagttagaaataaagaaaggtgtattacctgaaagtggagcagagcatgaggtcacagaggggcggacccaaacccaccataggggtgaagccttacatcatagggaagaaaaacgaaggaaggggcagtcaaggagagtcgacaatgaggaggaaagcaccacagtttaatggaggaagcatcttctacagacacccagacatcttcctgcacctgacccatgcttcttccccttgatattctcagcagacacttccccaactgctgccccagtcttccagaacctcctcagatcatcagatctgttcccaaggctccaccactctgaagggtgcattgtcctttctgctgtttgcctcctggttgcaccttggggggcttctctggctgtgctgagcctcaaataacagaatcccgaggaacagcaggaccaagccagccacacccatgcggatcgagattctccactgtgtaatcctgggaggtgtnggggcagtcttgggaatctggacttcttttgtgctggattgagggtctcagttgctcctgagaccacgagctccaggggctcactgggggtgagacagncagaaggggtttggagctgcgtgaagccgancacctgtaggtcccccgcgtggcctgaggcaccagactattggggaa

SEQ ID NO: 448672 - DNA, 386 bp, Homo Sapiens
gcgagaccttcacaagacgaagggctgaaccgggaggcgaagtttctcaggaggtcccggagtcagaggaggggtaggagtggggtgacggccccaggcgaggaggaacaaagctactagaagagcggggcgcatccctccccggtgctccaagtcccctctccggccgcccgggccttagcagggttgtggactgaaagtccgggagaatacccccttccctctccaaagcgcaacccggtccgggtggctcgggggatcccagcccgggacacgcagccctgggacgaaggaggtcccgggccaagaacaaagggtggggcgcccggcccagccccgccgcccctcacgcccgccctctgaatgggaccccggccggcggccgc

SEQ ID NO: 448673 - DNA, 360 bp, Homo Sapiens
gggtgggaaaaaaaccctaatacccggaaatttttaaactccctgcacccttttttaaacctaacgcaatctgatataaaagagcctgggatgagacttcgaaggcagaagtctactgtctcattaaaacaaggtcttggctattccatgaaatcaaatcttatttcagggcatgtgtgttccaataaaactactgtattgcaggaggcaagtctatctggcctatgggtgtagcttgctgactcctgctgaagcctccctcataaaattaaaaacaccctcaagattaaaattacggtaggggcccgaattttgataaaatattttccttctctttttccacctccatgtatgactgct

SEQ ID NO: 448674 - DNA, 196 bp, Homo Sapiens
gccgactttagaattaggcattttatttaactcatcaaataatacaagttattccaggaaacaacaatcaaaatgtattacttgtactaacgatatgtagagccacatttccaagaaatctcatgaaaataaattacttgatggaataaagcaaataaatagattttttacaaacaataaccctgtgaatattagg

SEQ ID NO: 448675 - DNA, 423 bp, Homo Sapiens
  misc_feature (49)..(49): n is a, c, g, or t
gtaggttaagaaaactgcaggagttgtcatgaaattctattggaaagantataaaaattatcttggttttaaattgataccaaagtctgtctagaaacaacccaaccactgcaaatttggtttttgcaagttaatttaattcaaaaaaatacttgtactcccgtgttttaaatggtcttaattattcatcaccataaaaagtagtttaggagaaaataaaatatttgaccaacagtctaaaatttaatagcactgtttagaataggtctgtttgtggcagacagaatccaaaatggctaatttcctaatcccgatgctctgtgtattaccgggagaaataatgaaattcatttaaaacctcagtctaagaaatcaaatgttcaatacttgctaatctaaatatctacattagtctgatcaact

SEQ ID NO: 448676 - DNA, 568 bp, Homo Sapiens
ccttgtgccgcaacccagcccatgggcttagttgtccaaaggagagttttttttagctggacctgagagaacttgatgagagccccttttctcctctgccctggggaaggcacagctcatgtaaatgcagcgtttgggtgcagagcgtgcaggccaaacccacgctcggccccaccgtttgcataactgcacgctcaagctgctccaggcctgggtgaaggcatgcacactgtcctgggtccaggtagcccagagcgtggatgaccaaagcaaaattccattaaagtcaaaccagatctcacccatagctctttgtttgtttatctgagaacaaagtcaaaggccaaggaggccccactctcctgccacgggggaaccagtgtgcaagctctaggcacctactagagggtacagaggtggcctccacagtggactcggagttctttcccccttcttcggcaatgaggggtttcttcctagggcctattttcctgcagggttagagttaggttttagagcccttttccttaaccctttttttctccttcctatcccaattcatttattt

SEQ ID NO: 448677 - DNA, 415 bp, Homo Sapiens
gaaataagggctattttaggtttacgaaccctatttcccaagcggaatggaaaaattatttcccacctcctactacctccattttcaggagtagttagttctagatttatacctagaggcaacatatagcaagattctaccacttcactatatctacctttcccccttgattgcttttctttcttctttttttgtctacttgagtccgcagtggcactcagtggtacctactgctattgctaatgacagtcttctgagttgagcacatagccaaatcctgatttaaaagtttactaccacttggaagctctatggaaacagtcttcagaaagcatagctgttaaatttcttaatttgatatcgagaagaaatcttggctataaagaagcttttaaaatggcacatggtctataag

SEQ ID NO: 448678 - DNA, 895 bp, Homo Sapiens
  misc_feature (99)..(99): n is a, c, g, or t
  misc_feature (237)..(287): n is a, c, g, or t
gtgagaaatatatatcttaatgtaaaaggggcgcgtcaacagtggggggtgtattatccgacatcatttcgtagctgttgtggccttcatattcatagnagccttgctcgttctgtattcatttgacagacagtgaaacgtagcgtttatatgtatttcccgtcccggtcgcgcaattgcattggtggtcttaggtggtgctcaggaccaccatatttaggtcctgcaatgtcggannnnnnnnnnnnnnnnnnnnnnnnnnnnnnnnnnnnnnnnnnnnnnnnnnntttcgtaggtgcttatgacctctcaatttatttttattctttatcgatatctcaagccaactccattgtagaatttcctttatttcatcttcatccttgttatctttatttaatgtgtgttgacgctttagtcgcagtataactcgtaattgggttattagaataaaaagtctgtgtacattcaaggaaaactgtaaaagcttggtggcaaagctatattaccaaaacaaaacacttgaagtaaactgtaattcatatgtagttctaatttagtaaacatggtttgcatctaccattatacagtatggatattcagcatgactagattagggcataacagaaatgaagcccagtattgtaggttaaaaggttcaaaaatctgaagtgtgaagtactacagattacatttaaatcagaaatattccacaatctgagccatgcattgttactgaacttactagtcagtgtttctaccacaaaacattcagtgaactaaggttatggtaaaactgtttgggaacctctctcttcaaacaactctgaggtgagtcaaactgactccaccccacaggggaggttcagcttagtgtttttttggtgtttttggt

SEQ ID NO: 448679 - DNA, 451 bp, Homo Sapiens
  misc_feature (190)..(190): n is a, c, g, or t
  misc_feature (408)..(408): n is a, c, g, or t
  misc_feature (423)..(423): n is a, c, g, or t
ttttttgaaactaaatacattttaatagaaaacaaaatacaaaataactcttttcagaaaacagaaatatttaatcctttttccacaaattagaacttgctttatcctcagagcatagtttgatatgcgtgcgtacatacttacgatttgtttcacaaagtgttcattagactggtattgcagtgcaggnacgtgggagcagttcattgcaggagaaaaagacgtgggaaaaagccacacctctggaatggtcattcaggaaattcaacatttttctaattctatcttgttacttattactccaaattattctttatcataatctttcttttgaggggagaggaattattaaggggaagtgcagctttggggaaaggaatttttctttccccaccatcactggcgggngccccaaagtgtttntcaatcaaacccacccacccatttccag

SEQ ID NO: 448680 - DNA, 1664 bp, Homo Sapiens
ttgggttttttcactcttcaagtgaagctgacacattcgcccaagctctttgaatgccttcatttatatcccgcacgcgtaagcgttctctggcattgttagccatccgcctctccttctccctttctatcttctgttcagggttcaaatcctcatcttcattagtacttgttctgcctctagatgaaaccttgatatctttttgggaggattcatcatctgacttcatgtcatctgatgaaggaggttcatgaaggttttcatccttttctttgttttcagtcttgatttctgttgtaacaacagttccagactgactttgcaagccacctctataattttcttgtgttttatggttcaggtctgtgcttgaagtagtgactgtactagacaggactgaatgattgccattgagactgacagagtcttcccgatgagttccaaccattgaagctgatcgactgcttgcaacaaggcttgatcctccatagtttgaattgaggcttccaattggtgcattatgggatggtcccaataaactatgtatatcactgtgaccagcaggcaaactggtggaaggtcccacagcatggttccgcagcacatggattgcatcatccagtctgtctaaacgatcctccattcgagactgctcacagacatcctttaagaaggacattgcatcttgcaaatgctcgtgaagttgctgctcaactcgatttttcagggagtggagtgagttttcatagcttggggatgaaggtgcttgccctccaggtcttggccactgactggtacctgtggagagttgaaggtgatcccaactggtgttgatggatttgacggaaaactactgctggtatggtcaggagaataaatagatgccaaagcctttccaagtgcatcacctgtctgtgagcttccagcagcattccctctggttcctagaatgctgtctgatccattgatgggaggagtgtgtgaggcagcaacgtaaggtgaactgctggtactgccgcgatgaaagctggacattggtggaagactcgtgtttatgtctgttggtgaaactgagtgtggaggataactcaagcggtcatgtgaatgaaggttgccataactactggattgagacatgtgggaagtggaggtccccagaattccaccaaaaccaggctggctcatcccatttgatgaactccaaaggtcagaagaattgtgggtcccatcttgcataaagaaagtgctagcgaacatactggttggtggcttaggagatggataactaggagattcacggttgaaatcatctgaatttggggatggtgcatataccgttttcccattgtagtaatacatcaaataattgctgcccatttctgaggtgaataaattgtatccctccgacatcaacatgaacagaactgacagatcatacaagcttctaaaaggcaatcattagataacccttcaaatgagacagaactatataattactgagaacatgtaaaatctgaagcaaattgcacgtttcttttgatcacaaactcacaacgacaaagcagttttctttgaaaaattaaagacggggggtccccctgccctgcatctcttggctgtccctttctttcccctttccttccctacgtgaattgcagcttgtc

SEQ ID NO: 448681 - DNA, 680 bp, Homo Sapiens
gctagttaactgcagcaggagcatgtccttaaggcacagatcgctcatgctattgtttgtggcttaagaatgcctttaagcggttttctgccctgggcgggccaggtgttcctcccgtgaacccacaaccttccagtggggcactagggccattatgaacatgttacagtgctgcagagattttgtttatggccagttttgaggccagtttttagccaggagtggtggtgtgccgagaccagctcggtcggggagaccctaacccagtggtgctagaggaattaaagacacacacacagaaatatagaggtgtgaagtgggaaatcaggggtctcacagccttcagagctgagagcctcgaacagagatttacccacatatttattgacagcaagccagtgataagcattatttctatagattatagattaactaaaagcatttcttatgggaaataaagggatgggctgaaataaaggggtgggtctggctagttatctgcagcaggaacatgtcgtttaggcacagatcgcttatgctattgtttgtggtttaggaatgcctttaagtggttttctgccctgggtgggccaggtgttccttgccttcgttccggtaaacccacaaccttccagcgtgggcgttatggccatcatgagcatgtcacagtgctgcagagc

SEQ ID NO: 448682 - DNA, 709 bp, Homo Sapiens
  misc_feature (313)..(348): n is a, c, g, or t
cagaggacttgaattacttcattgaggggtgagctccagttcctcgatcggataatgccttgaaaatgaaacccatgctctctgcttctgcacacgtgccacacagaggtgggttcttaatgttcgctgcatgagtgctcttagcaagcggagctggtgaaaaggatggcagtttggcttttgagcatctgaactgtccccttttcaaccccgccccatgccactaaaatctaccctctctcagaatgcacagacactatggccacagggagagcaggtgtgcgtgactcaccaccgggctgagagcggctgnnnnnnnnnnnnnnnnnnnnnnnnnnnnnnnnnnnnggctttgttaacccaaacaggcgggtagaggcagaggtggacgcaggggcctggctctgcccttctggtcctttgtttgtctggctggttgaactcagtatgtgaaaaggccccttatctttgtgtgtccgagagatgctgttcctttttggggacactgaaagttctgagtccaatgaccctgatttggctatggaaggtgcagatggcgaggggggctcctcaggactggggaagaacgatgggatcctcatcagcttggtatgtggatgggaaacctgtacatattcaagagaagggttttcacttggaggctgtcagcgtccgtgatgccaactcaataaatcctggctgaattcaa

SEQ ID NO: 448683 - DNA, 423 bp, Homo Sapiens
  misc_feature (61)..(96): n is a, c, g, or t
gcagagccaggcccctgcgtccacctctgcctctacccgcctgtttgggttaacaaagccnnnnnnnnnnnnnnnnnnnnnnnnnnnnnnnnnnnncagccgctctcagcccggtggtgagtcacgcacacctgctctccctgtggccatagtgtctgtgcattctgagagagggtagattttagtggcatggggcggggttgaaaaggggacagttcagatgctcaaaagccaaactgccatccttttcaccagctccgcttgctaagagcactcatgcagcgaacattaagaacccactctgtgtggcacgtgtgcagaagcagagagcatgggtttcattttcaaggcattatccgatcgaggaactggagctcacccctcaatgaagtaattcaagtcctctgccttttctggagagag

SEQ ID NO: 448684 - DNA, 390 bp, Homo Sapiens
  misc_feature (160)..(160): n is a, c, g, or t
  misc_feature (168)..(168): n is a, c, g, or t
  misc_feature (172)..(172): n is a, c, g, or t
  misc_feature (185)..(185): n is a, c, g, or t
  misc_feature (191)..(191): n is a, c, g, or t
  misc_feature (197)..(197): n is a, c, g, or t
  misc_feature (201)..(213): n is a, c, g, or t
caaccccacgaacagcccagctttcccctatggtctctccccccacccgccaccatcgaagctgggggtgtgtgtggagggtgtgcgccttgtggggtgaatttcaagaggcaccgccccttttaaaattaggtgcttggagggcggtgcctgtgcgggntggggcanaagncaggtctgttttngaaggnacaccnccgnnnnnnnnnnnnnagttcctgccgcgggtgtcctgcccgggctgtgtccgagggaggggtttcccctgcgcttcctcttgcacttcccgctccgtttccggggggcgggaggaagattggggaagtcggctcttactcggcgacgtctctggtgccggagaccctggttgtgcccgggggcacctgccgc

SEQ ID NO: 448685 - DNA, 744 bp, Homo Sapiens
ccggtactgggcctcaggtaagtgcctgccaggaggaggctctgacctgcggcaagcccttaccctctcccgctggagcagcccccttgggaggcagaagagcccccagaatggggggactgatggcaaggccaagctggtgggcactcggcctttgagcaagatgtggaggagctggaccgggcgctcaggcatgccttggaggtcaacagtcccaaggaggagacgggtggggcctggcgccgcacactgcctgcagagctgcgtgctccgcctggagcggtgccatggtgtgagttgttggcctgcgtggtgactgcaccatcctccggtggcttcggggcccaccctgcccgtggctgcccgccacttggtggcacttctggctggcccctgggatcagagtttggcctttcccttggcagcttcaggccctaccttggcggggcagacgctgaaggggccctggaacaacctggagcgtctggcagagaacaccggggagttccaggaggtggtgcgggccttctacgacaccctggacgctgcccgcagcagcatccgcgtcgttcgtgtggagcgcgtgtcgcacccgctgctgcagcagcagtatgagctgtaccgggagcgcctgctgcagcgatgcgagcggcgcccggtggagcaggtgctgtaccacggcacgacggcaccggcagtgcctgacatctgcgcccacggcttcaaccgcagactggcggccgc

SEQ ID NO: 448686 - DNA, 1044 bp, Homo Sapiens
gccgttcccgtgaccgcactagccgcaccacaacaaccagtatgggtggtaccggtccggaattcctgggatgcgtgaatcgcgcagggattgactaatttggggtggggggtgcggtgggcgatggagcagcctgaggacatggcgtcgctgagcgagttcgactccttggcgggcagcatcccggccaccaaggtggagatcaccgtgtcctgcaggaacctcctggacaaagacatgttttccaagtccgacccactgtgcgtcatgtatacccaagggatggagaacaagcagtggcgggagtttgggcgcaccgaagtcatcgacaacacgctcaatcctgacttcgtgcgcaagttcattgtggattactttttcgaggagaagcagaacctccgttttgatctatacgacgttgactctaagagtcctgatttatccaaacacgatttcctgggccaggccttctgcacccttggagagattgtggggtcccctgggagccgcctggaaaaagcccctcacgataggcgcattcaggcctgaattccaggaacgggcaaacccatgccagctgtgtccaacggtggtctttggatggaaagtttgagaaccactggtctggaagcctccggtggtgtcccaggaaagaaatgtggcaccatcatcctgtccgctgaggagctcagcaactgtagggatgtcgccaccatgcagttcttgtgccaacaagctggacaagaaagatttctttgggaaatctgaccccttcttggtattctacagaagcaacgaggatggaacgttcaccatttgccacaagaccgaggtcatgaagaacaccctaaatccagtctggcaaactttctccattcccgtgagagccctctgcaacggcgactacgatcggaccatcaaggtggaggtgtatgactgggatcgggacggcagccatgacttcattggggagttcaccaccagttaccgggagctggcccgtgggcagagccaattcaacatctatgaggtggtaaacccaaa

SEQ ID NO: 448687 - DNA, 265 bp, Homo Sapiens
aaagggtgtgtagagccacccaccttgaaatgatctatcaagggtgacagccagcccaaggccatcttacaagggaataaaagccctaccctccctctcctgactttgtctccagccagggatttctcctgacaacccagccacaagctggaagaaggagatctattgatatagggtggaccttgggactggtgggaaagggtggagagtacaacatattcagctcagtagtggagatggaaagaggcaacagactcaaacttaa

SEQ ID NO: 448688 - DNA, 588 bp, Homo Sapiens
tttttgacatttcacattttatttttagtaccatatcctttgtcagtgctcatcagaatgcacattaaaatgggtttattttatgcatattactgtaccacaataaatttattacaaatcacatgacctttatgttagacattttaatacatcaataggaggtcacgtttcattcagaaaatagcagtttttccctcaaacaccttcaggtttactgtgggttcacatagcctaggttaagcagttggcaacattttgcttcactgtctggttttacaaagctttcttgtgacaacagggtataaaagagtctaccgagttcaccaagacatctgcttcaaagagagctgtgaaagcacaagcctcaagaagaccccaaacaggtgcctctggggagcaggcccatgccgtgtcctgcatgtagcccacagggtgatggggcaagggcggtgtgctatgggatgctgcaggcctgtgggctgagccaggcggtctactcgcccagataggcagcccctgggcagccacgttctgctacgaaactgtatgtccatatatgtgcatgtgagcatacccagaggggcacag

SEQ ID NO: 448689 - DNA, 441 bp, Homo Sapiens
cacatttaacaaatatttattaacgcagaaatgaataaggcttggccccctgttcttagatgctcagtgcagaggggcagacaatcacaaagctacaataaaatcacagtagaataagtactatcaccgaggtatggacaaagtactttggaggcacagtgagaggaataaagaggggaagagaggaacaattttctcatttatacctgcctagagcattcagggaagactccagagaagtcatctgtgagttgggtcttgaaggaggagtaaaagccaccaggtgaatagtcaaagaaggagccctgcaggctggggctcagagatgtaggtaaggccaggtaagtaaggggttcagggaactaggcatgagtgacaaaaaaaggaaataaagagggaataaagaatgagcagaaggactgcaagcacaaacccattgct

SEQ ID NO: 448690 - DNA, 459 bp, Homo Sapiens
gtaaaaagaaacctttttgcagtgtcattgttgaacccgctgggccccaagggggcatcagtgagttcaaggacccccaaagggtcaatgaaccccctttcccaggggactggggggcttatgagtcagggggtccaccatcgccccagggtcatcaggtggccctgaggtgaggggtgaggagggagagctgtttcatgtcccccggggggggtggcatctcctgaccccaaggacaggagcttggggacatgaccccaagaggctcaccctgaggattccggggtttccggcatcttggtaagccaccggcagcctcccctctccttccctttcctcaaggcctaggaagtcatcacagtgggttaaggagcattaaggactgggaacctggggccaggcaagccccaagtgtacccccctccggcaccctaacggagaggagggacaagggctcgg

SEQ ID NO: 448691 - DNA, 272 bp, Homo Sapiens
  misc_feature (196)..(214): n is a, c, g, or t
ttttttaatttaatttaattttaaaataaatgctgcattggtaaagctggcagttgaaaccagttggacggcccagcttgcgtctcttctgcctgagtgggcctctcaggtcactcgtgccctgctggaggacagaggggcacctcagccgcccccaagcccagagcacagcaataaggtcggcctgcaggagccnnnnnnnnnnnnnnnnnnncaggaccctgagatgccaccaggacctgatgggccaggaagggcgtggacatggaggc

SEQ ID NO: 448692 - DNA, 650 bp, Homo Sapiens
ttgtcaggcaagcaagctttattgagctgcttggctgctccaccacagttagaggaggcagccctgcttacagactatagcaggtttttatagggccagaactaggtcggggtgtgggagctgagttgggggtgcaggagaactgggttggggtgggggagcttagtcgagggtgcaggtgtcttgtctgcatcctggagatgttttttgccagctttgttatgcgaggtgaacagacatgttaaccgcatcctgtaactgtctgcacagttactggagggatcagtgaaggggggtttgttttttgccctgtggtagctgtgcggagagcacaagggaccgtattgtaagtcctgtgggaggggaagggaacggtctgatcagggtgaccctaacagaagagtattattctaaacacctatctcataaatcacttacaagtatataaaacaaccacaaagagcctctctaccaagattttactcacgcatcttacatttcagtgtctttcacctttcacggacaagtatatcagtgatgcacacctaagagaaaagaatttctcatatctctgacgcagcaacaactgaccatgtgttttcacatcagcactagaaatgaagacacagcatctactgatttgagaatcc

SEQ ID NO: 448693 - DNA, 807 bp, Homo Sapiens
ttttgccacggaaaccagatacatttattaaatctactcttagccaagcaataaagatgtctacagagttcacaacctgcaacacttcaccaggaatgctaggtaaaggcaacttcagtttaactgagtactccatttcaagtgggtaatgtctgctggttggcagctatccagtttggaaaactgtggaagatgctgttgctacccagattgttctgttcaacaagtgggcctgaagcctgagcagtgtagccagctgtgtggggagcagaggttcactccattgcttctgcagcctcctcacctgactcctcctcctcctctagtaagcagcttcttgtcacagacttctggatagcttcccgctctccttcatcagtgcagttctgcaacaagatcaacagctgtctcctgttgtactgaattaggaacttctgacatgttcttattgtacctcccacatgtaatgtgttgaaaaagcatgggtaacggtgtcctttgttctccaagtatgtgatgaagggaagagctgaccacacaagctgatagaattcttttctgcatcgaagtagcactattccagtataggcattgagatatcgaaccgcgaagccgatggagcaggcggctgcgccgaaagttccgtgcaccctggcgatcgtgtcccgtacgaggctgctcagaactcggtcatcgaggcttaggcggcagcgggggtcgtcagacaccagttcgcagagcaggtacctgtgcttgaaccgcaccatggctgcctccgcgctctccggtccggcgtgcatacccgct

SEQ ID NO: 448694 - DNA, 822 bp, Homo Sapiens
  misc_feature (85)..(85): n is a, c, g, or t
agttcgacggagactctcagtctcactgacttaggagagttaagtctatctgcatttaactctccagaagtcaatctcaaacaanggtaaaagtgggaactaatttaagtggtgtgaaagaagggcccctctgtcctagctcatcctgtatttacatatattgacaatcatgtgttctgtactttaccaactatttaagggctttcccggagtacttttgaccatttttttccatatgatgttaatgtaatcggtcatataatagctcttactaggaagtatacacagcttccctcatttaattctctaccctatcaaattcaatcacaaccaattacagaaattacctgtcaagcaggtaaaaagaggcttctagctcaaagccccactgccttcgggcccctccttttagcgctctgctaatttcggactctcgcttggggtcccaggcgcttaaagagataccttacaaaaaacggtgcacgggcttggccactcgtgccccttctttcttcctccggcgcctgccccctccacatcccgccatcctcccgggttcccctcttcccccagcgcccttgcacccgcgaagccgatggagcaggcggctgcgccgaaagttccgtgcaccctggcgatcgtgtcccgtacgaggctgctcagaactcggtcatcgaggcttaggcggcagcgggggtcgtcagacaccagttcgcagagcaggtacctgtgcttgaaccgcaccatggctgcctccgcgctctccggtccggcgtgcaaccccgctctcgacgaattcgagctcggccgatttggcctgat

SEQ ID NO: 448695 - DNA, 548 bp, Homo Sapiens
  misc_feature (192)..(200): n is a, c, g, or t
  misc_feature (536)..(536): n is a, c, g, or t
agagtatcctgtttccccctagccttttgggtttcctactttatgtaccagagataaaatatccttgcctaagaaataaaaagcacatgtcctcaacgtgccataatccattgctgggtttcctacagggaatgccagacagctgtctccctgaaaacacccacaaagctgatacaagtgttttctcaaagnnnnnnnnngtgatgtccatatttacaaagttgaacaaatctgcgcaatacttaagaaacggaaggagaaatttaaaaaaagatacactctgcatgttctgaaggggcatacactacctagttagtggttagaataaaaactgtatacaatttaatataagacataaactctagtgagcaactaacacatctgtccctgttgtaatatcaacaggctctgattgggagagagaggggcatatcacatcacttaaattagttcccactttaaccttgtttgagattgacttctggagagttaaatgcagatagacttaactctcctatcaggtgagactgagagtnctccgtcgaact

SEQ ID NO: 448696 - DNA, 528 bp, Homo Sapiens
gcactttctagacaatcaaccaacttccatttattttcacaactgtggctaaaccagaggttcatccaatggtgacaatggaaaacctagtaagcaaagagtaaatctggttatagtcaacacctggatccactctaagggaatggtgcttatgtgtgatagtgacagcttcttggtccaaaaggctgacagatgaagagcacgtttctggggtttcccctttcctatcttgtctggtcatgacaagcagttctcatgtatttctttaactgaagtgttaaattgcatggtttctctcaggagcacttgataggccaagagtttctcctccacactttctgttggacaccttatccttcccactgatccttttacttacccacttttgaatcttaagcaaacactctttggaactggcctgcagttctaactgataggggattgatgaaagaaaagagtaacagttgaactctcttttattcttgggctgaggcttagtatcgcacctgcttccgtctctctgggatg

SEQ ID NO: 448697 - DNA, 711 bp, Homo Sapiens
  misc_feature (245)..(264): n is a, c, g, or t
  misc_feature (646)..(646): n is a, c, g, or t
  misc_feature (682)..(682): n is a, c, g, or t
ctagttctttttttcttttctctttaagcatcattaattctgtcctaatacaagtttggtcaaaacgaaaccattgttatctctgaaaaagaaatcagcagtggaaagaacatacttgtgggcacttcagatgttcactaaaagccttaaagcagcattggtctttcttcatccctgtaaaatgggttatcaccaggagggatcatttttaaatcaagagaagagacaagaaaatgccaatgccnnnnnnnnnnnnnnnnnnnncactttctcacagccacagggtcgtttccccggcagtcttgcaaaagcttatcaatttctctcacaacttcctctgcatccacagactctctgcccagatccctgttggggtggtcaagctgctcaagaacagcacccatctcactggaatcccggctggctctggaatgcacatctgcaaagacccttgccatctgatcggaagccatgaagggagggtctcttggttgcttactaggtgacagatattgactgtcagtggggcaagtactgactgcttgcttcagccaggggctcctgggttttgcttcacaggccatccaggggaggccttttgttgagggtgcaaggcttcgatggcacgccttgggttgggggctgnctttgatgcttgaggggggacctctttgggagggangaggggttcaggggcacttttgggttttt

SEQ ID NO: 448698 - DNA, 560 bp, Homo Sapiens
tgggcggatcacctgaggtcaggagttcaaggacattatgctgcatgttcttcgcggatccatccatatctaaggacatttgttaaacacattgaagtggctatagcttatgtgtgtgggaaggaagggtggttagaatgatagaggaaatcaggtaaaaaaaatcaaaggacacgtttgatgatggtgatgatgatgatggcagtcatgaactgaggagtgagattcatgccactctacatttgaggttctttctccagccatgtaactctggcaatggagtaaaatagggaggagggggaaggtgagaacgtaggtagaaagagctgttgggcaactgtagcaataaaacagaaaagagatgaatgtttgcacataggcaggggcagcaggaatgcagaagggcaggtgtcagagagcgtccacgtggtaggacccacagtaccaggtggctgaatgcagaggctgaggctgagcagggcggccagtatggctcctgtgttctgatggcgtgtagtggcgtgaccagccagggtctgctgtatattctcaggcctttt

SEQ ID NO: 448699 - DNA, 273 bp, Homo Sapiens
  misc_feature (176)..(176): n is a, c, g, or t
  misc_feature (226)..(226): n is a, c, g, or t
  misc_feature (238)..(238): n is a, c, g, or t
  misc_feature (263)..(263): n is a, c, g, or t
ttctccagaggacattgtgttcatgacaatctatcaccacaaggcaaaatcagacagaatttggggagagcatgaaatttgttaccttctgcttgtgagggaaaaacgtcactctgaacccggatcccagtgaaacgaagagcatcctctacctgtcccgggggggagctgtgggnagctgctgggagagggtaggccgagggggtgaaggtcaaaggtcaccccnggggctaagganccatttgccgaggaggtttctgtanccggtgggtg

SEQ ID NO: 448700 - DNA, 515 bp, Homo Sapiens
  misc_feature (443)..(443): n is a, c, g, or t
cagataatatatatttgttggatacatgaatgaaaggacagggcaatagcaattctaatatggcaagaggtgttagggggcggacagatgatggggggacacagaggcagatgttgctctgagccacgaaccagccatgcacccccatcctgggagagactggcaaaacgaaagcaggaatccaggccaaggtagaggacccaggtggaacccagacaccagacctagggtataggagtctcagccccaaccggaggggcttcaggcttctcccagatgtcacttaagttccaatccagctctctcccttctactcattcgggaggacttcttggaagaggtaagtctctcagagaccagaaaggtagggaatacccagccaggctaatgggatgaggatgagtccctccccccacccccaagcagtttgagggaaacattgngctgtggaggaggaggctcagcagcccagcctcgccacatgctcaggcatcccaagaattccggaccggtcc

SEQ ID NO: 448701 - DNA, 294 bp, Homo Sapiens
ggggagggaaagacaaaacgtatttattccaggccaggtcttaaaatgcacactgcacggttccctgttgttatcagcaccagtaaggaaagaacgtgccttaacggcagccccacccagagcctgctgcgtggctgctgtgaggctccccatgaatccacgcagtcttcttcctcactggtgcagttggtgaggttttctaccctcacagcaaagggatccttaactataaattcacggtatgcagagaagaggacagaatctgatttactgattgttcctcatttaaacccc

SEQ ID NO: 448702 - DNA, 615 bp, Homo Sapiens
  misc_feature (540)..(540): n is a, c, g, or t
  misc_feature (564)..(564): n is a, c, g, or t
  misc_feature (587)..(587): n is a, c, g, or t
  misc_feature (604)..(604): n is a, c, g, or t
gtggacttccagttttccaagggagccgtgtactggacagacgtgagctaggaggccatcaagcagacctacctgaaccagacgggggccgccgtgcagaacgtggtcatctccggcctggtctctcccgacggcctcgcctgcgactgggtgggcaagaagctgtactggacggactcagagaccaaccgcatcgaggtggccaacctcaatggcacatcccggaaggtgctcttctggcaggaccttgaccagccgagggccatcgccttggaccccgctcacgggtacatgtactggacagactggggtgagacgccccggattgagcgggcagggatggatggcagcacccggaagatcattgtggactcggacatttactggcccaatggactgaccatcgacctggaggagcagaagctctactgggctgacgccaagctcagcttcattcaccgtgccaacctggacggctcgttccggcagaaggtggtggagggcagcctgacgcaccccttcgccctgacgctctccggngacactctgtactggacagactgncagacccgctccatccatgcctngcacaagcgcactgggnggaagaggaaa

SEQ ID NO: 448703 - DNA, 768 bp, Homo Sapiens
agaaacccaggcttcagcccacctcctaatgtgactgcttcccccagcatggcatggacttattggcagagacccacaaatgcgatcgaagctcctccgcaacaagtttccatatcaaccaaattatggaactgggacaacaaccatatccagccccttttggtcgagtgtctagtcctcccaatgccaatgatgtcgtcaagaatgggtccctcccagaatcccatgatgcaacacccgcaggctgcatccatctatcagtcctcagaaatgaagggctggccatcaggaaatttggccaggaacagctccttttcccagcagcagtttgcccaccaggggaatcctgcagtgtatagtatggtgcacatgaatggcagcagtggtcacatgggacagatgaacatgaaccccatgcccatgtctggcatgcctatgggtcctgatcagaaatactgctgacatctctgcaccaggacctcttaaggaaaccactgtacaaatgacactgcactaggattattgggaaggaatcattgttccaggcatccatcttggaagaaaggaccagctttgagctccatcaagggtattttaagtgatgtcatttgagcaggactggattttaagccgaagggcaatatctacgtgtttttcccccctccttctgctgtgtatcatggtgttcaaaacagaaatgttttttggcattccacctcctagggatataattctggagacatggagtgttactgatcataaaaaaaa

SEQ ID NO: 448704 - DNA, 352 bp, Homo Sapiens
acacagttccatatctctctaaagctttcttcacggcatgatttagaattgttttatttgtgttcctcatgctacaacacaaccttcaaagtcagcgaagtttataacattaatatgcttcctcaaaacatcaatttaggcaacccatagccagagcttctaaacttctacaatgcaacttcaacattcacaagagcacaatatgcttcaaatcccatctcaatgcaaatttaagaaaagcaaagcaaattgtattatcagtctaccaaaactcagtaagattctgtaatttaatatacctacttctcaactctctaaatttgtttctcaacactggggagtttttaaagcc

SEQ ID NO: 448705 - DNA, 400 bp, Homo Sapiens
ttttgcattacctcttaatagtattttatttaaaagttcacaattagagcacttgtaataacagaaaatatttaaaagtaacaaaggctgcccttggggagagacttttttcttatatgtagaaggaatggtgtccttgcccttacagtgggtggaattaatagtgcagtgtgggaccccatagttcaacagaatccatcgtcttaagggaatgaaccttacttccaagttattccaaaactgggggagagtgtgaatgacaaaaatctgattatttcactcgggccaagttaaaatccaatgataaaaacaacaacacatctacataaacactgtctaccatctgctgatatagtccagaaaacaaaactgcaaaccagtattccttaaagaaatccat

SEQ ID NO: 448706 - DNA, 1171 bp, Homo Sapiens
tttctttttttgtctctctgtcaaccaggctcccctcagactcagattctgtatccatcaccttcacctaaatgacatcctcttcttcatgtcttccttctctttcttcaagtcctttgctttattttgaaggttcttttgcatctcttcataggtataagcaatttattgaaaccttttttaaaagtcaggcttcaatccaggaaaggatccatatgaattgtagcatcagacagcattcaatttcctctgcaaagacttcttcctatggaaatagactctcagtgatgaccaaagacagaaacttgagtagctcattaatttcactttccctaatatcaataaatcttaaacccacctgttttgcagacactaagattttttttaacttcttcattagctctagggaaatatgcatcattcacacatcctcccacagtttccagcaagcttaagagtggctgattttatatcacccatcacctcttttatcactaccaaagcatcggcaatattgtactgttgccatgcttctttcagagtaaggtgagggttttttcaatacagtcagcaaagtggtcataacatatgcttgattatgttcaaatgcttcagttataccctgacccaagggctgaagaaagctagggccttcctgagggagaaacacagtatcaacattagaatgaacaaagaataatgaatctgggtgattgggacctctgtccacagttagcaacattctgatttccagattttttttgttaaatgacttcggatttgatggataaaaaaattgtaaaactaatccaaaaagtggcagtggtgattctgggtgtgattacaagaaaacaggaaggcgtttatctctaaaagacaagtggggtgttagagtctttgtaaagcagcagtggttttatcattttgtcacctgaggcactgccacaaaaaaatgagggaaatcctgtccttagcttcctctaagctttccagatttttgtcttttgccccaaaagtaggaaggcatgcactgcaaaagatgggtcatctccttggcgttgaagacctgttgaggcacaaagcctctctccagttgcttggaatactcgatacccactcaggatttaagggtccttcctccccatcaacttcgtatgttgcaaaacagccc

SEQ ID NO: 448707 - DNA, 556 bp, Homo Sapiens
aagagttcattggtttagcagtcagcactgatggcaggaatgcaaactggtatatcttttaaaaatgttatccccttttatatcatataagattagattggtcatgttaaaataccaaaactacagttacccaagcaagatatgagtttaatttgctctcaagtggtcctgggttggtgtggaggctctatagtcatcaggaacccaactttcttccatcttgctgctgtgccgttcttaatacatgattcccagctagtggtgcagtgctggctttcatgtttatatttctagccggcagaaaggattgaggaaagagttatccacctcctgcaagtagatttgcaggaattctcactcctgttagccagatattacccacctagccacatgggggagtctgggaaatggggtccttattctagatagtcatggacccaaccaaaattccaggcttctgttactaagcaagagcagggaaaagaataagaggaccgccaaccattctgccttagtgtagttgatcctgtaattctacttttaggagtttatccta

SEQ ID NO: 448708 - DNA, 621 bp, Homo Sapiens
ttctaacaattttttaattttattgttataatacacaggggatacaaaagtacctttagcaaatacataaatcatcagttattatggtaaaactactagtttaacttaggtttttcccaaaagaagctacttactttgaaaataaaactagaaatcagattattgggctgctacttaatgcataataatttacaaaatgaagaagtcaggttaaaaggctttgcacagctattgttcacatttacagccttggctcaaaccctggtctctgaccaaagaaagatctgcttataaccatatattccaaggctcagccccttttctctatctttctttgatggtagatttcagagtaagcagtggcagaacagcaattacttaaagctacagctttgcagtacactttaaggtcacatgattgggcatttgttccaccagacttgggtaaaacaagtgtgttcatttcaacatcaaagtcaaggtctgcatcgggtgagtgcaggacggaccgtacagttccaagctgccccttgcaccctggacgcccagagcctggagagcctgcacagaatattctggttgagagtgagttactgagtcctcaggggtgcagcctggccc

SEQ ID NO: 448709 - DNA, 544 bp, Homo Sapiens
acaagtcgttaatataggtaagtttgtaagaatgattgtcatgaattaggaggtgagttcatttgctgcgggtaagtgataggagtggtagcttttatacaggaagtctaaacagaagttgggaatgtctactgaggtgtatgagaagggaaggtgactaaaaatgtgtaaaagaatagttaataaaaatcagaaccctacacaatacagtcatgtgttgcttaatgacggggatatgttctgagaaatgcattgttaggcgatttcatgcttgtgggaacatcagagagtgtatttacacaagcctagatggtatagtctactacacacctaggttatgtgggatagcctattgttcttaggctacaaactcatatagcatgttactttactgagtaccgtaggcagttgtaacacagtattaagtgcttgtgtatctaaaccaggggtgtccaatgttttggcttccctgagccacattggaagaagataaattgtcttgggccccacataaaatacaataacgatagctgataagctgagg

SEQ ID NO: 448710 - DNA, 558 bp, Homo Sapiens
ctggtgaagtcggctcatggtcaggtctctgggttctaagttgctgggttttctggctcagagtctctcatgaggtttcaatcaagatgtctttcggggccattgaaggtttgattgagcctgctcttctttcccgactcgtctttaatacccaccaggagccagtcgccgcgggcctggctctgtggtggcaagttgcatgggttctcccatcaggacctcccgatgagcctacgaggtcggttctattactgtcgccacttcagagggaggaaacaggcccgcagggttggggaacttcccgaggtcactgaactggtgtcaggcccggattggaatccaaacacatcccagcccatgcccggctctacagcgccggcccccagcgtcttcccgggtgccagcggcacccgcatccattcaaatgctgcccattccccgctcctcagtcgcttcccgctactccgcacgcgcatctcccccacccgtcagggtcaggcctctcggtgacttttcctttttctctggcagaaactgaggggtgagaccgatggttgc

SEQ ID NO: 448711 - DNA, 585 bp, Homo Sapiens
ggcttttttactccctgaagtcctcttttctccacagaatatttacaaacagggaaggggtggaggccacttccgccaccaaataaggggctagggaggggggcagtgctaagacacgcctctgcgcagggagagttcctgaggagggcccagtgtgaccacagtgccctcaggggcccaggtggttccagacggctcaggccaggtcggcggtgggtgagcccagctgcttggaggccaggaggaggcgtgtggctgcactctcagactccgcctgcagccgccggttgttgtgtctcaggctccgcacctcctcctccagggccgccctgtccgccttctccttctgcaggtcctcctgcagcttcctgagcatggactccaagtgagagaccttctctgagaggttcccaggctctggctcagcatcagattttggagttcccttagggtctccactctctgggatatggctgtccgtctcgggacagcgactccagaatggtgtttgcaagtagaggcaatctccgagatggcctgccactcgtcctccagggtcccactgacaacggcgggtaccgagct

SEQ ID NO: 448712 - DNA, 869 bp, Homo Sapiens
  misc_feature (749)..(799): n is a, c, g, or t
tttttttggagtcttgggcttcttgccagagtctggagcagctcttttctctccaatggctctgttggcttcatcagcatcctcttcattgatggagctggaaggggagggagtggctgatttgcttgctggaggtgaaggagatgtgtgaggcatactggcacctcccaaattcaaccccaactgggcgctgagctgagactggttgatggtggtgagctgggcaggaggcatgaccccagaacgcgcagcatcggtcatgtggacgatggaccgcatgatcagggagggatcctgccggtactgggacacttgtgtgtggctctgatccatatgcaacccactgctatgaagcacgccatcttgttccacgagatttcttgagattgtaatggaagggaggtccaggctttgagggggaaactggggtgtgaattcacttccctgggaaggcaatggatcgctgagggcttgaaagggtagcagtacatccggcatgcctagggcagggtctgactctggaggaggcgtgattggtggaatttcgaattcctcgtccccaaggcttggtgtgtggaatgtctgctcactggcagcgaagaacgcattgttcgcctcagccatattcatatagttattattatttccaaaccttgctgtagccgtagtaccccaggcactgcgcgaagtccaggctggcagggtccccggccgccgcggggtagaacctcacatccatgccgaagctnnnnnnnnnnnnnnnnnnnnnnnnnnnnnnnnnnnnnnnnnnnnnnnnnnntcctcgccgccgctagatccaccgtcgagggcgcccgggggtggcgcgtgggactcgcggccggaggggc

SEQ ID NO: 448713 - DNA, 494 bp, Homo Sapiens
  misc_feature (68)..(76): n is a, c, g, or t
tgtaggtaagaattttttattacgtttaaaacattacaaccaaattcaatttgtatgtctgacacagnnnnnnnnngtcatggacaacagtaatacaaacatttcagttttgatgtcacaaggcacaaagacaactgacaggtggccctcacgaagccaacttctcacccttctctgtcccaccctcctactcccttgttctttattctcacacagcaaatttcttatgcagtcgtgtctaatacttttgttaataaaaatggcttttccttaaagccaaggtaaaagagaagctatctgtgtctcttttagccttcccagaagaaatgagtcagactagttacttcatggccagccccaccaagaaactctaagaaaaatttagctaaactactatatctttttccttctcacattccttattcctctatatctgatccctcttagttctacctaaaatcttaaaatgtagtgaagatgccagatttttgctg

SEQ ID NO: 448714 - DNA, 894 bp, Homo Sapiens
ttcttggaggagcacagctacagcctggacggatgtctcccagccagtttgcacgggtccctggatttgttggtagtccacttgctgccatgaatcccaagttgctacaagggcgagttgggcagatgcttcccccagcaccaggcttccgtgccttctttagtgctccaccctccgctacaccacctccacagcagcaccctcctggcccaggaccccacctgcaaaacctaagatctcaggccccaatgtttagaccggacacaactcacctccatccacagcaccgtcgactcttgcatcagagacagcaacagaatagaagtcagcatcggaatctcaatggtgcgggagatagaggaagtcaccggagcagtcatcaagatcatctccgaaaggatccatatgccaatctcatgttgcagcgggaaaaggattgggtctctaaaatccagatgatgcaactgcaaagcactgatccctacctggatgatttttattaccagaattactttgaaaaactggagaaactgtcagctgctgaagaaatacaaggtgatggccctaagaaggagcgcaccaagcttatcacccctcaggtggccaaactggagcacgcctataagccagtgcaatttgagggctctttgggaaagcttaccgtttctagtgtgaataatccccgaaaaatgattgatgctgttgtgacatctcggagtgaggatgatgagacaaaagaaaaacaagttcgagacaagaggagaaaaacccttgttataattgagaaaacctacagcttactccttgatgtggaggactatgaaagacgttatctcctaagtctggaagaagagcgacctgccctaatggatgacattaccggggccagtcata

SEQ ID NO: 448715 - DNA, 899 bp, Homo Sapiens
  misc_feature (784)..(784): n is a, c, g, or t
  misc_feature (792)..(792): n is a, c, g, or t
  misc_feature (809)..(809): n is a, c, g, or t
  misc_feature (884)..(884): n is a, c, g, or t
tttttgtttttctgcttcttctgtagccgcttttctccgtgccctcatctcagcatctgtagctctgccatctattttagcaaatccctcaaaaattgttttgtagagaatgttcctgcgtgtgttgctgtcgtctggaggaaggtactccaggatggaagcctggtgctgtctgtacatgtccaaaataattcgaaccgccgtctcgcggacctcatacactctatgctccagggcactcactgaaaacttcatcacggttgccaatggtgaagcccgagctgccagtgcccaggtctttcagcagccgggccaggaggcccatctgactcattgccaggtgaactgaagagtttgctttcaatggctgcaccaggtaggatggaataatttggagagacttaacttctttaaacaaggccatttcctgaataaaatttgcagctgtgacgcggaggcgggcagaagaatctccagttctggtgagcaaaacgggaatggtcctctccacacagtgagctgtttcaagtttactcagtttatgtttaggaatatattgtgtaatgatcattttcaacaatttcaaagaagcctgaaaaacggaggtcacaatgtcctttatggctcttctaacgagaaagacggatgctctcagtgtgttctttaaatcttcttttggggttccaacaggcatttccattaacttcttagacaaggcaagcagtgcatcctctcggtaggaccacgtcttacaataggcctcagcaacctaataaaaaaaagncaaagggntaggattgtcccacgcnttccacaaaatgacctgctattaaccttgcgtaagccaaaatatttccagttgttcaaaaacttgcactatgcgnaagacagtttaacta

SEQ ID NO: 448716 - DNA, 1177 bp, Homo Sapiens
  misc_feature (266)..(266): n is a, c, g, or t
gggacttaggtgtctcctcctcatagagcatcttctctttgttcttaaagaacccactctgaatcttgctgttcagatctgactcaatgagtttattccgtgtctccttttcacttcgaagcacattctgcttcttctggagcaactccaaatgctccacgagaccctcatcagccacatcaaatggtgtctggcccagtttatttctaatatccatgtcacaaagtgcttctgccaggatggagcaagcctccttcacttcccantgtgcagcaacatggaggggagtccagccatcataatcctgaacattgagttcatagccagccctgattaaaagtctgaggaactttagagttagccttgggcagcagccacatggaaggctgtagcccctgagcgagccctgcctcacatcctctattttcccactggtgagccactggcgggcatcctgcaacatctgctgctcttcttcttttcttgactgctctagatcaactccttgcttctttacttgctccagaagaagatccttcatggctggctcttctgcaaggtcagagggaacttcaccttcactattgacaatacctacactggctccgtgattaatgaaatactctgctatgttgagatagccacaggaagctgctgcatgaaggggtgtccagccctcgttgtcttgctggtttacattggctctgttctccaccagaaacttcaccatgtccaaattgttcatcaatacatgcctggtgcagggctgtcaagccgtccacgttgaccgtgttgatatcagcacctcttgccagaagctttctcacctcgtcggtgtccccgctagagcaggcggccagaaagacagcaccgtcctcgaagcggacctggggctcccgcgcctggtcagcggctgccgccccgcgcctcgtcgctccgcaggctcctgctctgtcagcgagccccgccagcgccgaagctgctctgcccgccgcattcgcgccgactctgcccgcttccctcctaggtgctccagttccgccattgctccggcctcggcagctgctgccaaaactaccaacactaaattactgttggggctcgagttgccgctgccgcctctctcagagcgcttcagcccggagcagagggcggagaccctcgcgccgccatcttt

SEQ ID NO: 448717 - DNA, 554 bp, Homo Sapiens
  misc_feature (535)..(535): n is a, c, g, or t
aaacatgatgttcccattctctaaatgatatatatatatttcttctctctcaagtccataactctacataaagatagctaggtctctttaaggggtatgtccttgtttgctcatctggggccacttgagactaagattctcgtgccctctatgcctttcacaaacagggtctgtgcagtggccctattccctttctcctaagacagaggagctctctctccaacacttctcttactcgcaattccaggaatcttaatagtctatatttttatttagcttcattccagcttctatctcggttcaaaagccccttgatcattgatttgtatgtttcagggaagacagaaaaagttcaggcgtttttaaaaaagcaacactttcacaaatgctgtgaaatcaaaatatccccaggctagctttaaagagttctactaagatgaagtggatgaatactaatggctagcatttagtgagagtttgctccagtttagactgtgttaatcacttaatgtgtatcacctcatttaatcctcanagtaatcttattaagcact

SEQ ID NO: 448718 - DNA, 1504 bp, Homo Sapiens
  misc_feature (1288)..(1328): n is a, c, g, or t
ttaacagccaacatttttatttattattgtatatgaaacatgttgtttgcattatctagctcagtcctcatgaaccttatgagttgatgccatcattataacccactttgctaggtgagggaactgagcatcagagaagaaaagtggtttgcccaaattcacacagctggtgaatgacagagccaagacttgaagccaggtctatccagagctcatgttctcaccactaagcctccactgtctcagacctgcaatgtgcttttcatgcaagtttatacttaaagttcagcagcctttggtcttggcatcttcctgagccaagccatagtttggctaaaacatttttgacaggtccccattttggcttttatggtgagccgtcagcttccagcaatcaggaacattttcaatggaccatgccctggctgtgcccaaggaggtgatattctggatatgtgattgacattctctccacacccagaaatgtgatctctcaagccaagcgttccccgtccctgctggggcacggagctgcctcgcttccggagcgccaggccgagatccaggattccgggcaccgaggctggagacaccgggaaagccggagccgcgggtccgcccagcggcggggactgcgccctttgcgcgccgccgccctgagggtgggaatctgggccggacacctggccctgtgggcacatgctgaccttcccactccccatcctgggtcgacgaggcacggagcagtggggacccatgggcttcagggagggactgagtggctggcgggctccaagttgtaaggggaccggctcgggtgagagttcacgctcccaagtccagactcccggtctaggtagtgggtagacgtggcgggagaggagggcgaatctcgaccttctgatggtgccttcgtcctccgagaggagagcggctcataggtggggttagaggcagtgtgtcccccgggtacctcttcagcctctgcactcggagctgagagccgggggccagccgcaaagattgcgcggtagggggccccaccttgccaggtcgccgggcttggtctcaagcaggtgctgctgcccttcgcgcgcggagtcactccccctcgcacgccctcgccctgggcaccctcccgcggcgagactccgggtcctcctcctctcttcctccactgcctggcggctcggcgctctccggcccggcctggggccgctgggcccgcggggatcggaggggagccgagggcgcagccttgccgcctcccccggactctcctctcctnnnnnnnnnnnnnnnnnnnnnnnnnnnnnnnnnnnnnnnnncgggaaagggacctcgggagaggcagcccgtggccggccgggctccgctcggcgcggcgccggcagcggcgggggaagggagagagcgagggagcccgcgagcccgcgagcggagcggcgaggcggggagggacgcgctgccgagccggggctggagcggcggagctgcggcagcg

SEQ ID NO: 448719 - DNA, 712 bp, Homo Sapiens
  misc_feature (166)..(166): n is a, c, g, or t
gggaggggaatttcccaggccccttggtccatggacccggaattttccttaggggaaacaggctattggccccatgtttccactttaccctacgggggccccggggggccaaaagggaatggtttaggaaagtttttcgaggggcccgaggcggcccgacaagggntaatttctggccagaaggggtgttttcagtgatttgcagttagtttattgaaatggaaatgaatttgaggtttcaacagttgtctagcagtttccacataaaaagacaacacaagaaagaaaagtggtttctagcaatcaacagatgagttctggccatagtctgtagccctctgagccaaacgccttgggtaaagttaattactcttcatattacaccaaatgctgtcgtacactgtatgcatcatcagtccaaagtttttcagagttctatgtgactggttgaggaaacactgcttgaatttccccatagcctctgcagcggcatcactgtctatgaactcttgaagaagctctttgtattcaggtatagatatgtcggaattgatggtcttttcaaccatgtcctccaggagtttgcagccagaatctgcatagcagtgcaggaggagggccgccagcatgaggaccatcagcagcttcatggcgaggcggctgctgtctgtgttcagtcgtgcgtggcagggatcaaggaagttgctgcccc

SEQ ID NO: 448720 - DNA, 485 bp, Homo Sapiens
ggccgcgggaagctcagtttttattgaagacagagtctgggagaagaatgggggactccggaagacagtgatgcggtcggagattgtgcaggccccgggccgggaagtgggcggtgtctgggtgggcgggaccagcgccggggcggggctacggactcaggctgggagaacctccccctagcccgcgcgagggcggcacccgcggaggtcccggggggcgctgggcagtgtggggcgcggggattggacaagaggccgactgaaggcggagccgaggtaaggccgggcggggcgtggcctcagagggcgtctgactgctcgccctgggcctggctctgctgcatttgggcctgcatcttctccagcatctcttgcatgcggcgcagctcttcgtctttctcgcggatcagcttctcggtgtccgccagaggcagcatgggcagcgggatctctgtggcgctctggcgggaaagcttactgcggga

SEQ ID NO: 448721 - DNA, 355 bp, Homo Sapiens
  misc_feature (11)..(11): n is a, c, g, or t
ttttttttctntgacatcacaacagtttaatattttaacttattcattaaattgtgcttcacatcaatggaaatcttcagttctacaaactatcatttttaaatagcaataaaggttgataatgtcacaatacagtcccctagtaactgagttcatacatattattgtacagaaataaaaggaaatatctcttaagagaaataatttactatctactgaataactatctacatgtaaaataggtccccacataaagatccagatttttctttccaacactgaaatgatacattaaaagagaaataatgcaatcaaagccccagaagtacttctgagaaagaaaaaaaggaaagtg

SEQ ID NO: 448722 - DNA, 516 bp, Homo Sapiens
gtgacttcctccctggctgtgaaggcagctgacacagggctaggggcagcagctgggccttcgaggcgcaccttcccctccgtgaaacctggggtgggactgtcccctggggggtgcctgggcttctttggcgagatgattgctttgcctgctgaggttagttttgggaagcgcttcactccaggttggtagcttctttggagacttgtgataaccctgtcatcaaggtcctgtgagaacgggagaggcagttcctaccttgggaatggaagatttctctgcagtttgctgaggcccaggaggggcgctattcaaagctgcactgcaaagggagtaacggactctgcttctctgcagtgcaaagggtgtaagggactctgcttctctatttttggaagcagtgatctgttcacgtctctccccagtgggctcctaagggggcaggcgtgtgagtggacgccatccgaagacagcacttgacctcgggtggaagccaggctctttgcttggcttctc

SEQ ID NO: 448723 - DNA, 1121 bp, Homo Sapiens
agatattcagcaaaagatgggtattcttctgctgaaatggtttgaaagtgaaattattttgtagagcattttccctttaaactgcaaaggagccccaaggtcattggtccttggaagtccagggagaaagagcgctgggttaatgatggagaaaagataggtgggcagactggggcgtagtcccttggtgtggacgcccccagcgtgctcttatttcagtgctcaccctgttacgtgtgtctggggccactgactttctcctgcaagctgtggatctgaatttaactcaaatggggacatgggggcaggaaaagggacctgagagttctaaggggtggggatgggaaaactggtaaagaagttgttttgtgggttttcagatgcacctagtagagggaagtgctggggggaccagcctcccgggccaggctggctggagctgccttaactttcccacctctgctcagcccaccagcttgtggacctgtggcagcgttgtgttgtgagaggcacgtgcagatttgggagtgctgcaaaccaaagtgttacctggacgagtaagcccagtgtgggagtgtgggtgtgtgggtctgcagtcacaggctctgtctttgcgatgggatgccatgggaaaccgctaggattttaccctggtttattaaattgctgagtggctaaaaagattcctgtgggtggggctggcttatttctcttaaacgatgcccttctgagggtacatgtggtttttaggaacacaaaagattccaagtccctcatgacaaacacaattccggctctcttcctggaggccttgcaaggcggggtccaggctgctccctaggagggccccggtgactcgagcttgttggcgatcatctggctgaccttgtgcagggcctcctggaactgggggtactcgtcccgcacgcggtccaggatggtggcgatgagagccagtcgcttgtccaggcgctggcgctccagcactagggactgcttggagcggaacaggaacacgtagcgcccctccttcacagcctgcaggtgcttaaggcgcgtctgcagggccacgatctctgaaaggttctgtcgtttgagggccccaagccgggtgaggtcgg

SEQ ID NO: 448724 - DNA, 1997 bp, Homo Sapiens
  misc_feature (388)..(396): n is a, c, g, or t
tttcctttaaaaatattttattaagcattgatttagaaaacgcaagacaagattgtaacacctcagggcaaaggcttgaaggtgaaacaaataacactataaatattgcacttctaaaatctttttttgacatcttcacacaactcaattctaaaatatccttttacagagatgtataaataaacgcttccaagctgtcaacgcttgacacttttagcttcctatcaccgcactaagtcggcaggtttccaatcagatagctgctcctctgacagcaggcaaagaacttccctcagctatctcggaggcctcatacctccatcatgtgaagagtcaaccagtcccatctttcggaatgctctttcagaatatgtaattttataagtannnnnnnnnctactgagagaacatagatctttcaaaggcaatggcagaatacagcttaaatggacacagttcactgttaacattgcttattttttaaggcatccaggagcttctgattcttggtcttgaacatcatgataaagctgtttggcatgattttgcctcgcccatcttcacctacttggcccataataatgtaatttagacctcttctgaggagagggcactgcttgcagacgacagtcagcctggcactcatgttcttgcccgcctgctgaatcgccaaatttccctctttgtagatgttgatgatcgagactgtggcgtgcaaactcccatcgcgagtgatggttgtgataacagtgccggctaatacaaagtcacttgaacaaataattgcacctccagagtccccgtccgtctaacacttttagtgtgacacaaggccacggtgggttttaaaacccgtggttacaggaaatgtggtggtgacaggctgttctgtagttgtaggcagtttttttggcctgaatatgtagtgaccaataaacccatctgcagttaaacttaagtctgataaaaactgaataagaagttcatttctctcagacacaattggcgcaggtggactatcaccacaatactttccaattcttctagcatcgttgacttccccgccattaaacacagccacataatcatatcggcagtagttatctcgctccacatcaaacttctcaaactttaattctataagctgattctttggggctacaatgtgccacacacaagtgactcctgcagggtaatcccggtctggccagttgggggttttaaaagagccggaaggtctgtcaaggagtcctccacaatactgatcccctctttcgtttggttcagcagcggagaacatggccatgaagccattgccagctgtgttggcatcagaaatcatctgcaccatcatcttgttgccactggacacaagggctccaggccggaaagtgccacagaagcggccaatgcgctggccattggcatggccattgtacacatccacaaagtcatagcggcacaggttgtcactctcgaggtctatgaatcggaaattgagaacgactacttttccttcgggaactgtgattttccaagtacatttgctatttggagggtacactccaggaaaaccttcactgccaataaatccagactctccagtaagaatgccaccacatgtgaaaacaggtctctctggggactgctgccgcgagagctgggtggcggcagccagcagcaggcagagtggcgcccaggcgttcgcgcccctcatggcagcgtagacgctcggggtttgcacctcacggcgcgcgcgccggcacacacgcccctccgcacccaccgcgctcacaccgccgctcacactggcagcagcgctggctcacaccggcgctcggctgcccgcgcgctccctctcacgcgcgcaccgccgcggggcggcccaggtagccgggggatacgcggccggcagggcggaggcacttttaaaggcgattatggtgccgtctgactcgacgcttagtttctcctgaggagctgctctgcagccacag

SEQ ID NO: 448725 - DNA, 451 bp, Homo Sapiens
gaagaaggcatttttacagaggagctgtggaaatggccctgctgaggcctggaggatgcagccacaggtgagagccttctggcggagaagatgaggcagtcaggctcagccaccagcccaaccaccgccaagcctccttcagatcccatgcctgggagagctcctgctcttcctcctagaaaccctgagctctggcagccggttgaggccccttcccggaggatctcctgagggccaatctaagtgtgtgggggtgggggcatgattgagagagacaaacctcattctcccatagcccaaggaaacctcccctagctctctccccagcacctgcagccaccaggagtgggtgattgcaaacagcgcagggcaagccagctttatatctcctgtaactttcactccccaccaccctcactttctgtgcctgacaacctaggcaaatcagagg

SEQ ID NO: 448726 - DNA, 559 bp, Homo Sapiens
cttgtgaagaacaacaaaactgtcaacttttaattttgccaaactagagcatttaataaaatagccatttattatcagcatcagctctcaaatacattgtaacactaaaatgagggcacaccatctccaaataagacgatctttaaatgagcttttatacaaaactcactatgctgtcctttttggtcatttttccttggactaatgataactttggcctgagctggctaggcttccaattatgaatgtggctattctagtgagaaggaatgagatgggggaagagtatcaagttgacctgaaggctatgctgtttctttctgctccagtgatgccttctagctctaaatccttcaatttttcaactgccatctctcttattaaatgggtttaataataaaagataacctgagatccatggagcactgggtacagtgctgaaaatgttcatcagaccgtgatgctgctgatccctgccctcatgactatgggtaaattaacattgaactttggacatgaagatgactaatttttggagggagataaccctatatcaaat

SEQ ID NO: 448727 - DNA, 856 bp, Homo Sapiens
taaaatcttcatgaattctaagtaactcccagtcaccctgttttatttcaaccatggagaaaagtacagaggaaaggctgcatatggagagactgtcgggctgacggtgtcacagcagatccgagtccacgtgtggaaacagcagccgcccggccctgggtgtttcctccaggaaaggcctggtcagtgaatgcctgcaggcaggcaggtgtcaggaatcacctgcccgatgccagcgctgctcttgtctggagggccagactgtcatgaagtcagtgacgacagctcagacaattggaaggttaactttacgtacaaaaacaaaattcaaatgatttccttcagaggtggagttttcttaggttcacatttataaattagtcttcacagttaatcctgtttgggaacaagaaataaggaacacatttctggtttcctacacatgatacaggtgtacattaattctcgacttccgtggtccatggacttcagtttgtgaagggtgagtggctaccatttttggatcatctactttttgtattagctaacttgcatattttatttcaaattctgtctgtcagcaatcctgaaggtagatgataggtactattaatctcattgtacagatgaggaaatgaaggctcagaacggctaagaaacttgcccaagcccaaagtcacgctaggaagttgcagaaccagaatttgtaaaggacagcccttcgcttttctatatcccatgcttccttcccatggaggaaaatgcttaacactgatcatgaaatgaaccgccagcattcaaggaggtgacgaagttcctggtacacagcaggtgtccaggagaagatggcccagcc

SEQ ID NO: 448728 - DNA, 1010 bp, Homo Sapiens
  misc_feature (233)..(244): n is a, c, g, or t
agcggtctcagtcttttatggcttcatgaaaggactgtgccctcaggaggggaccatggcttggcttgtggggtcttggtgatgactgccatctttcttcatcaccacacccagcttcttgctggcatttgcgaggagacagcagcagataagaggttcaccctttatctcccagtgagcaagatgcttccctgttcagagaggaagtaacactgcttatgcttgactgctgnnnnnnnnnnnnggtctttggttggctttcctttggatgggaatctctgtatttaaaatgttaagttgtgtcagcttacatatgggacattcctggagaggtgactggccccccaccctgtttggcggtgggtttctgcatcaccggcttcagaagtgtccctgttcgcttcgtctgttgttggcttgctttgtaaatactttggtcccaagctgagacaattggctgtgtaaaacgtgaagagtcaatcttgaagggtgttatttttcagaagaatttgccgtgtgccttcaccgaaggcagtcaagtctgcagttggatttttctcactggtgaatgacaagaaacagggataattttgcactgcggagatattacgggagttgtctatatgattatatatagtacctgattctttgaacatattattgaactccaaaatgaattcgacctccattcaggcttcctgaaatctctgaagttgctgaaatttgtatattattttccttttccaatgcaagatctgctggtgacggggaatgactgtctggttttattatggtttataaattaataaatgggctattttaattctgtatataaatttacagcaagtacgtacactgggaatgaatgaggccaatcacgtttacaccaaatcagcagatccaaaagacaaacacatatttctgagacttgaaggtccacatcccccgccccctgccaagatggagtcccccactccagccttggtgacagagtgagactctgtctcaaa

SEQ ID NO: 448729 - DNA, 502 bp, Homo Sapiens
  misc_feature (96)..(96): n is a, c, g, or t
  misc_feature (108)..(108): n is a, c, g, or t
ccaggcaccaggcagcgggagacactgctgcagctcgaagcctgccggggcgccggcccctctgcggctgcttgcgccatcctgccccctccttcncaggggaggccncagtgaaggccctggccagggcttcccagccccttctgcctccggaccggcctgggtgcttcccgtgtggcccggcctggggcgacgtggccctcctctcaggaagcgtggtaatctctcaatggctggcctccggagttgtcactcaggctcccttgtaagttaaggccgggcccaggacactctagggcacgcagctgctgtgggactgctgggttaggtgtcccctggagcagaggcggcttcggatttctaaagtggctgagtcctttcaccttgcaccagaaatgctgggtcaggcgcagcacacacagcacctggggatgcaagcccggccagccccatggaccaagcaccgccgaccgtgtggcccgccgagcccaggtgcggccgc

SEQ ID NO: 448730 - DNA, 541 bp, Homo Sapiens
gttttgctttgttttggtgggcagtgttacccgaggcttctctgaagagctagttttcccagctgaagagacataacacctcccaggcctggaatctatgacatcaaagaccaatggcctaaacctgaagactgggcagttctcatctgcttcctgtaggagaactcaaggaaaaacagtgagctgagaagcacagggaacccatttgtcccttattctagcacacagaggacacggtgcagcttcgagaattttccagctcttctgcagacaaagtcacagtagttaaagtacataagtgggtgtggccagagaactgcccctctcactggttatttctggacattcccagactgtccaactggaccttcagaagaaagcagctttagtagtctcagggtccccatgggacaaatccagaagagaggtctctgtgacttgatttttaacacagcgaaaggatcagtagtaaagaaatccagtagactgtcacacacgctcaccccccaacttagagaaacatagagaaacaccatggtct

SEQ ID NO: 448731 - DNA, 1084 bp, Homo Sapiens
  misc_feature (51)..(61): n is a, c, g, or t
  misc_feature (643)..(673): n is a, c, g, or t
  misc_feature (1015)..(1015): n is a, c, g, or t
  misc_feature (1031)..(1031): n is a, c, g, or t
  misc_feature (1043)..(1043): n is a, c, g, or t
  misc_feature (1061)..(1061): n is a, c, g, or t
tcaaaacaagtgttatttattataaaatcagtggcttctgattagaagacnnnnnnnnnnnaaaccaaataggctcaagaagctggctggaggttgaattggctgacgaacatcttcttcctccaccagcagtttgtgggacacatcacgtttctgccaagtgctacagctgaagcccatattcatagaagcaccctgacagcccttctccagcaacttccagaaaacagaacctgagcactcaaagctgcatcagcccatgtggccttgctcccagagaagcatctgccagtttgggcatggaggaacagaaagtgggcagggaattctccttggctccttagaaggcagtgggagcccagggaagcgttcggccccagtgcagcctaattgggagggagggatgggtagaggctggctgggcttctccttcctcaccctcatgtaaggtgactgcccctctggctccttcagagctcttcccttccaagttcctactgagaaataagaaggcacaaaggaaaatcagccacctcctggaggtcactgtgggccacctgctttgctaagagccaagcacagacccctgcattctccctgcaggagagcccacccggctcagaagaaagcaattccgcctgtnnnnnnnnnnnnnnnnnnnnnnnnnnnnnnncacatggtgaggtggaagcagcgagcagagcttctccatccctcctctccttccctgccagaaatgcaattaagcaagtggcccagactcagccgcacagacagcgcttcctgctgggggaagtcaaaagggctgtagcagtgggaaagggaggtcatcgggccccagatctaattaaccaacctgccttgcttttgacgttgctgcatttcctctattaacattaatgatggttggtctgaatgtccaagcatggccagaagcttccctccccaccacccagtaggtagcacagcctgtccctgggaccaatatccagtctccgtggcaaccgcctcctgnagatgctttaaagagntctgaccctgtnagagttgttgggagcttnagaggagggaaaatggagtgtgg

SEQ ID NO: 448732 - DNA, 840 bp, Homo Sapiens
  misc_feature (217)..(217): n is a, c, g, or t
  misc_feature (751)..(751): n is a, c, g, or t
  misc_feature (814)..(814): n is a, c, g, or t
tccccatgttctttaaaatgcatttgaaaaacactagccctgtggctatttctctgtatttgaataatggcaactgctttaaaggaaatggtcaaataggcatgttttcctctggcagggtcaatcatgcttagctgcaggtgatttaaattagattactagtcaccttcacttacgatcctgccagtttttgctctctatatactttaaaactctntcacattagatatgattagtatgcatttacatacattttaaaagagtatgaaaacatctggaggcttttaataagactttccaattcccttttgcagcaaagaggcagaatcagttcaacacaccgatgtaagagaaaaaagaaaatctcaacaaatcaaaataatattcaaaccacaacatttagtttatctacatcccgctcaacagcaacatttataatatatcaataatctgtatcagaattttctctgtagggtacctttttcatatgttctgattatttacaactgtacaagcgaagacactccaagtgcacgtatttaatacagtattgactatttgcatttacaggattttccaacattctgaaaaaagatcaactgttgaagatctttaaggtatattacaaaaactactactagctcttgtactacagtatgcctactcagtaaaactagcgacaggagatccacgcagtaactgagtaactctgacccactcacggccaacccggggccggggctccatgggnctctaggctggtctttataccaaaggttaggggcaaggtcattttccagggtttaaattaaanttcaggtcttttaaatttgggtgggg

SEQ ID NO: 448733 - DNA, 891 bp, Homo Sapiens
tttttgtttaagagtgaagccatggctagcgtcaattaaacttagttaatggatagcaaagttgacttttcatagcattctcatatgtcacgtatattaatgttttgatttttttccaaccatttttagcttagtgggccccagttacagcagcagttggcctgaccgtggcagacatcattaatcaatcctgcacactctccagctcagccccgtccctgatcccagggggctgctccacaggacagcaggagccccccagccagactggaggtcctgggggtaacctgggtgctcaaggctcgctctgtgtgttgccacctccgtttgcacccagaccctcctgtgacgtggctcagcaaacctcttaaatgggtcattggatgctaaacttgaactttcacagggcggggtttcttcaaacgggacacaccagagtccaggccaggctggaatcctgctgccagtgcctgacccagatcagggattccaaacacccatggggcccctggtcccgccactgaagccaattccagctgcccccaggagtgtgaggggcctgggggtgtcttcctgggagctgccaggtgtgagattgacccaagaaatgggaccacaggaacccaaaaagctacagctgggtggccaggtccaccatccacgccctcaggtccaccagccacgccctcaggtccagtcttctaaaggtcaagggtctctgaccaggtggagcagagcacgtgactgggcagctcttctctgcctggaacgcccatcttctgtcttgaggcagaaaaatctattttagagggtttccaggcctggctcctcagaggtgcgggaagatgttcagagctgagactctggagggaacggaggggcagggacatc

SEQ ID NO: 448734 - DNA, 491 bp, Homo Sapiens
ggtacccgctctctctttctctcatttctttttgtttttcccccagttttggccaatccatggacttccttcaccacccccccaacctggttgtggccgccggagacacggggctttccaaatgacaaggtgtaatttaattttcccttcacaaaccccctcccccaacagaggaaacagcgaatgcagagggtgtgaggcaggcagcaggcgagaggtgttcagagctcagtgttcctgcagagtgaccccctctctcgccgcccaccctggccaaatggagggacgcctgccttcccgcccctggagtcccctctccccgatgtgatgagggtgggatgagaaggtctgggtctgatctaacactgcctgcccctagggttaagccagcggccttaggtagggaggcgtggccaggtatagtaagcacaaactagggagctggccaacacacctcaacgcgaggctttctgggaatacaggaggtgagg

SEQ ID NO: 448735 - DNA, 528 bp, Homo Sapiens
  misc_feature (415)..(415): n is a, c, g, or t
atattgcagaatcgctgatttattatttgattcccctcccaactccttggatcattcttctatggtctccccatggatcgaataatcattggcacatagcaaacatttcataaaaacagatacaattggcaacattatattcatacaaacctaatacacgcacacactgggcatgatgatggtgcagtccttgagcagggtttacaggcaggatcctcttcccgatgcttcacccgtggtatctgatacaaccccacttcattcagaggcgaacaccttccccacgggctcctgtgcccccacccagctctatgccatccctctcctctcactcaccagcccaccttgctttgcaccgctcccccttagggcctttgctgtcaaggtggtctccatgtgtcaaacagggactctngaccaactacttcatctcaaataccaccttcacagtaaggcctgcctgccctcctctttaataccatgactgttaccagcccctccccagcactcctgacttcctgatgcctc

SEQ ID NO: 448736 - DNA, 1364 bp, Homo Sapiens
atggtcgaaggtgtggtgggttttcagggtgacaccgcccttcggcgcgcgccagcaattgttatccatcttgggggtggggacccacacccgcagcccatttctttcgggcccaatttcttccacattgtgggggaacgggcctttcgccaggggtggcggattggggtggattggtagggcaccaatttagcccccattttttgcaaagcagggcccagtactttgaggcgctccaaaagttttttcgggtttctgtgcccccgctcagttcactcatctcagcgttaggaaaagctaccatttgggtcctcaagctgcctgctcggccagtgcgactgctgtgggtggaggagacctctgagtcccttgtttgaggctgcagtttggtttgcgggtttcattctttcacagcacatgtcctcctcttgatctgacatgtatcctggggggctggggacaccatccagcgtcactataaacttgggacttgcaggtttatctggttgtacaagatctcgtgtctgcataaggtgtcctgaaagtacccgaagggaatctgcagtcttcatccccgactcttggtttggtgccactactacttcctcagacagctttggcttcttcagaataaatgatcttgtgtctgcatggaccatggattccatgtcatagtaatctttctcaacgtttctaaggaagccgattattgttttacatcagtagttcttgactgtgattcagtatcttcttcttgatctgtcaaaactgtctgttgcattcatatgttgttgaatattcattcatttgtaacctccaaagatgaaatttttgcttcattcttggacactctaacatgttagatcaaaaagatttgcttccactgtcaaaatagctgctttcattcctttaatttcattgatatcagctgatattttccttaaaaggtgggaaatattgtctagctcattcagtgaacaagaggagcttgttatggaacctaagtccactggctccggtggaagaaaaattggtagaggtggtgatggaaactttgaagacattctcataaaggtgacaggaacctcaaagacattttcataaaattctctcccttaaaatctgataattttttcttcacagctcattaagttatttcatcgaaagtaaaagcagtgatcaaggctgttaccttaagacgtattaagagcaaataacatcttaaaacctgtaattcaaaagatggggttgtacatttctagagtcagaattcaaaactaaatgtgaaaaagctaaacgtaccagaccaattgctcttcgctacaactaagaagccctaatacgtagggccctacatcctctaa

SEQ ID NO: 448737 - DNA, 1924 bp, Homo Sapiens
gaggaaaggggcccattaaaggtttaattgaggtaaaaagggaggcgggccccctggttaatagaaaacctggttcccaattttattttggcaccttgccccttcccccggtttgctctccccactgtcccaataccccaccttcaattcatccctgtccacagaagggcagggaaaactggggaacttttaccaaaagtagcacttcagcctgagggggcctgtataatcatgctttcaaactaaattcacttaaaaattaaaaagcagaattgaatattttaagcagcctcagtacctttggccaatgctgttttcatggtggattatgaacattatataatctttgggaaaagtgaaagtagtacaatttttagaataatgacaactgcctcactgcatctctccactcacacagcaaccgtgtagccccctaagctgcagtaccatgactaaccatgatgtcaatttcatatgctgatcctcacaacagcagtgcacaaacatgccccaaatattttaacagaatttagctcttccttaagctgtcttttcatagtaaaaacaaaacaaaaacacccaatgttaaaaccacataataaacttacaaacttgaaaaattagacacttcagatagataggcaataaaacttcatattatgaaagcaatatattccaagtttcaaagatttgacaagttctgtagagtatctttcatcagtacatgaaaacttccaaactgcatgatcttctgccaggcaggactgggtgctattcgctggtttgaggtcgaatccatttcaaggcatgtcgtggtgggacattaatggtgggatggtagaatgtgcagtccggtcttgtacattgagtgttaaacctacaatgttttggatgatagaagggacattccatcttcttacaagcagggaagtaacggcagagctgactactggaaggtggtgctggtggtgcaactgctggttttggagacagtactggaattcttctactcacatgagtgaagggacaatctggtttagtacactttgcatcatatttacaatttgggtgaacaaacaaacatttttcagcaaatttacaattggggaaggctttgcagggtgagatggggtgatggtaggcacactcatccccatttttacaagcaggccagtacttgcagcgctccaaaagtttttctggtttctgtgccacactcagttcactcatctcagctttctccaacgtttctaaggaagccgattgattgtttacatcagtagttcttgactgtgattcagtatcttcttcttgatcgtcaaactgtctgtgcatgtcatatgttgttgaatattcattcattttaacctccaaagatgaaatttttgcttcattcttggacactctaacatttagatcaaaaagatttgcttccactgtcaaaatagctgctttcattcctttaatttcattgatatcagctgatattttccttaaaaggtgggaaatattgtctagctcattcagtgaacaagaggagcttgttatggaacctaagtccactggctccggtggaagaaaaattggtagaggtggtgatggaaactttgaagacattctcataaaggtgacaggaacctcaaagacattttcataaaattctctcccttacaatctgataattttgttcttcacagctcattaagttatttcatcgaaagctaaaagcagtgatcaaggcgtgttaccttaagacgtattaagagcaaataacatcttcaaacctgtaattcaaaagatggggttgtacatttctagagtcagaacttctaaactaaactgtgatataacgctacacgtaccagaccgattgctctatcgctacaagctaagaagccctaatacgtagggccctacatcctct

SEQ ID NO: 448738 - DNA, 1016 bp, Homo Sapiens
  misc_feature (340)..(340): n is a, c, g, or t
gtgagtctcttttctttcaaatatgagcaaatattcccagtttcaagattgccaattcttagagatctttcatccagaacagtgaaacttccactgcaggatcttctccaggcaggactgggtctaattcgctggtttgaggtcggaatcccatttcaaggcaatgtcgtggtgggacaataatgttgggatggtagaatggccagtccgttctggtacattggagtggttaaacctacaatgtttttggatgatagaagggacatccatcgtcttaccagcagggaagtaacggcagagctgactactggaaggtggtgctggtggtgcaactgctgtntttggagacagtactggaattcttctactcacatgagtgaagggacatctggtttagtacactttgcatcatatttacaatttgggtgaacaaacaaacatttttcagcaaatttacaattggggaaggctttgcagggtgagatggggtgatggtaggcacactcatccccatttttacaagcaggccagtacttgcagcgctccaaaagtttttctggtttctgtgccacactcagttcactcatctcagcttgatttttttctacagaatctccttttgtttcctcttctttaatggggggacttattctgggggtcctactttgtccctggaccacttctgctagcaattcttcttgagaagttcgagttctgggagcaactggaagtgtctgtttctgtggaactgtagagtagttagttgtttttgttacggattcttgagcttcagatatagccttcaaaatcagattcttgttagcttgtttagaaggtggaagagaaggtctcctttcaggctttgcaggcacagacacactgctggagatgcttcctgttcgagacccgtaatcatcatcttcttcctcctcttctccatcatgattgaattctctttactttaacaactgaacttaccacaggcaactttctcttccgaaagttttcatcctcca

SEQ ID NO: 448739 - DNA, 1459 bp, Homo Sapiens
  misc_feature (277)..(289): n is a, c, g, or t
  misc_feature (413)..(424): n is a, c, g, or t
  misc_feature (520)..(541): n is a, c, g, or t
  misc_feature (548)..(567): n is a, c, g, or t
  misc_feature (577)..(578): n is a, c, g, or t
  misc_feature (608)..(621): n is a, c, g, or t
  misc_feature (659)..(659): n is a, c, g, or t
  misc_feature (664)..(665): n is a, c, g, or t
  misc_feature (668)..(668): n is a, c, g, or t
  misc_feature (670)..(695): n is a, c, g, or t
  misc_feature (1210)..(1224): n is a, c, g, or t
ccccaaaaaatagtacccgcggcagagcaagagggaaggggcttgtttgttaggcgccgtgccgcgtgtttttttcggataggggaagataattgtatatatgggagggatgggcgaaaagtgggtgtgtgaatagaatcgccctggtacgattattgggggggttcatatggcaaaagttggtgggggaagagaagggtctccgtgtcttgggggggagaaatgtggtgggagagagttttgtaccgaatttttttgtggcgcattagcgcccccnnnnnnnnnnnnnatatgctggtgattgggggggcgggacggaagaccctggggtgatgagtccccccaagagggccctcgagagagagcgttttgggaattttggtggaaaagcaccggggtttaaccgggggggnnnnnnnnnnnngtgggaataaccagaccctttttggttgcccgggttttttgttgggagaagaggaaaaagcaaggttttcgataactttgggggggcgggggcccnnnnnnnnnnnnnnnnnnnnnnttttttnnnnnnnnnnnnnnnnnnnnagattgtttnntttgggtggtttggggttgggttgtttgtnnnnnnnnnnnnnnttgtttgggtttgggtggtggtggtggttggtgggtgnggggnnggntnnnnnnnnnnnnnnnnnnnnnnnnnncagattttagtattttattatttccttgtaaaatggctgaactaaattaaacccttgtttcccatttgttctataatttatagtgaaactgagaacaaaactatctttataaatgatagctaaaagtatttccagatatttaaacaatttaaaataaatttcttctgcagagatgcaaagcatctcaacactggaatgaacaaatgccttaaattcaatggagtaaacctttagaatgaagaggaactgtcatttcacccaagccgaagacaacagccttatgcacttgtgtgctctgtctttgctgcttctcgtgtttcaagcctttcctgtgggatcagcacagcaaagtgcaacttaccaaatggtttaatgactggttaattctttcttctcccaatggaaaagcaatggcaacacaacagtagactgctggcttgacaatcttaaacgtgagcctttgcacatgtaggtttatcatcatttgagtatacgactaagcaagtcaatgaacnnnnnnnnnnnnnnnagcagtttaatttggtcctgtagccccctaagctgcagtaccatgactaaccatgatgtcaatttcatatgctgatcctcacaacagcagtgcacaaacatgccccaaatattttaacagaatttagctcttccttaagctgtcttttcatagtaaaaacaaaacaaaaacacccaatgttaaaaccacataataaacttacaaacttgaaaaattagacacttcagatagatcc

SEQ ID NO: 448740 - DNA, 513 bp, Homo Sapiens
gcaaatgaaaacagaagcatttaatagatgtgtggacaagaacgggcagagaaggtgctgcggggagggggtaagtgcaggagcagtctggagaggcacatttgcaaggcaggggagtcccacttccaggagtgctctgggccactcagcctgcctactgtctcccaacagctgagacgggaggctggcccatccctacctttctcgcctgtagcctcaggaggaagtaattccttccactaagttgcaggctggagcagcccagagtggcagcagctgcggacacaggctcacggatttgggagcccttacacctgctcacagcccttcagtctgtccttgcagcatgtggagggatggtggggaggggctgctctcaggatagggataaagcaatagcccagtgtgcagggccagtgaccagtttgaagcaactaagacgattttgggggcagagaggggaactgggggcagcgaggccacctgccaggctgtcctgggccataggccacg

SEQ ID NO: 448741 - DNA, 712 bp, Homo Sapiens
ggagaaatcctcagcccaccaaagggcaggagcaaaaaggggagaatgtccaccgtcaggtccaagcaaccactcgtgatgtcctgtcgggtccagtaggaaggcccgcagccgcagagcgttggctgaggttggagagcagcggcgctaggtagtgccaggggcgcgcgggcgttgtagccgggcgtgcacagcgcgcgcaccagccgctccaaggcccgagtctgccggctccgcggccgccagcgccgccatgagcgctgcacacggcgccggctcgcgactgaggttggctagcgcggcggccgcctcctcggcccagggccactgcgggtccaacgcgcggcccatcaggcgcgctggcagcccggggtcggccgccagcaatgtctcgtgcaggccggggtcggcggccaagttcacgagcgcgcgggcggcgtcccgggccggggcagaggccggcgccagctccatcagcgcctgcagcagcgccgcctgccccgccaacagcgcgcggccgggtccgcagccagtcagcgccagcacgtgccgcaccgccgccgcctgcaggtccgcccgcgcgcccggcgccaggaagggcagcagcttcaccacctctgcctccgggcttgcctccggccctcccgaggcgccagcgccagccccggcctcccccatgtcgagcgacactctgctgccacccgaccggtgc

SEQ ID NO: 448742 - DNA, 522 bp, Homo Sapiens
ctttcttgatatatgtcacctgctgttccctgagaggcctttggaaattttagtcttattctctgcggcgctttcaggtttcttctccactcattttaatgtcttttctccactttcaacaatctatcatatttccattttgggctctgttcacaccagagtccttgcagcataatgtggtatatttactgcttctcccctgaatatctactgtgtccccactctgttaaagatcacataaatagattattgggagggaacatgtagttatttaaatcagaaagtctttctaaaggacagtgatgtacatgggaagtataaagatgataactttaatgtagtgggaagtcttaggtctttgaaaaggaggtgtcctaaaagaacactgcattttttctcctcaacgtcatggactttacccacatttcccttcatcatgtgttcttcactctttccccttggggaaacccatctctcctcatagatattagttctacactcaggctcttgttatgatttgtg

SEQ ID NO: 448743 - DNA, 141 bp, Homo Sapiens
tgagccaccatgcctggcctgttcatgttttaataggtcagaaataaagtcatgaaaaggaatttctctgtgacagttcgcaaagaattctaccaatttaaaataaaataatctaggataaactctggccaattcaaagct

SEQ ID NO: 448744 - DNA, 1796 bp, Homo Sapiens
ttctcgaaccattgcgaagccaaatgctttctaaccagtctccacactggacagttcacaggacaaaacacctgtccaggcccaccatgagcaagcatcaaccacttggttaaggaggacatatcacacagcatcttcagggttctggagcgcaggcgttgtgagctggagggcagcacttgggaagaggactcttcggatgggtgtgctcctgagcccatagggctcagtttagtgatcctgctcggctggccacgaagtgtcagagtaatggtggtggggaccttcaagcctgatgcttggttagagatctgagccaggccagggaggctgctttccacacttagcgaggcccccattggtcagcagctggtggatggctgtgggcttcccaccaggagtggcacccaaggaggagagagtggtggccacaggaatggtacggacaatggtgctggtgcccgtggtgatggcacccaggctctgcatggggttgggcaacttcacactggtggcctgtggggctgctcctggggagggatttgctggaaggccagaggtcttgctgctgatatcctgcaagctgaagctgaggccttggaggaggctgctggctgatgtggcccctgggagggagctgccaggagatgtggccaccaggcggctctgcagtgtgtgcaaggcactgggtgcagtgctgctggagaccactgaagggactgggctggctgagactccaccttcagaagaactggacttggctgtggtgagaagtcctgtgagctccttggcccctgctgaagcctgccccagtgtcatggtgatgggcttcccacctgcagcttctggagcacttccttgggaaggagcacaaggccctccagctgtgtccccttgggagataagggacaccttgatcttcggtcgtttggaggtcttactgccaggaaggggactcgagggatggtgtcgcttcagctgaaccctaagatcctctttctctccttcctctggtggttctgatgaaatgggaacaaagagacaggaggaggtgccaggaggaagagctttcctcaccagcatattttgtttcagaaaagcagcaaactgtgcttgagcttgtttgtgggtcagcacagcttctgtccgctgcacatgtctcttcagcagctgagaacttccaatctgactggacttctgggcagaggtcactgtggtcactttggtcttgggactggaggtgggtctgctggacacactggagagatcctctgagcctgagggtgaggcgggcagcttggcagctggggaggcaggtcgactgccccgctcagggacttcaaaggccaagtctctgcgggccacatcgcggggcttcttcttcttctcagcatcctgatcccgaggttcagagcccatgtgaccctcagcacgagtgagcaatccagtcagaaagtccacaatctcatcctgaatacatctgtccaccatgctctgagtcaacccttctgatttcttctttgctttgcttattctgagattgtcatcagctcccccaaccaccaccaagctgttctcagctcgaatcttctcccggaagtcctccatggcttcagggtgacattgaagggaattctgaccaatgacaaagaggactggagtcttcatatccaagaggggatcatctacatcccctctggggccatccacagtaagcagaggaaacccaaggcagacaactgcagtgacatactccattactgacacatgacaggccaccaaagctcctgtgttcc

SEQ ID NO: 448745 - DNA, 1431 bp, Homo Sapiens
  misc_feature (1126)..(1318): n is a, c, g, or t
tgggtggcgtttccgaacgagggagggtttgatcgccatcgcagcctcgccctgcccagacagctgggccctaaggggatagccagcgcctttagacttatcttaaatcgggcatctgcatcaacacttatttctggggtcctccatggaaagcagctcccgaaacaacacccgcccggtccgccctccgctgcactggaaaaccgcccctggacgtttctgccgcagtgtccccctcacggagttccgtttgtctgcttggtcggttgttctctggagccccaggacccaggccgcttgtatgtgcctgcggccgcacggccccaacacgcggacttcgagcggtaccgggagacccgcgcggcctcctcggagtggacagtgaagcagcagctgggctaggcagtggggctgggcctgcccatggggacccgtccacgtctccaggacatcagcctgagcctcttcgcagcctcgttttctgttgaccgagttctgcaaggggacgtagaggaaccacagcgttcttgcgcttgagaccgctgtgattttctgacattttggaggcagaaatgcctggggaaaggcccacagatgcaactgtcatccctagtgccaaaagggaacggaaagcgattacccttgacctcaaattggaagtgttacgacgatttgaagcgggtgagaagctcagtcagatcgcaaaggccttagatcttgctatctctacagtggcgaccattcgagatagtaaagaaaaaatcaaagcgagttcacaaatagctactcctctgagagcctctcggttggactcgccatcgaagtgcagtgatggagagcatggagcagctgctgagcttgtggctggaagaccagagccagccaaatgcgaccttgagcgccgccatcgttcaggagaaggctgagtttgatgacttacagcgtgaacatggcgaaggttctcaaacggagaggtttcatgcaagtcaagggtggcttgtgagattcaaggagtgccactgtttgccccacttcaagatgaacagcgcagctcccagcaacaaggacatgtacacagaaatgctgaaaagcatcatcgaagaaggtgagtacaccccccaggtgnnnnnnnnnnnnnnnnnnnnnnnnnnnnnnnnnnnnnnnnnnnnnnnnnnnnnnnnnnnnnnnnnnnnnnnnnnnnnnnnnnnnnnnnnnnnnnnnnnnnnnnnnnnnnnnnnnnnnnnnnnnnnnnnnnnnnnnnnnnnnnnnnnnnnnnnnnnnnnnnnnnnnnnnnnnnnnnnnnnnnnnnnnnnnnnnnggaggggtcttgaaacccagtttgcccgtgatttggcgcttccacagaaaagctttgggtgacaggaaagcatcttttatggaagggttcactttccttttttttggccgttg

SEQ ID NO: 448746 - DNA, 525 bp, Homo Sapiens
tgctgaccagttcatttaatctttacaacaaatctgggaggtgagccgcatttcaccagtgacggtaatggaggccctgtgtagctcagaaacttgccaaaagcaagcacaaggacccacacctattgccacaactagagggagctacaatttctagggactactggagtttaaaacagaatcgaggccctgtccgaacccgcggaagaatcactgataagtcagtctcctctgttcatgtttcataggtgaaacgtggataatcacatgcacccactgaggcccgttaagaaaagccgatgagagacaggagaaaatccaagtgccttgaacatcttgaaggccccttttgctcaacacccagtccctggatgtggctggggttcggagttagaaagcattcactaagcacttactctgggccaagaacatgcactgcctcattaactcttctctagagcccacaaagccagttactgtgctaaaaagtatttcacttgacagttcttttcaatgaaataataa

SEQ ID NO: 448747 - DNA, 523 bp, Homo Sapiens
  misc_feature (11)..(11): n is a, c, g, or t
  misc_feature (151)..(151): n is a, c, g, or t
cagaactcctnggcctggggtcctgtttgccaaaaggtatctggatgttgtgagtgcctcaagtcactgactccccctcctcatgaccaggggatgatgagcagctgtttaataagccaccggtgtcaaacccggtggccgggggcccagngaagaaccccgacttgggagtgcagccccttaggcatctcagagccagggacaggaaagaaagacaggttgtgttgccagtgtgactgaagcaaattaccttccctgggctggtttcctttatctatcttgtctatcttttcttacctccctcccgggaccttgagatgccttggaaatcagatgggaaaagcactgtcactcactgcaggggttgtggtaatgctggttacttgatgccactggggaacaccaagctacaggagtcagtcatttgggacagtgccagcagtcagagcacaggtcacacttgttccaaaccatggcagtcggtgcttgctgcccaaactattgtctgagtttattttttaag

SEQ ID NO: 448748 - DNA, 357 bp, Homo Sapiens
agaaaagctttttagaggtttattgcaaaagccttctccagaaactttcccggcccggggaatctgcctgtgatgggaatgtgctgatactctccagacccctgttttagggctgggaagattgaggcctaaaaaaggaagtgcccgtggcagagttactgctagaacccttccctaaacatggggtcctaccccttcccaggtcagggcgccctcacctccttccctttcactggcccctgacgaggcactaagtcaaccaacaacctaaagagccacttagtgaagaggtagagagtgaatatacctagcgttttattccacaaagttccagaaacccagtgactgggcatttcc

SEQ ID NO: 448749 - DNA, 934 bp, Homo Sapiens
  misc_feature (329)..(329): n is a, c, g, or t
  misc_feature (348)..(348): n is a, c, g, or t
gcatttagaattttggttaaagcaaagaaaattgagaaaattgaatcatcatattttcaaagacctaccatattcaacctattaagtaaagcaatatatcatgtttttttctctctcatgcttatttgatgcttacaggttcagggcagacttgccactttgtttctaaaaccatgcagagagcagacttagagcagcatatgctgttttggggcccaacccgcacaaaccctgacaggtgactgaccaaacaccatcaggaaggtgatgagggaaaccacctttgccgagaggccagtgcacagcacaaaactaaggaactgttggtngcatgcttgtacagagctntagtgtggcaggaagtgttaccgaaggggatgggtgggggaacacacaggcaacctccaatatgctcttgacgtccaatccatagtccagagcagtggggctgcagccgggcatggagctaaggcactagggctgcagtgggtgggaggcaccgaccagaggtcccagtgccctgccgttcccggggagaggggaaggagctctgctcacaaagctgcctttgtgtaccaaagttgttttcaaaagtctcaacagcactgctgagagctacacctgggaagcccccactgagcagccctctctttgggagctgcctcctctgctcacgtgccttcttccatctcatctttgcgagttgcctttctttcccctgctgtgggctggataaagagcaatccagtcatttcaccattcctggagcaggaccccgtgctttttccaaggcagcagggagtgccctctgtcacagcttgatgaaggcagctggctgggtctgaggttgctccacatctgggggtgggaagacactggaaatggctatgttccacgatgccttggcacagttctgcatagagcttccttatac

SEQ ID NO: 448750 - DNA, 249 bp, Homo Sapiens
tgagcgaccgcacccagccatcccttttcttttgactcaagtttcttcctccactaagaaacagagtccaagaaacaggtccaagtcccttcccaccttgtctaaaacgctccaagtatttaaagtgctgggcccaactaccaaaatttctgccccaccgtcatagagctaaacacagaacagcttgtgtgctagagcccattccaaccaccttacatattttagttcacataatcttcacaacagcct

SEQ ID NO: 448751 - DNA, 905 bp, Homo Sapiens
gccaaaggggggggttaaaaggggaaaagggcccccccgctttttggccccttccccaaggccggggggcctttagacccaaagtttttcccattccccaggaataaattcttttttgggcccttccttaggggaggccaggtccaaaaaagttgaggggaaacccttcgaagaatggaatgggaatcaggagttttgagattgtgaggggcagggagcagagtcagtttggaagaaggtgtttggttctgttcagtcctgttgtgttacagggggaggcctgtgctggattcagttcaccagggcctacaggcccttctgttaccctgaaccatggggggggccagtctcatttgggagtggagcctggtcccatgccctgcaagaggaggagaaaagcttgtgtgggctgagtcgacaataggtaattggattgtaatcgcccgcctggcttccgcgcaccattgggggtgctgagtctttcagtgagcaatcagtactgtgtggtgggagagggtagagattcaatagcaaatcccaggtggagagccaagggggaggagcagcagatgggcaaattttctgtctctcccaccccttttttccttacccaaataactgcctgcctattagttatttactagcagatccaaggtagagccaaatcttttgtggaagctgggtggaaggctaaaatggaagggtaaagagctagggttttggggagaactcttccctgaaattctgtgtgttgaaggatgtgctggtggaaaaagaaagtgcatctaagagacaggcagctgatgagttgtggccctttgctctccaaacccctattggtgaccagacctaggtttagtgtactcgtgggagactttcaccctcaatcctcctcaggagcctgt

SEQ ID NO: 448752 - DNA, 721 bp, Homo Sapiens
  misc_feature (325)..(325): n is a, c, g, or t
  misc_feature (670)..(679): n is a, c, g, or t
gcggccgccccgccgagctgtgcttctactcgggccgtgtgctcggccaccccggctccctcgtgtcgctcagcgcctgcggcgccgccggcggcctggttggcctcattcagcttgggcaggagcaggtgctaatccagcccctcaacaactcccagggcccattcagtggacgagaacatctgatcaggcgcaaatggtccttgacccccagcccttctgctgaggcccagagacctgagcagctctgcaaggttctaacagttccacagtgtctgggcctcacctgggaggacttgaaatctggaggctggaagtgatctgngaggtgcctcatttcatgtgtctggcctggaggtggatgacttgaagacaaggacaccaacgtggagcgtctacctgtggcctctgcagcttgggcgtccatccctttgtggcagacatacttcttctatggccaccagggctcccatgccaagaagtcccgcaagccagcggaaagctggctccttgaaaggatcagcctcagaaatcctagacattctttggaaggtcctctgttgggtaaaacgggtagaacccaccccaagtcaagggcagaaagatagaaccaccgcttaagtcaaagaattggggggcgcttattaaaacccttccacctcttactgtnnnnnnnnnnacacccccttggacaagggtgccggccgggggggtataaacc

SEQ ID NO: 448753 - DNA, 386 bp, Homo Sapiens
gtttatactctctatccctttattcatagcatgttttttaaaaatgttatattatgcaacagatgtgaggcagcagctaagctatacttaagaattttctctcaccttccaaaccaaagtgtcctgaataagccaggagacttattcttttgtgcaccctggtgcaatcttgactgttgtcctagccatagactctctgaggccactgaaagaacagtggccctatcgatttcattcctaggtctcaaaaatacaatgttgccttgtaacataattagggacagcacctctatttcacaattataatctaaggtaggataagacgacacagcagcaataaacttacaagtaaaattcaataccaaaacaaacacaaaggaaatttt

SEQ ID NO: 448754 - DNA, 1003 bp, Homo Sapiens
cgtggcaacccgctggcgttggcatctcccacgggcttctagcgcccaaagagggaaagggccagcccaggcccagcccgccgcctcccgctgctggtgccgcaggaacgtcactaactgatccaccgacagagtctcccttgagcccgcggcctcggcgaaggtccggtcgatctccaccccgctgggtcagcatctttgtagaaggcctcaatcgtcctcgtcctccagggagtctgtctgggagtggtcacaactccctgaagatcttccgggcatagctgtcgtccacctggatgttgagctccttctaggaagttctgcagcctccttgaagctcatcttggttgtccttgtttttgtcaagcttttcgcaagcaggagtgaatccagtgctgtagcttctgacgctggtccatggagcctgagtggtggatgatcttgtgcagccccagcacccagtgctgggcatcagctggcgatggggcgatgaggtctagtgtattgcgctggtccttgaagacaatggagaagcagcggtcctcgggcacatcacgggcgaacttctccagaccctccgtgcggtgccccattcgcacctcctgaatgtcctcgatggagaacagctgggactccggggtccgcatgaccttgcgggactcctgccagatggtcttgcagtcctcctgcaacttgtagaagcgctctctcctccatgagctggacttcaccttcaggagctggctgcccttcagcagcgcctgtagatcctcatcatcctgtaggcccagcctccgtccattgagcgccgccaccttaaggctccgctcctgcaggtagagctccctggagcggctccggctccggatccccaggcactgcatggccctccacagtgcccctgcctgcgcggagccgggtccggggcagtgccgcctccagtgttttatgctcacaacaccctctgctctggtccggggggcggaactgtcgccttggaggg

SEQ ID NO: 448755 - DNA, 1131 bp, Homo Sapiens
ccttgttagaccccgggccggtgttcccaaggctgaagggcgtttggccgtcagccggccaagttaaggttcatgaggaagcccgtcctttggtccatctgccgctgcgccttggccagtctcgctggggctggtagcgctcaatgagggagagggccagcgcaggccctgccgcctcctcccgctgctggtgctgcaggaacgtcactaactgatccaccgacagagtctcccctgagcccgcggcctcggcgaaggtgcggtcgatctccacccgctgggtcagcatcttgtagaaggcctcaatctcctcgtcctccagggagtctgtctgggagtggtcacactccctgaagatcttccgggcatagctgtcgtccacctggatgttgagctccttcaggaagttctgcagctccttgaagctcatcttgttgtccttgtttttgtcagcttttcgcaagcaggagtgaatccagtgctgtagcttctgacgctggtccatggagcctgagtggtggatgatcttgtgcagccccagcacccagtgctgggcatcagctggcgatggggcgatgaggtctagtgtattgcgctggtccttgaagacaatggagaagcagcggtcctcgggcacatcacgggcgaacttctccagaccctccgtgcggtgccccattcgcacctcctgaatgtcctcgatggagaacagctgggactccggggtccgcatgaccttgcgggactcctgccagatggtcttgcagtcctcctgcaacttgtagaagcgctctctcctccatgagctggacttcaccttcaggagctggctgcccttcagcagcgcctgtagatcctcatcatcctgtaggccgtgcagggtcaggaagtcccggcccgagtccatgcccgacgggcggcgcggcgggaggggcaccgcgggactcacttgagtagcgacagcaccggcggcctggggtccgagcggagtgcggtgcagggacctgaatggaccgcggtgggaggaggcacgggggtggtcccgggacaccgccccgccccacgctgccctgcgcccccagcccctgagcccgccaaccctcgtctctccccgcccccttctgggacgcg

SEQ ID NO: 448756 - DNA, 1124 bp, Homo Sapiens
cggacggggaatacgcagaaggtgggctgggggccataagtgcggggtgacgacgcgcggattgtagccaggttgtgaaggcatttttgggttcagcgcgtagcggtgaagggcgggggggaaaagcgtggcctgggttaaatgggccgtgtggcgccctggggcagttttcgctgggattgggtagcggtcacatgaggggaggagggccaagggccaggaccttgggcgcctacctcccgaatggtgggtgtggcagaaacgttcactaacggattcccccggacagggtctccccgtgagcccggcggcctcggcgaaggtgcggtcgatctccaacccgctggggtcagcatcttgtagaaggcctcaatctcctcgtcctcccagggagtctgtctgggagtggtcacactccctgaaagatcttccgggcatagctgtcgtccacctggatgttgagctccttcaggaagttctgcagctccttgaagctcatcttgttgtccttgtttttgtcagcttttcgcaagcaggagtgaatccagtgctgtagcttctgacgctggtccatggagcctgagtggtggatgatcttgtgcagccccagcacccagtgctgggcatcagctggcgatggggcgatgaggtctagtgtattgcgctggtccttgaagacaatggagaagcagcggtcctcgggcacatcacgggcgaacttctccagaccctccgtgcggtgccccattcgcacctcctgaatgtcctcgatggagaacagctgggactccggggtccgcatgaccttgcgggactcctgccagatggtcttgcagtcctcctgcaacttgtagaagcgctctctcctccatgagctggacttcaccttcaggagctggctgcccttcagcagcgcctgtagatcctcatcatcctgtaggcccagcctccgtccattgagcgccgccaccttaaggctccgctcctgcaggtagagctccctggagcggctccggctccggatccccaggcactgcatggccctccacagtgcccctgcctgcgcggagccgggtccggggcagtgccgcctcccagtgtttatccggaagaattccggaccg

SEQ ID NO: 448757 - DNA, 436 bp, Homo Sapiens
  misc_feature (252)..(252): n is a, c, g, or t
gctacaggaagtgggattggcacgttttcttttcaataatttataactgtttttctaccttctaaggtcatggcgaatacgtaatagagtcttttaagggttacttgattcaaatatgtcttaagtaactgcttcctttacatttacagtgttctcgcagtctttgccttataaaactcatgcattcaatgaagagcggctgcaagagtgagctaatccttttgttcggcgaactttgaagtttttcgcctntactgcacagcagtgatttgttaggtagcatgccctctctcacatcttttaaggttaggtgtaaagtttcccaaaaagcaccaagagagttaacttctaagggtgaaacgaaatccgattcagtacattacctactttttaaaacttcccccctacccagagctgcattagcacaaaagttagt

SEQ ID NO: 448758 - DNA, 1104 bp, Homo Sapiens
ggcctgggtggcgaattcggcacgaggctggatcctaggagcccacgggattctctgtatcatcagaggctgggcttggcagaggggaggggcctgtgcccgtcacccctggccccattccttggtaattagccacacccttgcctctgtacagggccctagagcagatgtgcgtccccctcctcttccagcaggtctataaagggaaggggtagcagaaagtcctgggctaggagagtgagtccctgggttctaatcttgggcacatctgtggccatcgctgggtccatttttctgactgtgaagtaaggagagacgtctcagtacccagggcctcttcagctctttgtaggttctgggctgggttgtgggggactggggagctgggctctaccatccctcccattagtagctttatccagccccgtttttgctgcttccagggcctctgccttcaaggcccccatggggctgtccatctatggctctgcctacggaaggggcttaatgcatgtgcctgcccctcccccagctgtttttaatgaaactgaaaaaatagacttgatcccggcaggactgtgatacagagccctagcctgcccagccagccccaagatctcaggagctttagggagaagacttggtggggctggagcacaccttgggcctcagtggtttctgtgtccctgtggtgccagtgcttctgggcagtgcaggcggctgccaggcccagccctgacttccactctggctcagcaacctggttatttatgtggggccgtgcaggcatgggcccactgcctgtccatcctgtttctcttatttattgaaactcaccattgccctatccttgtgtctccacccccttccatgtgttgaataatcaaaggtgggaaagtgctgtcacgaggagctccttttctctgtgcccttcccagcttatccgcctgttccacttgtacctgtccagccctgccctgtgttgggcaccgtgacaggctgccctcccctcacagttcctgcacctcagcagccagggaagcagggcccagaggagacccatcaactcatctggttctcaccaaagcccctagctagaggcag

SEQ ID NO: 448759 - DNA, 724 bp, Homo Sapiens
gccccaggggtggtctctatctttctgggatcaaagtgatcccctctgcctcagtttccccatgtggctggtacttactggtgcatgccactgtgtctgtcacattttttaaatcataaactgattctaaattataaataaatcaaaaggaaaggcagaggacttactatgctgctatcttgacaacatcaaagtaactaatccccaaaagtttattcaaaaatcacaagttggtttccatcttagacccaatttctgtaccaaataaagcctattatactccataatgaaaagtacagataatgaaaagtacagagcccaatgatgcttaaatgatgctatgtaatctaatagctttgatgagtcagtttccaagatatataattatattcaaagagttctgtctggttctgttgatactacaatcaaattcttccttcgctgcagacaacaccttgtacttaagcagaagctgagtcatgccccccactatacgcctctaacaacggatatgtgaaagtcttagagctaaatgtctgagtggtcctgttttataacagatcaatagttcctgaaattagtatttgccttccaggctaaaatattttttctacagtgttccaaatattcttgcatttcttaaagtcattgtcataaatagcaatgatgctttgataatcctgataacaaactacttccaaactgcagcaacagaaggaaaatg

SEQ ID NO: 448760 - DNA, 1087 bp, Homo Sapiens
ttgcaagataagagctcagcctttattgtgggctcagaagggcacaagagcagaacatgcagaggactggcagcactctggcctggccatcaggccaaggcaggcagcagcaggcacccatgcagctgcagcagcctcacttgctgcacttcctgggggagcatttgcactccatggcattgagaacctcatggtacacaacagagccattggtgcagtgcagggccacctgcatgggctccgtccgtgtcggagagcagcaggagcactggtcctgcacatcgttgatgtcaatggagtacatggctttgctggcacatttgccctggcagtagtggatatccacctctacttcagacttacagcttcccaccttgacatactgcagcctggcagtgatgtcgttgcactcaggctcctcacatgtgtcacagcaggtgcctggaattttcataattttacctccctcagccagacacttgtgttcatcaaagggtgggcagcctgtgaccctcttctcccagaagtactctcctctctcattgaccttgcagaagtgagtatcacagccatcctggagcgtctcatcacgcttcagtgtcatgatctgtcctcctcttagctgaatggtgcaagccgtaggcaaacatctcccacaacattcacctgtgttattttcttccttgtaacccagggggcaggggttgcaggtggtcttcctgcactccagcttgaatccagagatgacccccacctgcaccatgcagcggcaggtcgtgcacacatcgatcatcacagtcttcccgggcccaatgacagtgccattgagcatgcaggcctccatgcgctcacagcgacagcttgggcagcacgctgaggtcttacagctcagctgaaagcccgaggggcagacagggacctccagctgggggcaggagacgttcctttgttgtataaagacctcctccttcactcggacacactcattgatgaggcaggggttctccggggaggcccactgggagccgacactcttccaggaagactgggagtccccccgcggtgagccagtcaccacctcacagcc

SEQ ID NO: 448761 - DNA, 625 bp, Homo Sapiens
gatgtgggaaacaggtatcactgaatagctttattgagcattttgggctgggcactaagctcagcactttaatccccacaactggccagtgacatagctgttaccccactttacaaatgagggaggacaggtcacggaggctcgctgcctcaaatggcaggcccggctgcctggtcccaatgcagaaagtacccaatgccatgcctggcacataatgaccctcagcggaggttacccctccagtctgcaatcaacaccattggccccaggtggaagggatcccaagctctctccagctttccagtggcccttaaccatgggtcacccttgcttgggaatctgcccccagacaggacgcttccacttcccccaggcctggcactgccagccactgcccctctgcagtggctttccaggagcggggcagcagccccctgtcctccccaccactctgactctggcctttgcctgttgccgaggctgctccctgccccgtagtgaggacagctgtgtggctaggggcccgtcatggtgccactgcccacctccaccacccagcagtgcttcccagtctatcacctgccatccgccccatctataagctggcagctgctgctctagcctc

SEQ ID NO: 448762 - DNA, 455 bp, Homo Sapiens
tatcagttgggaagagggggaaattattttgatttttattgtcagttctcacaaagaaatttcacaattaaaaataatatgaatttcaactgcatgatgaaaaccccaatagcaagcaaaaatattatatttattatatctgaatatgcataatgtgagttaatgttacccctggtgtcttggcattaaagagggagaaattcattataagcctgagagataaatatgaaataaaaaataccagcacttaacaattacactattgtacattttacacataacttacaccagagcatataatcatatatatctcgtgacactcatagctctctgaaacaggtaaagcagaaattcttgttatcattttacatgaaactgagaatcaaagagattaagtaaatcacaagatttatacttgagagtataaattaggatacaacatcatcctgacatct

SEQ ID NO: 448763 - DNA, 468 bp, Homo Sapiens
  misc_feature (446)..(446): n is a, c, g, or t
ttttatttttttgaaaaataaggatgtttattaaggacatttctagcccacagctagggctcatactcggctctatgagccactgtccgacctcatccccattcaatgtgaatgacattagggaggccgggccacaggtagatcccactgcctggctaaaggggccatagcaaggggtccctcccatgcaaggggtctctcccatagccaggtatagaatagatacactgctgcggatgaagagggaaatctcactggactaatacattcccctacaccctgcctggaccctctcattcctccccacctcccaagatgatgggtcaaaggtacctagcactattatgtggggtaccaaaggaagcccctttatttgtcccagaactgtgggaaaaggatacccttcccttctcagccatctcaggccctgggggctactgaggtanagggggagggggccaggccact

SEQ ID NO: 448764 - DNA, 473 bp, Homo Sapiens
  misc_feature (395)..(395): n is a, c, g, or t
  misc_feature (423)..(423): n is a, c, g, or t
  misc_feature (428)..(428): n is a, c, g, or t
  misc_feature (438)..(438): n is a, c, g, or t
ttttttttgaaaaataaggatgtttattaaggacatttctagcccacagctagggctcatactcggctctatgagcacttgtccgacctcatccccattcaatgtgaatgacattagggaggccgggccacaggtagatcccactgcctggctaaaggggccatagcaaggggtccctcccatgcaaggggtctctcccatagccaggtatagaatagatacactgctgcgggatgaagagggaaatctcactgggactaatacattcccctacaccctgcctgggaccctctcattcctccccacctcccaagatgatggggtcaaaggtacctaggcactattatgtggggggtaccaaagggaagcccctttattttgttcccagaactttnggggaaaagggataccctttcctttttnagccntttcaggttngggggttattgaggttagaaggggaggggccaggc

SEQ ID NO: 448765 - DNA, 610 bp, Homo Sapiens
  misc_feature (462)..(462): n is a, c, g, or t
tattattaaaaaggtttaattggcttatggttctgcaggatgtacaggaagcatggtgctggcatctgctcagcttccagggaggcctcaggaagcttatgaccatggcaaaaggtgaagggggatcagacatgtcacatggtgaaagcaggagcaagaagggggcagggggaggtgccacacaattttaaatgaccgtatcttgcaataattcaccatcaagaaaacagcaccaagccatgaaatacccgtccccatgatccaaacacctcgtaccaggccccacctccagcactggggattacagttcaacatgagatttggctggggacaaatattcaaactatatcgcctcctttatgcagctgagggaaacagacttggggtcactaaggggaggagctgggattcagggtggagccagtgctcatggcataggctatggggtgctaaggtcgtttnttttgagcctcatttttaaggcagggaggacaatttgccagcacgatgacatgaaaccatccacatgaacgtcctgagcatggcatctgccacggcgagctcagtaaagatcagctccaagtcacattttcctcttccagaaaccagg

SEQ ID NO: 448766 - DNA, 501 bp, Homo Sapiens
  misc_feature (309)..(309): n is a, c, g, or t
tggtgagtcaatattctccaattctttatttgttaaattattttcatttttataaagtacatctgtcagtttcttttaagtaagggcaaaattatcctaagaaatccgtagtgtagatctcacatttttaacagaaataaccattgcaatgacagccactgttattacactgttattatttatttcatgtgtatttcctgcattaatctgatcttaacacattatcggtagagtctctccttgcaggagggaagcctgctcagtgggagatgggatctacaaagctctctcccagcctggactggagcntgcgtggctgccttccttctgtgcggctgcacgccccggctaactgagagggaattcttcacgtgaccgaagattggccccagacttcccactatctcacttcctttgtgttccttgcagagacacacaggggactgtggaagtcagctgtggaggacgcttgagagatttttgacccagaactcaactttg

SEQ ID NO: 448767 - DNA, 1031 bp, Homo Sapiens
tcgtggtatctcccctgccagggaagtataagcaggttttattaagatgccagggcgacagcaccaggtcagagctgcggcaggaacgccaggcagggggactgagtgtgcgggagagggcggggcacaggacagctgagggaggggtcagggtgggtgcgcggtgacggggagggcaaaggtggtgtcagtatcttcattttgaggattggggttcagagcacttctggggtgtcagctcctccttgtccccccgtggggctccgtaggactggaaagaggacatgaagagctctgacagagagcagcagaaactctggaactgtttccagagggcctgcactgcatggaccagggccaccaccttctccttcacccaggccagaaccccgtgccaccaggtctgcagccgctgcagcatggcctggaaccatctcatgaccttgtcacaaaagctctccccaggctcctcggttgcgggatcctcaacatccgggacaggggatctgttgcctcggcaccgtaatccatctctttctttttcaagtagaggagtgagctctgggtgctgctcctcataataagccgccactgtctccaggtagccctctttgaagtcgtcctccagctctgccaggctcgacatcacctgtccacgtcctgattctgcattttgcattttatcataaaatctttctatggcctggtgctgtgaagagaggcagagttggcaccaaagggccggatccttgtccctccagggtcccaggtgtcccacagtgtcctcagtgtcacacgctgagacccaggcccccaacccctgagcagaagtagggaggagcattaccattcgggccttcagcttcttcatgtcatcagagaggaccttcgggaagcacatggcggccaaaagttcaaggagccaaggcctgccgagagagacagaggtctggggtccctgggaggaatgagggtccgtccctggctgggcccctgctccctctgagctggggtgggagtctctgagcccc

SEQ ID NO: 448768 - DNA, 507 bp, Homo Sapiens
acacatgttagtctaggcctgtggagggttaggatcgtcattatcactggctttcccctccccatgccgtcccactgaaaggtcttcgtggacaataaaccactaacatattcatttgttatcattttcaagtattatgtatttcatgtattgtatgtgcaatacttttatacaactggctgtgcaggtttgtttacaccagcatcactacaaacgtgagtaatgcttccactgtgacattactaggtgatagaaatttttcagctttgtgttattaatgttatgggactacctgttgtatatgtggtctcttattgaccaaaacgtcattatgtggcacatgactgtacctgttcccctcactttcccattcttagagtcacataccttaaaaagaatgtctcatcttggggaaaacaccattgcgatgacagaggggtctgttatatctaggcttagaactaagaatgaaagttattacaggattgtataggccattcctgggag

SEQ ID NO: 448769 - DNA, 333 bp, Homo Sapiens
cttaaaaaggacttatcctaataatctggataataaatcgtttgcgtttcctaagaaactgggtttttcttttcccttgtggttttggtgtttttcttcttctttgagccttactagcggtctgaagctttctttctttcctttgcctttttgcttttggacaggagaaagcagtttgtctgaattgtacttgactcttcaaagaggaaaagggcgtggaagcataatgggggcttcgggagtaaggatatatcaataacggaggaagaaaacgaagaacggaactaaaacccacggaacccagaagttgccgggctgagggtgggggggtgg

SEQ ID NO: 448770 - DNA, 461 bp, Homo Sapiens
ggagattctccacgtttattaggaaaagcttgcacaattaataatcaaaatcacactgtgaaactcattaaaacacagatccaaatcaccacaaattattgatttctatgcgatgtaatgcccagaaggaacccctgtcctgtgtaggaaccgtcacttctctgcggctcatcagctggcaaggggaggtggcagtccccttctgtgtgtttggctggctgctgggactgggcgaggggttggaggcgggagccccacgcacagtgggctcaggggcggagaggcagggctcctctccagctaggaagagctggcagtctaacccatggaagtgggcgttccccccactcaaccacgtgccctggggaaatggtgagactgtccctcctgctggaagctgggggctcaggagcagtctccacagtctcctgcccatgggtcagcatttcctgagagtgagg

SEQ ID NO: 448771 - DNA, 867 bp, Homo Sapiens
ttacaggtgtgagccacggcgcctggcctaaaagcatctttttctttaacgcagaggttatgttgtattattagcataaatgtttttttctgggaatgcttatttcacacagcacaatactgaatcttctctggaatgtggatcgatttcagatggatgactattaaaatgtgtatatttgcagattatccttaaagggccacctcatgccttctaatttatgtcttacggataaaaaatcaaaatgaagcataaagtaaaaactgtgtccagctttacaagtggacgcttagtaatggctgaggcaatatgtttaatgtagcaaattttacttatttgtcatgatcagttttcacagtgcttgtaagtgctggtaatagaagatggacatggtttaggtcaaaacttggaccagaaaccaacttcctttgaaacagctctaccagttataagagcaatatgctgttaggtgaagaactgtttaacagaaatatattatgtttttgcaaacaggcagctgatccaaaattgtgttgaaacacctcagaaacataaatgacatcaatactctataaattaatgctgttaacaaatttaaaaaataaaacatacaattttcaaattgaaggcacacatcccagttggtactggcaagtttaaattgtttctaatactggtggactcttcatttgtaacctactgagcagttacagagggtactcccattgatacaaaatgctcaggtaccggcatttctccacatccagagttctttctatattcccttctgatttccatcccttatctgttccctgcttttgtacttccccagtctcacccccatctctagccatggtaagtgagatg

SEQ ID NO: 448772 - DNA, 377 bp, Homo Sapiens
caactgggaccaccaagttttattttttcaggccaaagaacacatttatggcccacagtgtcctataatggacataccatgttgcatattgtcttcatctcctagggctgccataacaaagtgccacaaaccatgtggctgacttacaaaacaaaatgcactgtctcacagttctggagactagaagtctgagatcaagttcttggcagggttggttcctttttgagggctgtgaggaaaaatctaatccacacttctctcctagcttctgggggtttgctggcaatctttggcatccctgggcttggaaaattctgccttcatcttcatatggcatatcccctgtgttatctttgggcacaaatttcccgaggagg

SEQ ID NO: 448773 - DNA, 514 bp, Homo Sapiens
ttttgggggctgaacaatcagattttattatggcggcttcggagcagtcccgtggcttccacgtgactgagagttcaatttctgagtacaaagtcgtgcccacacgcatccacccacacagaggaatcctttaaggatcatagtggaggcacccaccctccccagacagcccaccgtgagccccagccagaccaccaggcacactcaggagccttttggccatggccctcagggtcctggacgcccgtccggggtgatcactgtttcctatgaggatacagctcgagttcggccttcacaaaaggcaaatgtgcccgcggcacagcccgcctgccaggggtacgcccagcagctacgggccctgaagaaagtcctctacaggctgggggcagcagtgtgcgagccccggcactacaaatatcatagaaccccgggcggccggggacttcccagaagtcacttgcttaaatgcaaacacagaacaaccccatggggtcagacacttggcagaaga

SEQ ID NO: 448774 - DNA, 923 bp, Homo Sapiens
ttccctgcagtttatctatggtcacagcacttttatctgatgcatgaatatctatatttcctttaactgttcccagacagatcactttgcctccttttgtttttacatgcaatttttgacccttaacagactgcaagatgctagtcccatgctctgtttcaattttgcaattatcaccctcaatactttgaacttctacacagccagaccctgatgacttgatatctaaacctccacggacgcctgggggtggatagtatcagacacaatggccatctcctccagatcctcgtcgtacttcacctgcaggccgtccaggccccgcacgccgccctccacgccgcacaccgcgaccagcacgcggtcgccatccgggtaggtgagggggtccaggggcctcacggccaggtggcacgggagccgcgcccgcagccgaccaaacgggctcacctgcagtgtccactccttcagagttcggcgcgccgggccaggcggagggacctcagtctccgatccgggccagcgctcgctcccacctgagctgtacggcctggcttggcaagcccagcaagcccagcgcccagcgccagcccacagtcggacctgacggagacagagacggaagcagccaagctcccaacctgagcagggggcaagcatggcgcgcctctctcgccagtcctcagaacacttcagccacagggagggtcacttgccacggccaatcgacttggccactgtgccgcctcaagtcaaataggagacgtaagtcagggtttgctgaaacaagagcgagccggttggcttgactaggcgttctaaacatcagccgcgcaatccccaggggcaagttgggatttgaaagctctaaactctgacctggaccccttgcctaagcctcgtgccgaattcgccacccaggc

SEQ ID NO: 448775 - DNA, 385 bp, Homo Sapiens
tttataaaaacagattttaataaatttcaattaattataccatgatcataaattatctttattaaagaatacatattcttgtgatttaaaaccaaatattttaagtgatatatctaatagaaattgacatgaaattatttcatttaaaagttacaataaaaggcaaatagacatccgtatttgtctcattttagaaaacataggctttaagaatcaaaagtaagcttccaagctcacggccaggattacaacttcatattacagaaatgtttaataacaaatatttgaccaacagattataattctgaagttgtacatttttaaaagccttttaattttgcttctttactaaaaaaactatgaactgataaactcacaatagacc

SEQ ID NO: 448776 - DNA, 482 bp, Homo Sapiens
actccaagaggggtacagcttcaagttgataggattaatcaacattgtcacacatagttctggggagttcatagtgagataaagactatggacttggatgtattttaatgaagcaggttgtagtggggattcttttgttagtttgtctgatgggaatacaagctccagagacagtcctactctttccttctaatctgggctccatcttacatgtcatcttttttgtcccaaagtttttcacctgtaaaaagaactaatgttagtaccaagctcagcaggtgctgcaatgattacatgtgtaagtatatacaaagcagttagaatagtgtctggtgcatataaagtgctcaataaaattattatttaaagtcagataaatcttctgtcatattcaggacttctgacaggtttatgtccatcacgcaattatctttcaatagtacagatataattatatgattctccccatcacctgcccaatg

SEQ ID NO: 448777 - DNA, 765 bp, Homo Sapiens
  misc_feature (501)..(501): n is a, c, g, or t
acaaaatgtgtatattaatagctttgcacaaatattttaaagacaaattcagctagtctaagaacttcatgaaaataaaacaggtggataaatacttcatgtgcacaatgcactccatcagacgtcgtcggctgggagaggaggtatgttgatccttggccttgtgaagaatgctatcttctccctaaaggtctgcacttggatgggctctttgtggctctgcccacgcagctggtagatctccttggaggccttcttcagcatcttctcagccgcctgctcatgacggtagtcaaaagtttggtctgtcttgtctgccgctcggcctcccgcagcaggccacggagccgctcgtcccgaagcacccaggttgggagggtcagtctggccacggagctgggcgtcctccaaccgctgccgcagctcacggagggcgcagagctcctcattcagctgcctctgccgtgttctcgacgcctggagatccagctccaagtccanggaggtgcgggccatgagctcagccagggaagacctgcatgactgcttatagcgaagggttcgtctttccaaagtatttcggacaaaaggggacttccggggcagcgttgaactgtcgctgtcactacgataaagtctgcaaacatactggcttcgtgctccaggcgagatgtctgggaacggacatccggccactcgaacaaaggcgaccctcggccccgcggctggcccgtcctcacgaagctgctgctctttcagaagaga

SEQ ID NO: 448778 - DNA, 465 bp, Homo Sapiens
  misc_feature (17)..(17): n is a, c, g, or t
tttccaccttttccatnccatttggttaaataccgacaggtatttccctgagcaccctaatataacccccaggcactgttcctaggtactggagatgaagaaacccctgctcttacggttccttcataattaacatttggagactctatacaagcacatgtgttgttggggacttaaattcagtttgttgtatgaataagaaaagccatgattgatatgagagccaccagctttccgtgtcttcatatcagcttctgacctgtaattgtctccggtcccagggagaagatagcattcttcacaaggccaaggatcaacatacctcctctcccagccgacgacgtctgatggagtgcattgtgcacatgaagtatttatccacctgttttattttcatgaagttcttagactagctgaatttgtctttaaaatatttgtgcaaagctattaatatacacattttgt

SEQ ID NO: 448779 - DNA, 221 bp, Homo Sapiens
aacatttaaagcactcatatgcattttataagtggtctaaggtcatttagcataaaagcaaatagctccccgtgcccctactgttacaacttcagaagacactgctggagaaaagccattggtttctgtgaatgatcctcagttatgcagaaaattattatattgcagatatgctgaagacaagtgtaacattttagaatgacttccttccaaaatgagta

SEQ ID NO: 448780 - DNA, 406 bp, Homo Sapiens
  misc_feature (396)..(396): n is a, c, g, or t
ggaacactgttgttcattgcagccgtgttttgtgacacagatgcacagtctgctgtgaagaccttctctcaagtggcatttgggagtccatgccagatcatggtgcttcatgagagactgacagctatcaggggttgtggcacttagtgaggactctcctcccccagtgtgtgctgatgacacatacacacctgacaatagcttgagtcttctctgttccttttactctgtagccaacatacacatgatttaaaaccctttctaaatatctatcatggttcatccttgtccaaatgcagagtcagagctatttgtacttcattattatttccaaggcgaatagttggctttctttttgcaaaaataattaaagtttttgtatgttgcagttaaaangagggaaaaa

SEQ ID NO: 448781 - DNA, 1608 bp, Homo Sapiens
  misc_feature (449)..(469): n is a, c, g, or t
  misc_feature (487)..(547): n is a, c, g, or t
  misc_feature (556)..(581): n is a, c, g, or t
  misc_feature (594)..(604): n is a, c, g, or t
  misc_feature (648)..(656): n is a, c, g, or t
  misc_feature (713)..(774): n is a, c, g, or t
  misc_feature (782)..(887): n is a, c, g, or t
cccagtgacgcattcatgtgcgacaattgaaatataggcacgaatgcaggtagtaaatgagaataaacggcgcggacaagtgagatgtagggaggagaatagagaatgtagactgcggtggtgtgtggggcaataggtggcgtgcacggtattattgagtatggatgggggatgatagataatacgatggggacgggacttagggaggcttgcaacacgggaatccggcgcccgtatatatcggctgtcatggagtagcggacgagaatagtggatgggttgtttttgtgggtattattaggttattttaaagaagcgtgggttgttggtttgtgaatattcgtgcaacgacagtaaggtgagacagagggagcaagagagaaagccaccggttcttgaggtggttttagaagtcgaaacagcataagcaaccctcagcgccgtggggnnnnnnnnnnnnnnnnnnnnntactccgggaatagaaannnnnnnnnnnnnnnnnnnnnnnnnnnnnnnnnnnnnnnnnnnnnnnnnnnnnnnnnnnnnatttccccnnnnnnnnnnnnnnnnnnnnnnnnnntttgccaaaaatnnnnnnnnnnnaaaaaatgggtttttttcaaaaaatccccaagagagcttttttnnnnnnnnngcggtttaaaaaggggcccccgcccccttttttataaaggccccttttgggggcccnnnnnnnnnnnnnnnnnnnnnnnnnnnnnnnnnnnnnnnnnnnnnnnnnnnnnnnnnnnnnncccccccnnnnnnnnnnnnnnnnnnnnnnnnnnnnnnnnnnnnnnnnnnnnnnnnnnnnnnnnnnnnnnnnnnnnnnnnnnnnnnnnnnnnnnnnnnnnnnnnnnnnnnnnnncacacaacatatatttattcagaaaaaaatttgcaataaattataataaaaaagatgacacgaaatatagaatcccactagcagctttgcttagtgatcaagacgtttttgggaaatataacaaacaattacagaataagaaaacagtgaaagggagactaatgcaatgtcaccacatggatttgaaccatttcttccctaagacagcaggtgcagagtctttccctaccagctgaatccgaaatccttacttcagagcagctacaaattagtaccttagaggacttggcaattacaggttggggtgctggaatagccatggtagggaagcagatttcttctgtctgggtctacatcttgtctcctctacctagagattgtctaaaactctcaactctgtatatgttccaggatgagctgaaaaaaggtcgaggcagtaccccaacttagtgttttgatctgatgtagaaagagttaggatactgcatacgtgcagcacagggcctccattgaccacacccttgattacccaaagatcccaggtcagtgatatgctagaaaacaagcccaggaaaggtatttccctgtggtatgaccctaccccagtgtctatcatctgcctctttttgtgatcactttctggccttgcggagatgacaaacctgttctgctctcagtcttccattaactaagttcaacacctagcccctgacctatcata

SEQ ID NO: 448782 - DNA, 326 bp, Homo Sapiens
gacatgaaaacctttctttttaatttggttgatacacatttgacaaaatattttagaataaaataatccatgaacaggtacaaggtatttacagtaacataattgaaaaacataaaatcgatatatttctttaacagaaatgtctataaaattttctactgtgaatctggaagactttcagttcctacttatcaacctggtcttaagccccaacaggcgacatgtaaggcccaggagtagggatatacaaactctaacacatttgggcaattaagaatcatctattagtgaggagctggcaggcggtgggtggggggtggggatgg

SEQ ID NO: 448783 - DNA, 467 bp, Homo Sapiens
cccgagtcagaaggaagacacacctttattgcaatcccttctatggacacttccaagccatcactatgcaaatacagttggtggcccaaagccagtcagccaaagcccagcaagcatagcattggctcaagcaagcttcatgccagccattccccaccactgccctccccgcccccacagcagtgcaagccacaacacacagcattaagttatatgcacaacacacagcagcttcagtgctctcagtccaaactgttagtcctgtttcacacacagttgtaagtgataaaggggccaaggttcctgagtctcagatcttcaacctgcctgtaccgcaggtccctgcagggatactggcaaaatcactgggttttgccacctctgtggagcccgtggttctagggagctgaccagccggcccttacataagcttcaggaattctttgacccctctagaccaagatagg

SEQ ID NO: 448784 - DNA, 525 bp, Homo Sapiens
cacatcgtcttttcccaaatctccatctacgagttgcctcaactgtctccgtgatactatataggtgcttgcccaaccacctttagagaagcctcagcaagcctccctcaactaggacacagagaaccctggcttttcctgttcagccggcccctcaaagacgagggcagtgcccactgcggactggatggcaacggcggcagcggtgcgggcgcgcgtgtgggcccgctgatgctgtgacagcgagcggctgtggctgaagcacttgccgcactctgcgcactccgctggccgttcgcccaggtgcgtcttgcggtgcagtgcaagcttggaggcgacgctgaaggccttgctgcactcggggcatttgtgtggcttgtggccggcatggttgcgccgatgcacgttgagattggacacgcacgtgaaccgcttgccgcacagttcgcagcggtagggcttctcgcccgtgtgcgtgcgccggtgcttggtgaggtccgagcggtcgctgaagcggcggccgca

SEQ ID NO: 448785 - DNA, 1609 bp, Homo Sapiens
  misc_feature (424)..(424): n is a, c, g, or t
  misc_feature (670)..(743): n is a, c, g, or t
  misc_feature (941)..(1134): n is a, c, g, or t
  misc_feature (1533)..(1533): n is a, c, g, or t
ttaaatttggcgtgatagtgattgcgacgcggggggctaagtgttgcagagcgggcagatctcgagagaatgttggcgccgcgagcttcggttttcactgtttgcaccgtgcggggtgtgaaattgcgctaggcatactattattggggggcggcgcgggggatatatcgtatctggggcttatactgtaattacgcgcatctgtctcgcctgtttatcgcgcggttatattttttggggtcagcggcgactaattgtcgaccgcacatgtagggtggtatacggcgcgaggaatgtcggcgcggcgttagggcgcggtaatgcggctcgcggcaagtcggtggtctatatgggggccgtgtcatggataatggcggggatatacgtgggcgggtgtgggtaatgcgatagaagctgtggcgcngggataaaagggtgcggtaacgggggcggcggctgggttacgggttataccggaacgggaataagcggcggcgggcatacataaggggagaaaattacgcggcgggcggaacaggcgttataagggggggcgggaaagagtgggattgggaacggggcggcgcgggggaaacaccagcgacggggacgggtgggaaagcgaaaaggaacaccaaggcaggggtgaagggtggcacgggacgccttnnnnnnnnnnnnnnnnnnnnnnnnnnnnnnnnnnnnnnnnnnnnnnnnnnnnnnnnnnnnnnnnnnnnnnnnnngtttggtagggacgctcaggcggcttaaaaatgtggggtgtgtcccggaggcgcgcgaagagcgggtaaggggtttggcacagggatggccgcccccgggaaggggtgtggctcacagggatccccaatagcgcttttttcccccacgaggggttgaaaaaacgcgccccggccccttgtttaaaaacccgcccttannnnnnnnnnnnnnnnnnnnnnnnnnnnnnnnnnnnnnnnnnnnnnnnnnnnnnnnnnnnnnnnnnnnnnnnnnnnnnnnnnnnnnnnnnnnnnnnnnnnnnnnnnnnnnnnnnnnnnnnnnnnnnnnnnnnnnnnnnnnnnnnnnnnnnnnnnnnnnnnnnnnnnnnnnnnnnnnnnnnnnnnnnnnnnnnnnggaggaggattcagagcaagttttgtgtctcaggagagcaaaggcgtaaggagctttcctggagggacaggtgacagatccctgtagatgaacacagccgagctccgaggcccgagggtgtgggagcagtgctctgggccagggctatgctaggaccagggcgggcacagccacccccaaactgggtccccttggggcacagccttaaaataaacctccacatctgggtgcaggcacgcccacacctggctggctttaaatactccgagtgttaaaactgttaacaaacctgctttaaagacgaaatggtaatcacaagccaagtgacaaggccgcaggtgttttaaaggggagcaagggagataaaacggtaatacaagccatgtgacgatgcgcaangtgtttaagggggagtaaggcagataaaaggtttcccagaagcagctgctgatgggaagggagcagaaagctctcg

SEQ ID NO: 448786 - DNA, 752 bp, Homo Sapiens
  misc_feature (14)..(14): n is a, c, g, or t
  misc_feature (28)..(28): n is a, c, g, or t
  misc_feature (71)..(71): n is a, c, g, or t
  misc_feature (117)..(117): n is a, c, g, or t
  misc_feature (348)..(349): n is a, c, g, or t
  misc_feature (366)..(366): n is a, c, g, or t
  misc_feature (368)..(371): n is a, c, g, or t
  misc_feature (375)..(375): n is a, c, g, or t
  misc_feature (381)..(381): n is a, c, g, or t
tcaagtctgacaancatttcccaccctnatgcttggcgacttcaccattttcctggcaaaattgcacgaanaattaagtcacgtttaaaggcccttgtctttgagactgcatacctnaaccaatagggttccctcaccagtttgatctactttaacctgcaagctgtcgagacacacaaatatatacaaatatatattgcatatttctaaacccccacatagttccactattctcaacactgggggcgagaggcaaggatagccatctaatgaccacacatcaggtgactcataagattggtaaccactgacatttgattatgcagttgccatattccttagtaagannctggttacaattttcantnnnnaccncaggcnattccccctccccacaccccccttttttctgagaatttcagtgagatatacaaaagtttcatttaatcctttattaattccagactttatatatttttattaggatttaaaatacatttcaaaaagatcaagtgagaacagaagataaaagtaccaagataaaggcataatacaaacttagaaaatacatgttaagcatactgcggcgtcctggtagccccttgcttttgttcacttttttctcttatgtacctacataaaatcccaaatagtatcttccaggatgacacacttgctgtctgccccacccaattaaaaacagattttttagttattaggtattgtgctgaatctaccttattttattgcca

SEQ ID NO: 448787 - DNA, 609 bp, Homo Sapiens
ctctgatagaagaacttggttgcgataagtttatcaatagagaatagttatgtggtgacactacttcaagagaacctctgcattccagtcataccaatcctgcaacttgattttcagaagtcaagagtatatcgcgataagacagtgcacaggtggaggggaaaaaaagggggagggggaagcttatcttgaaaaagcatcacagaagtagaaaaaaaatgtcgaaagcattataactgtaacgttctttgagtttgtgattgatccacatttttccccctgcattatggaaaatgtctctcagcattgctttattacaaagtaaaggatggttttataaaattgagactgatgaaacatcaatactagagcccatgaggatgaaagaaattatcaaatagtgctgaacagaataagatgttaacgctgagttattaggactggaaggctatgaaaagaacttgaaattgtcggaatatgtgctctcttcatgtcatattcaatagaagtttctagtttaagattgattttgtgttttcttaggcatttcaagtgacaagcaaagtcaatgtatatattatgtgataaatcatgttttcaagaacgtca

SEQ ID NO: 448788 - DNA, 1497 bp, Homo Sapiens
gaggaacaacttgaagttggctaggctgctcaagactgtagttgatgataattttggttgttccatcttgatcaaccaaaggaagactgatggctgaaataacagaatggccaccttgttgtatgggtgaagcattgattgtttcttgttctttggatgcaagattggcttgattattctccaacacttgccttattacattaccatctaccgccactttaagtacattctgaatatcacttaaattgatacttatgggagacaccaaaccaactgttggcagaacaacagcttgcaccatgccctgaggagaactggttgcctgtaatgggccaccaccagtgaaaaccccattttgtaaaggggttgaacagttgattcctgaagcaaccactatgggtttgaattcataatccacaggttcagttttaatttggttaacagaaagttgttcttgaaggggtttattctctatcttttgccgtatctgtggtcgtgtgggactgcctggtgatgctgaaagaagacggtgaagaccactgagatgtcttgagtcctgttcttggtcgcccaattcacaggtatcaagctgatacatgttcttactgcttatgtgtgagctataggagccagaatggggaaagcgtttcttgcagtttgggcattcatatggcttctctccactgtgaattgcttaagtgctcttttaggtgatgtttgtatttgaaagcttttccacactcagtgcatttgaaatttacgattacacccagactgcgtcacatgtctttgatctcttcctgatttatgtgatgtcatgtgacgttcaagtttgggttctgtatgcaaaggtgtaactgcacagggagcaactaaagttatcttcattcttttcatgacgatatttaatgtgttctttcagagaggtaaagcgtttatagcctctatcacaatatggacaggtgagtaattgtgaaaatgcatctggtgttccattttcatcatgaccactggcttctggtgtgccctgcctctggtcctcttcaggtgcctcaggaaaaatgacagcagtgtcttgttgttgtagaaactcttcaacattaggatcatggttttgctcattttctgcatctgactcgcattcatcatcttttactgtacatcctgcttcatctgcctgagcttcaggccccaggatttcttgcccttcctttctgtcatcctcccagcagttcttagcattcccttctctttcactgctcctccctggtaacactgtctggtctgttggcaggtcatcctctggtacaccttcacagtcagctgcatctgtaacactttcttcttccacaatatgcagtttgtcttcatcatctgaatctgaatttgtttctaccacagtattataatttgtaacgttattgcgccgcgggttcgcctgctttctgcgcttacacctggggccatccgccatgatcctctcgcttgtgtctcccc

SEQ ID NO: 448789 - DNA, 683 bp, Homo Sapiens
gattgcatcaccaggtagttttctcgattaaggaggcagcctgaccagggtgggccgtggccgggcggcagcagcatcacactgggccatttaaggcagctccttctggcggggcatctgtcttcccgtcctttgtcactgtccccagggtggccaccatggctggggctgctgtgactgccatgatgggccctagggggaccgccacggccagtgcagaagagactgctggggtgggtatggcggggccagccttgctcagtgctgtggtgatggccacagtagcctcggggggcacagccacggctggggcagcagtcacttcctttggcgcggggcaggcagggcttaacagccggctgtcagcacacccgaccctgccgaccgcctcctctgtcctggccactgtgggcagcgggggggcctcccggccgggacccctgctcaccgcatccatggcactcgctgcctttctggtcgccatccttgctgtgggagcccccataggagctactgtcagagggcatcaggggggccctttctggtgacccacacgttccaggcacatggagaagccgggctgaaggctttctcaaggccttgggtccggctgccctcaacattgctggttgtgtgtacaccggagagctgcacctgggccctgactcggaccaacagaaagg

SEQ ID NO: 448790 - DNA, 503 bp, Homo Sapiens
gtttggtttagtcaactctaatatgttacttccccatatatgcctgcttgagagactggtcaacacatatacccaccctccaggccttccaaacaagcagggaccatgggccactcaagttcttcctcagagcttactggcaaatgctccgaatgtaatggaaagacctgccagggaactgccagcatcaggctgtacccaaagctcaaggggagagcactcatgtgccactcacacagccacacagctccacctccgctcagggaagaaggggcacagcgtgcaacacacaacagctgccttccaaaacgacttcgaacaaccagactctctgggtctctcctaggaataccatttgaaaatgctgcgtgttttcctatgtgtaatatttcagggtgcaagaccaactatgattctgtgcagccagtatgagttcatcggaaaccaacatgcttacaacacagcctgtcacctgccctgaacagagcacattgtgtgaaaag

SEQ ID NO: 448791 - DNA, 504 bp, Homo Sapiens
  misc_feature (306)..(344): n is a, c, g, or t
atttccacatttatatcacaaggtgtccacttactggaccaaatagcaaagttgctcccttctgcgtcctgagaacacagaagtctaggtactgtacattcactaaggctccttgtttttgcaaatcgcgtttatgacaaataaccataaggcaaacgaatctaaaggaatggttatgagtgtttccagcgtacagacaggtcttccccctcgccccacagtacagcataaaaccagtagcacccacaataacttttgtgttgttttggggggactctaaaaaggtgaagttttctagatgtgtannnnnnnnnnnnnnnnnnnnnnnnnnnnnnnnnnnnnnntttttttgtctggtggtctgatggaagaggaattgtttaaaataaacatgagaaaacttaaatttttgcagcatttctttaaaaactgggttataactgaaaccagatataaacaggtggctgcccatggagtgtgggtcacactggctggccagctggc

SEQ ID NO: 448792 - DNA, 556 bp, Homo Sapiens
gcggtccggccggagggcaggaccctcacctctcccccaaggccactgcgctcttgggaccccagagaaaacccggagcaagcaggagtgtgcggtcaatatttatatcatccagaaaagaaaaacacgagaaacgccatcgcgggatggtgcagacgcggcggggactcggagggtgccgtgcgggcgaggccgcccaaatttggcaataaataaagcttgggaagcttggacctggccgtctgggttttgttcgcgtctcaacgtggatggggcggcagcggggcgggcgccgttgacatgcggagggcaatggggactcggggcgcgggagggccggggccggctccctcagggccggcggcagcagcggtggcggcgcggttattgctcggaggcggcgcgggctgccgccagcacacgccgcagtgaggtaaacggtctcggaggtcggcagtcacggtgttgagccgcctcccggcccagggcggcgaactcgtctgcgaccgttagcgccccgcggcccccgcccgggcgagctcgcgcacgcgcccgg

SEQ ID NO: 448793 - DNA, 524 bp, Homo Sapiens
  misc_feature (249)..(249): n is a, c, g, or t
acagtcatgtgtacaatttgttacaaaaccatagaagactacaacttgttttaaatcatttttggtctgcaaatatgtaaaatctgtgtgcaattatcatgtatttacagggtcttgtgttagtcattttcaatgattattccaacaatgtcacactctcaacataagacatggcttaagataaatatattagtaaataaatattctgagaacatatttccataaatgaaatgtgctgctatacatatnggggaatatacataagttgtcttctaggcttttaaaacattttttaaaaatgggtaatgttgggaaaaagagcccttggacccttttatttacaaaatctttacagccaggtctttaccaaatctcttttaagtgctatgggaaaaattaaaaaattttaaaatagtgcctcgttagaccaacacaatagaaagagtttacataaagagtagaaaaaggcagttctgtttaaagaataatagtctcgactagtaattattttttagacctcattt

SEQ ID NO: 448794 - DNA, 889 bp, Homo Sapiens
  misc_feature (128)..(141): n is a, c, g, or t
aaagaggttttctctcttttccaaagaggggctcccccatggagagcccgtctccccaaaacacaaagaatatgtgttctcggtgtaaaaaaagacatacatactgaaaaaaggtgtcttatccggtnnnnnnnnnnnnnnctagatcattgggtgggattgtggtgagttctgagtcgtctgttcttcgaggaaacgattgggaaagggagggggggagttagaaaaagggccaaggcacggggaggaaatggggaaagtgtttttaaattccaattaagaggggcctggctccggaaataaaaggggaagaaccaaggggggggaaaaaccccttccaaaattctgggcccttgtttttgaagcccggttttaggttccttaggtatttttaaaggggagtttggaggtgacccgagggtggggggatcactggttgaagaatacaggaaggtgagatgaagaaactgcattttcatgctgattcagttcctcttggggagaggcgggggggcggtcttcaaactggttggcaatagctcttttgctggaattcaggatctgaaaaacatcttaagccatttttaaacaaacaaaggccttatgattctaacatcagaaatcttctctgtaggaacaatgaggaggcaaatggttagcatctggtgctctgggacttttggttacgaagaagtgggccaaagtgcagcctgattaatgcttaattacaactatatttctgtccagaacccagcatctaattcttgttaaccctgtgaggatggtttcaatagaatgtttccattgtccttaaagggaggtatagttagtcccattatactccaggtaatgatgacagtcttggcaaaatcttaggaccctaagttcc

SEQ ID NO: 448795 - DNA, 466 bp, Homo Sapiens
atgtgttgtcgttgaggtcaagcactgcaacatgcacagtgcctgtggtgctgcggggtgggctccctccatcctgcacctgcaccacggagctgatagctgctctgctgctcacggtccagggtttggagtgtggtcacttctccagtctgggggtggatgcggaaggccttgctgtcttcagacagctgttgcaggctgtaggtcagacgtccattgggtcctgagtctcggtcagtggcaaagactcggcccacgctggtccctgggggctggttctcagccacagccaggaaggtgggatcctcagacaagcggggactgtgttcattctggttgaggatgctgaccctcacggtggctgtgcctgtctgctgccccaactcagctttggacccagacactgccattaccttcagtatgtactattcctgggcctcacggtctagtgctgcccgcacccata

SEQ ID NO: 448796 - DNA, 356 bp, Homo Sapiens
ttttccccagacagcgagctgaatgagcccctgcttgcgcctgtggaatcaaatgacagcgaggacactcccagcaagctcttcggggctagaggaaacccagcattatcagacccaggcactcctgtaccaacaccaggccagtcagacccagcccccatgtaccagcgtgggccgagtctttgccactgaccgagactcaggacccaatgtacgtctgaccttcagcctgcaacacctgtctgacgacagtcaaggccttccgcatccatccccctgactggagaagttaccacactccaaaccctggaccgtgagctgcatagcagctatcatctcctggtgcaagttcagga

SEQ ID NO: 448797 - DNA, 1114 bp, Homo Sapiens
gagacgggcccaggcggcaggacgtgacgtgcgacagcgggaggtgggagatgtagagaaaggcatgagtagactttgagttatgtagtacatcacagggggagagaattatgtggagttctcgccgacagtattgatacgggacaggagggggcaccgcaaaggtcaacggaactagtgaaaggccccctttgcggtgcggaacgggtgggaattccctggggcagtgaggggggtcaaaagacaagtgttcaatagaggaagtccccaccggccaagcggatgcggcttcatcacctttactgcccaggaggggtcccaccagagcccgcggaaccaaccctcaatacccggcccaaaaggaagtggcgggaaacctccaattgggccttccccaacccgcaaggcacatgggcatgcccagcttgggcattctgccttcggcttcaagggcgccccactgcggtcttggagggcatctccagaatctgaacctcgtcgcttgcccctccctggcccggcaagcgtccagcgtggctggcccccggccaggatgctgctccggcagaagcccacactctccaagcacacggagtccacgacagcgctcctgccctccgcgaggtcccacaggcacagcttcaggtcccggccctgactgaggagctggcgcccctggggcagcgtctgcagccaggtcacacactggccgccgtggccatccagggtggtaaccgctctccgcgtctgcaggctccagatgtgtaccaggccactctgagaccctgagaagaggagcgggtgcccctgagcctgggctccttcgcagaagtgcagcgcatgcaccggtgactgggtgcctcggaggacaaactgggggtctggaggtggcggcgggcagggggccgtcatgctgggcaggatgcagttacctgaggctacgcgaatcgcccgcgaagagggtcctgggatccgtagccacagaccgtgggacgggcctccctctgagggcgagagtccaggcgccaccctcttgccggagtcgggaacgcctgctcctaggagcgccgcgcagcgtccagagaccgataacatcgcgcagccacgcccccag

SEQ ID NO: 448798 - DNA, 447 bp, Homo Sapiens
  misc_feature (434)..(434): n is a, c, g, or t
gaagagatcagcttttattgatggaaattcctttgtacacagcaacacgcactctgagaggccttttcctcctgataatatttacagagcactatgggagtggcagagggcatggggtgaggccttcaagcagtggaggagatggcagcaatggccacagcaagggaacaaacgacagggaactaggcaggctgggtcctgcccccgtctggtcctctgagccctaggcaccctgcatctctgtttgtgctcacagaggacagaggtaggtccttgggatgtcatttggagacctctccagtagtggcaggctccagggtgcctgggaagtgggagtgcgggtacgggaggatccaggttccaagctccaagctccaagctctgcttctcccacattttagtcggacctagggctccagctctctttaattcangggctggagtcca

SEQ ID NO: 448799 - DNA, 1086 bp, Homo Sapiens
  misc_feature (482)..(508): n is a, c, g, or t
cctttaaaaaatgttttattttggcaaaaaatgggctgaaaaattttttcccatgattagggggaaagcttgagtgtggaaaaaatgtgcatttttctatttatggtttaaagaaaatacaaagccagagcattttggcattagcaaaggctgaactaagttctcaggcaataaattttatggggaaacatggcaggctcctcattaaagctatgtgtacgttggctgaattttatacaagattcttgaatcttgtggaaaattgggcatggcttgacatctgaacaatgtccctggtttgtttgatttctaaagcatcggaaaatgttgcactttggaaatcaagtagagaagaataaacacactttaaaacagaactgggctgaatctgaaagttatttttccatatgtctctatgagatatttattacgtttatttctcatacaaacacagcccccatgctagaaatactgtggtgcannnnnnnnnnnnnnnnnnnnnnnnnnnggtggcgagaaaatagtactgttaaggcaaatcttaccccgtagcagttaccagcaggacaggcaattttcagtgggcttttcagaagctggttgccatgacaaagagcacaatttattcctcagtcccttatcacagctacgatcacagaccataaaaattaacaccgctcttttccatctgatttcagagttcctcatccttacctgaggccttttgttcccccaattaaatggaatgaatgtcagtcatttagcaattcaattaatgctgattcaaaattccggccaaaaccagaatctataatcacaacttcctaatcacagttcagtcatgagaatgaaaagtaagcaggaaattgcactaattactcaattagactaatactgtatttctaagcaagggcttacgaggttgtcagccctgacaaaggacttcggagtcctcttcaccttgtgtgtccacagttgtccaaccaaagctggtattttcaactggccataatttctgtccatctaacatggatggactgaagctgggcaatgggcgtcataactgatatactgaccacaagtgag

SEQ ID NO: 448800 - DNA, 985 bp, Homo Sapiens
  misc_feature (51)..(51): n is a, c, g, or t
  misc_feature (158)..(163): n is a, c, g, or t
  misc_feature (165)..(183): n is a, c, g, or t
ggtccccagggggaattcttcccttaagggggaaaaccaggccttattggngccccatgttttccactttaccccttacctgggggccccggcggcgcccaaaaaggaaaatggtctagaaaagcttcttcgaggggccgagggccggccgacatgtnnnnnntnnnnnnnnnnnnnnnnnnntttgctggtgaatcttttatttggacaagacaaaaacatctccacactgttcccttttatacagaaaatggaacatctcaaatatattagtttttctctttttcaacagaattcatttcaatctggtcccaggaactgcttctcattttaggattcacgttttagtaacacatatgcacccattacagccaaaagagcatacttgaattttggatagtcattcattattatggtgaccataccaacatatggtaaaaaccctcttgctcttcccaccacgtccttcttttccagccagttctggccttctttgtacaagcctctatcatcaacttcattattatctcctttagtcagaaatttgatgtctccattatctttttcatgaactttgattactctgtgaactattggaatgtctcgtccttcaactttaaaaacaactatttcaccagctctgattgggtcttcccggaaatttgtgaggaacaggaggtctcctctgtgaaaggccggctccatactgccactcagcaccaccacgatggggctctcactgcctgtgagcacgatcaagcctttccatatcatgagtgcagaagacacgatcatggcgaagtttaaaacctggtaatagagctggcgcttgttcatcttcttcaggtccccgaagatatccaagccggacgcggggagatgagcccccacggcgcccgcacgcaccatagcagggtctccggggacctagcggcccgccggctctgggtggcacagacggctgcggagcacctgccggcccgct

SEQ ID NO: 448801 - DNA, 457 bp, Homo Sapiens
gctttcttatttatttgttgatgttgttaagggtttaacaaagccttcttcataaactttcaaaatagcttcacatacaaatctgtattgactaggtgtttggatcatcatggctcgctgatctctcattgttcttacaatatctagtggataaactggctgattgcattcaatgagacacatggctgtttccatagtaataagaaccccagttcttccgattccagcactgcaatggacaacaacgggttcttccttgccagccctcttgtttcgtacatgacaaacaaaatctagaaagtcactcgaatcatcagggactccatggtcaggccaggctatgtactggatctgagtgagtggacgactttcatttttctcttggttaaatagggtcatcttcctgaagatataggcagtgtttccttcttcagagtggcaggtaacttggtagcat

SEQ ID NO: 448802 - DNA, 558 bp, Homo Sapiens
cacagggataaaccttccatttttacttccaaccttaccatgtgctcacaaaaaaaggtgttaaatacatgtaagttttgacgaggttatttaaaagtgtaggatataaaccaagaatttttcacaccccaaaaccccgcacaaattaagggattacatatctgagtgacaagtacatacaaacgcattacttctagagatacttagatgtagataaatgaccacatttcaatagagggatcacacagaccagtgggatgtttcttctgagataacccactttatgcaggaaacagtgtggactctggggacggcctctgctctggctgaggatttctgtcccagagcggtacaggaatctgcgtagtgttttagtttggagaaaacaggaagttacactcatcacatcttttgcccagatgatagaattcgaaatccccccggggttgttcatggaatgagccgctctgttatgttgtgagccgtggtattaatcagccacccctcactaggtgttggggttccaccacgcttcctccaccccccgtcaccacagca

SEQ ID NO: 448803 - DNA, 1138 bp, Homo Sapiens
  misc_feature (224)..(241): n is a, c, g, or t
ttctcattagtttatatttattgagcactcataatgttccagcccccgactccaatgaccgcattacccctcctacccactcccattcccatccctggatctttggaaaaagcttcataatcatatctggccctcagacacaatgatataaggacaaatttcttggggaccctgcagtgtttggtctttggccagtctgtccctggcacaactacagaaataannnnnnnnnnnnnnnnnnttattaaacctttgcttgtatctgtacaatattgatctctgctgattgcttaaaatagaacctgattatctctactactacagcatctcctaagccaaacagccccaccacagaggaggcccactttcacagactggctaagaatcctctagagcattttaagtagttgctctgaattttgcacagcagtctaatacctacttttccctagagctattgcccagaggaacaggactgaggcagaaggggcacttggggatgatatggaaggatctataaggcaagtctaaagatttagtggccatgtcagatgtttggggaagggactctattttccagacatttcagatagccatcccgggctcacctgaggagtgctggcaaagacaagagtcccctgaatgcacatatggtctaagcgtaccttgagaagtcgtgaacatttccccagaaaagtgaagaccctagagtcccctcttttgcatttgctgtcgccagatggtgtcttcagcagtgaagcggcatttcctttaacaatctgtgatttcctaggatgctcagagaaggctgggtaatgacagaccaacccaccccaaggaaatcctattcaagtctaatggctaagtgaggagccaatggcttcttcgaacctaaaactggctcctcctcaaccacagctctggcacaggtatgcttcatacaaagagaactacttccccagacaccgctggtgagagctggccagtgagttagccaacagaaaaggttgctggctcaaatggctggtatagtgtgataccactaatgagaaaattaatcacatgttgctggtggaaggggtgagtgctggtcatgggctagagactggctctgagggtttggatcaccagatggacc

SEQ ID NO: 448804 - DNA, 473 bp, Homo Sapiens
  misc_feature (232)..(247): n is a, c, g, or t
  misc_feature (436)..(436): n is a, c, g, or t
  misc_feature (455)..(455): n is a, c, g, or t
ttttttttctcattagtttatatttattgagcactcataatgttccagcccccgactccaatgaccgcattacccctcctacccactcccattcccatccctggatctttggaaaaagcttcataatcatatctggccctcagacacaatgatataaggacaaatttcttggggaccctggcagtgtttggtctttggccagtctgtccctgggcacaactacagaaataannnnnnnnnnnnnnnnttattaaacctttgcttgtatctgtacaatattgatctctggctgattgcttaaaataggaacctgattatctctactactacaggcatctcctaaggccaaacaggccccaccacagagggagggcccacttttcacaggactgggctaagggaatcctctaggaggcattttaagtagttggctctngaattttggcacagcagtnttaatacccactttttcc

SEQ ID NO: 448805 - DNA, 635 bp, Homo Sapiens
tcttcttgggacccatccagtgagttcctatttagttcttggttatctaccccaccagggaagtcatctttaccaaaacctttactgggatcctctgctacaatgtggttgtttttctttttcttcttcttttgttgtggctgctgttctattgatggcaggtaatcatcactcttcactagctgagcattcggtccactaacctgagtcatatccggcactggtttctctagaaagggctccgacggggaatgctgatgcacaggcactttctgcggggtgttctggggtgatgggtggagctgtgcccaaggctggtgatgagggtgtggaggtgaagactggtggtgcaagcccgggtgaggctgcagtggaggacaggttggcaactgctgaaaagatggctgttgaccaggatgttgttggccaggtatcagtcgttcctggattgcttgtgggtctccaaggccaacaccaggacaaccatttggcctcatgtgcccagtcaattccctttggtgccgaggacatgcctataaatggacgagactgctgcatgtttctggggcccatattcctctgtccgattcccatggcaccagggggctggtgagatggctgaggatggggcatat

SEQ ID NO: 448806 - DNA, 435 bp, Homo Sapiens
ttttaaaacaaacaaaacttttatggtccaaaacagtttttctcaagaatctgctctatgcaaacaataacaactttttacaaagcattttcacagaaaaggagacaagtccttccccagcgtgggaattgttcctctcgcacctcgttttcgggggaagagggggcgctattcactagtgcgggatggaaggcgcactgggtccctcagttgttcggcagctccaaaagccccagcttcccttcatacctcaacttgccatcttccctaagacctaagctcccctggacctcacctgggtggaggagaaagcacttccaatcctctctgactcaagatcctcctagctggagggcatggcagagggcatgatccaggcctatctcacccctcccctggaaaacagaacctctgaccccaaacctaatcccctcg

SEQ ID NO: 448807 - DNA, 857 bp, Homo Sapiens
  misc_feature (128)..(180): n is a, c, g, or t
ttcagaagagaaccatccagtatagccattgttcatttcagtttttccatttacaaaatccaatggtgaatccaggcagttagaaaaaagaaatggaggaaaaccctcctaaaatgtaccctatctannnnnnnnnnnnnnnnnnnnnnnnnnnnnnnnnnnnnnnnnnnnnnnnnnnnncactatcgctgagagaacaggctcccctactcccagcctctcagccactctggcctgcctttccagggccactctgcagccaggctcattaatgtctctcctgcctagagtgccctccccattctgtatgggtcaggcttccccagttctggggctctcttgggctagggagggagtttaggacagggacttctataaagaagggaaagggggatggataaatacagattccggccccacaggaagtgagagggggacagagagcctgggtaagaccagggcaaggagtgccagcttggctcaccaatccacagaacaggcctcaaagtaagcccagagtggactccacccctgggaggaggcttggatctccctcctggagaatctgactgcagtgtgctccactttgggtgtaggtaagggtgggggaaggatggggaaggagggttgttgggaaagaaggatgcattggggctcagggcccagtcagccaagggctactaaggaggggcttgaggcccctgaggcttgagggggacaaaaagaggtcagataggaatggactcaagtccacagtgccttggagtttgtaccgctatcggttaccaaggccccaaacaaattttcatcttcagaagagtaggggaaccctcgtccgaattcgccacccaggcctg

SEQ ID NO: 448808 - DNA, 394 bp, Homo Sapiens
  misc_feature (13)..(13): n is a, c, g, or t
  misc_feature (26)..(26): n is a, c, g, or t
cccccgggcggcnccttttctttccntcaaaatgtcctcggcttctaataaccgtgccctgggtctttttctctttctctctgcctggaagattccttctttccccttttgtcttgcccactcctgtttacccttcaagtttcaagttcatgtcactgtctcagagaggttttcctgtgctcgccctgtttctctcaggaagccttgctcttttccatcatgcctctaatcacagcttataatcggatatttatttctgtgtctacagtcttgccctgccagactgtatgccccatgtgggcaggcgctcatgattgtttctgattgtttcacgcatgctgctaacccagagcctgggcccaaagctagttagtactcaataaacaatgcattg

SEQ ID NO: 448809 - DNA, 954 bp, Homo Sapiens
ctctaaaaaagatttattatcaaaaagtttgctccctttaaatactgagccaattcatcaatgcagctccattctttttaggattattagggcccaaataatttcagactaaaacaagaaataaaaaaactggactataggttcagtaacatattcacagacatgtcagtgtgcactcaggaacactggtttcatttcttgattggaatgcttatcaccataaaatcttctgctagagtcacttcttggagatctaacactgattcagcttgcttttttagttctgcaatgccatctgtttctccttctctggccaaggcaactggtttgtacctctgactgaagtgagtcagaaccagcctctttgcacggcacaactttgcaaatgttgctgccatctgtggtgtgctgtggccatgctcctttgctttgtccatctgggcatcatccagggttgcttcgtggatcaacaggtctgcttcaaagcacagttttactcctccatcacccacaaccccagagcagtcacccaatatgcagatttttcttccaacaataggcttttttaagacatcttggggagaaattgtaaccccattttccagaacaacagaaattccatttttcagcttcccataggcaggacctggtggaacaccaaggtctttaagtttctgtgcattgagtttacctgggcgtttcttttccacgactgaaaacccaaatgagggaattctgctttaagttggcttttcataagctgtgtctgtgttccctccccacagtcaaagagccagcactcgccttcacaccgaaggaccacagcagaggcaccccgggttggagatgggtatgctgcacccgtccccaggaatgtcacatccatagacatcttccacccctctccccgaggcccgcgccaggagccgagggaggcgcaggcccgcacctggc

SEQ ID NO: 448810 - DNA, 899 bp, Homo Sapiens
  misc_feature (561)..(561): n is a, c, g, or t
ggggcccttcagcccatggccaggcccaggcccaccagcaaccaggtcaggcctggaagccataggcccagggccagcaccaagcccaagatgcagctcagggaacccccgtcatcacctggcagtggccttggagacatggaacatggatagggcagccgcctcccttgcccctgatgttcaggcccacagactccctcccgtcatgggcgaggtctggagcccggtccagctgtcaccagggccacgcacagcagcctggaagaagagctggcctcaggacaggtgttcatgttgtccagagtccattcccagaactctctgtgcttggccagccaggataggggtgcccacaggtcctgccgtcagaggctcaggatggccaagtgaggcttacctctgggctccgtgggacaggcctctccgaacagccacatccagggtggctgctgcagcagaggctggagtggctgctataccactgttcacctggccaggcttctgtctcctcccttcagggctgacgctttcctgttggatgacgttcagggggcagaaccnaatgtgataatccggcgttggtcaggggcaacagcggtgcggacagagggtgcggggcagaggcacggctggtccaggagggagctcggtgcagatgcagctgccttacacactggacccccaggcagcagaggtggaggcctcccctctggggagtggctgctggggctcatcggcacagcggtcacatcttgctgctggaggctcttccagtgcggggcctgggcagcacgggcactctggatggactctagggcactgtgagggagacacaacagtcgtgacacctggtctcacaccccggccctgcccgccctacctcccctcgcacctctgac

SEQ ID NO: 448811 - DNA, 1061 bp, Homo Sapiens
ggggttccgtgccccagagtcgagggagccgtgggcttggggtccggatcgcggccgcggggcgctggcgtgcggtgtcatttctgcggtgtaaatgctcccaccttggccgatttcaagccaccaggtgaggatggcactgcaacatcttccactgaggctccagctgccctctcaggtacatcagggcctggacgtcctctggggaggccacagaggaagggcctaggctaggaggtgcctctccattcagcacccgggccaggatccctgctagctggggtgtggagttctcctccaggagggccaggactcggccccctgccagcccccgaagcattgcagccaggagtgcagcgtgggggccctgcaggccatggccaaggccccagcgccaccagcaccaggtcaggctggaagccataggccaggggcagcaccaagcccaagatgcagctcaggaaaccaccggtcatcactggcagtggcgtggagacatggaacatggatagggcagccgcctccttgcccctgatgttcagccacagactcctcccgtcatgggcgaggtctggaggccggtccagctgtcccagggccacgcacagcagcctctgggctccgtgggacaggcctctccgaacagccacatccagggtggctgctgcagcagaggctggagtggcttgctataccactgttcacctgcccatccagcatcccatctaagaggtacaggagcttcccaagtgcagtgaggggctgccgtcccgggccagggactcgtgtgggcctggccccaggtttctgtctacctaccctcagggttgacgcttcctgttggatgacgtcagggggcagaaccaatgtgatatccggcgttgtcagggcaacagcggtgcggacagagggtgacggggcagaggcatcggctggtgccaggagggagctcggtgcagatgcagctgccgttacacactggacccccaggcagcagaggtggaggcctcccctctggggagtggctgctggggctcatcggcacagcggtcccatccgct

SEQ ID NO: 448812 - DNA, 1245 bp, Homo Sapiens
  misc_feature (51)..(51): n is a, c, g, or t
tcttcatttccccaaccggggaggggttttcccacttgaaaaaacctgcanccgggtttaaaaatggcacggctgagtgaagagaagtctgggtagaggcctgacatagaagggaatctttgtggtctgaaacctgggtgcttccagcggggtctgtatgtggggaattcccagagcaattgcagatggactgcactgcgtttgctgatgagctgtgtgaaggcccgaagatggcagccaccccaagagacagctgatcacaggctttcttggatgcttcaaaactatcataaaggtttatcttctgggtatcataggtaagggtagtattgggtagcaatgttctgtttctgttaattgtgttcacagcaaatctgaatgcaagttcctcagctcccattgggccagattccacatattcaaaaataccaccaaatcttaatacatgtgtggttccttgagaatatccaatccacagtaaacagagcaggagtttaacggtgcgcctgaagactggattacttagaatcgggaaaataatcttcatggtgtttctgtgcccacacgcacggcacccacttccccgatctagcgttcggctcctgggttcgggtagaaatgaggatgcgtcgagtggtgaccgcagacacgatcacggcatggtcatagagagaggaaggagtctccgcttcccaaacccattagcaatcgctgcatgttcttcactcactgcgccaaggaacaaccttccactgcaaggaatggtgggacatccatgttagtcggagagcatccgggagaaatccagcacgcacacccacaatgtccggccgcgcgagcctgtgaaagcagaggaggagggaaatcagtaggaaacccagccttggtaacggacgagatgtcgatagcgagccacagcccggcacaaaaggcgctttgctagcaaaggttttgccaggccctattctactgcactgctgcacagcttctgacgtgaagccaagattaagtgagaaagactgagatagctgctctcctcttaaggctcccggccagtgagctccccaatatctattatgcaaccgatctgacagcccgccttgagttgcaagaaagaagtaggatttatttatggggagaacattgtttttattttccatgagtatttgctgagagaatgactggtgtatgtaagcggacttcttacaatcaactgatgaatttcattaaattactagctaaatc

SEQ ID NO: 448813 - DNA, 427 bp, Homo Sapiens
  misc_feature (23)..(23): n is a, c, g, or t
  misc_feature (37)..(37): n is a, c, g, or t
ccagggaaaatggagggaatggngacactgaaggcanggttgttaagaggactgtgtcatcctcaaccaagctccattaacatctgcccagggcctgcctcaagaagcccagcccagccttttcctgggatgcagtgaaatcccatccatgaactcgatgggcccctcctgtgccggccgagaggcacacactgccttcacgacgtgactgctggacctggccgagcttgaggccacatgtgaagggtcctgctgtggtcatcttggtgactcggtcacagcagctactggccaagatcagacgtcgctgaggggctgttcaccaccatcctcgttctccagggtcaaggaagtgttttaacatgtcgtgttttcgacttgaccttgtggtatttttcttggcctagttgtgtgccatggatattaa

SEQ ID NO: 448814 - DNA, 701 bp, Homo Sapiens
  misc_feature (549)..(653): n is a, c, g, or t
  misc_feature (688)..(688): n is a, c, g, or t
ctggcaacaggcaacacccatctcaaaaaagcccaagcacagggcccacagcctggccgcacactaggaagttataatcacctggggagctttaaaacatgccaccactggggctgactgaactggtccaggtgggacacaagcaatggtactgtttaaacaagccccacgtgaactcctagttggcaggcggggaagacagacagaatgtggaagtgcagaatgacactgctgctacaggaggctcaggatggcatcctagaggaagtgtccttgtgtgggacactgcatccgcaggcatacacagcccaggctgcaaggggtggagggagagaaagccctgttcaatgagaggtcccactgctcagaaaccagacgggaacatctctccagtccgtggaaatgcacaggggtggggcaggggtcactctgggtctctgtcctcagtcaccatgactgctcacagttgccaaagcactttcacagtggctgtgttctgaatgacagcctggcaccaacccttagaggcacgtggccagttcccattannnnnnnnnnnnnnnnnnnnnnnnnnnnnnnnnnnnnnnnnnnnnnnnnnnnnnnnnnnnnnnnnnnnnnnnnnnnnnnnnnnnnnnnnnnnnnnnnnnnnnnnnattagacacagcctcgtgccgattcagccacccancctcgtacctagc

SEQ ID NO: 448815 - DNA, 733 bp, Homo Sapiens
aagcctccaagtgtggattcttggaaattggttaaaggttaagcaaaagtacaggagttccgaaccccaatgggccaagtgcgggtaatcacctgctaccgctggtgcccagcagggaagcccaccagcagtccttggcctgcatcgtcaactaccacatggaccgcttcaaggaaagcctcactctcaacgtgcagtatgagcctgaggtaaccattgaggggtttgatggcaactggtacctgcagcggatggacgtgaagctcacctgcaaagctgatgctaaccccccagccactgagtaccactggaccacgctaaatggctctctccccaagggtgtggaggcccagaacagaaccctcttcttcaagggacccatcaactacagcctggcagggacctacatctgtgaggccaccaaccccatcggtacacgctcaggccaggtggaggtcaatatcacagctttctgtcaacttatctatccgggcaaagggaggacaagagctaggatgttctgaggagagacttcacctgggacgtgaaaggagcatgggcttgatgtcagacagctgtgaccctggacagggccccccccaccatctgtaaaacggggacagtatgatgtaccttgaagggctgttgtcagaattctacgtgatgtaagtcaagcacctagcacagatcagtctgtcaataaatggccaatgttccgtgattattaaaaaaa

SEQ ID NO: 448816 - DNA, 477 bp, Homo Sapiens
tcaaacaatcgcaacaaaaaaattgatacctgcatccttttcacaactacacagaggtagattttaccacagataaacttgatttcccaccctctaaataaaagcaggaatgaagattggattttagttaaaaaacatcaaggtaaaattgctgggttttgtttctccaaaaaatggacccagaatctataaaagtaaagtgcaaatttaattgaatttttttgttaaaaatgttacttttaggtctctggattggctcctttttagactgtcatggtcactctgacttcacaattggagtatagtttgtgtctgtcacatagcttaatgtcaccatgtatatttgaaagccaagtcatttataatcttttagtctaaattatagggaactatgcatttgagatataaattgtggcagaaatctgtgtttctgttcaaagcacagttagcattgtggcccctaacatctaacaatta

SEQ ID NO: 448817 - DNA, 869 bp, Homo Sapiens
  misc_feature (59)..(83): n is a, c, g, or t
aggaggaaatacaccatttatttacaattcttttcactttatccacaatttcccatacnnnnnnnnnnnnnnnnnnnnnnnnnccaccacttgggaacacaagtgtctttctttaattagtccggttgagggagggtctcaagccctctcactctatgaaggagaccactgaggcacaccgaaggggaaaaggaagagggttgggaagaatgcctgagaaacagctccagatgagaaacctaactcacaccgatgtggtggggcctcactggcaaagagacttgagggtgttacccaccagggacactgctcggcttcccaggaggatgacagctgctggcccccatccccccaccctccactaccaaataccaaaactcaaacaggggtcacacatctcatgagctgtgtggggagtgaaggtgacagtaagggatatggagtgctgctctctgagaagagccccaaacccgagggacacacaagaagcccctttccttggcactgagtcttcagtcacagcttctgtccgaatacaatgctgaacttgaaaacgtaaaaacaaaagccctccccagattccggggaaggtggggataaaaacacatagagagggcttgcccgcctctgcagtcccttcctggggaggctgctaggagcaaagggcagatgctccaggaaagtctggggatggctccagctgctcagctactcacttcagcagcctcccgttctacccctcacagcaggacacccagaaccaacctggaggtgctgaagccaccttcctggcaacttcctctgtgctagtgacctagattgctttcacatgttgatgcacattataaatataaaatcatatctgctcc

SEQ ID NO: 448818 - DNA, 464 bp, Homo Sapiens
  misc_feature (84)..(84): n is a, c, g, or t
  misc_feature (132)..(132): n is a, c, g, or t
aggctggcgcattttcaagtgacaatctcgggctctagttgccctttgagatatccactctgctctttctccccaggcctcagncccaagaaaaacatgctctcaagattagcccataggcagttcttgtgnccctggctgaagaaagaaaggagacctgtttgttttaaaagtcgggcgcaaagtgtcaggtggctttgatttatgacagaaagaggaagaagaaagttggagtaatagcactatccaaataaccctgcccaggaaacttgggggtcaagagagcttatcaagagccttttataggtaagctcttccgtgtgaaagagaaaaggccggaaagagggagagagcccagagagcaggctgcgaactcacttccaatgggattggagtctgttgtattcttaagagatagcctgatatgtggtttataggtgaatcaataaacaccaacaacaaca

SEQ ID NO: 448819 - DNA, 1480 bp, Homo Sapiens
  misc_feature (969)..(978): n is a, c, g, or t
aagaagccgtaaatacaaaatgcccctcgcgaggggtaatatgtgttctctcgctaaatggaaggtatggccgcgccccccccgttagggtcacttgtcgggggtcgtcgcccgcgaaaagaaggtcgagtgagggacgtccggtgggcctgtgtcattccgcaggagcgaccgggtctactcccgattagcgcccgggacacccccgggggggcaaagagctataaaccgagacgcccggcgacccaagagaggggaacaccgcacaccgggaccgcacggagattactacggggtaacgaaggagggtggaccccaagccggggcctatatgagatgtttgttagaacagctgagaggcgaaatacataagggagcggggtggcgaaatataggggtggcggctcggcttgggggggtgggtatgtaggatgtgtttccacctcattataaaatattttatttgaagccgcctatttagccaagggcacctgggtggagaattacaaaaggaccctgtaaagtcacaaccctcccaaggtgctttccaattctagttgggagggataatacatatacataaaattataaaacaaaccaaaccatcgagccataatggtaaaggagaatagatttttgaaggtgggacctgtcttcaagacctggcaatcaccttttaccagctggttcaccttgggcaagtgatttaatctctttaaacctccagggtgctcatctggagatgcagatggtaacagtgcctacttcatatggttggtgacaggatcaattaatctacttcctgtaaaacccttagctgagtctttacctcattgcaggtgctcagtaagtgctagctactagcagtggaagtaagaggtctaaaagctgggacacaagagaacaagattagtgccccaaaatgctccaagagagggggactaacagccatcaaaacaaatgttctgnnnnnnnnnntagtactgctgtgatatcattctgcctttccctcctgttgcagcctccagtttcttaaagtgcagtgatacctggggcctaggttctcagacaagaggtgtgtctcctcctaacatctatcctattgtctgacaaacctcttcaaaattttgtatctttagagtcatttccatggcctcccctacagttctataacacagcaggaagggagtgcttattaaacactctggcgcagaagcaggacaggacaacggcagccagagtgggtagaatgagcaaatggcagctttaagacaggcgagatctatctcaaatttgtatggaagttcttgtcctacccaagcttttgcccaactcagtctattccctgtttggcgtaacgccgttgatgttgaataacagaagattttgaactgaaaactttcccacacacagtgcattcaaagggcttctctcccgtgtggaacgctgatccgcgtgagccggcccactgggaagcttg

SEQ ID NO: 448820 - DNA, 505 bp, Homo Sapiens
agttatcatacatttatttttaacatagcaccccagtttcacatcatgtatattttccaaagttggagatctttaactatgttcttcacagacctttcaacaagtgtgaaaaagaggcagtaaggttagcttgagtctacaagtcacaatccaaatataggacacctatgtttaaggtcaatatacataatgttcccaatgcttagcaaatgaatgagactctggctgagtaaaatattaacacaacttgttaagcacattatcatgaaaagacagaaggcatcaaatatatactttgctgttacactttttactgttcaatgtacttgtagtgaaaaaatatacatttttactttcaagggttaaaatagaccatcagctcattatctctcttagccaatagctatgaagactaaaatggctcttcttgcttctggctcacttgaacatcttatttgtgctgaagacaaaaaggatagcagtgctaaagaaaagggtatacccg

SEQ ID NO: 448821 - DNA, 842 bp, Homo Sapiens
ggcttaccacttactggccacactgccgtcctggccacaccaccgtcctggcttctctagcatgctaagctcacgctctcctcagcctggcaggcactgttccctgtgcctgatgttcttccccggctcttccctccacactaagcctctgcgcaaatgtcagctccggccagagactcccacatgtaaaggcatttatcatgattactgttccaaggtgtctgactcatactgctatatcctcttgtttcttaccttttaatgtcacattatgtcatgagcatttttcccatctgacaagagtttttcctctgctccctcagacacaaagatttttcacagggcacagggtaaaatcgcccggccttctgctgctggaacagggctgaagggagccccgtgactcagcgactcccaggggacctgtttctatttgtcctcagtgggtggagcagcttgcagatcttgtaaaacttctgcagtttagacgtagattctgggacaaacatggggatggtccttttgtgccggccaggtgagaagggcacgtgcacggccccatagcctcgaaccacatcgttcccgaacacatctggtccatacacgctgagcacgatctgtggccagccgtaggggttggtgcttttaaaggtgacatcaatggggaagttccacaccagtgcttgccgcacatcttggctcttggatgtgatctgtgagatcccctcctccagacccgctgtgggggcccagtcctggccgtacacaaagcagtacttgcagtagaggtcatcatactctggaaactgggcgctctccacctgcccgttgaccatgagtag

SEQ ID NO: 448822 - DNA, 1169 bp, Homo Sapiens
gcgagctgaggcccattctttttgcgcgggcatatatgaccctcgcctctttcgtggctacccgatgtagggggcacaccttattctcccagcaaagggtgtttccgacacgccagttagtggcggaagggccaattttcttgcccgttgttttggcgggcaacaatgaggggagggccccagaaataggaagaggaggctcctaatgcggggggcgggggatccgcgcttcaaaaaaaagggagggctgttattcgtgaccaaacttgttttttggggtccccccagtttgtggcccccccgggcttcccctccagggcccgatgggcagccggcgggcttttaggaaaagggagccccttcatttatcaaagactgtgcagcccggggaacccttcaatggggggaagctctgggggtggggtgggcccccaaaccacccccccctggttagaaggcccagtgtcatagcccagtttcctcatgtccttggtcaccacgttgaagaggagggtgacaaagccctgagaacggacacgggtcacttcccggccttcaccctgagccaccaccttggggtctgtgtactcgggccgccgccccatgaaccagcttgtaaacttctgcagtttagacgtagattctgggacaaacatggggatggtccttttgtgccggccaggtgagaagggcacgtgcacggccccatagcctcgaaccacatcgttcccgaacacatctggtccatacacgctgagcacgatctgtggccagccgtaggggttggtgcttttaaaggtgacatcaatggggaagttccacaccagtgcttgccgcacatcttggctcttggatgtgatctgtgagatcccctcctccagacccgctgtgggggcccagtcctggccgtacacaaagcagtacttgcagtagaggtcatcatactctggaaactgggcgctctccacctgcccgttgaccatgagtagaaagacgctaggactcgcggtcgccatggcaggtctgggggtgccggggggacccacctaggccgcgcgcggttgctaagagacgccggcgttgccctagaaacagacggcgtagcgcgcaggacacgtttcttggcagcgacaccttcgcgaagcctcgtgccgaattcgccacccagc

SEQ ID NO: 448823 - DNA, 415 bp, Homo Sapiens
agttcagtggctagtggctattcacaagaacgatcatcgcacactacctcaaactcctgggatcaagcaatccccccgcctcagctctccaagtcgctgggactataagtgtgtaccacagcatgtcagctctctctctccttcttgacctaaagcctagcataaaattagctaagtagaatgtttccaaagatggctgcatcagtatctcccatcccacataatttctgtttgattttgccattcacccataaaatggtgggatctacctcccctccttgcaaatttgagctggccctctgatcctgtctaagatctgaagccagatattaaggtacttcattaatttccatgtttgtcctctatgcaacctagcaatcaagcaagaagtcaaaacatactgacataggtttgg

SEQ ID NO: 448824 - DNA, 1242 bp, Homo Sapiens
cgcctccgctcgcctgtggctgcgtcgcgcgctcttcctcggagctacccaggcggctggtgtgcagcaagctccgcgccgaccccggacgcctgacgcctgacgcctgacgcctgtccccggccccgcatgagccgctacctgctgccgctgtcggcgctgggcacggtagcaggcgccgccgtgctgctcaaggactatgtcaccggtggggcttgccccagcaaggccaccatccctgggaagacggtcatcgtgacgggcgccaacacaggcatcgggaagcagaccgccttggaactggccaggagaggaggcaacatcatcctggcctgccgagacatggagaagtgtgaggcggcagcaaaggacatccgcggggagaccctcaatcaccatgtcaacgcccggcacctggacttggcttccctcaagtctatccgagagtttgcagcaaagatcattgaagaggaggagcgagtggacattctaatcaacaacgcgggtgtgatgcggtgcccccactggaccaccgaggacggcttcgagatgcagtttggcgtttaaccacttgggtcactttctcttgacaaacttgctgctggacaagctgaaagcctcagccctttcgcggatcatcaacctctcgtccctggcccatgttgctgggcacatagacttttgacgacttgaactggcagacgaggaagtataacaccaaagccgcctactgccagagcaagctcgccatcgtcctcttcaccaaggagctgagccggcggctgcaaggctctggtgtgactgtcaacgccctgcaccccggcgtggccaggacatagctgggcagacacacgggcatccatggctccaccttctccagcaccacactcgggcccatcttctggctgctggtcaagagccccgagctggccgcccagcccagcacatacctggccgtggcggaggaactggcggatgtttccggaaagtacttcgatggactcaaacagaaggccccggcccccgaggctgaggatgaggaggtggcccggaggctttgggctgaaagtgcccgcctggtgggcttagaggctccctctgtgagggagcagcccctccccagataacctctggagcagatttgaaagccaggatggcgcctccagaccgaggacagctgtccgccatgcccgcagcttccatggcactacctgagccgggagacccaggactggcggccgc

SEQ ID NO: 448825 - DNA, 1100 bp, Homo Sapiens
  misc_feature (56)..(56): n is a, c, g, or t
ttcaaattacgagctacgtggggcaagtagagagatggaataagacttagaataanaacactagaacatgcagatgctccactcacacatattttttatcctagccagtttttgtcccccgcctgtcttatttatcagatctaccaggtggtgtgctcacttagggagggaatttctcattttggtgagcgcgaaagggttgtgcgactctgtaaaaataaatctcaggatgtaatagcgataggtggtcctatcgacgtatacgaacacgcgagaacgggctatttttctttaacgagggaaatccttcttcgctgtgttatatctttattacatacgcagcgcatggggaaccttcccttgataaaatatccgcttaactctttttctttcgggagggtcagtcgccacatttattatatactccgaaagggtgtagattgtttcttatcatttcccggttccataccctatcgtggggaagaaaagttcccctcgggccgcgggggattcggctccattttccttttttgggttctcaaccattttttccatttctttttgacaaccattggtctttataaattaaaaggctgtttcaggagaggtcttttcaagctttcttcagaacaggctttttttgatgttttcgcgggtccaagtaatggaatgggaaaataatcctgctgttgcttgaaatcaggtctttttttgataagattataaacagtcacgtatttcatatatagtacataggccctttcctcatcacgatgtaatctgcattcttctgctgtcttaaagatcttcagggcactgtgcacataactcttagtgcttattttctctggtttaacttctgtcttcttattaaggtcttttagtgaagaactgaggtagagttctttaggaactgaagccacagcaggcatgatgaattatctttacttttccactttcacaatggatgctatatttccttacaagtgcttctttccgtgacgccgggcgcgcttcactaacgccagccttctcgccaaatgcccatctcccaagaactcgagggagaattagccttggctaccaggacggaagccccc

SEQ ID NO: 448826 - DNA, 587 bp, Homo Sapiens
gccttatgaagttttatttcccattttaatacaatgaagatgtctacacattacaatattgtggatttttatgctttacaattgagcttcttccttcgagtttctttgatctaatcaagagatagaaggcctccagcttcacattcctcacgattatttacaaaaagaaggatggctcagccaaggctaaatttaggttacagtccctaatcttaacacagtttttaagtttaggtttcagcttttgggatattattgttaccttgaaaaatgtcacgtttaaaaacacctcacaccctctactatagattggatcttgggaaatagggttgaggaccggatcaatacaagaatcctcataacctccgccccggcgcgaacctgggagggctgcagacagtctaaaggctgtggtgacctcagcgctgcgtccctccagcaaccggcgagtgctggggcacaggccatacccccctaagctcggcatcgcctgcacctctcacaggtgctctgtccgccacagtaacgcactatggaaaggaaagttgtacggcgaacgactgaaggagccaaacgaggtggatctg

SEQ ID NO: 448827 - DNA, 531 bp, Homo Sapiens
atgtgtatatgcagaaagagatttattttaaggaattggctcacattattctgggagctggcaagtctgaaatctgcagggcagacaaacagcctggagacccagggagatttgacgctgcagtctggaggctgaattgcttcttcttaagggtctcgttttaatttgaactgaccggatgcggcccaccctcattatagagggtaatgtactttaatcaaagtctgctgatttaaatgttaatcacatctaacaaatacaattcatagcaacaactagactagtgtttgaccaaaaactgagtaacatgggtagcatcgcctagccaagttgatagataaaattaaccattaaagtcactaagttccattgacaatgacctttaaatatttctcaagttggtttcttcttctccattgccattggccttaatttaggcttgtgttctcgtttaattaattcataaaatacttacgtattaggcattatgcccaaatgttggagatacaattgtgagtaagattgtgtcct

SEQ ID NO: 448828 - DNA, 826 bp, Homo Sapiens
tttttttggtaaattttcttcatgtgttttttagacaaaagaaaaatcaccagtttataaaaaaaggagcctgaagagtttgctcctgaaatacagacatgaatttttataaaaaggatattgatttcttgctataaaaagagactgaaaggtgtcagacctgaaaacaaattctcacagtgttttcagtgttggctgttaacaaggcattcaatagaacagagatagatggataccatacagttcatgtaatcatgtggtatgttagacagccttctagaggaatcaggtatatgaagtcccttactccaaactattatcaattgcttattgattccaaattgcctcagtggagagattgaccaggaattcactgtgctttataaactcttcggaaatgtctgcagtattttccaagttctgtctattactcttcagctaacccagacagcaggatcctgaagcatctggtgtcacaattataagttcgttggtttatttctaccccattgacagccagaacttggtgctggacaactagacccgggcctcagatcaggagtgacgagtgagagctggagagagctagccttgctgtccttcacaagggtccttccaccattcttgagatcccaaagaaggaatggggggcacattaattgtttagtccatttctctggcatcttgcccgattgagattcaaggtaatttaccagtaacaagagcatttaaatcgtgcgtagtatattgttaaagagccccatataacatgatgggaacactatagtgggcaaaatgtaaacagggtcagtataaagaagggcct

SEQ ID NO: 448829 - DNA, 391 bp, Homo Sapiens
  misc_feature (369)..(369): n is a, c, g, or t
  misc_feature (374)..(374): n is a, c, g, or t
ttttttacccggaggaaagtggatttattgctttataaaaaagaagtctaataaaactgaagagaaaataactaaaaatccaaacacaactcacccctctaagcacgcccaggaggtctcaagacacacttctgggggcagtcaaggtgggcgggttggtgggccaggcggacgggcctcccccgtcatcagctccagggccccacggagcccgccggcagggggtgctgtgggcctgtggttttggacaagctcctggccccacgccaggatggctcctgggcactggccaacttgcaggcctggcggctcccctcgggtcagttgggataagggctaactcctagagcccaccccgaccccacacanccctnggacccacccacgttcc

SEQ ID NO: 448830 - DNA, 474 bp, Homo Sapiens
gtcgatattaaccatctttattatgactgtcatcaaggctcgctcacttttcacatctccatttcacagatgagaaaactgaggcccagaggttaattcccggttgggaaggctggggacagcttcctggaagaactggtgcttttagaatggcctggcaggcagctgaccttggggactggttggcctctggctcacagggtgcttgtctctgaccttgacaaaggccccctccaccacttgcgttcttaacaggaagaactgtccccacccagcgcacctcccagggtggctgcttgaatgaacacaggtcaggaagtggaatgcccttgccaaggctgcagggcacctaaagccagagagatgacgattaaccctcttcaaccactccttcctttgagccttccttcaccaaacaggtattgagctcgcctgtgttcccagggacccaacagtgaacagcacagaggtggt

SEQ ID NO: 448831 - DNA, 414 bp, Homo Sapiens
  misc_feature (372)..(372): n is a, c, g, or t
  misc_feature (386)..(386): n is a, c, g, or t
  misc_feature (399)..(399): n is a, c, g, or t
tttttatttcaaacagaggggatataagttagggactgattgtgcaggttttgcaaggctcagagacaaaagtggatgttgcagaatctcagagttggatacttgcaggaagctgctaccacccttagggctggagaacccagggaagctaagaggagggtgcaacgaggctggtgttgggactgccaaaggaaacacagaatgacagctccatctctgcagacctcagatttgaccagggcctctggctgcctggggcctacaattgccaatgggctgaaaggttctgtcactgttcagtggttctgacttctgagttctgtgcacaccctgagctctgctcctctgggcctgggccaccagtccttgttnttagtgccccaggngttggttatggantttcagggcttagca

SEQ ID NO: 448832 - DNA, 821 bp, Homo Sapiens
cgggccccgggttattccttgaggaaaacaggtttgggcccatgttccgcttggcctatggggggcccgcgcgcccaaaagaaatggttttagaaagcttttttaaggggcggaggcgggcggacagggtattatggtagaaggggggggtgaggggatttcacacacttagcatatgcaattttaatcaaccaaaagaaaatcccaaatgtacaagtgaaaaaaatccaaactgttgacacaggcctaactaatatcagctacttttatgtacagctgtatagttcaaaaaagctatcctatatgtatatacaaaagttgtttatacacaggtctgtacataagggtctatacatttatttcctcagaacccttaggtgccacctcttggtgaggacaccaacacttcattcacatatcttacaaaaaagaaagaccatttccaggattgacaacattgtgcatcctgtattcagacaatgtacactccactcgactggttaagatccttccatcataatgcggaccacaccagatgcatgggttccaccaaacagcttcacacagagtgctccaaagtaaaagcccataaaccaacccgagatgaagcagggtcctgcccagtgtgccaccacaggtccgggcttagttgagtctgcctgccctgctcactgtcggtattccaattcatctacactgataactttgggcgggcatggagggcaggggttgctgtagcacatctgagccaaaccatttggcaaggcccacaggggagtttgttcctttggttggggggatgttccgttgggggttgcttt

SEQ ID NO: 448833 - DNA, 468 bp, Homo Sapiens
  misc_feature (318)..(400): n is a, c, g, or t
ctcaaaatgcacatcattcctggtgtggtgttgtggaggattttctgagcgctcgtcatagacaggaattggtgtgtatctgaatagacatgggtgtgcttgcctgtgtctgtgtggacctgtgtgaggggttatgagtatgacctccaaccttatcaggttagttcattggtagaatctgtgtggtcatttctgcatccggggcattctggacctggattacttgggttcaaatttcagctccactagctatgccatctcggacaggacgcttaaacactccatactgtttgcttttctgtgaattggagataatgnnnnnnnnnnnnnnnnnnnnnnnnnnnnnnnnnnnnnnnnnnnnnnnnnnnnnnnnnnnnnnnnnnnnnnnnnnnnnnnnnnntgtctctcactgcccccgtgactgccccgtgataggatattactttgttattctattacagtacttac

SEQ ID NO: 448834 - DNA, 1305 bp, Homo Sapiens
tcatcccaaaagatacctggggaaataatcctacctcatttctcgaatcccattttcagcacagcagctgttttcccacactgaaaacacagctggcgaagcagtatctcttctgggaactgaagatgcccatttcaggaagaatttcactttctttagtttgcatgtaacttacgagagtgtctctcaggctccactgagggcggaagcgctcctcggtttgggtttgggggttctttagtttcaagattatcatttcgtgcagctctagcaggaaggcgtctaggccagtctgatttaggaatgtgctgaggagcttagcattttccgggctcagatccgctttgtaccttgaactgatttccccaaatggctctttgtgcagccgcagcagctgttcagacttatgagcagacaggaactgccagagggcaatggtgtgttttaactggcatctgtttaaggcctttaacacgtgaatcgtctgatcacccatttgcaggatgtcttgagtatacacattcagctgcatgttttggatccccaccagctgtgctcagaaaccccagagtgacttctacgacagacagcacttcacaggcatcgctgtaggactgcagctgtccactgatggcactaatgaccgagctggggagggagtcctgggaaatgaaaagcaggagagggatgtctgtgggctgggtttctggcatctcaccacctggtaagagagccgagccccttcactgcccaagccacatgcggggggccaactctctaacagctgacacttgggcgcacggtgtgcaggcagttcctggaggccatggagacacacaggtctacctatcagtacccgcatgcggagagcaggaacaaatcggttccatggacttcccgcttcagcaggcatggccatgcatcaacatcattcctaagaatcaaacccacaagatgtcaatctgcttttactctacaagaaaacttgctgatttgctgtcttgcttgctctctgtaagggaggccgcagaaactgtgggctcacagcaaacacccggggcaaggctggagtaggcctaacacggagggaaacacactgagaaggcagaaagccccgtgcacaggatcaggtttatcgggatcacctgtgccattttgttcttgatgtccataaagagatgttcatagttccagtcgtgtctgtacaccagagtgggtattccctaaattgggaaagaaaaaagttttttaaaattaaatccatcgtggacatttccagcagatgacaaacagaatctgcagccg

SEQ ID NO: 448835 - DNA, 454 bp, Homo Sapiens
  misc_feature (62)..(62): n is a, c, g, or t
ttctatgagcatcccagaacccccaacatctgtgaatgggtaacagtatcaatttcacttcnccaaatggctctctgtgcagccgcagcagctgttcagacttatgagcagacaggaactgccagagggcaatggtgtgttttaactggcatctgtttaaggcctttaacacgtgaatcgtctgatcacccatttgcaggatgtcttgagtatacacattcagctgcatgtttggatccccaccagctgtgctcagaaaccccagagtgacttctacgacagacagcacttcacaggcatcgctgtaggactgcagctgtccactgatggcactaatgaccgagctggggagggagtcctgtgccattttgttcttgatgtccataaagagatgttcatagttccagtcgtgtctgtacaccagagtgggtattcccttgaggctcagcgggct

SEQ ID NO: 448836 - DNA, 736 bp, Homo Sapiens
  misc_feature (662)..(662): n is a, c, g, or t
  misc_feature (684)..(684): n is a, c, g, or t
  misc_feature (725)..(725): n is a, c, g, or t
caaaagcaacaatttttattatcttgctttatatttaatggattagaactataaagattcttaactttgaaagcagaaatataagttggatagtagttgcagatctttaataccattttcaatttcatttatgagctgctacattataaatgagatgctctaaaataataatcgcttttgttgttgttgttatagaacaatgaaaattcctgttcggaacacaagttgctgtttatatttgcttgttctcttaaatagtatgagaagaagtaaggtggagctgttgggaaagcccatcgtggacctttggagattatcttcttggttcagtcatctccaccacagatttttaagagtgtgatttcatagtctccagaagtatccgatttaattgctgaatatagggaatagccataatgcttcttgaactctgttcgaatgtccaaaaggtcaatttctgatctggacaccattattcggttcagagtaaactcatcagttccaatacccttcaaggctcgatgcagtctttcggctaaaaaggccggcgtgttcctcacacaattaactatggccaacagtaagtcttcaaaatgcccagataattctccttttatgctgaccacaaggacctttttggctgatatttctgtattcatcanatgctaaaaagaagcaccacanaattatttaaagcaaacgcagtgagcacatttgaatatatnctagtttttta

SEQ ID NO: 448837 - DNA, 720 bp, Homo Sapiens
gaatttccccctctttattcatttacagccctgcatccctacacctctgcttaaaattgtttttagatatacttccatgcagagaagattcttcagacagctgtcaaacgtcctcctctccgaggaagggagtaacaggcaggattatttagttctcttcatataggcgactcacagtatgggtttttggggcttgggattgggggagacagccattgatagtaacaggaggcctgacactgatgaggggctttgacgtggaagggcacccttccagggagggacgccctgtcagtacggaacagagcccgtgtggggaggggcgctcggctcgaatggcgacagcggcggcagagtcaggaggtcagtacggtgggcttcggtttaaatctttaatgcactggctggctgggcagcggcggtggggctgcggcgggggaagccacgacccgagcgctggggagtaggacccaggccgctggacagacagctcatcaggcctcgcagaggctccagcttctgctccccggggtgcgccgagctccgctccctccgccacatgcgaagccaggggaaaaagtagaaacagccccagtagatctcctcctccgcctccagcgccacctcgtatctcctcattcccgacatgtcctgggctccgaacgtctcctggagggggggctgagagggttcagcgcagcctaaactcccgccctcctg

SEQ ID NO: 448838 - DNA, 511 bp, Homo Sapiens
attttttttgatgccagttttttattaggagttaaataggccctttcccatcgtggtctcattggtgcacgctctgctgagcctcgagggcctcagagcagatcccgcctcctcccatccacaagggaggccacaggggtgcggcaggcaggctgggccccagagtggctctacccctcattcgctgggcatcctgaggaaggagccctcacatctctgggcctcctaggtaaaatgggttaactgatcgcagaagacctgggcaagtccagattgaaaggggtacaggagagagggtaggagggggtgtgggagacatgcccagcccccgacagccagcgcaccccctggagcagaggctactgggagcaggggggctctgaggggcagtccttgaagtactcgtggcagtagagacagaggcaggcaagtgagcgcacatactccacaaagtccacctcgcagtccttgttggtgtccagaacactcatgaatttgttgagtcacattc

SEQ ID NO: 448839 - DNA, 443 bp, Homo Sapiens
tttatttccaaccagtagtttattattcacaaactgtgattcaccagtcctattttttaagccagcatcacgctctaatcatattcctaggttacaagcccagttatttgtgcataataaaaactgaatccattaagatgatacattaggcttttcttccctatgtcatctctttagggagacatttgattataaaacctacaaaatattgaacctacatattactttggatcccgaaaccaaagaggtttcctatgaaaatgaaacagttatccaaggattctttcacctgaaaaacggagtccaaatctggggcaggcaaataatgaaaccctcagacctatgcaagtgacactattccatccagacatgaagaaactttaatgcggctcactagatttatgttcggaaatatgggctattgttgaactctctctcgaata

SEQ ID NO: 448840 - DNA, 460 bp, Homo Sapiens
  misc_feature (21)..(21): n is a, c, g, or t
ctgtgttcctcctgccacacnggaaatttttgagcatgttcatcctccaagctgaatgccagggtcttgggtaagtggtcctcacctgctcccagagacttctccagccattgccactctccactcaggtgatgaagctggatgagggactgcacccaccagagtcaggccagggtcctgtctgttctgtgagtccctccaattgttcttattccgagatttccattgttctgccccctcttgactcccagggctctcaagggagtgggggtagtgaagggagccctttcccaagctcccccaagagctctagtcacatcacttctgatacttcttttcccaccagctggaagaaagaactttcatttgtcttgaaatgagaaaaatgttcttagaatattttgtattcctctctgctctgtcatttatggtaaacaaaataaaataataaaccaaaact

SEQ ID NO: 448841 - DNA, 371 bp, Homo Sapiens
ttttttttgcaggagaagcctgtttattaggcaggagaagcagcagggcagccaggctcccctcccagccaccagctggccaaatgtcctcccttaactcaggggtacccaaggctccatggccatgtgaccagaggcgtgtaccctcaagaggcggcccctcagccctgggcagcccagccactgggtctcgcccttcaggggcctgcgccccactctgcccggccctgcctagaacagctgggatccagtccaggccagactcaagtggggcaagaccaggcagccggggcctggatgttctctacacaggaacgcacagatgatgacagaacaggctacatgggaagggcgggggaagccaccagatg

SEQ ID NO: 448842 - DNA, 893 bp, Homo Sapiens
  misc_feature (238)..(291): n is a, c, g, or t
gtgtgttggcgcggttgtgtcgtcttgcgtggccgccgctgttgtgtgtcgttgtgtcctccgtgtgggcggtgtgttgtgggctgttggtctgttggtgtgtgccgtggggtgcttggtcgcgttcgtgttccgtgttggcggtggtcttcgtgtggtttccttggtgtgggtccagtggggcccggtgtgctgcgcggcttgcgctgccgcgtgtgtcggttcttgctctctcgcnnnnnnnnnnnnnnnnnnnnnnnnnnnnnnnnnnnnnnnnnnnnnnnnnnnnnnaacctgggaattaggcaaacctgcctcccgttttatttctaaataacatagctacaatgataagaagctacacgcctccctcataattagcgcccagggaaattccttgtggacaaaggacagacggaactggaagtcatccctctggggctcccctgagacaaacgcttatatgattgccccgttcccttactgtttacataaaaatgcggattcactgggccagactcaatcgtgtattcagtggaaggctgactgaaccaatgtacgccatacacatactgatcttgtgtctccctaagatgtataaaggcaaactgtatccccagccacctcgggcacctgttgtcaggacctcctgaggctgtcacaggtgcatccttaaccttggcaaaataaactgagactggtctcagatatttggggttcacaaaggcgtgagacggcagggtcctgaggtctgaggcgccgtgggcgaggaggagggtcctgaaatctgaggcgccgtgggcgaggaggagggccaagcacacgccagggtcaggtcctgggcaggtggaattgtgcagtccacctgcgtctgcaggtgctgtctgtctggc

SEQ ID NO: 448843 - DNA, 1400 bp, Homo Sapiens
  misc_feature (57)..(620): n is a, c, g, or t
  misc_feature (634)..(644): n is a, c, g, or t
atgctttacaagggggcaaaaggggggggacccaagggattaccctggtttctgggnnnnnnnnnnnnnnnnnnnnnnnnnnnnnnnnnnnnnnnnnnnnnnnnnnnnnnnnnnnnnnnnnnnnnnnnnnnnnnnnnnnnnnnnnnnnnnnnnnnnnnnnnnnnnnnnnnnnnnnnnnnnnnnnnnnnnnnnnnnnnnnnnnnnnnnnnnnnnnnnnnnnnnnnnnnnnnnnnnnnnnnnnnnnnnnnnnnnnnnnnnnnnnnnnnnnnnnnnnnnnnnnnnnnnnnnnnnnnnnnnnnnnnnnnnnnnnnnnnnnnnnnnnnnnnnnnnnnnnnnnnnnnnnnnnnnnnnnnnnnnnnnnnnnnnnnnnnnnnnnnnnnnnnnnnnnnnnnnnnnnnnnnnnnnnnnnnnnnnnnnnnnnnnnnnnnnnnnnnnnnnnnnnnnnnnnnnnnnnnnnnnnnnnnnnnnnnnnnnnnnnnnnnnnnnnnnnnnnnnnnnnnnnnnnnnnnnnnnnnnnnnnnnnnnnnnnnnnnnnnnnnnnnnnnnnnnnnnnnnnnnnnnnnnnnnnnnnnnnnnnnnnnnnnnnnnnnnnnnnnnnnnnnnnnnnnnnnnnnnnnnnngagatggagtctcnnnnnnnnnnngaacggaatgtactggagatgtatttgataaccaaggttttaggtaaattttcaccagtattagttctatttgcaaactgaaaaatgttgtaggcttaatataaaataaccacattagtgaacattatatctcttagaagaaaggccatattttgctcctgcttctgtaaaaatattatttgtttgaaggggaaataatggtagtgtgacctttcacttaattcctactcccttaatgtgagagagacaaaatgagctgaagaaggaaaattctggagttacactccacaaccttgaacatactgacggacatctctgttttgacaacgatttctccatgccacccatgctctaatgccttgtggatcacggacaaccctctttgcacaagctacagcatcagcgatgttatcttgcagcaaagcactgcaggataaatgacaggcattaactgctcctggggttttgccatcattacaccagtagcggctattgatctgaaatatcccataatcagtgcttctgtctccagcattgtagtttgtagctcgtgtgttgtaaccactctcccatttggccaaacacatccagtttgctaggctgattcccctgtagccatccattcccaatcttttcagagttctggccaactcacacctttcaaagaccttgccctggaccgtaacagaaaggaggacaagccccagaacaatgagagccttcatgttgactgctaggtcagagtgctaggctccc

SEQ ID NO: 448844 - DNA, 796 bp, Homo Sapiens
agaaaaaaattttttcccgcccaagttagtcaagggttccttattttggcacaaaagcgtgaaaaaaaatggttggtgagggcccttaaattataaaaaaaataaccccccccattaggtggaaccatttattatttttctttaggaaggaaaagggcccattatttttggccccccggctttcccgtaaaaaaatatttatttgttttgaagggggaaaataaatggtaggtgtgaccttttcacttaatttcctactccccttcatgggaggagagacacaaatgagctgaagaagggaaaatttctgggagttacactcccacaacccttgaacatactgaacggacatctctgttttgacaacgatttctccatgccacccatgctctaatggccttgtggatcacggacaaccctctttgcacaagctacagcatcagcgatgttatcttgcagcaaagcactgcaggataaatgacaggcattaactgctcctggggttttgccatcattacaccagtagcggctattgatctgaaatatcccataatcagtgcttctgtctccagcattgtagtttgtagctcgtgtgttgtaaccactctcccatttggccaaacacatccagtttgctaggctgattcccctgtagccatccattccccatcttttcagagttctggccaactcacacctttcaaagaccttgccctggaccgtaacagaaaggaggacaagccccagaacaatgagagccttcatgttgactgctaggtcagagtgctaggctccc

SEQ ID NO: 448845 - DNA, 803 bp, Homo Sapiens
caaagggaagcgcggaaattttacctggggaaattgttttttggattaaacccaagggttttttagggtaaaattttttcacccggtatttagtttcttatttggccaaacttgaaaaaatgtttgtagggctttaattataaaaataacccacatttagtgaaccattatatcttcttagaaggaaagggccatatttttgctcctgcttctgtaaaaatattatttgtttgaaggggaaataatggtagtgtgacctttcacttaattcctactcccttaatgtgagagagacaaaatgagctgaagaaggaaaattctggagttacactccacaaccttgaacatactgacggacatctctgttttgacaacgatttctccatgccacccatgctctaatgccttgtggatcacggacaaccctctttgcacaagctacagcatcagcgatgttatcttgcagcaaagcactgcaggataaatgacaggcattaactgctcctggggttttgccatcattacaccagtagcggctattgatctgaaatatcccataatcagtgcttctgtctccagcattgtagtttgtagctcgtgtgttgtaaccactctcccatttggccaaacacatccagtttgctaggctgattcccctgtagccatccattcccaatcttttcagagttctggccaactcacacctttcaaagaccttgccctggaccgtaacagaaaggaggacaagccccagaacaatgagagccttcatgttgactgctaggtcagagtgctaggctccc

SEQ ID NO: 448846 - DNA, 1144 bp, Homo Sapiens
  misc_feature (595)..(603): n is a, c, g, or t
gtaccgagatcggacaccagttttatgtgggcgccagcagggtgcgcaataagtgtattggtaaggggagcgcgaaagagaataatccaaatatattcgcacgagaactgcccccaccgggtacggatttaccaagggagtacaattccaacaagccaatatatattgacaggggctttccgccagttttgggacagaaaatgtgccttaaagtcgaatgtcgtagcccaagttattggatgaaaggaagtggcccacgggcccgggggcgctaattcctggatatttggggctcgggaatcggagcttccttgtcggagtagaatgcccagtgacggacccgcacgaaggtccccttcggggattattttacaggatcgctccagttttcccgcccggaccgtttttttatgtgggtgaggaattccaaaccactagtccatggcccgggatttccgtagggaaacagcatagggcccagggttcccgttccctactggggccgcggctccaaaggaatcgttttagaaagtttttacgggggccgagggcggccgacaagaatataaatattggaatataacgaggtcctagnnnnnnnnngagaaacctttatttacaaccatgggagtcccacaggagtacacaaaacacacaatgtgcacacacacaaaatgaaccttttaagtcaataccatgcgtgctcctggccgcgcgccacccctcagtgccctatccgcaccaccatcacagtgacgttgtcggccgagccccgctgcaccgccttgttggccagcctgttgcaggctgcttcgtagcgggcgtcggctgcggacttcccttcccgggtctggatcttttcatcctcgagacaggacaagatgaagttcacggcttcttctggggtaaagaccttgaagagcccatcacaggccaacaaaatgaacctgtcattgggggtcagctggcagcgtctgatgtcgggcacagaggtgacaccgcagcgcttgtactgcccgtccccaatggagcgtgacacctctagcacgcccaaaacacgcccatccctgacgtttcctccagccttctgtatcctcatccgctcttcatactgagttggattatgctctttgctgaggcttaa

SEQ ID NO: 448847 - DNA, 1063 bp, Homo Sapiens
  misc_feature (64)..(85): n is a, c, g, or t
attagaaatgtttattaaaaataatggcatgaactgcttttaacaatttaaaaaagacccattnnnnnnnnnnnnnnnnnnnnnnagatccagggcacttcctctaagtaaacacaaatatttctgtagtgaactgtatgcatattcccactgagtaaaggttataaaaagcctcaggtcaggtcttaccaccaaacttgaaagcctaattgaaaaccaaaagccaatctcttaatttattctggcccttgacaagagatttggtgaatggttcaaaaagatttttggtacagacaagttccagggcttgaacagtgaaaagtagttacaggccatgtgtttggtctttgcaggtcttgggatacatgttctcaaggtaccttgagtgtttggggggtttctagcctcagtgggttcttgacaaatgtgcatcagttggatgctgaagacaaaccaaagtatgagaccaacaagcactttaagggtggtcgggggttgacctcaaatctggaactttattcatcacagactatggcactatagagaactgtgggctctcttccttagagcagatagacagccagagactgggactccctgggctggatgatcacaaagcacattgtaaacacagcagagcagagcaggtttagagttgttatacaaataaattttggtcttcattgattccacttaggaacattttgttgcaggaatattactgattatggatcctacctcagctgacactgggggtgagaggtacattgccatcctgagagacagggagcagaggaccccctccaatcccccgacctacaaggcattcacagcagtcctcctgccaattctcactgccttagctccctaaaggcccagaataagatgcgtcctcagaccaagtatccacctggtggggttagccacaatgccccatagcctgggcctggcttagtgggtgaggtggaagttcccaagtctccatccacctgccaagcaaattcatgactgtttggcttacaggaagaaggaatattggggcctgtcccaactgactgggaat

SEQ ID NO: 448848 - DNA, 477 bp, Homo Sapiens
  misc_feature (78)..(99): n is a, c, g, or t
ttttttcacagcatattagaaatgtttattaagaataatggcatgaactgcttttaacaatttagaaaagacccattnnnnnnnnnnnnnnnnnnnnnnagatccagggcacttcctctaagtaaatacaaatatttctgtagtgaactgtatgcatattcccactgagtaaaggttataagaagcctcaggtcaggtcttaccaccaaacttgaaaacacttggaatgcagctgggcagggacttgagcaggttttgtcttgataagcaggtaagaatggcagaacactggcttattgtcaaccaatgtttttttatatacctgaagtattcacagcaacttattttaagaagctttttaaaagttctacacctccacccccacaactccccaatccagaacatggaacaagggtgtggagctgtttgatggacttggtctgttcttaacatttaatactcttaactcctaggcca

SEQ ID NO: 448849 - DNA, 570 bp, Homo Sapiens
cagtcacagtacttttttcttcatttctttggatttataaacaaatcagcagggaggacaaggttctcaaggacaaaaaaatcaaagctgaaacgaaagcagcacaatccattggtgacgttcatctttttccagaggaatataccattctgttaggacttctggtccaaacgttggtagtcactggcctttggccgccgggtgactttagatctttttccttccagaacaaaagcaatgatcttccgcttgttgtgatgagcgatatagaggacagccacaagaatggctgcagtcacccagatatgcaaagaagtggctgctctccgcgctgccatttccagaaccgttcggataaaggtcatccttctcgctccccgtggaatccgaaagtgttccttcacggttctcactggaggcagaaccggacatcttttctttctcttctttgggcggtgagccctcctcgggtcctgtatcatcatcttcaacctctctgagctccacatcctcagtaggctctgaagacttaacttcctgctgcgggggagaaatgaggtcagttgcctc

SEQ ID NO: 448850 - DNA, 526 bp, Homo Sapiens
ctcattttagacctaagagttttttgttataagacaccccagttaagaaatattgaaacataagagacttgaccatcaagggagaaaagaagccaagagtgaaaaatgctatgaaagtaactccagacctgggcggggcgggaggtaggaggaataaggagaaaaggaggcataagtggaaaggccaggggcctgtcatctcagcagctccgagacttgtcatgtttgaaagtgcaaatgtcaatgggattttacccatcttgaggttgtgatcttttaaaaagctcaatgaatgaggaagtcaattccttcaaatgcaaaatagctggctttctggctggaggtttgttgggtctggggtatttcttccccatctacctcctctgccacccccaccccattccccaaagaaaggtacaaaaggttgcagttctgcagcattaccgttacagggaaggcactggttacccaccagcgggcggaaggaagacagggtcgtgtcacttcaaagctaagtgccatagtg

SEQ ID NO: 448851 - DNA, 1731 bp, Homo Sapiens
cgggaccttgggccgcaacggccaggtcacctaccggcctgctggagccgaaggtggcacgcgccgggggccccgggtccaactaatgtctcgggtggacccaagctaccgggagccatctacgcgctgcgcagcttcgactatgagacgctgcgccaactcgacgttcgcatccaagctagcgacggcggctcccctcagctttccagcagcgccctagtgcaagtgcgcgtgctggaccagaacgaccatgcgccagtcctggtgcacccggcgccagccaatggctccctagaagtggcggtgcctgggcgcaccgcaaaggacacggttgtggcccgtgtgcaggcccgggatgcagacgagggagccaacggggagctggcgttcgagctgcagcagcaggagccgcgcgaagccttcgccatcggccgccgcacgggggagatactgctcaccggcgacctctcgcaggagccacccggtcgcgtgttcagggcgctcctggtcatatccgacggcggccgtcccccgctcaccaccaccgcaactgtcagcttcgtggtaacagcagggggcgggcgtgggccggctgcgcctgccagtgcaggaagcccggagcgttcccgcccgcctggctctcggctcggggtgtccgggtcggtgctgcaatgggacacgccgctgatcgtcatcatcgtgctggccgggagctgcacgctgctgctggccgccatcatcgccatcgccaccacctgcaaccgccgcaagaaggagccctacggtgcctccccgggttttggaaaggagccggcgccccctgtggcggtgtggaaaggacactccttcaacaccatttctggcagagaagcagagaagttcagcggcaaagacagcggtaaaggggacagtgatttcaacgacagcgattccgacatcagcggggacgctctgaaaaaggatctcatcaaccacatgcagagtggactgtgggcgtgcaccgctgagtgtaagatcctgggccactctgaccgctgctggagcccatcctgcagcgggcccaacgcacatccatcgcctcacccaccagcccagatgtcaaccttctgtaagagcacgtcactgcctcgggatcctctgcgcagggacaattactaccaggcccagctgcccaagacagtggggctgcagagcgtctatgagaaagtactgcacagagactatgacaggacagtcactctgctctcccctccccgtccagggaggctcccagacctgcaggagattggagtatccctctaccagtcccctcctggcaggtacctgtccccgaagaagggagccaatgaacaatgtgtaatcccatgcttgcatgtcttcacacatattcaggtcactccgagaagcccctaagttattgaccggtttcagtgttgtatatataaatatgcaagatgtgccttacaattgaagttgttgaaagctattttccaatcacattggtactgtttggtatttgcaaacaaaaaaacaaaacatgttgaattacttaattgaaatttatctttcacctgaaacaacctagtgtttgagaaattttgccttgccaagtataacttgtatatcttgactctgtggtagatttcaagttcaatgttatttaattacatttggttttccgtaaaccgtgtcacttataagcacagtaataaaagatttgtcatgtgtttg

SEQ ID NO: 448852 - DNA, 279 bp, Homo Sapiens
ttttttttcaaacacatgacaaatcttttattactgtgcttataagtgacacggtttacggaaaaccaaatgtaattaaataacattgaacttgaaatctaccacagagtcaagatatacaagttatacttggcaaggcaaaatttctcaaacactaggttgtttcaggtgaaagataaatttcaattaagtaattccaacatgttttgttttttgtcttacagacagttcctttggcaataacttccactttagcttttattatataaatttataaca

SEQ ID NO: 448853 - DNA, 433 bp, Homo Sapiens
gcactgcagatgcattttattgagctcacacatcatttgaacatttttgatccaatatactaatatttggagatttcacagaaaaacctagactcctcttttgaacattgtaagatctggtcacactggacccatggtggaacaacatcagctggaagggagttgcagcccccccctgcagacagggctggtgtttctcttgtccttacaccttttccatttcactgatttacatgccctgaatttcccctgtagggaaattaactaccgatcccagtcttataataaagctctgttccttaattttaattatccctgagtaggattttctgttcctggccacgaaaacagtgctgatgagagcttctgtggcctacacatccacggcagggctccttgcaaccatcgcccatccacagccattgctatcctt

SEQ ID NO: 448854 - DNA, 465 bp, Homo Sapiens
ccagttgaaataatttagactagttttctccctaattgctgctgggagcagtacttgttacacaatacaactgctatagttgtcaccggtgatcctctaccgggagctagatcatcttatatcccagggggaagatgacagacctctttgtaccaagcctgcaattttcaaaggtgtaaaaatattttaatagcccttttcatttgcctatgttggcctgagatgtttcccttctggtgaatttgcttctgtaaatttcagcttgcagaagtgctggcaggtatctcttcaacaaaacctggaaaagcttcacctcaggagagagaagggagagaagcagttgctgggtctcactcaggtttcccagtcaatgtgccagcccaggatttttaaagaaaatatataaaccaaacatttaaaagagcatatgataaagttgatttaatgaatggcactgactacata

SEQ ID NO: 448855 - DNA, 1045 bp, Homo Sapiens
  misc_feature (571)..(571): n is a, c, g, or t
aggtgtaaggttttgagacatgttcaagagcatgcatttcgttccatatacattttagacaaggatatggccatagatttggcaagttcttcgtcgcgtttcctttgcacttgagtttgtttgcaccaagttgtcgtactctgggttaggataggagtgatcaaatacagcatcatagtgtccgttactgagccaactgagccaaatactaggcctcagggaatcctctgggcccaaataatgaatcatggtagacaccgtgggactctccagcctccctccagtagttaaatggatattcacattcagcatctgccccatggccagcaactccgggtacccggcccatgccccgtcttgggcagcagcgatgataaactcccccacgtcgccctcaatcagggggctgaagtggtcgagatggtcggcgatgtagtgcaccgtctgctccctcaactcccggtgcaggctctggtccccattcacggtcttgctgacagctcggtagaggcagttgccgtctggaatgatgtggaatcggtacttattcctctgccgcagatacttgtcnctgcttctccacctcggccaggtatagggccagcttctcgtctctgggatccgacctggagacgatcaccggctccgccgcactactcggggcggcctcgatgctcccggcggggggtgcctcggcctctgggtcgggcctccgcgccgcgtccccacccgggcgcgtcgcagcgatcgccgcccctctcccagcccctggggcccctctccgccaagtgctcttcgccccacggaccggggccgggatcggggctccccggggtcgccgcggggcctcggtgcttggcggcggccagggcctggcggtgctcgctcagtcggaagttccgatcgggcccctcccgtgtcgcgtccaagcccgcgggctcggggcagtcgggccgcagcagctcctccaggagccaggccgaggagccccgccgcggcgggaccggggctgcgggcgccggggcgagcaggaggcagcggccgc

SEQ ID NO: 448856 - DNA, 547 bp, Homo Sapiens
gactatcgccaacttataatgcttaaactttatgatcaatagtaataaattacacgagatattcacactttattataaaatagggtttgtgtaagatgatttttcccaactgtaggttaacatcagtgttctgagcacatttaaggtaggcttggctaagctatgatattcagtagggtatgtgtatttcatgcattttttacttacaatattttcaacttatggtggatttattgggacataaacccatcctaagtcaaggagcatctgtatacatgaagctaacattctattcctatcagacagtgctgctctaaagtatgtcactgcaaaacttaagccttcaaggtaaaatgatcagatttgcattctagaaagattatatgccctggtgagactgggttaagatttgaaagcagatagaaagctattccagttgctgggggcaaacaatgataaggacctgttttaaaacatgtgcagtaaaggttatgaggaaataacagctttagcctgggcatgggtgactcatggcctggtaatccct

SEQ ID NO: 448857 - DNA, 641 bp, Homo Sapiens
  misc_feature (35)..(35): n is a, c, g, or t
  misc_feature (107)..(107): n is a, c, g, or t
  misc_feature (115)..(115): n is a, c, g, or t
  misc_feature (139)..(139): n is a, c, g, or t
  misc_feature (164)..(164): n is a, c, g, or t
aagatgtggctactaattaactctaaacttaaagnaaaaagggtaatcactaaagaaatagcaataggtttaattacttccaaaccactggaggaataacaaggagnaaaaaatnacaagccagtaagatgacaaaatnaaaacaagagagcatgatatatagnaaatacaaagtaagacagccaggaatagtccaaatgttttaataatctcaattaatatacatgtattaaatttcccagagctggtttgattaaggaaaatagaagtcaattatagaggatatgagaaaaagtaaagtatttcagttataaaaggcacaactcaccaatagtcatgtaatgcttacatttcagaaactgattaaacgaacaactaagataggaatgtagaaggcagaaagtttgaacaattaacaagctaaatccaaaaaaacctgtacccaaaacaggcaaagcacccctctacccacccaaaactcatagaatatttacaaatattgaccatataattccataaagtagaaaccatacaggctatattatatctccttagaaattttaaatacacttggaatctgaaatacccattaaaaataaacaatagtcaccatagctaaagactgtcagacatacagccaa

SEQ ID NO: 448858 - DNA, 620 bp, Homo Sapiens
  misc_feature (219)..(219): n is a, c, g, or t
ttttttaggaaatggcttaatttttatttgaggtggaaacctttggcttcaagcctgccattcaacactgatgacatctcagtcgtgagccgcacagtgggctgagtcctggtcactgcacatctgcagccagctgtgcaatcaagtctttggcatcttgcatggtggagggtatctctgagccattcttagtcaggtaagggttccaaaccaagaacnatcttcctgtcatttcccacttcagataatgccaaagcttcatggatatctgtaatgtgataggctgcttcaagatcctgtttgtttgcaaacacaaccagaggaagtactgggtttgctgcaattagctgatgaaggtatttcttggcttcaggtaatcggctgtgatctgctgaatccaccacatagatcagcagcaatcccttggataggtacatttcccagtaggaccgaaaaggtttactgccaccaatctccaggaactccatctggctgtcttcagtggtgatgcacactgcatggaaaccttgggtgggtgccacactgtgctggactctgtttgaagctagaaagtgcaggaaactggttttttctgctccatccaagcccacacttagaat

SEQ ID NO: 448859 - DNA, 497 bp, Homo Sapiens
attagtaatagctttttattcggagtcctcattttccagatagatcacattaaacacagccattaaacaatagcgttgagataaatccatacaatgtatgctgcttttgttgttgtccttgttcaccaatcacttggtgcagctaagaactttatggagtgatgggctgataatggaaatagccaacctgcaaaacactggggccaggaaagtcagactttaatcaggtctcattcaataatatttagaatcaacacatcttgatagccaaaactctcattcgaattagtgctctgatgaatgctgtctgttgtcaaaagaatataattagactattatgactgggcatatattatgccagacctgtctatctgttgacctcagtaacttttactctattagataacaaacagcttttaacctggttctaaaaaagcatatgctctattactacatgacttttttatggtgccatattttaaattgaacaatatcta

SEQ ID NO: 448860 - DNA, 926 bp, Homo Sapiens
gggctcacagaagccttggcgcagtccagctcgcggggggatgggcgagggtggggggcagaaatagcaatctgcagccggcaagggggcggcacttagtcaggctccgcccacaagacccggctgccgtccccgcccgcctgcgcgggatcgactccgcatgcgcactggagcctcggaatacagccaggactctcccgtcggaatgcgcccctaagttgggccaagcccattcattcaggggctcccgagccacgtaggcgccatccctggccagaggggttctgaggaggtgggcaagggcagacactctctcccggtctcaaattcgaaatagggactagaagggaacttcacgcgaggcctcgcaactgtcgcgagaatcagaacaggaaatctaggaaccgagaacactaagagcccgcggattttaaacaggaaaaagaaagggcggagcaaactctggcggatagttgtgagtaatccctggtccttggaataagtgtcgacctgagacagaaggggaactgtcagagagctgccggagaccctgaaaaaggccagagacggggacttgtggggctgacgaatggaatcaccccaggagaggtctctgactctaacaaaacaccttggggacggagctccttggctgggatacagagcagaaacaagtccggggatcttttagtgaattgctgccggcttctaagggctggagcagatattcaaccacaaactccacgggacctagaaactctccacttatcctactatttgtagacgggtggcttacttttagtcttccctatgctctaagcttctggtagtaggaatcgtgcctaactcactactgtatcttgtgaacctagccccgcgcctggtggcacgtcaaattctcggtaaatatttgtggattaaatgtg

SEQ ID NO: 448861 - DNA, 434 bp, Homo Sapiens
  misc_feature (274)..(274): n is a, c, g, or t
  misc_feature (305)..(305): n is a, c, g, or t
  misc_feature (409)..(409): n is a, c, g, or t
gccgataccacggatacctttattgctccctggcattcacatcctaagcccatgctcccaccgtcccatccgctacttcccgaaaactcaatctcccaacattccacgcgggataagaactacaactcccagaaagctttgcgttcaggcgggctcctgtccgtagaagcccgtgacatttcaaggttcgcgcgctcgtttggtatttggttctcaaggagacgtggccacgggaggcccatggcgataaattggctggcagctcctgctgctncaagatcccagaggagggcggcggagcctancgggagtttcacggtgcaaggcatcgtccgtcactggaccagtgaggcgcaggcgccagctccccagggggaggatgaggggcgggtgcgaggagaagctttcnaaaatgtcccctgtgaggccgaagg

SEQ ID NO: 448862 - DNA, 487 bp, Homo Sapiens
  misc_feature (399)..(399): n is a, c, g, or t
cacttttctcctggctgtttattacagaacgaagaaaaaacacactggcttgaaacagacgccagatttcaaatgtagaggtgaaatacgaggtggcaattaaaatgtgattacagaaagtctggacactgagaaaagtttacaggacagtgggtgtgggttttctataacagacacttaaatatacatgacgataattgcagatagaaaccatcaaagacaaaccccaaatcaactaataatgtttacagatgttcccccccaaaccacagagccttacatcaaaacaaatactgaaaggctttaaaccagggaacagttcgccttaaccccacgagggtgcacacaagttgggttttttctctcggtctgaatggtaaagggaggaggatactctanctcctccaggtggattgctgagacagggctcggctcacacactgtctctgcgcctctcccaaatctggagaactctcccagcctcctg

SEQ ID NO: 448863 - DNA, 998 bp, Homo Sapiens
gcaggttaatctgtttattttttcagagacaaaactaaaaatcgccactcaatgtatctgagcagactgcctgatcacagttaaaagctttctgtaatgcgcagcaggaacgtcatagcctggtggtcagaaatgagtgcttctggcgctgctggactgtggcccgcagcctgagcaccccttcttctcctccctctgctcatattgtctttgtgctgccatccagtcagcagcggacagccagcccaatgctgctcaggtctgtggcatccagagataaaaggtcctgattcactagaatgttgctgaagttacaggctgcgctgaacttgcggctatgggacaggttccgaggggtcccttgggatggaagcggtggcagcccagggtgctccccctggtccgccaggaatcaggctcccgggaaaggccgcaccactgcagaagagctctctggctagggaggaagcccagtaggccgtacaagcacagaaaaacggaaggtgcaggattcagggactgaagaggttactatagacaaacaccgaatcttccatgcctggcgtgtccaaaattacctttcacttggccgcctctcggccgctctgcggggcgccggttcctcttccacctgcggctcggaagcctgagcccagcccgggacagcacgggccccctgcctccagcctaggcgtccgcgcgggtgtgggtcactggtcaggccctggaagccgactacgccgcttcggtctgcgtgtcccggctctttctatgggagaaacttagcatcgctctcccagagtgaatagaagccgcagggctgctcggaggcggcggcagcggcggcgaaacccgccgccgaggctgcaccggggcttgcggcggcgccgccgcagttgcgtttaccccggcaaaaagtcctgcgcccaactcgggcggggatccgccagagccagtccagacccagcaccagccgcacggctcccgctcgcagtcgg

SEQ ID NO: 448864 - DNA, 917 bp, Homo Sapiens
ttttttttgcaggttaatctgtttattttttcaaaacaaaactaaaaatcgccactcaatgtatctgagcagactgcctgatcacagttaaaagctttctgtaatgcgcagcaggaacgtcatagcctggtggtcagaaatgagtgcttctggcgctgctggactgtggcccgcagcctgagcaccccttcttctcctccctctgctcatattgtccttgtgctgccatccagtcagcagcggacagccagcccaatgctgctcaggtctgtggcatccagagataaaaggcgtctccgctccccgcaggtttctgctttgcccacctggtggggtacgcgcctggcacgccacccccactggaggtcctgaatggtccacagagaaggcgtggggcaaggcctcaagtgctgatgctctgagaataaaaattaaaaggcagctctgccctgaagcgtcaccccacagggctcattccttggctgtgccctcctgggtcccggggtggacacatggatttggtgtcatcatcgctcgtgcttgatgttggcttcacttcgctccaaggccaccccgctgccgttccgaggggcgtccttcttgctccagtccttttcagtgtagaactcggctagcactgggcagtgttcagaagccaccccgccccaagaccagttatccggaatccaagggttcgtgaggccttctctcaccacagcccagtgacctgtgaaaaccttctttaagcttttactgatccagatgttgtccagagacttcgagccttgagggttcttggtgctgatgttggtgaaggtgtgcgcggggatcaggtggtggaacttttctttcctcaggatatcatagtcattgctgtctggcccttggccaaaatcccctaagataatgacatcccc

SEQ ID NO: 448865 - DNA, 487 bp, Homo Sapiens
  misc_feature (103)..(103): n is a, c, g, or t
  misc_feature (106)..(106): n is a, c, g, or t
gcaggttaatctgtttattttttcaaaacaaaactaaaaatcgccactcaatgtatctgagcagactgcctgatcacagttaaaagctttctgtaatgcgcanggnaacgtcatagcctggtggtcagaaatgagtgcttctggcgctgctggactgtggcccgcagcctgagcaccccttcttctcctccctctgctcatattgtccttgtgctgccatccagtcagcagcggacagccagcccaatgctgctcaggtctgtgggcatccagagataaaagggcgtctccgttccccgcaggtttctgctttgcccacctgggtggggttacgcgcctggggacgccacccccactgggagggtcctgaatgggtccacagaggaagggcttgggggcaagggcttcaagtgcttgatggtttttgaggattaaaattttaaaagggcagtttttgcccttgaagggtttaaccccacagggttca

SEQ ID NO: 448866 - DNA, 654 bp, Homo Sapiens
  misc_feature (25)..(25): n is a, c, g, or t
  misc_feature (49)..(50): n is a, c, g, or t
  misc_feature (53)..(53): n is a, c, g, or t
  misc_feature (56)..(57): n is a, c, g, or t
  misc_feature (59)..(59): n is a, c, g, or t
  misc_feature (466)..(491): n is a, c, g, or t
gaaaaatggtaaggttttatgtttntgagaatgttagggtaggttagannacnttnnantcccccaccctccaccccagaaaaacagccacaattgttagatgaaaaaacataaataaaagaactgacaaaaaagcaggaaacttttggatcaaaatctaactgaaaataacgcagaaaggtaatttaaacaccatagaatggggtctgcttttgtcctgagggcatttgctcatgtggacaaagtggggctttgagtttagaggatttgtgaaaagaacagtagttaagctcgattcctctcaaggtaaatagcctaaaggagaccctccccacaccgatggaactctgaagggctctatcctcaaggtgtgagggcagactagaggcacatgtgcctcacaccgttccttgccctcatctggttgtctttttactaaatgtagcacaaaaagaattgactgtannnnnnnnnnnnnnnnnnnnnnnnnnagggttgcccgtgttttcccaaatacagtattctaaaccagagaatagcaccttacatagtagagagattgtttctcttttggtaggcggtggccaggaaggaacgccaggtagcattaagccgtggcccccaagtatgtcttgttcctgtctcttgcattgt

SEQ ID NO: 448867 - DNA, 437 bp, Homo Sapiens
gggtctgcttttgtcctgagggcatttgctcatgtggacaaagtggggctttgagtttagaggatttgtgaaaagaacagtagttaagctcgattcctctcaaggtaaatagcttaaaggagaccctccccacaccgatggaactctgaagggctctatcctcaaggtgtgagggcagactagaggcacatgtgcctcacaccgttccttgccctcatctggttgtctttttactaaatgtagcacaaaaagatgaaaagggaaaaaaacctgttcctgagaattgtagctctgtattggcctttgtgaggatttttagcccagttacattgcctggtagttcagggaaatcgggcatgaatttaattcaaggtgtttctagcttgtcatctgacaggacaaagataaacctctctggaagaaagtccattctatgt

SEQ ID NO: 448868 - DNA, 547 bp, Homo Sapiens
  misc_feature (532)..(532): n is a, c, g, or t
tttttccaatagtttgactttattaaatcaatagaacgggatctcagtggttaagccgtcttaacagggccaggtctcttgaggtagtttttgggccatcagttaattacatcgactttccaggaaacagactatggagaatgagaggaatcagactgcctgtcacacacctctcatggaaccccctagtgacacctataaggacgttacagatctagttccagactttacagatctagttctattttctcaagttacagatggggaaactgaggccccagcagggggaggggatgtatctaagtcactagtgagttggcggcagtcaggtctcttgattcttttccccatactctcagcccaacttctcagtggagaggggctggcaggcctgctctctggatagaatgtagcaaaaggccccgtggtcaaactgatacggggtggggaaggttggtgggctctcagcccatcagcccattctcatcttacacgtgaaaaaactcagcctgagagaagggaaagtgacttncccccctcagggtaa

SEQ ID NO: 448869 - DNA, 486 bp, Homo Sapiens
aaaaaatttcctagtcttacttttgaagttataaagaagaaggtgtttaaggagcttagaataagtcagttttgcctattgttttactataaagagagttttttccaccatcatggtgggacatttatgacatataggtagaatgcaaatgacagttgggtgggctattataagaaagaatgacccagataaggggcaaatccacagttgaattctgtgatctccaaataaggtgggcaggtctaatcagaccaaacaccctcacccgcgcaccaccaaagcatcttcctcatcacgctgtggctaactgcacagtatcttcaaattaaatcaacattgaaaagaggtaaactaaaacctctactagggatccccagagtcctaagtactaaaatgaaggccagtctcaatatttattttccctccacctggtgagaaagaaagagggggaaaaaaaggagtggagggaggtggggagcctgggta

SEQ ID NO: 448870 - DNA, 423 bp, Homo Sapiens
aaccgtaagtgcacgatgcaggtgcataggccccagaccaaactagaccaccagcatgttcatgtccagacctcggcagtggcgtgcactgcttgtgcacctcagttcctccagtgttggtttgtttgttttttaattcagcatcctgctggttttactttccaagcaagatctgttgcgactcccaaatgcgttttaatgagctcatccttatttgcctttcttcttacgtattttgtgtattagattgtgcaggagatattctagaaggcattaatggtttgcattcaaaacgatgtggtttgtccaagttattttctgtctttattactgagacggattaatctccttatttttttcttgatgatttgaagttgtaagagttgtccagctattgcttaataaaattttgcagatcaaaaa

SEQ ID NO: 448871 - DNA, 633 bp, Homo Sapiens
tctctgagcttagcctttcttctattctcacaaaataaaacaaaacaaaccaacagtaaacatcgcaaacacccttcacagatgcttcatctttctcctttgctttgttatccctttctagaacgtcttctgttttcattcttttcactgctgcctttagatgaagtaaaggattctttggcacagatgcgctggctgactgctggtgagtgctgttctcgccctgcctttgtctttgatcatacgctgctttcagctccctctgaagttcagcaggaagggcagcagatacctcagggtccacctgtgaaaatgctggaagggctattatatttattgctgcgtcactgttcgattcttgaggttctggtatttgcaacaagactgtcccaactggttgtggcaaaattcctgtattacagccatttactggttctttctttttgtcgccatgtgactctgcttgctggacagcacagacttgctctacttgttcccggagatcaggtggaagtgcttctaaaacagactgatccagctgggaaggtgacgggacctctatactcaggttaagtctcgactgcacactgacaggagtatgtagaccattccatttccctgaagactcagcct

SEQ ID NO: 448872 - DNA, 714 bp, Homo Sapiens
  misc_feature (629)..(660): n is a, c, g, or t
tggagaatgtcttcttccattggatctaggaagggggaaaaacttcaaatgaggaccagtctttttgaaggagaaagtcagagatctgcatggataaaggaaaactgcatttctacaactatgtcactaacagctatcaaaggaatgggctttgttacttttcaaagcaagtcccagaatttaaaagatttgggggtagctgctttaagcttatcagagttagagaaatgggttaaatctgcatagtttagtctgtttatgttctcaaatcatgagacgactacatctcagccttgggccatctaacacaggccaagccaacctgaaattgtagttatccattctctgagcaaggtcttcacatcattgaattcaacagctccagctagattgggtgctggaggtctcacacagccagctgggtcagactgcaaactagaaaggcctggcacacctgaagtagaagcagagagttcttccaggggtttctctgcaggaggtccttcatgttttagaaacccatcaattaacttctggggactgccacaggcccctggcagagtttttgcaggactgttaagcagcttgttattcaaaggactctgaatcctttttggtgaaccgatggnnnnnnnnnnnnnnnnnnnnnnnnnnnnnnnnactgctgcctttagatgaagtaaaggattctttggcacagatgcgctggctgcc

SEQ ID NO: 448873 - DNA, 532 bp, Homo Sapiens
gtgtgagcatacatctcaaatttaaaagacagtggaaaactaagattttatttaagtcctaggtacaactttccagaactttttggaagcacaggagggaacaatattcttcaacctccaaaaaaaggtatagtattttaacaatttatgccaactttgagactttgtcagaattggaaaatatctctaagataatgggagatctttagagatgtttcataccaggataaagatcaaatgccgctgtagcctagagttaatatgtttggtggttatcaactagatctaaggcatagtgaggcaaacaatgtctactctttgatgcatacattctttttcatttttgctcctttcagtttttcctctgccccattgcagctagtaacagtttggccctatttcatttgtagtcaagagctctctctgtaaagaaccatggttccctcaaacagtggtaccagcaataaaactatgataggggacttagaaaaccccctgcccaaaagaaatattcatagtaataccgagtgtc

SEQ ID NO: 448874 - DNA, 790 bp, Homo Sapiens
aaaggagaagttacgaaggaaggttattggttgtttcaacttgcaaaatctcttgaaggttggagcagagccgccggtaacctttgagcatcgaaataccgcaagtaatcccgtttccttttcccctcaggaaagatgggtgcagggttgagatgttacaagagaattaaaagagagccaccagcttggcatagtagaagaaacaaacccaaaatgaaaacacccgggattttaagcgcggatcctgcgaggccggtttgcactggccgaacgcctgcgttaaccctttgggcgccgcagctgggatccccggtgtttgcggacccgaccggcagggaacagagatggagtgtcccgcgcccgcatgggggagtgagctctcttcccccaaagagggagcgagccgagaagccctttttcctccggtgcgtgcgtcgcggcccgggacaggcgtcgagtccggttttggagtgggggcagagaccgcggcgaggagccgctcaaatgtccgctgactgggggttcgccttaatctgtcctcgccaggagcgctcgccctcgccctcccgctggctcgctcctgggccctggaggggcatgggcccgggggcggttcgggaggggccccaggtgaagggcgcccgcacttctcctgcggcaatcatcgctctcctgcctccacacgtcgcggcagcggcccggccccgcgccgaaacagcagctgtgactgacggagtcacctccccgcgcgcctggccaccccctcctcccccgccgctccctcctcgct

SEQ ID NO: 448875 - DNA, 647 bp, Homo Sapiens
gttcaaacttgcaaagtctcttgaaggttggagcagagccgccggttacctttgagcatcgaaataccgcaagttatcccgtttccttttcccctcaggaaagatgggtgcagggttgagatgttacaagagaattaaaagagagccaccagcttggcatagtagaagaaacaaacccaaaatgaaaacacccggattttaagcgcggatcctgcgaggccggtttgcactggccgaacgcctgcgttaaccctttgggcgccgcagctgggatccccggtgtttgcggacccgaccggcaggaacagagatggagtgtcccgcgcccgcatggggagtgagctctcttccccaaagagggagcgagccgagaagcactttttcctccggtgcgtgcgtcacggcccgggacaggcgtcgagtccggtttggagtgggggcagagacgcggcgaggagccgctcaaatgtccgctgactgggggttcgccttaatctggctcgccctcccgctggctcgctcctgggccctggaggggcatgggcccgggggtggttcgggaggggccccaggtgaagggcgcccgcacttctcctgcggcaatcatcgctctcctgcctccacacgtcgcggcagcagcccccgct

SEQ ID NO: 448876 - DNA, 511 bp, Homo Sapiens
  misc_feature (335)..(335): n is a, c, g, or t
  misc_feature (411)..(411): n is a, c, g, or t
ttgctttgtcatttgctatttaatgttcaaacattgaaagtaattgatttcttccgagacacctctttccttggagactttcaccctcccggtctgggctagactgaatgcccacaagacctactgtgtggctgatgcgtgggatctccctttgcttccttcccgtgttggagcccattttctagatccttcacttctttgttcttggtttgcttcgtcatttggtggaatacattcccagcagctgcctgagtggggaagcaggggaaatatccctacacaggcagtttttcgaggtatgactgaaaaatgcctttatttagccttacacttgnattgactgtttgggctaaatataggattttgtgtttaaaataattttccatcaggcttttgggaagacactacttncactgtattgtggtattcagttgttgctactgaaaatctcaataccatctgattcctgtttctttgcatggaacctaatttttctcctccctgcaacatt

SEQ ID NO: 448877 - DNA, 753 bp, Homo Sapiens
  misc_feature (417)..(426): n is a, c, g, or t
  misc_feature (595)..(595): n is a, c, g, or t
gttcggaaacttcttttattaaaaaagattttaaatattaatgctattttcaatacaggtgtgataacactcaataaagcatggtgtacttgatataaatttcggaatgtaacagtccatctagttcctggtcccctccagtctccaccacatagcctagtagcaaaacgtacacacccgtttaaaaatgaagaagcttttgggcattgggtgagcacagtggggtggggcaaggaaagtgctcgttcctgaattattcatgcttttggctttgacttcagttagtaacatcaattctaagagaactgagacaaactcttctatgttccgcaaaggaatggagaaaaaagcctgccattcgcaagcagctgtgggcaaaaccagcgcagagtacaggggtcgggaaatgaggtattnnnnnnnnnngtcggagtaaagtgcacagttactgtcaaaaatatattattttgatcctaagaaaattaaaagattttatctaatggactagattgctgaccttttaatacatttggttttcattgaaccttccaatcaccatcggacataaaaaggacttaggtttgcttaaaaaaanaaatccttggagttatctacaggaatcttgtggacgcaattcaaggataacattctgcagctctttggatattgaatgatgtcctcggatcagtccacaaaagaaacagggacctgttaatgcactgattcaagtgggcgtttcctcttgccgaattt

SEQ ID NO: 448878 - DNA, 661 bp, Homo Sapiens
tttttctaattaaagattttattaacacttaagattaatataaagtaatactatatattgtatcacaatgcaatataaaagttaataaaatcattgttttgttaatatttaccataaaagttatatttatctttgaagcactaagatcaatacctagggacaccattctactctgtgggattgcaggtcaaagattaaatacaaatttatttaaataaaggccctttaatagcatagaaacaatatatattcatacaataaaatgtaagctgaaaaatgcacggaacaaaatatgtgtgctgtgaccacagacgcgttctgaaaaatacgtgcgctgtgattgcagacgcgttctgaaaaatacgtgtaccataatcacagacgcgttcgcaaaaatacatgcactgtgatcgcagcacgtgcgccgagaccgcagacgcgttctgaaaaacacgtgcgccgtgatggcagacgttctgaaaaatacatgcgctatgaccatagatgcattctgaaaaacacatgcaccatgaccgcagatgcgttctgaaaaatgtgtgctgtgatcgcagacacgttctgaaaactacttgcgcccagaccgcagacgcgttctgaaaaatacgtgcgctgtgaccgcagacgcgttctgaaaaatggg

SEQ ID NO: 448879 - DNA, 1111 bp, Homo Sapiens
attagatgccagggtgaactttattttcttataaactataatgagaatgagagaaacatatagcactgaagtgctgtgtttccactttattaaatcatcacagtaaatcagaattaaagagtaaaagaggttaactggagagtcgggtggctgccatcagtggagatgtgtgctttctcggtgtggctgcctgggccgcggtgtgtcctggtgcacacacgtctgcaaggtgttcccaccacctaggaaggaacctagatgtggagcattaggaaaattaaataacaagagacagcaaaataagaatcaaatgacacgctataacttaatttaccatattttatcaaattttttccttatttacatgtactaaacattgtagacctgaaaacataaggaaacattcacttcatgtgtatgtcatatggacagactgagtgcaactaaaacgatggttgtttcatgttgaatttccctcggatgcagacgctgcccttcagtagatataaaggtagcacagttacatttacgacatcacagttaggttttaaaggattcatcagacctccacatgacaccgatacagcaggtccatggggcgcaggtggtgccacctgaggaaggtcaggaagacaggatgtgcatggctctgtggatctgcatgagctcttgcttgtaaggctgagggtctgatcaatcaacctatgtcaccaagtttgggtcaccccacttccccaacatgtggctcttaggaaccgcagacttttgttgctgaggcaacccaggctaaatttcttcacttctgtctgctgaaggcttatttttaaaaagtcataattttttaaagtacgaaagcctaagtacaatgagacgataaacatcagctttgctctggatggaatctgggaataggtgtgcagagaagtgatggaactggcctggccctgcctgaggccagcgagtcttaccacatttttgcccaattagggccacttctgtttccagatggctgacctactggtaccaccgtgatgagtcagcgctgtgcctcaggtggggccctagtggatgaatgatcctccgcaattttgctgcgaagggatttattccc

SEQ ID NO: 448880 - DNA, 733 bp, Homo Sapiens
  misc_feature (463)..(464): n is a, c, g, or t
ttgggatcgttgatcaatacgaccacattctgtcccttctcaaaggctaagttccttatttgtcacccggatcctatatattgaaagacgacgcaaggtgctaaatgttaaccactagtcaagttaggaatgtctgaagaaaatatattaaccttgacataaagaagatgtttttggtcaaatttcagacatgtattattataaattaataactggctccatccaccaggttaaagatgaagggagggcctaagatgtctctagagtttatatacacacaagtgagtgtcactgttttgttttgtttttgacctatttttattaaatattgcttccttggggtgtgtttataacaactcccagaacatttcatgtaaggattcaaagcggtcatattaaaatacagcttcaatataaagtttatcacagttttacagtattcaaaaatgacagacctgccttnnaaaggaacatacgtaaccaaaaaggactattacacccaaaacataagaaaacaattaaataaacaagtttggcattttcataactttatagtataaaacagaatattaaatttattactggcaaacggacactgatttatttcctttgaaatgtgtcccatttaaacacactatacaagttcattatacaaaagatggatgatcattttgatgaaagaagtgcaccctgaaaatttttgccagtttagaatatttagctcttaaagttt

SEQ ID NO: 448881 - DNA, 466 bp, Homo Sapiens
  misc_feature (167)..(176): n is a, c, g, or t
  misc_feature (261)..(261): n is a, c, g, or t
  misc_feature (405)..(405): n is a, c, g, or t
  misc_feature (449)..(449): n is a, c, g, or t
gaaacagggtcttactctgtcgcccaggctggaatgcacaacccagccccaaaggcacagaaatgtcactgtcacttcacaaagctccttgcatccctgcgcagtcaaggtaagagatgatgcagtgagatttaagaggctgaaggcgcgagtgcccgggaagccgnnnnnnnnnnttgggcatgtgggaccccctccatgttgacagtcgaggcatacggcctgcaggtccacgcttacttgctgtccatgctgtcggtntcacaaagctgcatgttgaccagcctatctcccttttctcctgggcacaccagaagactacatttcctaggccccttgtatcaaggtgggtccatttgggtagttttagccaaagcaaagtatgaaaaggatttttcaccattnagaggtttgacccatttcagggtcacacaagcattttttcgttnttgtccctgggaacttt

SEQ ID NO: 448882 - DNA, 1149 bp, Homo Sapiens
  misc_feature (126)..(136): n is a, c, g, or t
  misc_feature (968)..(980): n is a, c, g, or t
gacagatacttcacgtagatagtctttattccattgtattcaatccagactcatcgattcagaaatcatataatagctggtggtcaaaatgacatgttgagatcattgttgtttcattgtttaagnnnnnnnnnnntgcctgtacctacaatgtgattgctttgtattgtgagagtatctttgttgcttgctctgccaaatgcagtcttggttctaagttcactgtgaccacgaagcagctgactgtgcatcacgcagtcacaatattgtttttagggtgagggtggaggactgtgtgtccgtggattactcctcctgctggtggattgcagatgcattattaggtcatactggctagaatgcagcttttctcccaccataacatgaaaacagtgtaagaacatagggtgctttgtgcatagcccttctctatgtaagcagccatggcagtcattaaagagaaaggagtagctttgacattaagctccccagatccctgctgctcatacttctggcaagggttcccctctctcatgcatgaacaggggcatccaaaataagaagctctccattctgtggtggggaaagcggagaggggagtgggtgaagctgggaaagtaaaggcagcacgttacagaaggaagaaaggaagccagtaactgagggcccactgcctgcccggccctgggccaggccctcaacagaagccatctcatttaagccctgcaaccaatgagatgcacgtcatcattggctcttacagacaagaaaactagactcagaggggctgagtccacatcccagacagctcactgcagacacaggtggagtggttcctacaagacatccagttttaacaacaaagagttattgaaatgcatgggtagaaattgaaccaggcaaatcagtaaagtgattgtaaaaaagaaggactagcttgcctggagatgatgtttcttgcttttggnnnnnnnnnnnnngtctctgaaatttgattcttactacagatttaaaactttctacatattatatgtaggagctcctagtgtttttgagaaattagactgtacctgtgtacacttctaaggtctacatggacctatgtatatatatctaagacctctgatcattaaaacctataaaaggttg

SEQ ID NO: 448883 - DNA, 532 bp, Homo Sapiens
  misc_feature (409)..(409): n is a, c, g, or t
ctgtgaaaccatgaaaatacattttttaaaaaaagtttccaggtataatacacaaaagcaaacaagtttatcttaaaaaataccaagtatcacatccatagcctattcctaattataattacttcttaaagcaacatttgtctttgtttacaaatacagcagcaggtgataaaacctagtatctcaaactgattgcttacaatttataatacaaacatatgtatatgtctcaaatcacattttaggcagtttaacttaaaatgcatagacaattacatacattaaatttgtcattactgtcagtgaaaaatcacaatttcaagaaggaaaattacaacaaactcatagagcacacataagaagtcaagttcacttaatgggcaacaagtcagtatctgctggatcagtngacaggcagtggaaagtggcctttatccaggggtaaagtgaagaggcaaactatcctgttactttgcacacttgaattgttgcgctggatcaacactacaatcttgaaaaacattaaattctt

SEQ ID NO: 448884 - DNA, 1789 bp, Homo Sapiens
  misc_feature (65)..(65): n is a, c, g, or t
  misc_feature (90)..(91): n is a, c, g, or t
  misc_feature (123)..(123): n is a, c, g, or t
  misc_feature (131)..(131): n is a, c, g, or t
  misc_feature (147)..(147): n is a, c, g, or t
  misc_feature (164)..(164): n is a, c, g, or t
  misc_feature (173)..(173): n is a, c, g, or t
  misc_feature (184)..(184): n is a, c, g, or t
  misc_feature (204)..(204): n is a, c, g, or t
  misc_feature (223)..(223): n is a, c, g, or t
  misc_feature (229)..(229): n is a, c, g, or t
  misc_feature (238)..(238): n is a, c, g, or t
  misc_feature (249)..(249): n is a, c, g, or t
  misc_feature (267)..(268): n is a, c, g, or t
  misc_feature (284)..(285): n is a, c, g, or t
  misc_feature (304)..(304): n is a, c, g, or t
  misc_feature (321)..(321): n is a, c, g, or t
  misc_feature (340)..(340): n is a, c, g, or t
  misc_feature (727)..(765): n is a, c, g, or t
  misc_feature (1283)..(1291): n is a, c, g, or t
cgatgagtaaatcttggctggagggagaagaacaatgtggatttgtataatagtagaatcccatntataatccagctgcaacggtccacnntgatcagtaaaaatgccaggagggtcaaacanaggtttcnttgaaagcacagcacnagcataaaagcctattnttaacaatngcggatacaanaggtaactgctccttctatntcccattaccacttttccnataggngttctaccnatatatatttntgaggcaggaaaatgagnncatggatgaaatattnngacactaacaaaaatacanaataaaattggaaagcnttaattttttccaagcttngttaacaatttaaaaaaatttttttatttaaggctttaagtttatcctcctttcacattaaagacagggaaagaaaattgtcaaaaccgaaaaccaaaatcatgagcttggcacttttgtgattaatctgaaagggtgtctactttcttacattatttacataggtttataatgacatcaaaaaattttcgaaacttagtacatatatttccatttacataattttgtgtctttgatatgggttattttgttgtttatgtccccccttttatttttggtttaacgcacaccaactttaaactgcacgtgttttgtgcccaaactccctgcatctgtggctatatctgtctttttaagcaagcccaagagtcattgtataacacgttnnnnnnnnnnnnnnnnnnnnnnnnnnnnnnnnnnnnnnnaacaaaaaagatggggagcaaaaaatcaactcaagtttacagagaacctttacaaggaaaatatctcaatacagacaagtgaaaatgatgtgtcaaaatctcttatttccatatttacatttataaaagaactatacaatagcatcattgttcaaattccagctcccatttccaaaggatgctcagtccaggagaaaacacaatggggaaagtgaatcaacaagagcaaggtccgtggagttctgccctggcctggtctccaatggggagtggggattatagagggtgggaggtggggggtaagaagtggggctccgagaggatggggtgtggggacatgtttaagtgaagaggcccaggcagcttctttgtgttcatctgtcatcttcactttaggaattctgttgcaggttttgctgagaattggcttgctagcttgttgtatatatgccatgcagtttttacccttttgaaaattagatcttcatgccactggagtttgtcatcggtagtaaagnnnnnnnnntcatgccaaatcatttagaagatattaagtgccagcaggctgagggaaaaaaaatcatttactattttttttaatgattcctttattgcatttaatttttgtgtgtgtgttgttccttcgtccattagggaaaaaaaagattctggaacagttctttttatagcatggtcttttgccccctcccccgtttactgacaggtggtgaaaggtgttctttgacattatttccaaaagagacagttttcttttaccccatccttgtcaccccaactttagctccgtagtcattaccacccaaaggttttgtttacaaacttaatagttccagtaacactgctggcgagtatgtcatacccagaatccaacagtgcaagggggtgtccatccagcgcctagattcagatggggccttgttgagtaggatcgaaccttctcttcttgacatttttaaatccccagcctgtgcccccaaggacaatagctgctaccaggatggca

SEQ ID NO: 448885 - DNA, 406 bp, Homo Sapiens
  misc_feature (353)..(353): n is a, c, g, or t
tttctgcaagatgaacgtttattagcacacctgggcgtgccacatggaacatgtatgcagacagggatccctgcccagggggttcacaatctacacaacacacgacacatacacgcaggacacagacacggggagcggggcgtcttcacgggaaacagatggtctggggagccacgagctggggtatcggcgtgctcaaggcttgtccttctggttgtctttgcgtgggagggagaggagcgcaggacgtaacccagggacagccttccagaaagcagcagtattccaggggggggattcacagggagaaagaaaacaccagagggcggtggtcccaggtacagggaggggtnggggagcatctcagagcaggcatggacgaagacagacccagagaagcaaaaat

SEQ ID NO: 448886 - DNA, 1016 bp, Homo Sapiens
tcgggggccagggaaaaggggtttttttccccccgtgttgggccttgcgcccgtggcttgcccagcttcggggtggccttctggtaggcccttgggggcatagcgggacacggcataggggccctaggctgggccgcggagccctgacacctttttttcccccactgcttcctctgccttagcttctgtctctggctttggcttcacctcgggccactttttcagagcaagtctgccggccccatgtgtggcagcgtggcgcgctgccctgggcgcgtttggaaatgtcttggtacaggacaggcacttgtagcggcggcccgagcgcttgtagccgggggctggggaccgggcctctgcagcctccacttccatggccttggtgaacggggtttctctgatgagacttgtgctgactccgtggcgtcggcgtcggctcctcgcaccgacggagcccggaccctgccaaacaggggccggcgctaggacccagcggggggcggggaggtgggaccggtggcgcggcgagcggaagtgagggatcttcctcagctaggaaggaagggaaagttcccggggaacctccagcctatggcggcagagaagcatcttgcaagaggtctctgtgtgtgctgaggcaaggggaacgccaggcaggctgacggtatacgcccgccttgtgttagtctggggccaggtcaccggcaatgtcttcaagaaccagaaggtgggaggacaaaaaggccatgctcaagctctgcaaaacctaagtccaattatattccacaacatttcctttaatagcaaggagtgggtttcacgaagttttctccatctgccttgggaaaagtcctccagagagccccacgaaaagtgtcaccaaagtactgtggccagggctgtagaatctttttctccctttctgcgcctattcaatatgcaccggaacgattctagctgctcttgccggaagtgtggctagcatagcgtgcaaagatcccgggaattccggaccg

SEQ ID NO: 448887 - DNA, 516 bp, Homo Sapiens
  misc_feature (497)..(497): n is a, c, g, or t
ttttttttcacggtggcattctgggtttgggttttattggctttccattgagaaaggtggccagtgggcatcaagggtgccataaaggcccacagagctttgacctggggaccctgcttgttttccagaagtgacccaccaggagaggtggaccagagagctctctgcctggagggctgtggctggggagcacgaccggatgatgcagagctggaggaaggcgtgggtaagtggccgcagccgggcaaagaaaggagggctggagccaggggcagggcacctgccacaatccagtggatctttcaagggccccattcagcatgggaccccacttgttccctcttagccccggagcagtttcctttatgaaatctgcaacactggggggggaaatcccacgtcttgttgctgagactgcaggagatcaaggggcatctggccccagcccttaaaagagactgaagggaggcgagactgggagggactcacaggtgggngctgtctagttagatgggc

SEQ ID NO: 448888 - DNA, 2142 bp, Homo Sapiens
  misc_feature (599)..(609): n is a, c, g, or t
caccatttttgtaaaaacattcttcgggtatggtgtgttccaatggatatatgccaacctaatactgggttaaggtactgaagcctggtgatgtccccagtgcctgtttttcaaagggattcacgacattgattggattacaccattaactgatgcatgactccgatattcccttccccgactatgttcatcacctcttctctgttaactgctaatttttaaaactaaagggagtaccaggactagctggttcctggtaagaagttcaccccagtaatcaaaacttttatcagggatttttataattcatgaccccattccaagtggacattcacctcaggaagatgtgcaaaagaaaaagatgttaaattacagtcaagttatccagaggaggatgttacacaatcttataaggaaacgacagtctttttttcttcctttagtataaatacatttaccagcttagcagaaagtcaagctaaatttaagattgttcacatttgaaaatagtatcatactctctgatagtgatcaataaggaactcccgataatggaattttaacatagcaatttcatcaacagatctttgaagaccgannnnnnnnnnnaaaagagggtgagaacaatgattatgtttgcaaagttctgagaagtccatctactgtccaaactttggattgaagtccttattttgttttttcctttacttagagacaggtatatacagtgctgctgtaataatgaaacaaaggtgaaatctactgtaaagttgcacaatacagaaaactgttgctccatcttctactacataaacgtgtgactccacaggttagtaatgttgttgtcattgtttttgttaagttggaattattccatcacgtctaagacctctctttaactccagatcctccaattttttccacaattcttcacgctccttttctttctttttctcacgctgacgatctgacttgtatgtggctgtcagctcgtcaaacatggtgctgttcatttccataaatgccttcaacacattgtacaccaacgccacaatagccggattccaatgttcttttgaaatcctataaaggctggaaaacatgatgggaaggatgacgttagagttttcttctatcaaactcatgatgtattcattattccaataatagagtgctctttctgccacctgaaaatgggggctagatacacacttggcgatttgtttaaacaaaggttcttggattttaacaaattgtgaaggttcaatcacatccaatatttcttccagttccccaaggaacatgacctctttttgactacatgtttagggccaaaatttcattaaccccctaataactggttctgtgagtgaaggatctttctccagaaactgtactatacaatatgccagctgtgcatggaagagtgataagctcctgacagtgtgtaaagggatcaatactttcaccagaaactgtttgtgttctgccttaagaggtaaagcaaagccattgataatacttcctaatatttccagcagttcagctacaccattgaagtgttctgtttcataaacaaaccttagaaaaatattgttaatctgttttcggataaatgctctaagaccaagaaacttgccataaattctgtgtaagactgtttttaagtagtcccgttcccgagggtcttcgctgtcaaatagctccagaagctgtaatacaaatttctgatctatatattttttggcaatgctgggttggaattcttggctttccaaaaatcgtatgaaaaattcatatacaagctgtaagtgtggccacgatgcctcaagggtaggttcatcttcttctggatcaaattcattgctgtcactaggagggagagttctgaatatattgcaagataccattctaactacttcagggtaagtctgctctgtcaaacagcctctgcttattgtaatgtagtccaccagttcattaagagtggagcgcttgtattctttcattttaagatcagatagcgtgtccatgaagtcaaaaatgacacagcactgctgaagtttctttaggaacagttcaggctgctctgaggatggaacgtcaagtgtgtctcttccctcctcgcacacctcacacacc

SEQ ID NO: 448889 - DNA, 380 bp, Homo Sapiens
  misc_feature (315)..(315): n is a, c, g, or t
  misc_feature (326)..(326): n is a, c, g, or t
ttttttttaagttatgtggttatttccaacaacacgtaaaaaatcaatctgggggagattttgtcatttcccatgatttccttgtagacattcttaatgacagtctttgaagaaagaaaaacacaaaagcatttagtgttatggattaaaatgaaagttcagtattttactgggtggcggggggtgggtggtaaagagaggagcgaagttcccttaaaacatacaaaggatgaaattccacctactctgtctaagaattccaaacaattaaaacgcgaagtttgaataagaataagcttcaggatattaagaccnttctggacctntctaaagtcatgcctgtttattttgcatctgtcatctcaaatataggtctgtta

SEQ ID NO: 448890 - DNA, 1099 bp, Homo Sapiens
agtaaaaaaattttcaaaatatggaatggatttccaaaccccttaagtttttctttcccataatcccctaaaaccgtttccggaattttcagagttaatggacaggtttgtttccggattctcaaaattaataggaaagggttaatttggtttagtaaaggtgggtttgccagaatcctttaaatgggctttttaattggttccctgggaaatttaaaccattggtagttatgtgtttttgaaaccaccttgaaattgtcttacataaagtttggttgtggtgaatttatttaaagtattttctttgaaaaaagtttgctaagtagatcctccaatattaaaagaaaaaggtatctctggaataaagtaagaggattgtaatgaaagtaagaggataattgttcatccatcaagccaactcaagctagttctttctttccagtgcagcaacacattttagggcaacaaagttcagaatggatacaatggcctgttcagaaagcatgcaagttatatcagatcatttctttaaagtcagtgtgataaatttgttaactagactccgaccatagaaagagagagatacaggaagtcaatgtaaattgcagacatgccagctctgttggttcacattacagctacctaatgttgggcttaatttctttttcttcttcttcttcactatcatcaacctgttggatgaccagatcagcagacccatcttctacaatctccacataggatctattctcatcttcactcaagtgccatctggaatccttatctccatctgatggggacataagatgttgttcagcttccaagtcaatggggaggctgtctatgccaaattctgcaagacactcattacacagtctgtagcgcctggttccctcctgtaccacttgccctgttagatctgtcacatgacgtttacattttctgcagatgagtttacatgcctggtgaattgttcgaaaatggctacttagatggtctagcctgctaaatctttttccacaagcttgacatggatagggcctttctcctgtatgacaacgaaggtgcgctttaggtctccttcatccgaaatccggcc

SEQ ID NO: 448891 - DNA, 1258 bp, Homo Sapiens
  misc_feature (380)..(440): n is a, c, g, or t
  misc_feature (566)..(578): n is a, c, g, or t
gttttgggggccgctttatctttccggggcggttgccccccttcccggcggggggccgggtttgccccggtgcaggtttgctgtggggccctttcgttctgaccaggggaggttctgtgtgggggaagctccccccggccaggtagggggtccggcgcggggacggagccacttcctccctccctcggttgggttttctttttaaatgccaaaagggtcccccaaaaaggtggcgtcggggaagactccctggaaagttgatcccgaggagccccgcccgcccgcgtgtttgccaaagtgccaaagggggggctctccgcgggcgggagtgtttggggttctccttcgggggcttttctcattgaccggaagcagatggnnnnnnnnnnnnnnnnnnnnnnnnnnnnnnnnnnnnnnnnnnnnnnnnnnnnnnnnnnnnntgtccaggcgtgccacgagaacgcagagcgcagcaatggatataaatacaaatacagcagcaccagcctgtcttcttggctccgggcagggtgcgccgatgggaaacccccaatcggctgggtgannnnnnnnnnnnnggaggggggagctgtcccccgcagcacctgcctctcgagtcttcctctcccgctgctggactgacgggtggggcgaggaaggagggtggatgaggcttgagcaagcgtgggtcgcccggcctcagaggaagttctcccggctcgccgaggagccgcgtccggccgtcccctgggccatgccggctctgttcgctccgagccccttcaggcgcgcctgccgacttagggctcccggagctcgccggccgcggagggcagcgcagcctccacgcggcgccgcaggcctggcaccggccgcgtccccgcctcgctcttctcggcagccgcctggcacttgcaactaacttcgcccaagtttcctgcgccgcggcgcccctctcggcgcgctcctgggagcgtgcgcccgcgagtccgccgcgcccggggcccctctgtcctcgctgctgtggccagagccgagccggcgcaggggcggaggtgctgcaggagagttaaggaaaacgggccatcacctcagttcgcaggtccgcgctgtggcacctcccgctctccccactcccgcggcgcagggggccccttcccagcccaggccgccctctgcaccggctcaggtgagtgtggctacctgcatgtgtgcgcgcccggagccaggcacatgggtgtgcatgtccagccgcggc

SEQ ID NO: 448892 - DNA, 917 bp, Homo Sapiens
tttttttgaataaaaagtttccccatttatttttccttccactaaactgattgaaacatccagaacaagtgatgaaagagaaaggcactaattaggtaatcaatttaccattagattgtaaatttaatttaaaataaaatgtccctaaaatcatctcagtacttggcacactgacttaagatgtggggtgggggagcatcccttaacacattctttgttttcctggtaaatactggtggaacaagacagctgagaatgtatgacatctgaccatgaacatatgacagctgtttgtgccagtcatgtccaaacccatggctctcaactccagatccaaaaactctccccatgttttagacctcccacaccagcatttaggatttcttcctctataatcttgctgggtgctggtcttggcagggccatctactggggataggtggtttggggtctcagtggtgggcaccggcttgttcttgcctcctctgcagctcctcttgccgcctcgcctgctgttcactcatgcaatccttgaacgcctgcacctgtggctggcattgccgccagtcctggtgctgggccatgcactcctgcactgcaaagtgggaggcagcacagccagagcgggagatcagctggtccagcgggtcctcctcctcatcgtctttcttcacccgttgggtccaggtatggccttgagggactgaggttgacatcctggggatggggagtcgaacaggtgggagaagagggcccgaacgcacgctcctacgcggcggcttgggtttcgcaggcggttggggatcctctgtacatcctttcaggaaccatgccctcgtggggagcgtgcacacggaaggggcggggaatgtgaaaaagtcacgttttcattggcggcctcttggtgttgagcccac

SEQ ID NO: 448893 - DNA, 1068 bp, Homo Sapiens
tgagccaccgcacccggccccagtttggttttcaactgaaccttaaaaaagcagagcccaactatattgaagacaaaggtgaaaggaagatattaactaggcaggtaagtcatcagttggttaattctttctctagaacttgagaagttagaaaaagctcattgaaaattttcagaaacaactgtgtacacgaagaggacagatccgagggacaccttacccacagagatggccgggagtgtcaagagctatgcgcagctagcctttgaggtcagagggcaagaaaggctgtcaccagatgctcctacgtttccattacattcacagtttctttcacaaaacagcattcgaaggagaagggaaagttcgcacattactcccagccattgtctttgatcatatgagcaagctcaatgatgaattttccttccttatatttctgactgctctcaaaggcatgctcgtatttccacccgagcgtggtcttgcagttctcgcagtagatgtcggcaaccgcatgcagcccggtgagaaggaccctctcctctgcagggccgcagcccacgttcaccacggaattgaagaggtaggcgcgtccctggctcccctgaaaggacttggagatgagctcgtcatgattggccaggtgtgctctgcagtggatacagctgtacgttcggtgacagttcggcagatacgcttggaaagttttggactttgtcattttcaccatctctcctgggcactcctcactcagctcagggctggttctggaagaaccgtggctctgctggcctctctgacaaaagcaacactggaaaatgcacgcaagagccgtcgttgtccaggagggcgtgtggcactgtccacacagctgggacgagagaaaaacgtaacggccgctccgcggtccgcgccccggcccgcagcgcccatccggcccgggccccggtcagcgcgggctcggctctcaggcgttcccggcgcggcccgggacgcgctgaggccgttaacgcctaggcagggcgcgaggcatcctcccgccgccgccccgcggccgcctccgct

SEQ ID NO: 448894 - DNA, 1768 bp, Homo Sapiens
gggattacaggtgtgagccacttgcacccagcctaaaagtcattttaatttgtaagatatgtttactgttttagagagacagaggctaacttttcattttcaaggactgctgaacaatcatccatgagttcttgaagttgaataacaggaaactgtacttgtttttcaaaccatttggctactgtaagaagctgctggtcacaaaacgcacgtccaataaactgcagtcctattggcaacccttggtttgagagtgcaacagggatactcactgctggcaatcctgccatatttacagcttgtgtaaaaatatcatcctgggcacttcgggttctgttgtcctctttgatgaactccaagtatggtactgcctcactcaaggtggtgggagttagcaagacatctactccagagttaaaagcatttacaaagtcattagcaatgaggcgtctcactttctgtgctttgacaaaataattttcatagttttcttttaataagaaaaagtttcctgagagaattcttcctctcaccacatcattaaacccttctcgtctggttgcagcatacatggcttcagtggacacatcaatgtcacatctgtgaccatattgtagcccatcaaatcttgccatattcgatgccacttctgatgtgcacaatacatggtagcagacaattgaataactggtgtgaggaagggatacttcaattactttggccccctcagactcaaagaggtcagcagctttggaccaaagagactgtacttcacttgataattccggtacaagagattcctttggaagtccttatacatagtttgcctcacatctgccaaactgggaagccatgaatggtttattaataggtttcatgtactgtggtagagtccctggggtcaggttccggccaggtgcacccaacacaatttgctgcatcatccacacatctgggttaagattcctggcacatccatcgaaattcaccaggggaaatgagaccatgacgggaaactaagccatagcttggtttgaaacccaacaagcccacagtgggcagcaggatttctggtcgatcctcctgtatctgatcctaaagcccgcgtagcatgtgaacgccgatacagcagctgcactcccacctgagcttcctccagttatcagccagtctgaatcttcattctcgctgtggggattctgcttcctcttttctctatattgttttgaataactccaggggtttttaactggtccaaatacaccatctgtgctcccagatcccatagcaaactcatctaaatttgtttttcccattagtagagctccctgatccaacaacttctgaactactgtagcattataaggtggtatataacctttcagcatatttgatgcacatgttgtctcaatgccagaagtgctgaaattgtcttttactgcaataggaattccatctaaatccccaagtgactgtccattcttatatctcttttctgattcttcagcttgttttaaggccacctcttctgacacagtaatgtaggcatttagaaacttggtcttcttgataagagagagacatttttgacagagctctgttggtgtaatttggccttgtttcagtgccgcagaaacttctcggaggctccggcccagcatggtcctcgtgcccagcctgccaccacaggagccaggcaagggggaaaaagaggtcaccggtcgctagtgatgttacatgggcgcagccatctttaattgtcactccc

SEQ ID NO: 448895 - DNA, 690 bp, Homo Sapiens
  misc_feature (156)..(165): n is a, c, g, or t
tttttttaaaatgtgtaatataaatttattctgtgacattttcctcattgaagatattttaacatagattaaaatacatcaatatttcatgaaaaataaattctagaagaatttagataatatctgtaatgtacatgatttgaccctgaatatccnnnnnnnnnncacttcaaacatcattttttaaaaagtaacataaaatgataaggactgcaacattcttcatatatcttgtgtctcataaattttaattcaactgcccgttcttttctcaactatgtatgttaatggtatttgctcctgtttttgaataggaagagtatccattttctgtttcttcgtgatatttaggtcttctttctctgattcttcaagaaaatgcttcgtgctgagtttggaatagtaatcgggggtctggattagacagtggtggacaattacacatctctctaattttgagagcctgaggtataagtctatccaagtactcaactcgattgccatgagaagggtgtgtagataaccattctggcatcttgggttggccatgcaggctatcaacgaactccatttgctgccaaaacactgaactggctcttatgtctgcacaagcctttgcagcaagcagtagtccaattttgtcagcttcggcctccaattttctgctgtatggtctattaaacatatact

SEQ ID NO: 448896 - DNA, 411 bp, Homo Sapiens
ttttttgacatccactgcagttttatttaagaggtgcaaatctggaggccatgtccagaagtccagcgatggcggggacagactgcagagtgcccctctgcagagtgtccccagggcacaaggggagtgaggagggggctgagctggtgcagaggcttctccgacaatgtggggggctgcctgcactgcagcctggggacatggtgcatccccacccatccagggcctgctcttcactggctcctgctctacctgcccattcactcactcactgatcaacagatgctgggcagaaatggctgtgtccctgggcctttgagaagcagatgcagcttcccttttccccagaggcctacagtcattatgggtaccttccacagggttcgttttgggctgcgtttaaagggaggg

SEQ ID NO: 448897 - DNA, 802 bp, Homo Sapiens
  misc_feature (697)..(729): n is a, c, g, or t
gcagtaaaatgttttaatgtaggaagcactaaagtctttggttccaacaaattaactcagagaacaaattatttgttacatatgtatacagatcaatcaccaaaagtacacattataccaattgctaaacactgtccataaagaaaacatttcaaatgagaagcgccatcgcggttttctccttctgggccacccagtggaatgagggccctcgccaggggctcttcccagacgtctcttcacaccaaccggcttccttctgatggccccattttcctttaaaaccagttctcatcaaatagggtgttttatgcaccctggcaaatgatcattttgacaaggattaaaactgtaagctaaacagatgacacaaatgacaattgggaataatttttagtggggacagaggctaaatactaccccctccccttttctacttctaaccaatatcttgagcattcagtgggacaatacagtcttgctgggtctcttgaaatcctctagcaagaagccagccaggagaagacccagaagtcccacacctgtggggccaggatggctgcttggttgctaaacccagacagggtccttccagtgcatctgcccctgtcaggctctgtctcgagactggggatcttccaggctggcttcattcgcggatccactgcgcaaaccttgatgaacctgaaaaaagcannnnnnnnnnnnnnnnnnnnnnnnnnnnnnnnnctagaccctgctcgcacccagcgccacgcaccgctctctgggcgggttcgagtgcgcgcgccgggcgggcccc

SEQ ID NO: 448898 - DNA, 794 bp, Homo Sapiens
tctgagctaggttccaatatattaactttcaggggcccactgcccatcccaaccctcccctaacaaagtcccctgccggtccctgttccctcagccagctgcaggaacctaccaacggccaggaagctgcctggtggtgtcaactaagaaaagggggagcatctgcgccgtcactgttggggagggggctctattagtggttttgagagcttcacagaagccttccccctcctaaacctccccagcttcgaagggggagaattccaccagcagccccgtcagggacctaagctgggttcagccatgcaagcagctttccaggtggaaccccggccgcgagcttcccagcccttctagagcgggagatggagagcagggtggaggcaggcggcttgcggcgcgcaagtctcctcttccccggccggctcccggctgcgagctctgccagctcagaatttgcaaagaatctgcggtttggccacccacggcagcttcagcttaaccaaagaatgagccccaggcaaagttacccccaggcaagaggcgatgggtggaggaggaggtacatgcagcgggcagccgggcccatagccagcctccttccgccgtgcagccccctccccaggggccagagccggccgaagactgggggtagggacggagtcgggggacgggatttttttccagagcaacaggtaggctggtgaggaggcctccggcccagggagaggcgctgagaaggctgcgggtgaacgggagggtcgagggcacacgtgagtgacagcaccttgcac

SEQ ID NO: 448899 - DNA, 922 bp, Homo Sapiens
  misc_feature (58)..(58): n is a, c, g, or t
ttgcccagcacggccctccaccgcttggtcaggccccgcttctcacccacccactggntgctgccggcacctcccagtgcataggcgaacacagagcctgagttggtgccagcccacatggtgggcccgtggtgggccccatctcgaaggaatgtgtcggcaaagtataggcaacgcacgacacccgacaaggagtcatcggcagagcggggctcaatgcggcgctgcacgggcgtcatctccacgtcgtgggggcaggcctgctcagccagctgtgcattggcttcctgcaactatgctgctggcattagcagccccgcttcttgccagagacacgactcttgcgaatgcgccggaaagactggcgcagtgacttcttgagagacttcacccgggagagcggaccctccatggccagggagtcattggggtgaagagtgcacctggccagcacagggctcttgcgctggtagtcgaagaggccaaagccatgactggtgccaaaagccacgaggctccactcggtgtggagtgtgacagcggttacagcagctggcggcaggcactgcaccaggacacggggctggaagccagcaggccagggcagcggccccgtgcgtgggctcagccgctcgtggcccttccatgtgaagccctcgcggtcctggaggaggtctatgatggccacgctgaccgcctgctccaccggcacatcactaagctccagtaccagcacctggcctgcagtgccagccaccaccatctgggctgtatacttgcagagagcaaccttctgcacgccaagccggggatcgtcactgtagggatcgaagcagcccaccttgcggaagggtggccagtcgtcctcggcagcctgggccaggctgtcagcgtgctcacagtctgtctggaagaggccagc

SEQ ID NO: 448900 - DNA, 891 bp, Homo Sapiens
  misc_feature (874)..(874): n is a, c, g, or t
aataagtgtccatccttaaattagggcttttcagaagcttcacctggttgaaaatatcttataccatggggcaattcgtgcagaatgtccaacaacatgtgtcttcttggtccaatgtagggctacaataacacagtccaggtaataaatcttaactcctggaattttacaagaccaagtgatcagctactactcggcaagttctgcctttgtgtataaatattttagccatgaaatagtaaaaatctataggaatagctccatgataaaaaattataagtgctggtccatcttctggtattttttccattccatgaacttcataaccatgccaaacggctgcatgtccatcccacagagttgccactgttttccttgcaccatcccataaattatgagagtaggcttctttcaatacattctttctcttataaatgtgtaagaaaataatagtaaggtagagaagaaagatagtaaagtaaggaagtattaaaagtattagtggtgtaaaaacccacaagagatagtttgcaaaattcaaatagtcctccaactgctccacaccaaaccattcttcgagtatgtgaatcagacaaatcatatagggcacagaatcctgtcctacaccacaggtttgatttttgtctatcatttttcttcaggtgaaaatgacaaattcagtttctttcttcattgccatagcaggtcgctaattttgacacagaagttagataaatatcttgtcccaaacttcaatgtctgtattcctagagcggcgacagaagctcttcgggggatcagtggccaagggggcggacagatttgcacggcggattcctccgaagcaacccgtgtgaaagaagccatccctaantcccggaccgtaccagc

SEQ ID NO: 448901 - DNA, 486 bp, Homo Sapiens
ttttttattgttggaaactcaacttttattctgggttaagcctctagataaaatcttaagtctgccaaactattattccccccaccttttctttccccaactatcaagaccattctaggaagtacgtcactctaccaaaaatgattgagttgtgttgggcctggggaaaaagtcgggcaaaaggagcctttcttgtggctgctgatagttaggttcatccaccaccgcactttgagctcgactagagtcgccatggggtttcatctgtctttgtggccccacagtgctcacatgttccacttcagctgtgccaataggtggtagcagattatttcgactcaggggcgtcggtgagggagaggagagcgagtcgggtgccactgggactcgggctcctctgaggatttcttccacagatcttggtgtttcagcacatgaatggctcgtgctgatcggatgaagagttcgtggtggtggattgcgtct

SEQ ID NO: 448902 - DNA, 504 bp, Homo Sapiens
  misc_feature (490)..(490): n is a, c, g, or t
ttaattttacaagtttattatagctcatacctgggaccgattaaggtgtcaacattttaaaattactcaagatattaaccagaaaagatgattatggcctttaaaactattggacaaactgatgctatttaacattgttcacagccatttaatttgaataacaaattttagattctaagtaggccataacttctttgcaaaacaattgatttataaaggtacagtttcagaaggtaacagcatgagactagtcttcctataggcacattttagtagactgcttttctcatccctggtcaaggagcttctctaactgatggttgatatttcgcagatggctttcggctcccagaagtgttcttgctttaaataacagagctggaaggctggatgaatcatacgtttcctttacgtttggttcttgagcttgaacatctgaataatcttgataaagctgttttaaattagataagaaatatgctgcattccnaagggaagactttc

SEQ ID NO: 448903 - DNA, 1418 bp, Homo Sapiens
  misc_feature (162)..(191): n is a, c, g, or t
  misc_feature (208)..(230): n is a, c, g, or t
  misc_feature (256)..(297): n is a, c, g, or t
  misc_feature (336)..(345): n is a, c, g, or t
  misc_feature (400)..(458): n is a, c, g, or t
  misc_feature (460)..(626): n is a, c, g, or t
  misc_feature (1222)..(1222): n is a, c, g, or t
  misc_feature (1379)..(1379): n is a, c, g, or t
  misc_feature (1391)..(1391): n is a, c, g, or t
cagtttcccggggggggatttttgggaatatttttttaaagacaaaagaaaaccctctcccccaaaaagggggtgggtgcgggttaatattccaaaaaccacccttttggggagcttggggggcccccaaagaaccccctgggggtgttgttttttaaattnnnnnnnnnnnnnnnnnnnnnnnnnnnnnnggggtaaaatttttttnnnnnnnnnnnnnnnnnnnnnnnttttttaacaccaaaaaatttggcgnnnnnnnnnnnnnnnnnnnnnnnnnnnnnnnnnnnnnnnnnnagggggttaaaattttgggggggggtgggcccaaaatgnnnnnnnnnnaaagaagggtttttttccaaaaatccccaaagagcggtttttccccccccggggnnnnnnnnnnnnnnnnnnnnnnnnnnnnnnnnnnnnnnnnnnnnnnnnnnnnnnnnnnntnnnnnnnnnnnnnnnnnnnnnnnnnnnnnnnnnnnnnnnnnnnnnnnnnnnnnnnnnnnnnnnnnnnnnnnnnnnnnnnnnnnnnnnnnnnnnnnnnnnnnnnnnnnnnnnnnnnnnnnnnnnnnnnnnnnnnnnnnnnnnnnnnnnnnnnnnnnnnnnnnnnnnnnctgtttggatttaaaaacactttatagtgtgttgtttttattgagcgctcacacccgaaggggtggcggcggatgctgtgggtgagtggggccgcctgagcctgctcgggccacatccacacatccacagagtccacctggactcggaggaaggccgagaggacacggacggtggccacaccacgctgcagtgaaggcccaagtgtgatggcagagaaagagggaaagttggagaaagagcggtatctgacaataacttttctcttggatgttaattttttggtctataaattggaaaggaaggctcggactgaaataaatacatttattctgagtaatgaccttttgggagcagtgtccgtcaactctgcttcgagagcgtctccacgtgagcagcagcgcctgtctcgcgcctcgccgaggcggaaccacaccgggcctccagcggaggcggctttctcctgtgtctgtgaagggaagtagcaggtgcgtcactgttcttaatggagcggacaatgatgccttttctctgacagacaaatgtccggcttaactatgcaagacaagacttggtcgtcacgttcgcgtctctagtntgattttgtcctggaatatgtacaagttattggtggccagccacggcaatgacattgtctactgggtgccaggctgtgtgcaggatcttcttgttgaaagtcagactggtcacactgatctcgtctttcttcgcttacctccgtcacacctttcggngttgaggctgcngcgcgatgctgtctcattcgaggcatc

SEQ ID NO: 448904 - DNA, 473 bp, Homo Sapiens
  misc_feature (437)..(437): n is a, c, g, or t
  misc_feature (451)..(451): n is a, c, g, or t
  misc_feature (463)..(463): n is a, c, g, or t
ttttttttggatttaaaaacactttatagtgtgttgtttttattgagcgctcacacccgaagtgggcggcgggatctgtgggtgagtggggccgcctgagcctgctcgggccacatccacacatccacagagtccacctggactcggaggaaggccgagaggacacggacggtggccacaccacgctgcagtgaaggcccaagtgtgatggcagagaaagagggaaagttggagaaagagcggtatctgacaataacttttctcttggatgttaattttttggtctataaattgggaaaggaaggctcggactgaaataaatacatttattctgagtaatgaccttttggggagcagtttccgtcaacttctgctttcgaggagcgttttccacgtggaggcagcagcgccttgttttcgcgccttcgccgaggggnaatccacaccgggncttccagcgggnggggcttttc

SEQ ID NO: 448905 - DNA, 281 bp, Homo Sapiens
ggccttgcccagcagccgagcccaggagaaacaagcctaacaaatacagggccggcgccagctgcagagagttctccctgactgccagctacactgaaccacaggaaagagaacgaaactcttccacattcttttctgaagccagacaccaaaacacaacaaagacagcattcgtgcccacagacgcctcacgtgcgaccacagcacagaagccacggtgttggcagacatttgccaagagccagcacaacgccccaaacggggcccctgcagggagggag

SEQ ID NO: 448906 - DNA, 1604 bp, Homo Sapiens
  misc_feature (98)..(109): n is a, c, g, or t
  misc_feature (1574)..(1575): n is a, c, g, or t
agggggttctcccccggggccacgggggccccgtgaggatggaggggaccccattcgggtgggcacaaaaaagggagaaaaggggattggaacccttnnnnnnnnnnnnggggacccttgtgactttcacccctggtttcggcagaatgcaccccccaccgggttaggggggtggcgacccttttcggggttcttgcggggcccggccccccaccccctgcttgctttgctttgcaccgcaccctggcgaggcctggctgcgcacgcgtgtaataggccgagggggagccgtggctgaggcgtcttgttccggaccgagagggtgggcctcttctgggctggtcgccaccttctctgtcacagtctgtggttcctaaccagctcagctcacaggggcgacagaggatctcctgttcccgcagcgcccagaaggctctgccacgggactcacggccctggccaccgcagcccagatctgcagcaggaaagccggtgcggccctggcttcccgcctctagggcaggtccagcagggagtgctcggcgtagagcttctgggagacgttgtagacacgctggatgaaggggagggcctcgcctagcatctgcacggcctgctccgggggccccacgttcatggcctccaggaagacctcgcgtgtgggcagcgtgcagaaggccacggtgacggcacggcgcacgacccaggggtggtaggcggccagcgaggcgttgtaggagtcggcgcagagcgcggaggtgcgtgcgtcctcggggctggtacgcaggcccttccaggaacagctgcagccagtgcagggcgcggtgcaggcgcagcaccgtccggcagccagactccgggtggtgggagcggcgctccaggtccaccagccggttgctcagctcgtgggccaccatggcctgcaggctgcggtagtgctcgctctgcgggccgcccctgaggcgctccatgatccgcagcttggagaccacgtccttggagatgaatgagaagatggtgcccaggctgttcagaaacctgaccaggcccttccagctggcaatgtaggggtccagcaagacctcttccttctcatcgagacactgcttgaaactgaccaggacgactttcagattgaaacctgtctccgagtcatccattttttgataggaacggaaatacagtagggctggggggctgtgtcgctggggtcagcttgctctgtggctcattttcgggcttcaggtgtgggggatggctgctcctgggcctcagaaagatgcagtcccatagacttccagcacgcccctcccctcctcgggccttaattttgtccactgagaagatggtctctgaggctctggggtttccttcttggtcaccagatattctgcgggccttgccttcctgcccagattcgagccagtggcaaacagaagctgccaggagcttctcagagctgtggctggtggctcgggaacaacaggaagggcagtggctgtgcaggaggcaggcagcttgccagcccaggaaggtgacccagacacctccaggcctttttctgtgctacccanncggcccaaggtcaggatttgaaattccgg

SEQ ID NO: 448907 - DNA, 1023 bp, Homo Sapiens
ccggaattcccgggatcacgtctcccagaagctctacgccgagcactccctgctggacctgccctagaggcgggaagccagggccgcaccggctttcctgctgcagatctgggctgcggtggccagggccgtgagtcccgtggcagagccttctgggcgctgcgggaacaggagatcctctgtcgcccctgtgagctgagctggttaggaaccacagactgtgacagagaaaggtggcgaccagcccagaagaggcccacccctctcggtccaggaacaagacgcgtcagccacggctccccctcggcctattaacaacgcgtgcgcagccaggcctcagccagggtgcggtgcagagcagagcaggcaaggggtgggggcacgggcccagcaagagcccgaaaggtcgccaccccctagcctgtggggtgcatctgcgaaccagggtgaagtcacaggtcccggggtgtggaggctccatcctttctcctttctgccatccgatgtgtcctcatctcaggcccgtgcctgggaccccagtgtctgcccaggtgggcagccttgagcccaggggactcagtgccctccatgccctggctggcagaaaccctcaacagcagtctgggcactgtggggctctccccgcctctcctgccttgtttgcccctcagcgtgccaggcagactgggggcaggacagccggaagctgagaccaaggctcctcacagaagggcccaggaagtccccgcccttgggacagcctcctccgtagcccctgcacggcaccagttccccgagggacgcagcaggccgcctcccgcagcggccgtgggtctgcacagcccagcccagcccaaggcccccaggagctgggactctgctacacccagtgaaatgctgtgtcccttctcccccgtgccaccttgatgccccctccccacagtgctcaggagacccgtggggcacggaacaggagggtctggacctgtggatcctaaatctccgggccgtaccagcctgctt

SEQ ID NO: 448908 - DNA, 443 bp, Homo Sapiens
gtgaatcctaaccgctgattttatttaaccgaatatatccaaaatatgatcacttccaggtcctcagtacacaaccaccacgagggaaacccagacctaggtttccggcgccgactctgaggcccgggagttttcttcttgcgtcaccccagcgtgggcaccccggcccgcccccctccacctggagcgcctctgccttgcccccagacccaccagccaggagccagaggagggaggctgaggggcggggacgaggaagaggatgtggctggtgccctgggtggccgcagccgctgtctttcacgcctgtctcactccacacggtgccccgaccccagggtcccgaaagtcccaggctgttggacgtggtctgggtggggtgggagggacgacgctggcaaaggcgggctgagaggatttctttatttcgcgttcagacccaa

SEQ ID NO: 448909 - DNA, 1181 bp, Homo Sapiens
  misc_feature (77)..(85): n is a, c, g, or t
aaaatattcaaaaaacggcggcggcgaagggggggcggctcacaaaaagggagaaaagggatattcacaaacgggtnnnnnnnnnagaaattagtaaacagttttacgggggaggaggggtctacctcatacacgcgggccgcgaaaaatccagtgggggcccttcttttggcacaacataacctatagatccaggggaaggaaacccgcccctttttccaaggggggaaatggcggggggttgcctaccagtgctacctccttggtcctttaccagggacatctgaacccaggtgcggaaagcccccagaggacttccagctggaataggcactctcacaggcctgcatgaagcctaccctgtttgggctttgcaggaactcctggaaagaagagaagaggaggtaatcaatggcgctgaagtcctcactactcttgttcaggcggaactggaggaagaccagctcccgctttttcacttcccggggcccctggacaatcagggcagatttcacagtctgattggagaaggggtccgtgtagttgatcctctgggtggtgcaattcatgtcacccggctggccagggcttgtcagaggaggaatgacctcgtaatggtgcttacagctgagcaactgggcctgaccggggtacaaggcaatacctggggcatcatagcgatccacttccttgtaagacacagacatgacagggtgcttgagtttctcacgaaagtctgtgatggtccggtagaccaggaagacggccacagccatgagcagcaggtagatgaagatgagtaggaccgagaagacgttcttcaggcaggccttgctgaagcggatgctgctggaggcggactcgctgtccaggcctggtaagatacccggaccttggactctgaccgtctccttgtcctgctcgtctgccagctctgagttctcaaccacctggaccaactcctcactcagctcctggtaggatgtggagcgctcctgccggatcatggcactgaccagagcttcggcacacctgagaccgccccagcccgcggcgcacggacgcagcactgcggccgctgcacctggacctaccggctccgcgaggcgaaaccggtccggaggggcgtcccagagaccaggcgtggcgatactcggcgcatgcgcactggccgctccgct

SEQ ID NO: 448910 - DNA, 475 bp, Homo Sapiens
  misc_feature (236)..(236): n is a, c, g, or t
tgggcctgaatagtctggttttattaacacttttaagtacaggaagtagcttgggcagggccaagcctgaggccaagggtcagagcagcaggatgaatggacagacagccagatggatacacaccctaggatactctgcccctgcaggggccacaacctccccaccctctcccaccagatgcataagctgaggcccaaagcccagaggtgttccccacaacaaaggcaggcatggnctggggcaggcaggtaggccagctcacagcagctgcctgcaggcgagctcatctccagcgactctgggataccagaggatagaacacgttgagcacgagggccaccaaagccgccacggtgcccaggacaaagtaccggaggcagccctcatctggtgtggtagggccacgtggtagggggcccacccagtcttggggcccccagggacccaggggcccagacccctcaggcaccggct

SEQ ID NO: 448911 - DNA, 436 bp, Homo Sapiens
gcattttaaacaatttattgcataaaataaggtatgtatttgaatatatttcatgctatagtgaaaaaaatctaaattactgaagaaattgcactgctggaggatgagggcagcactgcatgatactggatccataaatgcatgtgttcattttctcataaactatgcagcctaagagtagcagagtaactcaaaataacaagtcagaaatgctggaacttaatcttccctatcttatcttccatccaaaagtctccaaaagcttcagcgatgcactgctatttgatgcaaactcctgcaacaataatgacttttttgatttacgtaagttggtaaaatgttaggctacgtccccaaatatcttttcttggatgcttctggggaccactccaggatattccttgggcctgattacaatccacaggtgaaaagacaa

SEQ ID NO: 448912 - DNA, 460 bp, Homo Sapiens
gttcaaattgttttatttccatctttaatactagtccaaaacagactgatacccatgagcatagtttaaatgtaacaaagaaaagagttaaactatatacattaagtaaaaaggaaagaaaatcttttctataccaatctttccctattaatgcagtgtctgattagaagaacacatctttttctcaatttaatttaggataaagtaatagaacttttatgatcaacttcatacaccgtccttgaggagaaaacaaatttttaagtgggtgttaccacatttactggtgaactggctgcatggttgccttgtctctttgaagtctggctttcattagactaacaagaccaagtccatgaggcccacaaagaaatcaatggctgtgacatccaagggggagaggagagcacacacatcacaatgatgagagctaatgctcttaccctctgagtccatgtag

SEQ ID NO: 448913 - DNA, 475 bp, Homo Sapiens
  misc_feature (42)..(42): n is a, c, g, or t
tgtggattttttgcgcacagcagtcggggtcagtgtccctanccccccccactgttcaagggttagctgtactatatgatgagatgtgcaacatggttttgataagaggcagcaagggtttaggacattctgtggcatactggccacatagcgatttgcatcaggtcagatattctaagtcttagaaagcctgtgggatagttcttagaggaggagcagagatgaagcaacgcaaagatgcccttgttcgtctgcaaaatttagggtctctgagtgagacacagctcaagggggggactgtgagcatttggggaagggggttctgtccaaccaggcaaagcggggagtcatggctatcacagccatcttgccctcacattcaagaacttaccatcatagggacactgaagttatcttctcatatggccatataaagataggatgttatgtattgactatcccacagatgtatgcc

SEQ ID NO: 448914 - DNA, 876 bp, Homo Sapiens
  misc_feature (55)..(92): n is a, c, g, or t
  misc_feature (729)..(744): n is a, c, g, or t
  misc_feature (751)..(800): n is a, c, g, or t
acctgtttactaaagtatgcattctgcagactcacaaaacgtacacaaagactannnnnnnnnnnnnnnnnnnnnnnnnnnnnnnnnnnnnnagacggaaaagtagaaccataaacattttatataacgggtatcatattgtatgtatccttctgcaagctgcttattttgctcactactaatgacttgtgaggtttatccaagtggatactacgtagactataatgatatatgtagcttttctttcgttattttaactgctacaatatattccattatacattatacttggtttatccagtctcctgtaggtgaacattgacttggtctctggttttttctcttgtttgaaacaatgttgcaattaaacattcctgtaaatgtattctatagtactagtgctggaatctctctggaagatatttacgtagaatagtatgtggaatggttgggataagagggtggtgaatatctctgttttgctctccaaggggttataccaactgacagtctaccagcatgtgtcagaatctcctttttctacacacccatcaataattgggattatcagactttagcttttgcttagctgataaatgtaaaatgatatattgttgctgctttatttttacaatttctctgattgtcattgtggttgaacatctattcatgtttgtgggtcatttgggttttccttctgtgaattgcctgttcatattctttgcctgnnnnnnnnnnnnnnnnaattggnnnnnnnnnnnnnnnnnnnnnnnnnnnnnnnnnnnnnnnnnnnnnnnnnntttcaaataaattgtgcatcaggatgtagagagagtggaagagggagttcagaggcaccaggtgaccaaacgtaag

SEQ ID NO: 448915 - DNA, 417 bp, Homo Sapiens
  misc_feature (43)..(140): n is a, c, g, or t
attatttatccatttattcaatttttcgtagagacaaagcctnnnnnnnnnnnnnnnnnnnnnnnnnnnnnnnnnnnnnnnnnnnnnnnnnnnnnnnnnnnnnnnnnnnnnnnnnnnnnnnnnnnnnnnnnnnnnnnnnnccattccgcttttaattttctatatttttcaaacatcagtaacaaatttttagtacttttatgcattaagtgctggcagcttctttaaatgtaacccagactactttatgacaggcagtaaaaatatgtgaaggggctgctgtatgcaggtagtccatagtaagtatatttgggaataagtctaggaagggaattgcggcaattcctactttaattcttttaagccttacagttttgattgtgttacagcatctccagcttcaggaatgagtccccc

SEQ ID NO: 448916 - DNA, 565 bp, Homo Sapiens
caaaaacatacttcatatttcctcttttattatataaatatcagtttaaccttttactgtaagaatataaacgttttaagaggatctttgttattatttatacaaattcacaaacagtacaattaattgataaaggtctctgggtttctttaactccatggtcttgcatgttgctgtggagggttctaaagaaataacaacaaaaatccaacgaaaatatacatcctactcagaagtgatttctttaaagccacaagtcccaacccccaccaaaagaaagaaagtcatctattcctccatttagaaacggaattttttaaaacccacaaactcccattttgttaatagaacagagataagatatgagcttcatcacagccccaggggctctgcaggccagctctgctcctgtttcccacaggaagccgcactgtgtgacctttttggggggaaacttggaagagggtgagggtagggcagaatttgcatatataatcatcattttcaagacacagtctgcatctccaacaaaaacaacggttcaactctcattgctcccacatcc

SEQ ID NO: 448917 - DNA, 687 bp, Homo Sapiens
tctatgagaaggccattacacggtggacctgatctaggtctggcttccctgaggatgctgaagttgcccagaggcccagagaaggggatgctgagcacgtttgaaccactgaacctgctctggacctcgcctccttcccttcggtgcctcccagcgtcttatcctctttaaagagcaggggttcggggaagttgcctttgatggtgattcgcaggggcagctcccctctcacctgccgcgatgactaccccgccccatctcatacacacaagctcacgcatgcgggactggagcccttgaggacatgtggcccaaagacaggaggtacaggggctcagtgcgtgcagtggaatgaactgggcttcatctctggaagggtaaggggccatcttccgggttcaccgccgcatccccacccccggcacagcgcctcctggcgactaacatcggtgacttagtgaaaggactaagaaagacccgaggcgaggccggaacaggccgatttctagccgccaagtggagaacaggttggagcggtgcgccgggcttagcggcggttgctggaggaacgggcggagtcgcccagggtcctgccctgcgggggtcgagccgaggcaggcggtgacttccccactcggggcggagccgcagcctcgcgggggcggggcctggcgccggcggtggcgt

SEQ ID NO: 448918 - DNA, 471 bp, Homo Sapiens
ttgttttgatagttatgtcttttaatatgtattagaagaatacataattagcacacatcaaacctgtgatttcacagatatcactacttgggatgaaaatgatataggataacaatgttagacctcagatcaacctcaagaaaaatactgagtaaatagtacaggagggcaatttggaagtattattaaaaaccaatatataaatatcctatgactttgcaattccacttctaggaatcaaccctagggtaaactttcatacatatactttcacacagggcatagtgatgctcctgtgtagtattttgtaataggcaaaacctaaaaacagtcttaatgtccatcacaaaagacatgcgtaagtaaaatgtgggtaatccatatggatgacaatctataccagcaattaccagaagatgggattggagctacattaagtaacatggcacagatctcaaaaacatcgttaag

SEQ ID NO: 448919 - DNA, 495 bp, Homo Sapiens
  misc_feature (439)..(439): n is a, c, g, or t
cataatcagaaacaagttttatgttttgttttgctttttctaagaaaaaaagtagtttcagagcctggggttgctgtttgcattgggggctggacactcaggaaggagggactggcgcaggggaagggcatccgctgggaatagcacttgacccggagcccataggctgctgctcagtcttaggtcaccagcttcctcatctcaggggggtcaccaccatctgctagggttaccagaggccccactagaggatgccctgcatttgcgctgggagcccaccctggggcaggccacgctgggcccaggtgggcctctgaaagcctgcagcctggcggtgggttgctcagtggtctgatacctgagatcccccatgtccagctccaaaggggtggtggtttccttgatttctgtcccctccaaacaggaagttgtagtccanggaagttttgatttcctgcagttacatcccagccagggcccgtggaggaggggctg

SEQ ID NO: 448920 - DNA, 603 bp, Homo Sapiens
  misc_feature (293)..(414): n is a, c, g, or t
  misc_feature (555)..(563): n is a, c, g, or t
ttgtgcacataatgctttatgtacctgctgttaaaaattggaattaaacagaagtgggtaattagtaaaggctaaaattaaattgcagaagtaaactggcaaggattttttgtgcatgtcacattaaaatcatcacctacttttcaacgggagagatcataaaatttagccaactatttgaagtatcctttaataaactggggtctgaacatttgaaagacaatgcctatcctgtttttgtagatttttttgaaattaaaactttgtttcttggccagggatggtggctcatnnnnnnnnnnnnnnnnnnnnnnnnnnnnnnnnnnnnnnnnnnnnnnnnnnnnnnnnnnnnnnnnnnnnnnnnnnnnnnnnnnnnnnnnnnnnnnnnnnnnnnnnnnnnnnnnnnnnnnnnnntatagtggcatgagcctgtagtcccagctactcaggagactgaggtaggagggtcatttgagcccaaaggctgaggttgcagagaactgtgccactgcactccagtctgggtgacagagtgagaccctgtgtcagggaagnnnnnnnnnttgtttacaacagataatccaatataccaagagtctctcc

SEQ ID NO: 448921 - DNA, 1523 bp, Homo Sapiens
  misc_feature (143)..(143): n is a, c, g, or t
  misc_feature (248)..(248): n is a, c, g, or t
  misc_feature (260)..(260): n is a, c, g, or t
  misc_feature (278)..(278): n is a, c, g, or t
  misc_feature (288)..(288): n is a, c, g, or t
  misc_feature (401)..(401): n is a, c, g, or t
  misc_feature (579)..(579): n is a, c, g, or t
  misc_feature (1389)..(1416): n is a, c, g, or t
  misc_feature (1503)..(1503): n is a, c, g, or t
ccgcgtggtctcgatcacaggctgcgtcgccgcggccgatgcgctgatcatgtaaagccttcgtgaccgttcgatccgcgggggcgctgtggtgggttaatttcctctgagtcagagctttgttgtttgagcgtcgcggaaancgtatgcccagggtcacggggggtataagtagggaggcggcgggggagcgtgggataagtgttggggggaggcggccgagccgcgcgcgcaatgggagcggtgangagtgagtctcncgcacctataacctccgncttgtgtgancgggcggggcttatatcatctatggcccggcagcgccggtgttagccaactatagtgtggcgggttccgcagcgctgtcaacgagcatgggtgtggctagcaattcttattantacagacactggcggcgtaccggagaaggctcacaaggcgtgcttctgcggaaagaggggtaccaaagaggtggggataacagacggtgggcgccgtgtgtgtgttgcgcgtccctcggggttttaccgcagaaggacgcagcccgccatcatagaggggaagagtttcggggaggancgtattggtaatgtggggaagggggccggcagtgtggattacagagaatgggtgcgtgcgtggcattctagggggacgatgacagtggactcgccccggcgcaagggctgcttgccaaagcacgtttccgcgggatggtcccctaggaattgggggaatttggaccgtaacagtaggctcccacctcgtatagagggggagcccggcggcggcgaagtaagcggaacatcgtttcatgaatactcgtacttcgcgcttgtatgcaggtccgtcccgggcgagggcggaccggcgaggacgggatggagatcgcgccacagggcgatgccgggaacccaaaggctcttgcagcacaggaggttccgaggttcaggttcatttcgtgaatcgtggcgattggcatatttgcgtttgcgaggagtttgtccagtggagcgtcgcctcttgcaggtcctggtgttaaattactcatgtttatttataacagactttcagccagtacagtacaaaacttacagtagtatatctccgttacacaaatatttacttacaatatattacatatacaaaatgctttgcaataagtctcaaaagctagtttaactccccttgagaaaggagaaaaactctttaaaaaagggggggaggggaatcagaagaagagaggaggaggtgaaggggtaaaggtcaaaagagacaccaaacataggctacaaaggaaaccctaggagagagggagaagagaggtggtattgcacttgcttctgtgtttattttttctttttgttcttcataacttctgattaaaannnnnnnnnnnnnnnnnnnnnnnnnnnntatgtacacaaggaaagaagctgccagaagtattacaaaatcctatctgcagcttggacactgacacaaaaaaacaaaggtctgganaagtgtctacttagaaatat

SEQ ID NO: 448922 - DNA, 1164 bp, Homo Sapiens
  misc_feature (221)..(221): n is a, c, g, or t
actggcaaatttgctttatttttaactggacaaaaagtttctgacttgccctcccttttattccaacacaattcctagtagggaatccacatggcatgtcaaaggctgtccattaacccaagctcattaggggagtcactgaccccaaaaaaggcttgtgagctcttcaagggcaggggccaggtctgtgccttccaagtgctgggtaaataatttgcaanaaaagggcttgtttcagggtctcgtgcacatgtcgcaagccttctccaagcagccttatagcaggactccatggatcccaggtaactgcaaaatcatcgttgtcccaggctgcgaagctctgaagagcagccatggcacttgtaaatgttttgtaagacaaggtgcatcttatcaggatgaacagctgacagcacaaatatcaacataacaacatccacagactctggcggtacatgatccagaagatcatctttagtcagatcacactggaataccttgcatctttctgtatcatataaaggattttgcttaacatattcaatggctcttggagaaaaatcacaggcataggcaaagatattcggatcttcttctaaaagtgggaataaacagtttccaaccccacagccagcttcaagcattgttaacttttgatcttcaaactctctacatgatcttagctcctcaaactctctggtggtccagtgtctgtctttgaagaaattagtgctatttcttttgtaaaaaagatcccaatttttctgagcctcttgttccaatttctgctgtttaaaatcagacaccaaagtttggtctcttttcagtttctcctcttcttcagaggtgagaatccttgcctgcagccctttcctttgcaaagaagccatctctgaaactgacggtaacacttaacacagctgaagattctccatcaccaaataatatgaatccacgctaatggatcagatacatttcctgaggtgagtttcacgcctcaaacagcacagggggcccacagccagccccactgggcctcggaggcagaatacgggaagaaccgcgaaacaaccctaaaccaattctgaggaccacgaattcggattctccgggagttcttttgccatggcaccgcccccatcccgggaattccggaccggtcca

SEQ ID NO: 448923 - DNA, 952 bp, Homo Sapiens
  misc_feature (113)..(113): n is a, c, g, or t
  misc_feature (287)..(287): n is a, c, g, or t
gttgcacaattaacctcttggctgctagcttgatgcatacatatgtaacaatacacaaatttaaaaatttttttattctacataaaagctgtcaaagttttgacacatcaaanatgcaaaataatggaatatactgttaaaaaaattagttgcaagtctagcagcaaagcaattaagtgagaacatatgtaatattaaaacaaagggaactgtgcatctatagatgaagtccaactaccttaattctactgatacaaacagaaattaaaacattctcccttgagggnaaaaaaaagtgattatttaaaatatgagtaaaagccattgctgccagatgagctccctaggctcagttcctggaagagagacagagggtcgctactcttcttggcctgctcaggagggggcctgggctttggaggggcccgcagagcgctggcataggacatggcgggcttgccccccgcagagcttctggggggctactgctattggccgactccgcgatctgcttgttaggcataaggggtggaaactggccaagatgctgcagcacactgtagttgaaggaactggacacctcgaggttctccgacttcagttgatcctcagggggtttgacagtcttgggtggcgctatcaactctctgggctgagctgtcctgctggatccattgcacggaatgttctgataaggagtagatgaggtggtgtttacccaggactccggggatgaaaagttgaaagaagattggttactgtggtcctgaagctctttacactgagccagactgtcttgagagtgcttacttcttcaaaacaagttgaactgagctagatgagattcttctttggtacaaggcccaaacagtcctctgggctcatactcttctaagctggggagcaagaaaagatcctgttcagatgaccatgggtgaaaggcttctgaccc

SEQ ID NO: 448924 - DNA, 545 bp, Homo Sapiens
ttttttttggtgtggcagcttgtaggtgatttttattttcttctttgtgtctgattttccaatgttctttgataaacatgttttactctaatacagggcgatacactagtgtgggccgcacaagtcctggcctttgtctgagagggcaaggcaggcgtgaagcccagaaaccccgcgggaaggatggggcttgttttctcccccaaaacacccaagaccgacatccgcggggaggcgccacgacaccgacgtccgaggggaggcgccatgagtttcgggaagctacaatccacaccacaccaacgccttttccatctaaagatacactcaaacgcaaggctgagcttggggccctgaccgccagcatactgtcagtcacagagagacacacatttactacaacacgcgtagggagaccttcagaaaacagcacgtttcggtggcttctctcaattatctgtgaacctccttattctgccatagtagagtgtatggaatgtgcttttattctaagaaaaatgttatgttcaacctatcaatggcat

SEQ ID NO: 448925 - DNA, 771 bp, Homo Sapiens
  misc_feature (375)..(385): n is a, c, g, or t
cctgcttcttaatgtcccctaactcttcaccccagtcctaggcgcttgtgcctgctgtgccagtcccaggccgcaggctggcactgtagctataaagggcgcccagaaaaaaagattttgctagatagcgatgattcccccatcacagaaaggagatactgcggatgcttatcagcccaatacccagtaagtgtcccttgcagaatgggattagagactgccaactgcaggcccgcccacagagggtgctctgtgtgaaattatgtgaaaatgtagaaaagagcgcgagcccagtaatttaaaatcgacgtcccaatactcactgggtcacctatcagctatgtaatttgggcaggtaaataagcttttgtttcnnnnnnnnnnncctcataaatggactaggaatattactcctacctacctggcatggccgatgtgcgagaaaatgagataatctcgtggacaggctctgaaaactgcacttttactgagtaaaaaaccctttgcctctccgggcccccgtttccccatctgtaaaatgagtctgtaaagtgagaatgatactccctacgccgcaaggctcttgcgggttaaactggaatattataaatgcaccatttatttgcagattgaaattctgtgcgtccggaggtggcgggtgggagagggaatgagcagggatgcagggtaggccctgagttgctgggggctcagcatggccgctgcgcacattgcattatttcgtcgacactggtgtgggtgaaatcttac

SEQ ID NO: 448926 - DNA, 1124 bp, Homo Sapiens
  misc_feature (1093)..(1093): n is a, c, g, or t
  misc_feature (1103)..(1103): n is a, c, g, or t
tgccttttcatatgcacatcgcttatcaagcaggctgtacggtccggacttccgggatatcgtcgaccacgcgtcgctctggcagatgtttgggccgtttggcgccgtcaccactgtgaaagtgatccgcgacttcaacaccaacaagtgcaaagggttggctttgtgaccatgacaaactatgaagaagccgcgatggtcatagccagcctgaacggctaccgcctgggggacaaaatcttacaggtttccttcaaaaccaacaagtcccacaaataactcgctcatgcttttcttttgtacggaatagataattaagagtgaaggagttgaaacttttcttgttagtgtacaactcattttgcgccaattttcacaagtgtttgtctttgtctgaatgagaagtgagaaggtttttatactctgggatgcaaccgacatgttcaaatgtttgaaatcccacaatgttagaccaatcttaagtttcgtaagttatttcctttaagatatatattaaacagaaatctaagtagaactgcattgactaaccagtccctctggatggtggtgaacctgaagcatgctttaacctctaagactgtctaacacgcgtttcattcaatgtctccacagactgggtagcaaaaaaatcaccttttagttttagtttttaatctaaagatgttagacagatgctgagtgtgcgttttctcaaccgcttcaacattgtaagcgatgtatgctttgggttgacagggaagttccttttccggggcaggtcccgttgccacctcctgcttcactcagtcccgggctctgcgagtggtcctgggaatggcggcgggccgtccagcgtgggccaccactggggccggggcacgggctgcatgctgggcgggcctccagagaaggacacaaacgtgtttcgtaagcccaggcaccaatgggaatggaccaaagagtttcagggaaactccagtatattccagagtcagatctaagctccaggcacgccttgaagatgtgttgctactctgacatcccgagtttctgtccacacatttgcatgcacagcgccccacacattggatantgttggttcncgataatttctcccgttttca

SEQ ID NO: 448927 - DNA, 1189 bp, Homo Sapiens
  misc_feature (1068)..(1126): n is a, c, g, or t
ggaaagttccaatcccttcactcttaattatctatcccgtccaaaaaaagccatgagcgagttattggggggacttgttggttttgaaggaaacctgtaagattttgtcccccaggcggtagccgttcaggctggctatggccatcgcggcttcttcatagtttgtcatggtcacaaagccaaaccctttgcacttgttggtgttgaagtcgcggatcactttcacattggtgacggcgccaaacggcccaaacatctgccagaggatcccctcgtcggcatcttgccccaggttgtagatgaaaatgccaccagccgggaggaggcgtttcctggcacgttgacgccagagagccccgctcatgtgatcgacgcccatgggggagaacctgaatctctgcgcctggtggtgaacggggcctccgaaccgtcgcgctggcgagtggtacagctgcgagaggagtgccacgtttttgttctggttggggttggctgcaaacttcactgtgatgggctcagaggaacctgggggtttatgaccattgaaactggtaattgcctcttctgcctccgaccgtttgtcaaaccggataaacgcaacccctctggacaaacctgtagtctgatccacgaggacccgcgagttgatgatccgcccaaaccgagagaacatgtcttctacgtccttctgggtcatggtccgcgggagcccgctgatgtacaagttggcgtctttgatcacctctgagctcgggcgagcatacgacaccttaatggtttttgactggagcctcaagccgttcagcgtgttgatcgctctctctgcatccttcgcggtcacgtagttcacaaagccatagcccaagctgtgtcctgctactttatcccgaataagttttgcagattcaacttcaccaatgctgctgaacaggcttcgtaactcatcctgggtcatgttctgagggaggtagttgacgatcaaattcgttctcccgatgtcacccctgcagtcttcggccatgtggtcttcataaccattagacattgtatttttcaaaaatctggatnnnnnnnnnnnnnnnnnnnnnnnnnnnnnnnnnnnnnnnnnnnnnnnnnnnnnnnnnnntaacggctccgctcggcctcggtagcggtggcggcggtgacggcccccgcgacggcggcagcc

SEQ ID NO: 448928 - DNA, 456 bp, Homo Sapiens
  misc_feature (15)..(15): n is a, c, g, or t
  misc_feature (35)..(35): n is a, c, g, or t
  misc_feature (40)..(40): n is a, c, g, or t
gcccaaagttttccngggaaccccagataccccgngggtnaaatctaagctccaggcccgcctgaagatgtgttgctactctgacatcccggagtttctgtccacacattgcatgcacagcgccccacacattggatactgttgttcacgataatttctcccgttttccagagcatttaacatagcttggaggcgtaaaatggctctgtattttaataacacagaaacatttgagcattgtatttctcgcatcccttctcgtgagcgcttagacctttttctattttagtcggattttgttttggaattttgcttttgtatgaacactcagcagaaaagtacttacttcttgccagttatctattaaccaaaacctttgatttgtagttttaaagattaaccctcaaagttctcttcataactgccttgacattttgggttgttctgttctgttaa

SEQ ID NO: 448929 - DNA, 684 bp, Homo Sapiens
  misc_feature (350)..(350): n is a, c, g, or t
  misc_feature (375)..(375): n is a, c, g, or t
cggggagctggcccacgggcggcggggctgggcccggggctcccaggcgctgacccccggggcccgcaggcgtgtggctcacggacctggtgcacgtggcggcccacgagatcggccacgcgctgggcctgatgcactcacaacacggccgggcgctcatgcacctgaacgccacgctgcgcggctggaaggcgttgtcccaggacgagctgtgggggctgcaccggctctacggatgcctcgacaggctgttcgtgtgcgcgttcctgggcgccggaggggcttttgcgacgctcgccggcggctcatgaagaggctctgccccagcagctgcgacttttggtacgaanttccctttccccacggtggccaccnacccccccgcgccccaggaccaaaacccaggctggtgcccgagggcaggaacgtgaccttccgctgcggccagaagatcctccacaagaaagggaaagtgtagtgactggtacaaggaccaggagcccctggagttctcctaccccggctacctggccctgggcgaggcgcacctgagcatcatcgccaacgccgtcaatgagggcacctacacctgcgtggtgcgccgccagcagcgcgtgctgaccacctactcctggcgagtccgtgtgcggggctgagcccggctgataaagcactttctctctg

SEQ ID NO: 448930 - DNA, 972 bp, Homo Sapiens
  misc_feature (24)..(24): n is a, c, g, or t
  misc_feature (86)..(86): n is a, c, g, or t
  misc_feature (296)..(326): n is a, c, g, or t
gaccagaaacctaggaaaataaanggtgggaagaagaaaaagggactcctcagccctagaccctgggcataagcccaattaagagntcctgattttaattaaacgtgcctgccatactctttatttatgttaaaacaagtagaacccaccaaattaattacaagatagaacagaaacagattaaaatacatcagctggtttgtgtttagaagaggtaatgagacaactaaatatttttcaatctaaaattcattctttaaggaccctctgaagaccacataaatacatgtatgggnnnnnnnnnnnnnnnnnnnnnnnnnnnnnnntatcttgatttctacttaattggctcttctatagtcatattaatatggggcaatgaaaaaacaacttcaataggatgagggaaggaatcctttggcaggctacaatctactctgaggtggagtagtggagggataaagggagagattacacttgtgtctctagggcaaagaaaatgcaaaacagaactgagtaaaagtaggacatgcagaactgtaacacagaaggtaaagaaaccagcagaagtatcacccagccaaatttcatagagcagtggggaaatatctgacatttagagagacaacccctgtaaacaggaatcgatcccacaagactttgctttggggaaaaagctaccttccttccctcattaaaaacactccattggtgatggcagcagtgcaggtggcagccaaaaggaggtacaggacacatttggagatcttttatcgtatcccctgaactagctgcagttttgtctccagcaagttcagtttctgccggtcaacatagcgagaaaagagggacactaggtttgtaggtatagagattggcttggccagggctgcttggggaatccgcagaagttctcgtgttgccatgaacatcacctccgtccactgattattttgtgttgattctgtagcc

SEQ ID NO: 448931 - DNA, 936 bp, Homo Sapiens
ttttttttaactatgaataattcattcactcgcctcccactgggagtccacaatggcctaatgcacgtttcaagctcttggtttctatcaaacggctcgctcaaggtgggtaaccaatggaaacgcataatctatccccggcggatgtcctggaggccacggagggaaggcggcccgagctgcttcctccccgcctcgcccttccctcttggccctttacccaaaagaagtctgaattggatgcggtcttggcgtcccgtggctgaggtggcgaggtggaagatcagccctttacggggtgcggcaccggagctgggcccccagctgcatgcctcgcacccctcccgactaggtctgagcggggcagccggtgaaggggccgctactggctgcagcagccgctccgggcgtcttggcccgggtgccagggcgcgcctgcaggacgtgacctcacaatgggcgcgcgaggggagctcggcccggccgggggaagccgggggaggaggggaaccgaggcccggccggagacaccagagaccaggcccggccagccccggttcgcttccgaccccaggggcggggacagcgccgagaccgactctgccctgcctgatccgacaggccgcacggggctgggcgctggcgaaggggtggcccagcggggagccccgcgcggaggtggtgccccactcgtccccccgagagagggaaaaggctacaagccgcgcttcgctcacctgtcccgcccgcgccatcgcgcgatgcgtcgccgacgcttccacgacttccgcagctccggcagtcgcccgggcccggcagccccgcccctggccgaacacccctaaacccggggacacctcctccggcgtccgcgcctagccgccggcagcgccacgcccaccgccagcggcgcagcgaggcagcctggagtgaccg

SEQ ID NO: 448932 - DNA, 988 bp, Homo Sapiens
agtacaattcaaaaggtttttgtgcttggagaggtcaatttttatttctgctgcattctcttgaggaccttttcatttgttaaaatggaagaattctgtctcaggtcaaatgctttattgtgtctgcttcctctgtccgaatcccagatagtttcagataatttgttgatatcttcgtactacctccctccgataatttctgatttctgtccggccgcccacatctagagcatccaggtcagcgatcagccccgagagcacacaggataagtgcctgcaggtctcattgttgttcacacccatcagaagtgcaatcaggacccctcgggccttgttcacctcacacatcacgaagttgattttggcaacggaaggatgtgcatcctcggaaagcggcagggaaggctgctttttcatgcagtcttcgattatctcttgcaccgcacagattttggttaaagtgtgataccttgctttccgcaaggagatttttcctccagttttaacatgtgtcagcctcagaatgatatcttggatgccttcttcaaactcatcagttacgcagttgcctccattataaaatggcacaattttctctctcacgagggactgggcttcctcaaaaatgttctgtatttcaatccggtgtgggtggtttgcattctgctccaactctttgagaagacgttctgtctcctgtgctgcccgcttcctagcttgctgaatatctccttttccttcagtatctacagagtctatttcaaaaagctgttttgttagaatcctctccagtttcttgtaattcttgtcatctgacagaccactgaagccgataacttgctgttctacactttttacttccttttggatttcctgaagcctactaatagaaggatgttggtttcccatatccatacttttgttgtgttcagtttcacaagcactgtcccgcccgcgccatcgcgcgatgcgtcgccgacgcttcccc

SEQ ID NO: 448933 - DNA, 850 bp, Homo Sapiens
ccaggataagtgcctgcaggtctcattgttgtcacacccatcagaagtgcaatcaggacccctcggccttgttcacctccacacatcccgaagttgatttttggcaacggaaggatgtgcatcctcggaaagcggcagggaaggttgctttttcatgcagtcttcgattatctcttgcaccgcacagattttggttaaagtgtgataccttgctttccgcaaggagatttttcctccagttttaacatgtgtcagcctcagaatgatatcttggatgccttcttcaaactcatcagttacgcagttgcctccattataaaatggcacaattttctctctcacgagggactgggcttcctcaaaaatgttctgtatttcaatccggtgtgggtggtttgcattctgctccaactctttgagaagacgttctgtctcctgtgctgcccgcttcctagcttgctgaatatctccttttccttcagtatctacagagtctatttcaaaaagctgttttgttagaatcctctccagtttcttgtaattcttgtcatctgacagaccactgaagccgataacttgctgttctacactttttacttccttttggatttcctgaagcctactaatagaaggatgttggtttcccatatccatacttttgttgtgttcagtttcacaagcaccaaaagaagtctgaattggatgcggtcttggcgtcccgtggctgaggtggcgaggtggaagatcagccctttacggggtgcggcaccggagctgggcccccagctgcatgcctcgcacccctcccgactaggtctgagcggggcagccggtgaagggccgctactgc

SEQ ID NO: 448934 - DNA, 1075 bp, Homo Sapiens
actttagagttagggtttggggctttccctttttcccaaaatccccgaattatttcaattaaattggtgtgatttctttcaaactaccctcccccccggaataatttcggatttctgtcccggcccgcacacatttagagcatccaggttcagggatcagccccggagagcacacaggataagtgctgcaggttctcatgttgtttcacacccatcagaagtgcatcaggaccccctcgggcctgttcacctcacacatcacgaagttgattttggcaacggaaggatgtgcatcctcggaaagcggcagggaaaggctgctttttcatgcagtcttcgattatctcttgcaccgcccagattttggttaaagtgtgataccttgctttccgcaaggagatttttcctccagttttaacatgtgtcagcctcagaatgatatcttggatgccttcttcaaactcatcagttacgcagttgcctccattataaaatggcacaattttctctctcacgagggactgggcttcctcaaaaatgttctgtatttcaatccggtgtgggtggtttgcattctgctccaactctttgagaagacgttctgtctcctgtgctgcccgcttcctagcttgctgaatatctccttttccttcagtatctacagagtctatttcaaaaagctgttttgttagaatcctctccagtttcttgtaattcttgtcatctgacagaccactgaagccgataacttgctgttctacactttttacttccttttggatttcctgaagcctactaatagaaggatgttggtttcccatatccatacttttgttgtgttcagtttcacaagcaccaaaagaagtctgaattggatgcggtcttggcgtcccgtggctgaggtggcgaggtggaagatcagccctttacggggtgcggcaccggagctgggcccccagctgcatgcctcgcacccctcccgactaggtctgagcggggcagccggtgaaggggccgctactggctgcagcagccgctccgggcgtcttggcccgatcccaagaattccggaccg

SEQ ID NO: 448935 - DNA, 709 bp, Homo Sapiens
tccagcacagaggggaaaaatgctgtcaccatccaaaaatgaaaggaggatgacatggctcactaagcaagtactagggcacctggcatgtgaggtccttgctttccctagaagccactggtggggggcagcaaattcctgggattagctggttatctggtggagaaagctaaagctgcggtcagggatctttaaaaggcaagcacattttgcttaaaggattagctccagaggatccctgagtatgggtgccactcttagctcagacagaagtcatgttcttagcgttcaggcaagtcagcctttgcgtaagacaccctgtcgtcgggcaggaatttgccgttacaaatcccaaacccatgacagtaggaatgtcaccccatgcttcacatatgcattatgctctgaacccagggcaactatgaccatgcttccttcaatctttattgagcaaatatatggccaaggttattcccttatctgtgactgggtggaaaaaaatggtcaggaagggaaactgcctcactgttgaccaattccaaaacctaaggataagcccatggggtatgtcaagctagcaggttcttctcggcctaggatgacagtgtctgggggcatcacaaaacagttgtacaatccaatgcagccgtcctgctcatacagtaagatccattaggccaaagcaggcctaacttgggtggagagccca

SEQ ID NO: 448936 - DNA, 683 bp, Homo Sapiens
cagggctagagaataagtttatacactgcctcgttaggtccaggggcccgcgcacgtggccaggcgggtggtcctgacgcttcaattcatttacaagtattggattccacgcctgctcctgtgcccgcaggcttccccaataggccagcaatctcaataatgctttattaaagggcagattcatatgcggctcttgggggaatttttacaaatatcaaaggaactaatccagcatcctatatagaactctgcacactttggggaggtccgtgaagcaggacaaagtgctctttacacaggaattgagtcggttcaagtatctgctctgtggggaggacaccctaagcgttctacatacgtcacccctgctctcaggatgcacccagtgggctcgcggtcagggtggccttgccggtgtccacccctacaccacccccagctccggaagcggctccacacggggcttgtaccttcacagcattcgggacatccactatcatacagtcgccctcctactcttactccttctacgagtctgcctggaagccgtgcatgtctgaagcaccgatttgggcgacgtgcctacgcttgttaatgaatcggttaagcgatatctgcccacgtgattcctcttatgaagatgtgagagctcttactggcgaccgttgatgtgaccctgtact

SEQ ID NO: 448937 - DNA, 875 bp, Homo Sapiens
  misc_feature (776)..(811): n is a, c, g, or t
aaccttgataaataaaaccaaacgtttatttacaccaaagaattccaacactggatctttcacatatgaaggacaaagtattatatatatacacacagcaaggggtggcggggctgtaacaagagagtttatagttttcccacaattacaggtctaccatttcagcttcaatggagatagtggctctgctcctacctctcaagatacatttacaagactgaggagcaggtcttctcactggatggcatgtgagggaaggggacggtcggaggaaaagaaggtagaaagcttaaaatggaagtcagtgtggccacatctcccattagctctagcatgaaacctgtacagacaatgtttgtttcttttgtaaaaagcagtaagttatgcccagtaactaaatgaattcaaaatggccaagacaaagaaaactaagaaagattttgccttccctctcctaccagctatggagcacagcatgttgggagatgaacagggaaaagaccaaggtaaggagcctgggagggaaggtatcaacattttaaactgaactaaaaataaaagtataaatgagttggatttagggttagatcagtaagacatgattcttactgaacagaagtttttagtatctgtctgcattttgggtagattttcaacatctcgatgtaactaagacacacttccacaagagccactaggataaccccactgaagcgcttatggagtaaagtgatgtaagcgaccagcaagcagtccactgctcctatagattgggnnnnnnnnnnnnnnnnnnnnnnnnnnnnnnnnnnnngcctcccctgagaagctacatttttgtaatctctggagaagagcacgagataccaaccccctcc

SEQ ID NO: 448938 - DNA, 579 bp, Homo Sapiens
  misc_feature (84)..(93): n is a, c, g, or t
  misc_feature (518)..(518): n is a, c, g, or t
  misc_feature (542)..(542): n is a, c, g, or t
ctgttctcataaaactttatttatggatactggaatttaagttttacattacttacatcacatgctacaaaatctactacttcnnnnnnnnnnctttcccaaccatttaaaaatgtaaaagccattcttagcaggctacaccaaacaggtggtgggccagatttggcctcaggcacaagtctgctgagccctgtcatttcggccactcttacactcgagtgtagataagacaggccccaatgcttaatacttcgttcatttgctctttgctttacccatccacagcaaagacctggatactcttcaccaaaaaatgtacaactaagaagctttatcaacattttctaaatgttaggagtagtattaagatctgtcagacaagtatgccagggtcacagtttaaagggatattgatataatgcccatattgtgcattaaataaaaacaaggggaaaaatataataaaccttgaggaaacctccccttaaatttgaaaaatggggctttattttaacccngtggggattgtctggccatccctntcggggcataacctggattacagcccaggttcctggg

SEQ ID NO: 448939 - DNA, 696 bp, Homo Sapiens
  misc_feature (678)..(678): n is a, c, g, or t
gagaagccagcttatcccagagaacagactcacctgagtttggcaggccctaaaaaagcatttcacaaaaatatttcacttttagtgtggagaagttctggaaatggaaagatctttctcacggggagtaggagagccaaaaacatccttaaggaaaatggccttaatgtttcaaaagattgggaggactcggggggaagaaaacagagctcgatacatctgaagaaattaaataactcctcatatcttagagcagattgaatttacattttacttaaaaaaaggggggtgggggaagtacatacacaaggaggaaaatggggtgaggaacaataaagatctgaaatggatttctatgattttcccctacaatgatcgattttgtctgttgggcagtatttttcctgctggcgtacaactgtttacagtattaacaaggttgtagacaaaggaactgccaaagtttaggcccggatggaaaggacagtaagttatcatatacaatttaagtttacaatacacagcattttctttaaatgatgtaacgcagtcgcaaaaagaagttaacaatactaacacgagaataatcaaatttttgttgttatccatgtgcagcaactaactgcttttacaaaaaggcaaattattacattttttcttcactttgtttacagtttngtaatttacttttttgtc

SEQ ID NO: 448940 - DNA, 1029 bp, Homo Sapiens
  misc_feature (460)..(460): n is a, c, g, or t
  misc_feature (552)..(612): n is a, c, g, or t
aacttaactaaggtttaaaatttaccttgtttaaagaacttctgacttttgaggaaaatctagctttccaagtaactaaaatgtacatgagataaacctctcaccactatgtgtcccttgagaaatgcaacacttttttagtcttcatacttgtaatctataaaagaaattctgaagtttagaccaagttgcccatttctgcgtaattgacataagttctgttaaaaatattataagtaattcgtttcggtttgtaggatgtttcccctgacttgttaaagagggaaaccgggaactcagtcatgtttttgtcctggggtaatctacctgttatggccagtactcccatccgagggggcatgcccttagttgcccagatgggagatgcagttcagtagatttggggcaaagtgggctacagctctgtcttccatttcactcaacacctgtttcatggacntgaggccgggtgcccgggacacatcctaaacagtcagcttctattcctgtgtcctagttggggagacagagtgccagccagcaaccctcccnnnnnnnnnnnnnnnnnnnnnnnnnnnnnnnnnnnnnnnnnnnnnnnnnnnnnnnnnnnnnctacatccttccccgactcccaggcataatgaggcatgtcttactcaatgttatgcaatggatttaggcaaaaattcattcttagtgtcagccacacaattttttttaatgcagtatattcacctgtaaatagtttgtgtaaaatttgacaaaaaaagtatatttactatactgtaaatatatgtgatgatatattgtattattttgcttttttgtaaagcagttagttgctgcacatggataacaacaaaaatttgattattttcgtgttagtattgttaacttctttttgcgactgcgttacatcatttaaagaaaatgctgtgtattctcactctacatctgtacatgatcacctgccgtccctccatcccagccagctgactcatcgggtgccagctcgattcgtatctgtca

SEQ ID NO: 448941 - DNA, 728 bp, Homo Sapiens
aagtgagtagctgtggcatggtgacgcccaggcatctctgtccacgggcatacagtcatagagcagcagatccttctcagtcacagccatgagaacaggtctccattgctgtcttccaccatctagttttgcctgttctgcatgccaggcaatatgcttcacctctttactgcctcctgctgtactggttgccccaagcatggcgttgagttcagccaacacctgtgggaggagagccattatgttggtgtggatagctacgaaccaggagtgtgctgtggctgtatctttgcagcgtaggatcaacgtgttcctgctatcaggagaatgtagctctatcaatctgttttccagatccggcatgcttaggtttctagcagcaaagcacattttgagagggatgatcttcctgtccttggtgctgttctggtgttttggcgatccagagtcctcactgccactaaagcttggtgactgggggtctgcaccttcccacggcagatctgatacttatgatggcttcttgatatatggtgttacttctcggatgtactcgacacgaattccaggatatttgaagataacttagtacagcagctgtatgtgctcctgatattggtcagacagaaatttcctcattataggcctggtggctacaagtgggtagctgtggcatggtgacgcccaggcatctcttgtccacggcatacatcatagagcagcattcg

SEQ ID NO: 448942 - DNA, 601 bp, Homo Sapiens
  misc_feature (65)..(65): n is a, c, g, or t
tcagaaagcctatagtagagctggaacctcaattcccagcctccttaccctgctcagtccatacntgctgatgaagtcagcttgcaacatttatggtaggcatttattaaagtagatgcaatagtacatatgtagtacagatgagctgtttgggtctttgttgttcctatacccctctacagcttcctgaccttcgccccaaggcttctttagcttttactctgcccagtggggaaaatggctatgggctcagttatgggagcctggcctttgcctacttcagcccttgggctctcaccactgtgggtggtgtgacctaggacttgtttttgttatcttggaaccagaaggcgtgttcttggcagggttgggtctggccaactgtgtgggtagaagggcatccttttctgtcctgcaattgggcttcatggcacatggcctcacatggtgcctggggacttttctaaggttccaccatgagccagactttgccctcactcctgatttgaacctaaacctcttgctgaactggtcctgcatactgagattcctcagattgcttgccctgaggatgtgttctgggtttgacctgataaacctg

SEQ ID NO: 448943 - DNA, 498 bp, Homo Sapiens
gcggccgccaccgggatggtcgctggccctgccgccgcgggaactgcagttgcccgcgccgccctcgaagcagccgcctggcccgggggacagcgggggcgctctcggcggcggcgacagtggaggcggcgacggctgcagcttgtcgcccgccgtggtcaagcagtcgcctgggggctcggaggaggcaagaagggccaggcgtgttccaggcagggtcttgagggtgctgcggtaggtttcgtgccgggtgcccccgacattgaggatcaccctctcgttgttctcgatcttgcccatctctgtgactcagacatgacttaacgagaccgagagaaaagtggttctgctttggtttccgagtggacgaggttctctgggcagcgggactgagtcttggcgcccaggtgagccgcccttctccgacgagaaactacttgttggcgttttccggattcaggtggttgagccgcttccctgggcgctggggtggggaga

SEQ ID NO: 448944 - DNA, 518 bp, Homo Sapiens
tttttttgccttggttttgggagtgaagatgacctctctcaactactactgcaattccacatgatcaccaggatgatactaaacttttagaaataagtttaaaatagggttttcttaaaagctttttttccgactttagtgagcatcggaataagccttatttctttacagcaagatttctcaaccttattactaatgacattttgagtctggtaattgttactaagggagacaggggactgtcctgtgaactacaggatctttagtagaatccctggccatcacctccccctccatgtgacaacccaaaacgtcttcacacattgctatacccccaaagggcaaaaatcacctagttgagaatcacttcattatagatgattgcctggtttcccttaaaaatatatccccacttgaaataaaaatgaggttagttgccccagaatatttccagatatattcaaacaggatctgggttaaaaaatctggtatgtcaaaccttacaaagtacctcatca

SEQ ID NO: 448945 - DNA, 737 bp, Homo Sapiens
aggagctgaggtggcaggatcacttgagccccaggagcttgaggtttatagtgacttgttgactgtgccactccaccccaacctgggttgacagagtgaggcctcatctgggagctgcagggtggctgctgtgcagtgggcatggtcagagtggaactgagaagccagttagggagggcttttcattgcccattttcctgcggtgcaaatcaagttccgaaggccacaagcgaggtcgggtgcagagaacactgggctgaggcatcaccttctctcctctttggctcacataggcccctgactttcttgggcttgcctgtctcagaggactgatgggctggtatggcaaggttgtatggaggattaagccagatagtcgcagtaaagccccattagcccgtctggcctctggatttatctataaaagtattgtttctggctttctctaggaaactttccagaatgtgctccaggtgttgaagcgggaaggcatggacagccctcacctatggcgttgcggttccattccagacagccccctcttcttaggctcttttcaagcgcacgcccagcaacgtgtgctctgaccgaagagcgcagtcacagatcttcctgtgggtctaaaaccagaaggctttcgttccatgacccctgccctcatatcaccccgacgccactgtctcttggcagagccggctacagaatcgagtgtcagtttaatgcttgttccctaaggt

SEQ ID NO: 448946 - DNA, 535 bp, Homo Sapiens
gagttacagtagatgttcgtatagttaaagctccaagaagtcctacagaaatgtttgagtttaacactacgtttgttccaacaaattagatcatagaaacaccaccactttttgtttctagcccatattaacaacctgtggaagatccctcgggctggtctgaaagaatcgccccagagctcttaaggaggaagcgagccgagaaaggagggttgtgatattgtgatgagctctgagttgtattaaggaatttgaacttttcatctggggagtaataggatccagtctagcttccaaaagctgcccctaccagccacatgggggcccctgaaagcagggtttcagccctgctgtagttcctcaactccccacaggtgtatctaggaaggcttctgccctggctgggcctgccctaatgcctgaaccagtcctgaccagggcaggaggtatggcaaaatcaggggctttggcctcaccatctgcccatgcagatgcctatgccacagcagcttcctattttctcccttcctagtcc

SEQ ID NO: 448947 - DNA, 462 bp, Homo Sapiens
  misc_feature (338)..(338): n is a, c, g, or t
  misc_feature (370)..(370): n is a, c, g, or t
caatccctgtttttgaataaatattctcagcgaccaggaagttgtgaaatactggtgttgtgggcagcaaaacctccagaaaatgggtgcagctgaggtcctggaggacccccatgtgtgaatccaccaacctcaattaggcctcagccccttccacatgccagttctggggcttcaggaccctttgggggtgaagtcgtccagcctcctacttctaataccaaactggtccagttgtcttctgggcattttagaagcaggtggaggagtttcagtagctttgtccagactctccttggtgcagatgtcagggaagtccttctgacgtgtctctccangtggttcttccgtgctgtggactgtaacccanatactgccctgcttggcggatcactttggttgtgagcccttagggccctcttctttgtgacacctgcccatcttggcctggggaccacctgt

SEQ ID NO: 448948 - DNA, 418 bp, Homo Sapiens
ttagagtgtgaaaatgaatatatttatttgatcctagtctaaacacacgaatgataaactaaggcaagctaaagtttgatctacagatgctgaaaacagaaatggtttatttattatgtacctattactttgaccattgcatctcacatatacttgaacataattggaagaccagaagaaccaaacaatcttcaaattctacattcttcttccctcatcctctctctctccagtttagactcataaacttgtcactttccctccatccctgctgctgctgtttgacttcatttccccatctcacttgcctagataattttaactgctctagtatcagatcttcctgccatccatcattcccagcacctgtccactatccacacaaataagggcctcataaacctcttcagcttaattg

SEQ ID NO: 448949 - DNA, 472 bp, Homo Sapiens
aagttaacatatttatttaagtcttttgttaataacaagatagtcaaagttaaagcatattttgatatgtatgggggtaaagaaggaagggaagatatattcaaagtgtatataaaatatacatgtaaattctagaaagtttttcaaacagtgggtgttagtcagcactgaagtgttggaatggaaatgtaagtggaggtgggattgaaaccggctgttgctgtaacactgtttttcttaatcataagaatgatttaattttatagtttctcaaaatacccaagggaggaacataaactcctatatataacacgactctttttaaacatatatatctataaatgctttgggtgtcaggaaacactgaaaataaatttaccaaagagttattttagccattcagtacttattgctgggtggtggaattattgttgactttgttcttagcatacttctgcgttttccaaattat

SEQ ID NO: 448950 - DNA, 162 bp, Homo Sapiens
tgcaaaatagaagtataaaatttatttaaaaccacccacaaagttctgtgtaatcaggaatgatacaatttgcaatagttttttttaaaaaaactcatgacaaagatttaaaatatattttcaattacagtattcatttagccttattcagttaggctgaat

SEQ ID NO: 448951 - DNA, 222 bp, Homo Sapiens
gctactcatcctctccttaatcaggggcttatttgcttcattggtatcttcatagaagttttgaacttatattcattaattttatataatttctgctttgatattttacattaatttcatcttccaatttttaaaataaggggaattaacatttctgttttcttatgaggactattttaaaagatatgcattaatctttaatattataggcactacagactg

SEQ ID NO: 448952 - DNA, 471 bp, Homo Sapiens
gtcaaactatagcattttgctataaatgtttattatacatatttttgagaaatatagatacaattatatatagataagcatatatggatataaagatgtttttgagaaattatacatataattaaaatatcctgggtactatctctggatctattgttcttcctgcttctctcaaattaacaatgattcatgattttatatttttagtgcataaatatatcttaaaattttatatccaagctaagcattttgatataatcagatatatcaatgttttcttcatgtcatttgcttcttctgtttttggtatattgtttaagaaattcttactcaatttaaggttcatatataaacaaatatatctatattttcttctaacatctaaaagtgtttttcttttgacatttatgtctttaaaccatctggagtttatattcatgtagggtgaggtaaagatacattttttttgaa

SEQ ID NO: 448953 - DNA, 181 bp, Homo Sapiens
ccttctatctcactttaatatgaacaagttataactcatttcacaaaacagaaaatcctacggcctgagactgcagcgggaaaaatcaaggaaatgtcactttattcatgtccccagaaccctaggaaagcatcagcattcaaggaaagttggattgatagttcagctaaaaccggacgcg

SEQ ID NO: 448954 - DNA, 255 bp, Homo Sapiens
aagaaactctttattttgaaataattatggattcacaggaagttgcaaagatattagtttctcagggccctttatccaatcctcccaatggtcacatcttatctacctataatccaatatcaaaaccaggaaattgatattaatatgatgggggggtatagttctatgccattttatcatatgtacacatatttatttaaacaccaccataatcaaaaggcagaaccattctttaactgcaatgatccggacgcg

SEQ ID NO: 448955 - DNA, 472 bp, Homo Sapiens
  misc_feature (444)..(444): n is a, c, g, or t
acttctttgttggcttattagctataactctttattttgttattttagtagtttcccagggcttatagtctacatcattaacatatagtagcctacattaagtgcaattataccatttcatacatagcataaaaaccctgcaataatatactttcatttctcccctctaggacttcgtacaattgttgtcatactatgtatgcatataaagcccacattgtcacttatcttttaaagagatttaaacaataagaaaaaaattaaaatgcatttatttaatatatatgtagttaccatttcaagtactcttcttttttgtgtgagcagatcaatatttctatctggtttcattttctacttcctaagaactttaaaaaactgttcttttaatgtgagtctgttggtaatgaattgcttcagcttctgtacatacaaaataatttnttttctactcttaaaagacattttttgc

SEQ ID NO: 448956 - DNA, 488 bp, Homo Sapiens
ataacttttgggcttgaaagcaccgaaatcttttctgaatgataacaacacaagatctaatataaatatatttccgtaattctttatgcattctataccatgattgtatgataatagcagaattttcttctttagcttgttttcttaaatgccattctctaaaagctctttgcaatattactgtagcttttacttgtgattgcattttacgttgcttccattttctgaacatagattggattataagagttgatgattttagcatttcatatctttgttgatcttgttttcttcttaaataagcacgccaatgcctctgaattgtaactgtagcccaaagatatcgtttataagatgtaacagcaattatcattcttatcctagattgcaggatgattgaataatatttcaatttcagaaatctttgtctagtggaatatcttctccaatatccctgaataagtgatgctgctttattttgaactttt

SEQ ID NO: 448957 - DNA, 464 bp, Homo Sapiens
gtggctgtgaaatactttatttgtcttcagattggtctggcttatacatggattgaacctcagttagggcagcaccatcttctgtgaaattcactgtgacagtatcacgtcttaagtaaccatatccccaagatatttcatttctcttgagccctgcatatcctgaggatctagtcactatccaccagtctttttatacaggttcttgagcaaatgtttatgtaatcatgcatttgtattgagaattattggaaagccatgaaagtgaaagtagaaagaccatttcgaagataattgtgacaattcagaggagagatagcaaaagcctccctgtcttagtttgtgctgctgtaagaatatgcttgatactgggtaattcctgaaagacagaaatttttttctgacaattccagaggctgagaagtttaagatcaaggtgccaacaggttcagtatctggttagg

SEQ ID NO: 448958 - DNA, 473 bp, Homo Sapiens
ctcatcctctcactactaaaaaccttttattatcagagccatcctttcttcactatacaaaatagtactgttctggtttaggcagtaaggatctatcccttgggttattccaataatttcctctctggtctccttgcctccaatttctctctatcctctctattctccaacatttgcaccatttatctttctaaaataagaaagaggatgctatcactccctgctgaaaaacctccattggctccgcactggttacaggataaagttcacactcacttgctagacatacaaacattttacatctgatcacaatctacatttctagatcatcccctgtcccatcagcaacacatcctgtagtcccgacactctgaataagttctatttcctcaggggtctatacctttcacaacactgtagcactgcacatgcctaaaacccacacatgcttctctgataatcttaactcattc

SEQ ID NO: 448959 - DNA, 392 bp, Homo Sapiens
acaattggagaggaaagaagtgctaaggcaacacaataactttctaagcacttttctgctggtttaaattagttaaattattttgtataaattagatataattctacttttctgatatgtataaaaattgatgaagctgcatggttttaaaataggaaatccacattataaaaagtcattaaaaattctgtacaaaatcacaacaaaataattcagcatgggaaaggtaacaagtagtaaaatgctggttgaaaaatatatatttatatatattttaattggcccattactagtttaaaaattgcatagatcctaattattgcttgtgattttgttatcccgatcagataattaatacgatctgaatacagccacaccaaattcggggggta

SEQ ID NO: 448960 - DNA, 463 bp, Homo Sapiens
gaaattattttcaaatttattagtatacttggacaaactggacaagataaggcataattaagtgtataaatattttaacattttgtatgaataaagattaatgcacaggttccatgttagatgtcaactgcattttgctgatacaaagaaatccactgatagcttttgacaatggctgccatcagctgtatctcactagaaaagcttaacatgtttttcttcagagatgctgtcaagcaaatagcctaagggccggtgaaatctgagagactggaataaaaggaaaataaggtcaaagagatcatttttgaaataactgaaatgtcaaatttcaattctttctttgtgggtacaacataagctacaatagagaatgttaaatgtcgaatactaaaatactttcagagtagctgcttaatgcagctagtctgtttctcaaagtcctaatgatttcatatatata

SEQ ID NO: 448961 - DNA, 423 bp, Homo Sapiens
gcaaagattgttggaaataatccttctcttgtacctagaaacataggtgcaaatttctgatatctttgttttatctgcattcctgcctttcatgaaagtccctcttgattgtgctggggctgtggctcagcgaagacactgaataaatacgatagccactgttgcttgttgcttgtccaagtcttcctggcttctgctgcaagagggggatatggagaaggtgggccagggtgtgtggacccgggcagaatctggggaagaagcctgccattcgtctttctttcccacaccaccgaacccactgcccttcccacccccacagcccttttatgaaatcagacaacgtggtaggtggaaaacagcagggcctttcctctgggttttcaaccagaagtgatattccacagttttaactggttactg

SEQ ID NO: 448962 - DNA, 1367 bp, Homo Sapiens
cagtcttgggtctatatcagggcttcagcctcaccacttactataactcctctaggcatgaatcactttaccaagccacagctttctcatctgtaaaacaggaatgacatctgcccttaatgatgctgtcaggggatcaaaggtgcaggcctgtggtactcaaatcgacacagaagccccgtaagtttaagttagtaagcaaagcaactcactgcaaagatgtgctggatcgacacatccttgggcataagagaggaacgactattccaaggtctggaagcacaatgggacttttacccaccccatcccgttcatttgcaactattcatgaaattcaccaaaattatttccttgtgttttacctttattgttttgctttttggatcaccttcagaaatggttatatctgttgagtttaccttctagaagatgcagaaacagtaaaaaaacagagccacctcagatcactcaaggggttgttctattttcaaaaacacactgacttttgaaaagtccctgcattggttggataaaatgtctgaagtggttggggggaaagcaagacaaagtcttaactacagaatatatttttaaggaaatgcagctttattactttcaagtacaaacaataacttgggcttggctaaccaaatttgcctaattgagggaatctgctttaatgtacagatataaatgatttatagttaacacaatcactcacgggtaaaaagagtgcttctatgatgcaagaaaataacttctcatcttagagacatcttgttccacaatcaccccactatttgcttaagcaacctcttcttccccctaccccacacagttcaaatataaactttatctcatgccctctaaatcacaacatacatcaaattcgtgaaatatgagttgattactttttccacattgctatagatgttggattgctgacagaactatctcttcaacctgagcattctcatcaagtatactaagtctaaatcagtgaaatatgcctgttcacaatctgagtacaaagacaccaaaacatgagcttttatcatctgaattactaattttccagggttgaatattaaaaacacatatttacttgggcacatttatgaagagtagaagtagctgaattctttaggctgcaataattaagtgggtttacactggtcaggattgaattactaaatttaaacaactgaactgttccaggaaagacaagaaacactgaaacatcctaacagcaaaacagctttttgcactgagcgtgaccattcagtctgattaggctgatgggaatggtgcaaagactactcagtaatccatttgaggatttattctgaacaaagtttactttccta

SEQ ID NO: 448963 - DNA, 411 bp, Homo Sapiens
ggcggcataaacagcagaaatttattggttacatttatgcaggctggaagtccaaatcaaagcgccagctgggttggttccttctgagtagtaagagggaaggatctcttccagggatctttccttgacttgtaaatggtccactcttgtgcatgccacttcacattttcttccctggatgcatgtctctgtgtctgaatccccccttaaggtatgccgcagagcaagggctcaacccttccgactctcaactagggcgagctctgcgttccacgcattcttccactcctgttctgcgacctctccagttccaaacaagctgcgttgtactaggaatcctctctaaatcatacttcgcatctggttattccttatttcttccttcaggagcccactctctcttgggagagc

SEQ ID NO: 448964 - DNA, 781 bp, Homo Sapiens
ccatctcctcctctgcattaaagatgacctgctgaacattgtcatatgtctctgtaatggggtggtgggacacatagtgtctaacacttcagtttctctgctgcttccctcccattgagaagccagtgccagggttgctgtgaagatgggagagcttctgaacccacctcattaaaggatgagaaacccagggtccgagagcaaagggacttgacggtggccgcaagtgcttcaaaggcagagctgggattggaacccaggtgtcatctcgatgggaatgtccagcagtgatgtccaagtgggaagtgaagacccgaaggctcaagggacacaggtggctgacagtggtcaaaggctagggggcaggattcaggcagaggagctctagggggtgtttgccaccctgtgtgaactcccgagactctaccaggggggccgaaaggagtaccccagaagggcccaaggggtcctcggggttgacctgactctctggagtcctggatgggtcagtggctgtgggtgtttggggagggcggttcctgctgccaggctggggcagcagaccctcaagacatagttacaaagcctttggtgtcactcagtgtctggcttgccctggggcccagaagggctggtcagtcctgcctctggcaggcaatctggtaggcccatgattcaaggaacagtgacattcagtggtccagtccactccctcagaggaggcgggtccagagggtgaaacaggctgtgttgatgacagtctaccggggtaccgaggtga

SEQ ID NO: 448965 - DNA, 563 bp, Homo Sapiens
  misc_feature (427)..(427): n is a, c, g, or t
  misc_feature (436)..(436): n is a, c, g, or t
  misc_feature (458)..(458): n is a, c, g, or t
  misc_feature (463)..(463): n is a, c, g, or t
  misc_feature (471)..(471): n is a, c, g, or t
  misc_feature (494)..(494): n is a, c, g, or t
  misc_feature (513)..(513): n is a, c, g, or t
  misc_feature (551)..(551): n is a, c, g, or t
tattttttcaatcttcttttattcatttagaaagttacaggtaacaaattgcacatcaaacagtttttttaaagtatacaacaaaagcccagagaagaatgtgactaagaatggttgtaaatagaaaaacaaaaccaaccgccttcattggaatctagcttctaacccactggagtatggaatttttaatgacaggtcaaacttggaccacatcccaggggtttatgttactaagaggactggaagaatgtccctccagttcaatctgggcttcttacctgggtaagacatgggctcctggggtataaagggaatttcccccatggggctgttaaataaagggatagtgtttaatgggtaaacattatacattcctctaggctccttttcaattattattaatctccctctccaaagtaggtatttnttgtttgtnaaaccaaagtctttaaggtttnattantgggcccncaatttttctctaggggtctttnagggtgccaggcatttttnccctggaaagcccccgccaaatgccttcagtagggggnaattggggctct

SEQ ID NO: 448966 - DNA, 430 bp, Homo Sapiens
caaataggtgctttttaaaaagggctttaatactgtttaagtagttcaaataggcttcctcactattaatttgcttcagtaaactcttcagcttaactcattatcttaaatttcagaattaatgaggttttactgtaaaagtagaaaagcaaacacttcaaatgataagactccagtatcacccatactaaaaacttagcaataaaactgcagtttgaaaagctactgtacaatgcagcaaggactaggtgtcaatactgctggaagcagagccaggtaaagaacaggaaatctgcacagtattatccctgtggttcttagactcattcgaaatacagaactgcaatctcacaatgaaacaaacatactgcttattaggaggcactacagttaaagctttttagaaaagagagagaagtatttttaaatg

SEQ ID NO: 448967 - DNA, 491 bp, Homo Sapiens
ttttttttcacttatgaaaacatttttattattcattcattccacaaacgtaggggctttccatgtgcagggcacagtgctggacactgaggcctctgccctccagtgctcatccagggcttggtcctccaagcctacctggactctgcctttctttgggacgttgtcctggacttcagtccatccagtacttctttccagaacttcagaatggaagcacaggtgaaaatcactatatttcaccactgatcatgggaacctagagtggaatatcattactgcatcacagacaagatcacagacagggtaagaagggggagagaggaaatttacaattcctcataaatagttccttatttacagagattgtaagtgattatgtaaatcacagagcttccaattaaaaccagctcaagctacaaacatgaaagtccaggggcagtgccagagccaccctcacttgcccgagtgctgctctccagggcttgcta

SEQ ID NO: 448968 - DNA, 1139 bp, Homo Sapiens
ttatcaatcatatcataccaaagtttattgattacatcaaacaaaaatttctgtaatggaaaaggcaagttgcagtcataaaagatggcattcacattcattttagaaagcaacaacgtagatgtaaaaaactgcttaagtgaaaaatgtaatattgcagtcccattttgcaagctgaaaaatgattttgtcaacacgcataaaatctgcacatttatatactgcatgttattaaaaaattccatcactaaattattacgaattttgcaaagttaggcttacatttatactgttgctggtgtatgtgtaagtagatatggaatgaatgttttcagtttagtaggtaacatcctcaaacaatggacagcggttgtgaaaattacaaagacattttgatagctcaaaattattcaaattataggtagatgatcttattatatttttttccctttctctgtcacaaatggggtgattacattgagtgctaggaatactgcacggtctatttcaagttattcgatctgctaaccccacactggccagtttttagctcttcagtaaaatatcttttaaaaaggaaagccaggtccctctcaaggatctaggccatgatatcatgtatcattgccattctgaatttgagctgcagtatcacaatgtaatgtgtagctgagacataactctaaatcccccttactccttgtctttctttctttctggctggaaggaattttacatgcaaccagttatttttctactagattattctgttaactctccaatggtactgcattaaacaagcctctctactgtggctctcttgtctgtattcacagttcccatagattttatgtaaaacagcaatcataatacagcaacaacaaccataagaacaagaaaacaaacacaaaatatcaaaagctttcctgggttagacttttttagctctttggaataggcaaagaatatagagacttttgttttcagcagcttacctcaaatacgggctaccagaacacagcacacttaggtaagttgtgaatgacatgtaacaaaatgctcaaaaataatactgatatatgagagcaaatgaaataatgaaaaagggtctataatgatggaatggcttctgataaccc

SEQ ID NO: 448969 - DNA, 618 bp, Homo Sapiens
atactacaaacctattttatttatataacttcttatgaagtagattttgtacacatggtaggctaaaaattaaaactgcttttccacaaaactgataaattactagattcttggttctttcatgatatcataacattaaatcattaaaaatataaggcaatttaatgtaaactactagcatttacaaaacagtaaagttataaaaaactgtattacaagcaaatgcaccaaataccagtgaacatgaaacaggagtgaagtttgctggagaacattaaaaatcacttttcagtgggttcacttcacattcatgctgcactgggcctgacacgttcagcaccatgaagcagacacttcggcaactagaaatgttacttctgtttgactttttttctaaaatgaaaaagcagtctgtgaaatgcgtgttaagaacgatctatctagagtcgcacagggtccagggccgctgcagttgactcagttgttcccatcctcgttttatttgacaaagtacttcatttggccactctggaagaatttattttcttgatatcaactgggctcagaatcagtgttccatttttgaattttccaacctgtccaatccgtccatttgcc

SEQ ID NO: 448970 - DNA, 1072 bp, Homo Sapiens
ccatttaaacatttttataatttgtttcattttcaaggcacaaagagtttatgtcaatcattttaatgtctaagaatacaaagttagcactagtaacatctggtagtctaatcatttatcatgcttaaatgtaacattacaaaactacattttaaaatctgccccctaaccagatgtgaaacaacgtggacaagggtgacatgtgctagacccaatctccaaaaacgtatggttgacaaagacagctgactgctggggtaaaactgcagcagtcataatcgaagagcgaaagaggccactctattaaagactttgtttcttttgctagacatttttcacctaatcccaggatagtttctgttaatgcatcttactctctttcaaacgaatcgtccctagagcaggtgtacacattaaaaatgagctttatagcatcaaacacataccacaaccaactctacaaggagggttttctgtaagatgtgtacgactgtccgaagaacacattctggctgataagtctcagctcctgtgaggtcctgatgagtatctaaacaacctcacattttctcttccacgcctagggttaaggccagcactcagcccacacacaaaagctgtgatgagaggttggttagggatggtggaggcaaagccacagatcagccagaaactcttttgagtcaatagtttctactccctccctaactggaccgtttaccagaactgcccaggacttgtcaccatgacttttatctccctggattttccctgcttgatgtctcgatgagacattagggcgagagtattggtatcccacacgataacacagcatgagggactgcacctgggttctcagagaagcgccgggaaaggacaagtgtgctagtccattcagggcaggaggttccagtgcaggattaagcgtaggcatcttgaatggtggggcccagaagtgacgaacgatgcccctgttcggaaagaagatcgagaaaaaaagggcagacgtaatatgcagggaaccacagaaactgaaacgaaagggacaaaccatctcattcttaacatatct

SEQ ID NO: 448971 - DNA, 988 bp, Homo Sapiens
  misc_feature (168)..(177): n is a, c, g, or t
  misc_feature (396)..(410): n is a, c, g, or t
  misc_feature (420)..(500): n is a, c, g, or t
ccccccccggttttttgcccccggggcgaaattatttttggcacaggggggcaaaagggtggtgatgccgccgggggagttcagggttcaacaaggccggtttgggaggggtttcaagttcgggggaaaggctttaagaatttccccacttcttcccataaggccaannnnnnnnnnaaaattgatattgggctcgcttggggtcccgttgagaggtcccggaaaggccccaaagccccctttggatttgttagaacccttgggtcgccccggggggtttttatttgggggaaatccaacccttgttcttgcccgggttttcttgggaacaacttaggccaaggtccctttccttagggggccgggcggccaaagaaaggttttgaaaaatttttnnnnnnnnnnnnnnncggcaaggannnnnnnnnnnnnnnnnnnnnnnnnnnnnnnnnnnnnnnnnnnnnnnnnnnnnnnnnnnnnnnnnnnnnnnnnnnnnnnnngtttgttaattttaaagaatagtattttattgaatacgttttattcacagaaaaataagctttaatctacaatgaatgccagattatacagcagaaagcaattttcttagttttccacacagaaaggttctaagtgaaaaaaaccataaaattatattcacaaatatagtactctgtctcaaaacatttcacatgattattcacaatactaatacaattagatcagtcagtcaggttaaaatataacagtaatgaaaaaaatgcaaaatctaacataaattacattaaaacccttgttacatcaaaccaaaactgcaaatttcttactaaatccagaaaaatggtaacatatatagtaatttaaaatattacattaatgatacagaataagaaagtggtaaactccaaaaatctataggcatatctgcaaacttcagattcaaagtagaatctgaccacccaaacattaatgtagcatttgtctaacc

SEQ ID NO: 448972 - DNA, 405 bp, Homo Sapiens
cagtgttctcacatctttttaatcattcatattgacttaatcaggttgacaaaatctcagggttggtctgggatcattcacaaatcagaattactcagagaaattttcacagcagttgcagcagcacaaactctaacgctgatttaaattaataactgttattaatgaacaaacttgaaaaaggaatttcatatagaacattacatttctccctgacactaccgtatcataaaaattaaaaatgatataaacatgttttaaagtcatagtggtagaaccagccacactacagtgcggcattgttagaagttcgctctcaagttgactcagcttagtaaagcaaattgttctctgagatttcagctttggttagtcctctttggctgacatgaacattatggagtg

SEQ ID NO: 448973 - DNA, 700 bp, Homo Sapiens
  misc_feature (653)..(653): n is a, c, g, or t
  misc_feature (660)..(660): n is a, c, g, or t
  misc_feature (665)..(665): n is a, c, g, or t
  misc_feature (672)..(672): n is a, c, g, or t
aactttcacattgctttatgtatcttttctatgcattagttatgtattagttttttatttagattggaacattacgtacttatttaagaagatggcataaacttaaagataacttaaaaataaaactattctattacaattcctttaaatcacaaattcagaagcactgtttctgaatggtgaaaaagatgacatacaaactatatagttcaatatacttcaatacaaacatggcagcttcacttaattatacatacgttttatttaaagaaaagcaaaacacacaaccacagcatttcaattaaggagcttagaaaaatttcaagtgcgttcttggttctccagttaccattccaataaaaaactttttaaaccaaagttaaaattaagtgaaaaagaaagaagtcccagtaagcagaccgaacaatacaaattcaaaatactactctatcttcttgtgttcgttcccaccaaagtgtgctgtttaaagttccacaactattatcttcctcctcttgttctttagtgagttctacaaaaacctgttccaatgttgcttgaggaaaagctatattcttcaatgggcaaaagcatgtttaggcttcttccagcttaaaaaaaggttgtggaaagggggactggaacatcttccntaggganttttntagggcnaaataggaggaaaaacttcccgacgggt

SEQ ID NO: 448974 - DNA, 392 bp, Homo Sapiens
acaagacttaaaaaggatattttattgtcatcaaaaaagaaacatcaaagacaattaatgagctttagaaaatttaaaagaagaagaaaagccaaagctgaaatggtgacacctccttcgagtgagcccaggagtcctccctgacggccgaggcaggcgctggccgcagtcccgctcgagcctcccttcctgtctgcggattctgcgtgacagtcacggaacggcgtgatgggggcagcagagcgtgggggcctctgtccagcactcgtggccagcagccccgctttcgcaagaacacgggcaccctctttgtcgtcttgcctctccacctggtgcccccagagtggctgcttgttccttgctgatgtgacccggggctggacgccagcctc

SEQ ID NO: 448975 - DNA, 848 bp, Homo Sapiens
actttgtaacaaaaatttattaggattaagtcaaattagaaaacttcatgctccaccacttgtcatatttacctgaaatgacaaagttatacttagcttgagtgtaaaacttgtgccccagagattctgtttggaaagcaaaaaaataattgatgcacatagcagtgtgcctgataccaccacagtgaatgttgtttaaggcctaacaaacagtggtcagcaaagcatacattacttttaagctttgggtccaaggaagatgtcattccctacctccttcaaaagcagactcatcatagcctgggcacctaggcctggagcctattttttcgagtctaatatgaacatctggatttcaagaggtgctaggcttgaggtatctttatggcttaaaaggcacaggtcatgcagctgaattaaaagctatcatgttggtctctggaatgcaggccatgagccacgccttgtaagggggagacctgaggccctgtccttggctcctcagtgtaacccacacatcattggctctgttcctctcgccctgctcctgcactgctcatcagctgtgaatgctggaattggaggacaggttggggctcctgcacagtctgctgccaggtagagagcaacacaggctgcagaatcctaccctccagcatatcgcggggagggggggacctgctgcacagccaagaagtgactcacatgcaggcaaggacgggaaggcttgttcttcaggcacaacgtggtatggggagaagaaacctggttttcttggaatggtcctactaagcttgaaagtggtgctgcatttagggcagggcacacccagccataggcaacccccc

SEQ ID NO: 448976 - DNA, 582 bp, Homo Sapiens
  misc_feature (145)..(183): n is a, c, g, or t
ttcattaaaagtaatactgtgaaaagtttatttgcatcgattaattcctttttttcaccatcataagagatattgacatttgtttgctctttgtgatcagagaaaagacattttggaatggataatctgtttctaccattctttnnnnnnnnnnnnnnnnnnnnnnnnnnnnnnnnnnnnnnntttccagtagtcttcctacctccagtgtaccccagcaaaatattcatagctgtgctgttaggaaattaatcaaccataagcttcaattacccactttttttcttccctaaggtgtctgtacttatgaaaacatatatagcatattcctgaaagtataccatattcctacaaagtaagggagcctagaagcaacagtgatcactgcctttcagtgtctccaaccccatgtaaccactgataggataattcagtctctaagtcatttgatctacccatttcctaaataacagcgatcaacttctattcaacaaagctagtctgggtttactaacacgttcccccaaaattcaataggtccatgtaacgtagtaattaggtctttcaattttttactatgat

SEQ ID NO: 448977 - DNA, 328 bp, Homo Sapiens
aaattttatgcatgtatacacactttattaaatttgcattctaagatatacacaaggccagcatttcacaaaacttcctattattccaaaagcagtaatcatgaaacagtgattatataagtcaatcaggcaaaaaacattatctatagggttgtatcatatcatctcttatacctgttttcaaatagaagcctgaaatatatgatatatattagaataggaagagagaattttactttataacaatcgcttttcaaatattagactttatataaaaataaaggggtcttaacgaagttcatctgtgagttagcatatctctttattt

SEQ ID NO: 448978 - DNA, 401 bp, Homo Sapiens
  misc_feature (387)..(387): n is a, c, g, or t
tgcaaagtaactgtgttttttatttctatgaacaataaaatactttcataatttcacatcccattgcttttaagagcacatatattacaaataaaggaactccacaaactttaaagattagtatttatcaacgcttttgtacacatacacaaatattttaatataatggtatctgaaatgttattcatatatttttagtactgtcatagtattaactaaaaaggatcttttaaatttggtaaaaaccgtatattttacaatcttttatttacatctgaaatatgcttaaatgttacaaaaacattcactttaacctttaaaatatgtggtactaggactggggtactgaccatacaataactgacagcaaacttagggtttgcattnggagctacacattc

SEQ ID NO: 448979 - DNA, 1204 bp, Homo Sapiens
  misc_feature (752)..(827): n is a, c, g, or t
  misc_feature (959)..(968): n is a, c, g, or t
  misc_feature (1135)..(1143): n is a, c, g, or t
agcggattacaggcttgagccaccacgcccagacttgtgaggttttaatatgaagtattaaagctatgctggttagacaatttggaaaatgtttcttctcctatttctgacagagtttatgtaagatgtgtgctatttcttccttaagcatttggaagaattcacttattaagccatgtgagactgtagttttctttataaggtgtttaactacaggttcaattacatatatataaatattcattttggtaacctgtgtttgctgaatcaatttgttcattttatctaaaatttcaaagttgttctattattcatttatctttttaatacttataaggtgtgcggttagagtttgtgccttttgtctgttttgttaatcaatcttgctgggggccatcaattttattagtgtttcaaaaaagcaaactttgattttattcatccctttaccatactgaaaatgttttgcttaatttccaaacttatagttccactgtgattaaatatttgtataactaaaactctgtggaatttgtgtcttctcaatgattgaaaatatgattaatttttataaatattgcttctgcacttgaaaaggatatgtattctgcatgttgagcgtagtgtaccacgtatctcagttaggtccagtgtgttaaatgcatcctttaaagattctatgtgcttactgatgtttgtttatttttcagtggctgagacacagatattaaagtttcccacaatgatcatcnnnnnnnnnnnnnnnnnnnnnnnnnnnnnnnnnnnnnnnnnnnnnnnnnnnnnnnnnnnnnnnnnnnnnnnnnnnntgttgggcccccccgccccccaaaaaattttttaaacatttctttgggggcgggggccccaaaggaaaggaaaagggggctaactggtttccaagaaaacccggggaagaaaaagggtggggatcccccccnnnnnnnnnncccggggggaaaccaagggttttaaaaaaaccccagggggttttggggggcttattggggtttataacagggggcccaggggaatccaatttaaattaagccccccccggggcctccttggggaaagggggggaatttcttttaagaattttgccgggctggggaannnnnnnnnaaaccggctgtggtggaacccttaatttcccacgcggggttataacccccttggccgccct

SEQ ID NO: 448980 - DNA, 504 bp, Homo Sapiens
  misc_feature (277)..(319): n is a, c, g, or t
  misc_feature (380)..(380): n is a, c, g, or t
  misc_feature (465)..(465): n is a, c, g, or t
tttttttaaacaggaacttaggttaatttaatagaaaaaataaaatatggaataacattgattttggccagtatcagttacaaccgttctactatattttacaaaaaaacaactgaacattttacacatgtacagtatttttcagtaaaagtggatttggatttaacaatgggtcactaattgaaaataaaaagacaaaagaaaacagaaataggacttttgtctctagaaggttaggggcatttgttgagtctccaaactttgtactatccattannnnnnnnnnnnnnnnnnnnnnnnnnnnnnnnnnnnnnnnnnnacattaacttaaactttgaaagcattatcgttctagttaataatgttatgtagataaaatngaggcagtaacacgctaagtagttaaacccagtatttccgcgacgtgcacctggcatgggtcagtgggaaatgggaatgcacgcngggtagacccccaatgaattttggtggtcatgttgatgg

SEQ ID NO: 448981 - DNA, 435 bp, Homo Sapiens
  misc_feature (412)..(412): n is a, c, g, or t
  misc_feature (418)..(418): n is a, c, g, or t
ttcatttgtaaaatgtttattttcttaggtgtgtttacaggctttataaaccaccctgatatctggttcattttaattaaccaccctgatatctggttcattttaattattcaaaccgaagaatatctgcaaaagtgacaggggaaagatgtatattaatatatataatttcccaaactataaacctttaaggccgtttgagaaagctgtagagctgaggcacgaagtaatccttgtaatgcccgtcaatgaatccttttccactgttgtgcacaaaccagcaggtaacgtcccgttccaaacactagatccgttctgtaggctttctgtaagcccctggggggatggatcagctttctgcccctttcacttcccatggctgggcctctgggtttctcagggggcctttccnggggcntctcattgaagatgtgt

SEQ ID NO: 448982 - DNA, 486 bp, Homo Sapiens
  misc_feature (35)..(35): n is a, c, g, or t
ccgacaaggtttggtattgtatagtggtagggagnaggtttgttaatactttattagtattttctaatggacagaacacaaaccaaataaattttttaatccttttagttgaataaaaataactgacattctgattgttgtttcttctttgttaaagaaagaaagtattgatagaacagttaggcacacagttgacacttactgtacaatgatatgcacacattatcttttaacaattataatcctaaaatgtgctcttcatattttttcccttgtaatacaggagccatgctcctaaaagcaaaatttactactaataaaagaattttccaaggagtgacaaaaagacttttaaaacaagtccttaaataaaaggatgcagcaacaacggaatgtaagttgttgggattaagaagacagtttaagctacatctcaaaaaattaaaaattcatttatcttacaattactcaaatacacatgcattt

SEQ ID NO: 448983 - DNA, 483 bp, Homo Sapiens
  misc_feature (437)..(437): n is a, c, g, or t
aaaaaatttatctatgtaaacacatcttaatactaatttgagttactacttttattctttattgtcacattttccaagttttgcgcattcaaacttggcaaacatcatggagatttgtacaaacatacatatacatatatacacacatatttatagccccagcttcctcattaaaccttgtgctcaggctcctgttaaaagaggtaaaatggtgagaagataaaaatcagggaaaacatgaataaatgctgactgacaaatcttgttgttatgaatttgtaaggcagacattttaaagcaaaatccattaccttgctaaaatttccactaagctacagcttcagatatttacaagaaaaataaatatcttttaacagacttcaatgtggtttaacagcaagctagctgaggagttgtattttgttgttatttcaggnaactttttattaaggaacagttaatatttcagtgattacaattttc

SEQ ID NO: 448984 - DNA, 593 bp, Homo Sapiens
tattatttttttgaggtataaaaaggaatatttatcttttaaaaatacaactttgaacactactggcatctcatttacaaagtatttttgtgaaatactctccattggctttgcttgctcagtacattcttttatcttcaattgagactcaagggagggtatgcttgcattattataaataccacaaccaccaccacacacaataaagaccatctctgcctcaggacattcgccccaaacctccatcctctctgtttactttccaccaagcagaagtttctgaatggtccactcacatgctgccattgcgatttgccgatgggcactaccaaggtgtctctggcaattcgcactccaggtggagctgacctatttgtagaaagcctcacaaaccctagctcattatttattcattgattcattactattaatacttatatcaagtctttgcaaacattcagcatgaagtaaacatagtatttacagcagtactcggtttgcaattcaacacactgacaacagaagcaaagggaccaacagactgtaagaaggccagaggggaaagaatattaatataagtcccttctgccact

SEQ ID NO: 448985 - DNA, 611 bp, Homo Sapiens
  misc_feature (236)..(236): n is a, c, g, or t
  misc_feature (240)..(240): n is a, c, g, or t
  misc_feature (292)..(292): n is a, c, g, or t
  misc_feature (351)..(351): n is a, c, g, or t
  misc_feature (384)..(385): n is a, c, g, or t
  misc_feature (465)..(466): n is a, c, g, or t
gcaagcaaaatattttattgaaaattcagaaaagttacaacactttaagacagcgtttttcatattctgttataaagaaaaatgttaaaagaattgacttgaatgttatatttaggtttcattcaaactaacaaaatcattttgaaaaacaaaaatccacccacagctgaatttattcaggggtgtaaacatatattttcctattttgttatcaagaaaacgctaatgaaatattntttnagtgttcttttcaaaacagcatctttctggacccattaaatagtatttagtnttagattctatcacatagatctgtttgtggggggggtgctgctataactgtgaccaggnctgtaggacagctatttatttgaaatttagatnnagaagatttgcttttacttatatagggcataaaacaatctagctttttgggctgttctatctttaagcacaaacacttcnnaaagtagccctttatggggcccgggttacaaatatcaatgtgccccagttactttctcggaattggtggggggggcactcacttcgaaccaagtttcaatttttaagaggctcgtgcaaaaggcacactcattaaaaagatttgg

SEQ ID NO: 448986 - DNA, 1028 bp, Homo Sapiens
  misc_feature (48)..(48): n is a, c, g, or t
tggcctccctatttggtttagcagaaattcctgaaattcttcctttgnaaactcctgtgattgttgtttaaagggacttatcaccatcgttcccttctgatcccttaatttcctgcctcaaatgctgaaattgcagtaattcccttctcatcctttgccagaatttttctttctttttggcatgcaaaatttcctccacatacttcctcatactttctattcagattggccaatttttcatttaagctagaaatctgtgtctccaaatcactttttgttgctttatatttagacaagtcaactacctctctagtctctaatttttttaatgcttgtttagtattctgaacctccgactgaagtttggagacttcttccattttgttttggctttcttcttccttttctctcaagctggcttttatgattccaacttctttctcaaatgcttctttaatctgcaaatgctctgccaggggtacagaagagttcttttgattctccaacaattgatgcagtttggtcactgtctgctgctctttctcgtaacacctttgcatactcttcagttcttcctttagattttcaattgtgccattaagagattttttcagagcctcaacctgttccaatggaacatgttgtttttgcaaaagattttgcactgcaagtatctcagaagtctgtttggcattttcttctactagcttctctttcacattctttacttccgtgtatttctgtgacaagtcttttaactgtttgtttagctcgtctgtttttctgcttaatgctctttccatttcatgagacttctcaatgagaactgtcttatctctcaaatctttctgaagggtaaaaatctccttctttaacttgtcattctcttgcttgtttttcttgacttcttcttcactgacactatacttttgtgtctgctctgataactggtcttttagttctttctctgttgctttaaattttctctcgcactcctcaaagctgatccgaggaattccggaccggac

SEQ ID NO: 448987 - DNA, 384 bp, Homo Sapiens
atttgtatttatctcagcaagatcactcgataatctggctgatttttgctcctgcacttggccctttccacgttcagagctcacctgaaagtcctgaccacctacaggtgttgttacattctttaacttccatctctcctcctcctcttttccctttcatgtttctttgagcttcaccagctccttggcaggttcagcttcctgaggttctgcatccattatcaaccaattctctcagctggcacagaccctgctgtttcttccacctccgttttctgctcttcggttctctccatcacggtgcctgacgtggacttcggccacaacctcttcattggtggacattcatatatttctcaatcaaaacacttcatgtcagacaga

SEQ ID NO: 448988 - DNA, 917 bp, Homo Sapiens
  misc_feature (306)..(323): n is a, c, g, or t
  misc_feature (342)..(342): n is a, c, g, or t
  misc_feature (580)..(757): n is a, c, g, or t
agtagtgtttccaagagtattagggagaaccccattaggggtttggcgagaaacttccccccgaggggccacaggtggagagtgaaaaaaaggcttgtaggcaagccacaagggccaggggtgtaaggattcccctgggagggcctgaccggccttgggggtgggggccccccagtgaagccccaggccccctggaggggcttttagttcttggtccccttgccagaggctcagaaaatggaggtgggctccttgtgccttggtcccagcaatggttcccctgaaaaagaaccccataaggattannnnnnnnnnnnnnnnnnatgtgtttctggtgttatngtagataatctccccaacagtgggtgagcttggggtgagggaacctggctgctgggagtggaaacgccctagatcctccatcctgtacagctgcccagtggacatacctctctccccagcaatttctcaaggcacaagataaagtaaggggcaaatacaaagataaagctgtgaggcaggagggtctgagtctgcctctaaaggagtagccaagactcctgtttctctgcatttttcnnnnnnnnnnnnnnnnnnnnnnnnnnnnnnnnnnnnnnnnnnnnnnnnnnnnnnnnnnnnnnnnnnnnnnnnnnnnnnnnnnnnnnnnnnnnnnnnnnnnnnnnnnnnnnnnnnnnnnnnnnnnnnnnnnnnnnnnnnnnnnnnnnnnnnnnnnnnnnnnnnnnnnnnnnnnnnnnnntggggtccctgttgcccagcatgcctggaccctcaacacttaatagtgataataacatatatccaacccttggtaaatgccaggactcatcctaagacctacatcgataaactcctttaatcttcacaacactgggaaatatatatatatacttatcctc

SEQ ID NO: 448989 - DNA, 341 bp, Homo Sapiens
  misc_feature (328)..(328): n is a, c, g, or t
cacatctgctgtacctttattgcacttttatgacattgcaaactattccacaaaactctgcaaaggtcagcccacagctgcgcacagccagccctgcaggatgcacttgcaccaaccgtccacagccaagtccgaggtgggtgctgcaggccagcgggcggactcgcaggacgcctggtcatcgggtcctccaaaaccgcgtaggcatccgtccaccagcgcacaggccagacgtccagcgagagcctcctcccgtcctcagacgagaccctccagccctccaggagccgaggccccaggaaggagaaagggtttttacttgaattangtcccgagtgtga

SEQ ID NO: 448990 - DNA, 342 bp, Homo Sapiens
cagaatattcaactttattttccattgacaaacacgacataaataacacacatttattaaatacacagactagccatgacttgaatgccagcaaaagtctaacgtacttttcatacgctcttttattttttgtctccacagtattgaagaccagcctttaaaacatactagaagatatatttaaatacactgacgataactacccataaaactttacatagaggtgataaaagagacttttccatttaatcaagtatatagagatggatgctgaggaggagaggtgaagaacactatgcttttgatactgatctttacacggacgcgtgggcggacgcgtgg

SEQ ID NO: 448991 - DNA, 394 bp, Homo Sapiens
  misc_feature (324)..(324): n is a, c, g, or t
cattctttttttaatccattccaatcaggattttgttttcccacccttctgaaaccaattgtcaaattcaccaaaaaattccatcttgccacaaatccaatggtcaattctcagtctttattttattgaacctctcaacaaacagctgcatttggcacaagtaagcacttcctcctccttcaaatggccttttctcttgttttctgagacacaacagctccttttagccttctttgctggctctcctccctctttttgcacttaaagtttaggttgacccaaggctcagttttccagaggctctcttttcttctcactgggttntggatgacttcccctagtcccatgcctttaattagatctattaggctaagaattaccaaattaatatagg

SEQ ID NO: 448992 - DNA, 383 bp, Homo Sapiens
  misc_feature (350)..(350): n is a, c, g, or t
  misc_feature (364)..(364): n is a, c, g, or t
ttttttttgttaaaaaacatgtttattttacaatatgtacaatcaggaacatattttaaaaccattaccattaaaataaatgaagatcataaatcacaatttagtttgttcttagtgtatatactcacattaaaatataaagaacatataccaaaaagagccaaaagtgtgcattttgctaaaacctggtatatacatattccattggaaaaaagcaatcaaaaatgacttaaaccaaaactaagttcctgtgatgtgtagtaaccattatattgtttgtatgaggtagtaactaaattattttggccatgtattaatactctaagtcaaaagaaatatgaaaagggtcntaaaataaggccancaaaagtaaaaattccaag

SEQ ID NO: 448993 - DNA, 3447 bp, Homo Sapiens
  misc_feature (944)..(963): n is a, c, g, or t
  misc_feature (3284)..(3334): n is a, c, g, or t
aagataggtgaggtgggggtggatgagtggtgtggttggcgtgtatgagtagtgttgtgtgtggacggaggttaatagggataggtattaagtggggtatgggggttgtatgatggttgggtagttggcttatgaagtgagtttgttgtgtatctgataaactggtagcaaagaggttgctatatgatgtatagaatggatttgttctatttttgttgtgttggtgattgtggtggtgtattggttatgtttgatgtggataaggcatagtagtgacgtgtaatgaagatgagttgagttaaatagatttgtaactattggagtgttgaaagtgggctgtgagctagtctgcgcatgttgataggtgttagtacattgttttggtgtatatggtgctgtctgtgtggtggttgggtgtcaaggtggatttgatgttgcggtcaacgggctgtgtggcacgtcgttgagaagctgtagtgtcttggtttgtggtatttcatcagcttgtagcgcaatgtaaagtttgatggtcatggactgatctgtgggtgtctgtgtttgctgtgggaactcagcctgttcttgtcaaggtgaggaatgctttaagagtgagcgcgctgccggtatgccaagtgttttggtaagtgtttaacttgacaaagtgatattcgttagaaaaggtgtggtagatgtgtaggtagtatggggtaagtacctgcgataataccgtataattaggtgacgtatcaagccagcttaagggtgtgaagatggttgtgcagattcagcgagcattaaagggtcttcaaatatagtgttggacaggacctgacttcagttccaaattattatgcagatatttcgaagatctataagaaagtatcagttctataccaagataaaggtgttactcaatacctgaaggttcacattttaaatgttannnnnnnnnnnnnnnnnnnngtcaacaaatgattgatgaaataatgcaacacccttaaattccagaaaatggcatggtttttccaacctcctgtggatatggtgcatgatcaatctattatataggattaatacaagttcatgctttttgtgttatggtgaaacaacattaaagaatccaatttagattggttgaagcacaagtataataatccttgaatgtgatcaaacctatttaagacaccagtttaaatccattatcttgagacttaacgtcgtactgtggtccatccatcttcatcagtctcatttttagtacgacggagagattccctatctttctcagctctccatgaggccttctctttttcaccttctctttctcggtctcggtctctttctcggtctcttgaaagagctgggggaggaactcgacgaggagggtcccgctcttccacccggtcatctttcctgtcatcagcacgtctccaagaacttacttcttcacgttctgatctgagtggaggtcctcttcggtccctgtcgtctcttagatctcgtctttctcttagatcacgccggtcatccctctcacggcgacggtcatccctatccctatcgtcccggcgaacttgagtctctcccagcttgaagattcctcagctggtcctcttctccagccaccttcatccctaggtcttctgaagcgatcctctcgatccacatctctctctctgtccctttctctctcagggtccttgtcattctcctcccgatcttgattatctctgtccctttctttttctctgtcccattcacgttcttctgatggccttgattctcgaggtggaccccagctctcctctctggctttttctttctctctccatccacctggcttgactaatggtctccaaggaccaggtcttgagtcatcaccccgtctgggaaaccgatcatcatcagcacgtcttgaaaggcgatcatcatccatgtttctccaagggcccctgtcatcctctgcaccacgcctgggaattctgtcatcatcggcgttcctccaaggtcctcgatcatcatccaaccctcgcctgggaccccggtcatcatccatgcctcgcctgggaccccggtcatcatccatgcctcgcctgggaccccggtcatcatccatgcctcgcctgggaccccgatcatcatccaaccctcgcctgggaccccggtcatcatcagcattacgccaggatgatcgctcatcatcagcgcctcctcgcctcggcccccggtcatcatccatcccacgtcttggtcctctgtcctcatcagctgttcgccagcttcctctgtcctcatccagtcctcgtctaggtggtctgtcatcatccgcatgacgccagtttcccctgtcttcatcggcaattcgtctgggaggcctgtcatcatctgtgttacgccaggaaggccggtcatcgtctgccccacgacgagagaacctatcttcctcaggaccacgtctagggcctctgtcatcatccatgccacgccggggaacccgatcatcgtctggtctaagagagggctctctatcttcatcatcccccagacgccggggccgctcttcatctcttctatgagacctgtcctcatctcgcccttcgtccacgtcgtccactccttctctgtcgggcctcttctccactcagaatctgcttcaggtccttttctccaggtgccttctgaatctctatctccccatcgagagtcctttctagaaagggaactatcgccaagtcttctctcttcctctctacgccagttctcgttcttcaatttccaactccctttggcgttttttcctttccacttcttctaatttcttcacccgctcctgatactctcgtagctctttctcgcgttttgctcgttcggcgcgctctctctcttcccgctcttttagcatttgttcttctgcccttctctgctcctcctcttctttttctctatagtatgttatcctgcgttcttctttacgctgccttttccgttcttccaatcgattatgcctttcttctgctaatcgcttcttcaaactgtttaagtttttcctcataaacagactgccgtgcagctttgagtcgcattacgaataaatctctgtcttcaagcattcgtgacattcgattcttatgttcaagagccttttcacgttctagctgcattgtagtaattctttcttcctcttgttgctcccacagatccatgtctttaattctctgttcctcgtaagcgctctttatcaaaggaatttcttccaaacgtttggctctttcaaaatagtcaannnnnnnnnnnnnnnnnnnnnnnnnnnnnnnnnnnnnnnnnnnnnnnnnnnccagttgttcaacctgtttagccatgataaaatctggatccaattcctcaaggtcttcaatatcaatatctttgaatgctttggcacccagttctggataacacgttcgcgag

SEQ ID NO: 448994 - DNA, 726 bp, Homo Sapiens
ccaaaaccgttttgggttctttccaaaaataggccaaatcttctttttcctggattctttagggcgttcttgaagttcctttcttttctttctcccagtggttccaacctgtttagcccatgataaaatctggatccaattcctcaaggtcttcaatatcaatatctttgaatgctttggcacccagttctgttttcttgatctgctccaaacgctctcggacagttttctttttgatttgttcatgttcctgtaagatacgctccttctctctctcctttgcttcctggcgcagcctctcttcctcagccttccgcactttctggagttcagcttccctctgttccaattcttctttctcacgctgaatattcagactctcaaggcgctcttttctctcctcaattgtctggcggcgagccaggatccgctggtgctcttttcgtgaatttttaaggtatgcagtgacagccaactgatgctgttcttctttctcttgcagtatatgagctggtttaatgacttcaagtgcttttgcaagtactgaggacatggctgtcagctggtttcgttatctgctctgaaggcatgctttgcaaatgaggaccaatcggagcatcttctcgagtagcataattcaaatcagatccaaaactcagggtccgagaagtgtgatcaatacgaacctgcaagtcgcaatgcctggctgcatctactatggccccc

SEQ ID NO: 448995 - DNA, 482 bp, Homo Sapiens
tcagactgcatatatttttattcatataaagttctttataatactttattttgtggtgttaagttccaccagttatttacaaatgatgtaaaaagctttaagtgttgttaatttctaaagtgttcttgcgttttcagaagtgtaagtggatctcagttgatctgtcaccccaaacctcaaatgatccatccaccctgcttggccatctaattcacctgctctccccagtgactattttggacctttcctctccatagatgactttgcaatctacagggaaaatacttatgcaggacatcttatatctcccccttaccacgtacagttctctccacagctgccagcagccctaacctttttgtctctccacctgtgctttggatgctcttctcccagccttttcaggatctttgtctgtcctcctatattaatgtattcaattattctctcagctagatccttgctacttggttttaaattta

SEQ ID NO: 448996 - DNA, 807 bp, Homo Sapiens
  misc_feature (204)..(217): n is a, c, g, or t
ctcagttcactcagaaatgtgtttccactaatttaaaagtattatctgatatatctccacatttactgaaaatacttcagatattaagcattatttcccccaaattcatggatacatttttagataattcagcaacctccctaacaacactgtactgcctacacagaccagagctccttaagtgagaagagcaaacctgtcacnnnnnnnnnnnnnnaaatgcaatacaatttcaaaatgcacggtggtcagtgaagcctcacatataaagaaacacagcatgtgtaaacatgcagtatacatactcatccagtatagtttctagtcctaacaaaacacaggatgtagggcgctttgtcaaatatgtttttgtttttgtgtgttacctctccaaatgctataatttttaatcaaataatatcctttttatcctgaagagtcttcttccaagatgttataacaaggacgggaagttaagaaagattataaaaccatttgattattggtccgttttaacaattcagagtttcacccgattattaaaagaaatagtaatttacccagttacccaaaaagtgttaccaaatttctctgcaatcgaaatctgctagaatttcttcagtaattttcctcgtccctcacatcttaaaaacaaataatgactgcagagattctgattgagactgagagaaaaatctgtagtgtcaagagtgaagtggtttgagaatatttcagaaattgctccaggcatcgttactccctgaattacataatgaacataaatttaaaataatagtatttgaaggt

SEQ ID NO: 448997 - DNA, 745 bp, Homo Sapiens
  misc_feature (150)..(173): n is a, c, g, or t
ccgcgcgcttccctccgcacacccacccccccaccgcgacgcggcgcgtgcgcgggcggggcccgcgtgcccgttcgttcgctcgctcgttcgttcgccgcccggccccgccggccgcgagagccggagaactcgggagggagacggggnnnnnnnnnnnnnnnnnnnnnnnnaagaagggcgtgtcgttggtgtgcgcgtgtcgtggggccggcgggcggcggggagcggtccccggccgcggccccgacggcgtgggtgtcggcgggcgcgggggcggttctcggcggcgtcgcggcgggtctggggggtctcggtgccctcctccccgccggggcccgtcgtcctggccccgccgcgccggctccccgtcttcggggccggccggattcccgtcgcctccgccgcgccgctccgcgccgccgggcacggccccgctcgctctccccggccttcccgctagggcgtctcgagggtcgggggccggacgccggtcccctcccccgtttcctcgtcccgccccccgccgtccaggtacctagcgcgttcccgagacgccgagaaagagtttcatacagagaacccccctttgggaggaggaaatcggccccaggtgacggcaagtacaaatcatggagcaaaacgaattcgtccagagtgacctgttatatcctcgcgcatacttgtgggggccgtgcatgtctttcgtatggagtgtgccctcggtgtcccaacgttggtcccg

SEQ ID NO: 448998 - DNA, 642 bp, Homo Sapiens
tataaatacaaatgtagaaatctttattccacttacttcttaaatataaatgggatgacaagtgatcaaactgatcagatacagaagattttgaggatggattaaaaagattttccttgctcttcaaaaagaaatttactgtgtccagctgacgattttctatcccggcctctagtgcatgtatgggaattgagcaccttccccagccattgagatgacaaagagtgtccacagtgctggcacttccatggatcatgagtctgtttaaaaactcttcttgagtcaaaccaaacaaaatcagagagagtccattctctgtcaaaacaaagcacagctgctggtctccactactgtctacaggaatacactttgtgccaagggaagaacactgcatgccctgggtctccaaatcccagagggtaatggtatagcccatcctttccacttcccaagtaaacagtgcagtgaatcctgtcacagacacacatttaagctctatgggttcctcttgttcactgatgtgcattattttccatgatcttcctggatcactggtcttggcatgatctttctgtagaacattatattgcccatgcattatgtcctgtggaatgaaggcccagctcttgccagtagtgggtc

SEQ ID NO: 448999 - DNA, 782 bp, Homo Sapiens
cccacgcttgggggtataaaaaagcagctgtcggccgatacggatgcggaacagctcagctgttgtcagcgagtgagacgggagagcgtgggtcactgcccctcctgcagcggctcttcatggcctgctcctcaaggcgtactttcaccctcaccacggtggacacgcgcaggtcccggacgtgctgaaggacttcgcccccggctcgcactgcccatcctgctctatgacagcgacgccaagacagacacgctgcagatcgaggacttctggaggagacgctggggccgcccgacttccccagcctggcgcctcgttacagggagtccaacaccgccggcaacgacgttttccacaagttctccgcgttcatcaagaacccggtgcccgcgcaggacgaagccctgtaccagcagctgctgcgcgccctcgccaggctggacagctacctgcgcgcgcccctggagcacgagctggcgggggagccgcagctgcgcgagtcccgccgccgcttcctggacggcgacaggctcacgctggccgactgcagcctcctgcccaagctgcacatcgtcgacacggtgtgcgcgcacttccgccaggcgcccatccccgcggagctgcgcggcgtacgccgctacctggacagcgcgatgcaggagaaagagttcaaatacacgtgtccgcacagcgccgagatcctggcggcctaccggcccgccgtgcacccccgctagcgccccaccccgcgtctgtcgcccaataaaggcatctttgtcggg

SEQ ID NO: 449000 - DNA, 605 bp, Homo Sapiens
ttaaccaatactgcaaagacactcggcagcaacatcagcagggagatgaatcacagaaaatgagaggggactatggcaagttaaaggccctcatcaatagtcggaaaagtagaaaccaggaggaatcagttgccagagtcataatattttcttatgtgggtcttatgcttccattaacaaatgctctgtcttcaatgatccaaattttgagcaaagaaacttgtgctttaccaaggggaattactgaaaaaggtgattactcctgaagtgagttttacacgaactgaaatgagcatgcattttcttgtatgatagtgactagcactagacatgtcatggtcctcatggtgcatataaatatatttaacttaacccagattttatttatatctttattcaccttttcttcaaaatcgatatggtggctgcaaaactagaattgttgcatccctcaattgaatgagggccatatccctgtggtattcctttcctgctttggggctttagaattctaattgtcagtgattttgtatatgaaaacaagttccaaatccacagcttttacgtagtaaaagtcataaatgcatatgacagaatggctatca

SEQ ID NO: 449001 - DNA, 553 bp, Homo Sapiens
  misc_feature (32)..(32): n is a, c, g, or t
  misc_feature (51)..(51): n is a, c, g, or t
  misc_feature (84)..(84): n is a, c, g, or t
  misc_feature (98)..(98): n is a, c, g, or t
  misc_feature (132)..(132): n is a, c, g, or t
  misc_feature (153)..(153): n is a, c, g, or t
  misc_feature (162)..(162): n is a, c, g, or t
gaagggttcccccaaaatgggaaggaaagaanacaggaactgctggaaggnaaaataataacaaccgtaaataataatgaaaangtttctgtgccccngccctcaggaaacttgaaaactcaaaacccttanaatgcttaacactgacggaanaaataggangggggaaataatccttagtccccatgttaagaaagggggacgtgggaacagaacaactgttcacacgtgaaatctagtgaattggccaggctccgtgctaggtcttacattatcatttaattccagtactgtcctgagaactaagcattaggagaagcagcatggggctcaacagtgaagtgacttgttccaggcgggtcctcaggagtggctgtgcagccccagtcacttttcaatccaacacccggagagggacgcacaaccccagtcctgtttagttgcagatataccgagaagggagagcccacaccgaccttaagggcacttgggccctgaatcctatgcctctcgttccactgcttctcagttctctctcctgcagaggatcctt

SEQ ID NO: 449002 - DNA, 373 bp, Homo Sapiens
  misc_feature (350)..(350): n is a, c, g, or t
gtatataccataatttatttaccaatccttcattgacactcagttatgggttttccccaatgatttcccattatagaccaagttcacttcttgaacttgggtttttacaatcagatgcaattctttctaaaagctggaatcctgagtggaatgacaggcaaacaaggtgggcaaagttccaaatgtgttgactcttgacaaattgccctctgcaaacagtatgtgaaagtgaccacttcagcaagcattgtgttattgcagtgatgttgtagactaacttgggggagtgtggtatatgaacagttttagccttttaccgaagagtctcctgcatttccctttgttcaagncttcttttagatctttcagtaaa

SEQ ID NO: 449003 - DNA, 481 bp, Homo Sapiens
ttttttttaaagcacacaactttattcacgaagttgtgagtatgacagtgatgcagagtatatgacaaaggagtgcagtgagtgctgctggcaacaggagcggggagcaggtagggatcacaggcacagcagcgcggagccggcagggccacctcctcctctacacacaagcatgtggcacttagcgcgccaacacacacctgctcagtttcacagggaacacgacacagcttttcaaaaggaattcttctaaacatttgctttcatatttccaaaaggggagggaggggcaggaagaaccacacgcctttccaacatttgaaaaaattccattaaacccaacttaaaatcaaagaactcagagagcttcaatgcggagtcatcagcaactcgcaggaaccacacacatgattggacaagtctgtacataaaccccaaaagaacatcagttttgtgacaatgttcctctgcggtccgccta

SEQ ID NO: 449004 - DNA, 593 bp, Homo Sapiens
tcggctctaccttgtctggaggctcttccaggttctgccaagtatttcctaatttatttggcgattttaacgtatcttttccatctgtggaaagaactctcttgagaggagctggtctctgacctgaatataatcatcctactaggtctatctccactcacaactcactggggaaaacccacaaagactaagccataatgagacacaattcctagcccatcagtttagggacaacacaatgtactagagagttcctgctttacagtttttattgctgttggggtagaagcatggggggcaggtgagaacatgtttgtagcatggccagaatcagaataagataagaaataagggattaggttctcccctgactaaccatgtggctttgagaagtcactaaacctcattaagccttgttctcctcattgagatcgagataataataccttctctgctaacctcagaggttgctatgagggtcactatgatgagggactccaccacaagaaaccacagtcatagtgtttaaaggatgatttgcaaggcacgattaaacaacaacacaagatttactaaggttaccaaactggaag

SEQ ID NO: 449005 - DNA, 466 bp, Homo Sapiens
  misc_feature (452)..(452): n is a, c, g, or t
tttttttctgagtatttgctgtattttatttgttcacatttagcctatttgaggttaacactacttcatttgacagtttaaaaatcatcctgtaaatagaataaaaaacaacagcagcaatagctaaaaaaaggacacaatgtataataaaataaaggaatgtgttgaaagaaatattccaaagaagcaaaggaaatgagaccatgattatgaattcaacaatcagaagaaaaaatcgtccaacatctgtaaaaagcaaaatcataacagtaataaaaaagaagcaagaattcaaagtgcaggtgcgctagctttcatttccacatccattcaggaaatagagcatactattcttttatataaagtgacaagttctgtttttaaaacattcagttacattatcttgcagattttttttcagtttacattatctctacattgatttgatgganagatggtcatatgc

SEQ ID NO: 449006 - DNA, 439 bp, Homo Sapiens
  misc_feature (401)..(401): n is a, c, g, or t
ttttttttcctgatttagcagatacgtttattcaacacagtgcatgattcaaagcatcggatattccacagccaacaaggtttcctattccctattacaaaataccggataccctgaatatagctcattcaaggtcctcgttcctttttccctatatctagaattaaacaggtttccccgtttagcgcacatttcacgttcgctgaaggctttggggagagggggaaacagagcttatgactgcccctctgaaccaaaggcacttaatgttaaaagataaagcacagtagagtcaccccacagacatttctatgtgttcaacggctcgaacttcagcataccatcaccggccccatgtggggattcatcataacaacgtaaaagacactggattttccttngaaaaaaccaaagtgcagtacgaattattaaggggggt

SEQ ID NO: 449007 - DNA, 790 bp, Homo Sapiens
ttaaactgattcaattaacatcataatcactgcatagactgataatagagtcatataggtaagccctgatagcttaaaatagatggctgttttcttacagtttggctagcttaaatcagtaaatcagtgatggtttgttcctgatttgcccactatttcagttttcaattcatggccctaaggaatgtgtgctaaattcaagtttattatatcataacatgatagattaatagtcgtgcttgtttagtgcacatattaactggtctaggtaaggcaaagaagttttcatgataaaatgataaatttcaagcttactttattaagcagcatataacaaacagcttttaaagttaaatattgttatggccgtggagtttcattaaacagtatttctattcacacccaaccactggtaagtttgtagaacatctcttcatctaaactctcgttttggtcttttgcacgtgttgagagaaatatgtagccaccaatgaattcatgaaccactttgcaatctacttcagtacaaatgaaggacaatcgtacttcatctgcaaactctacggtgaccattttgatttcccagttgacattccactgtttcatgttgctgaaacgccatgttttaattgcatctccagtgctggcatccatccgaatcagtctgttgtatgcaattccaataagttcttcttttttgcccccttggaacccttgcaatgaagtgagtgatgccaaatttcaggtagtgactgccaagcttgaataaatctcatcttggcttcaatta

SEQ ID NO: 449008 - DNA, 428 bp, Homo Sapiens
ttttttgcatttcttaatttatttttaataagtaaaaaatactcattgaaactgtacaaaaatcaaatcattaatttttgcacctggtatttcagtcatcaacagcaatctcatggtacagaaataaaataatgggaattatcattaacttcaccctggctttctagcttagtagaaccaaacagaagaaatcatggcaataaccattaactatagaaaaaaagtaatggaaaaatggttgcaggtttaatcacaaaatgaacttaatttttgttgattttgttttatctgctaaaacactaatatctataaatatgaactgacagcatcgttctaaatttacttctgaagagctgtcgagacttcaataaaatataagcaagttactggatcatatttatggactgctgaattaactacccgaaaag

SEQ ID NO: 449009 - DNA, 1020 bp, Homo Sapiens
  misc_feature (329)..(337): n is a, c, g, or t
  misc_feature (367)..(405): n is a, c, g, or t
  misc_feature (445)..(453): n is a, c, g, or t
  misc_feature (630)..(723): n is a, c, g, or t
gcgggaatttaccgtgacgacttgttttagttgggggggcagcatcatataaacagggagatgtaaaagagggggacgcacatacacgtgccattttctttgcgtggttcgaggtttcaaaggataaacgtcgggaaaattttttaaaagacaagagaaaccctttcgaaaaaaagtggttatcccgggtttattcccacatacaccgtcgtgggggggtttaagggcccccaaaaaaagccctgtgggctttggtttttttaactcccccgacccattggggccccctggcgccccggggaaataatttttcaaaaacccagccccgnnnnnnnnntttttaagagcccaagattttgcagttggnnnnnnnnnnnnnnnnnnnnnnnnnnnnnnnnnnnnnnnggaagggttaaattccggagggggggttgcccaaatattnnnnnnnnnaaaaagaagggtccctccaaaaagtcccaaaggagcatttttccccccccggagggtttaaaaggcggccccgcccctttttttaaaaaggcgccccttaggggccccctttttcaaaaaaaaggggggtcggtaaaactggggccccccgggggattttttaaaaggccccccccnnnnnnnnnnnnnnnnnnnnnnnnnnnnnnnnnnnnnnnnnnnnnnnnnnnnnnnnnnnnnnnnnnnnnnnnnnnnnnnnnnnnnnnnnnnnnngaacgggaaaaatagtttattgaaccgtacttctccattgaagtctttaaacataaaagctctgtaacaaacatcacaatttcacgtcatctgccatataaatagaacctacactgagatgcatgttatcaacaggcatgtccccagggtgaggctccccacccgggacccaacttggtcagttacaaaacagggacgaaggcgggaggaagcccagtgtcaccaggtgggaccgggtgccgggcctgtggggtgtcctcgcagcccccctagagaggggcgtgcggaaatgatctt

SEQ ID NO: 449010 - DNA, 725 bp, Homo Sapiens
cgtaagcagaagctgtgtggatataattattcctgcattattgagggcttctcaatgacagaagtttgacaaagatagtttgacaaacaaggccctggattttaagtcaataaaccaaagactagagacatacagaaacaagcttagtgagaggaggaaggagaggaaggtgtctgtaacctcaatttaatttgaaaataaatatgaaacacaggaagaaacaaacttgactataatgaaatgggcaaaaaggacatacctatgactataatcgtgagtcaactgcaacaaaatggtcactgcaaatcatctgcattttctattagcaaaacgatagggtagttacccatgtgatcaaatccaatgctcatgatacaagagtcggtggcgtcgatcgcctgaatcttgtatttgtccagagggcctgttggaaggtggttgtagtccttctgccacctctcctggccatggtagcgcaccatggccccacagcgcagcaaccactcggatgccgccctgtcagggccaacatccctgatgcgatcataatccaccttattaaacactgcattcaaccagccccagaagtatctggagtcacatgaccatgggagtttctttacgccacacaactgctgggaattttttccaaacagcatcatttgatagcgtcggagggagggagggagggagcgagccagcgtccccgcgtctgcggcaccctg

SEQ ID NO: 449011 - DNA, 1260 bp, Homo Sapiens
  misc_feature (41)..(57): n is a, c, g, or t
  misc_feature (80)..(90): n is a, c, g, or t
  misc_feature (293)..(348): n is a, c, g, or t
  misc_feature (430)..(478): n is a, c, g, or t
gcgcgagaacagcgcgcgggaggcggaagcgggaaacaaannnnnnnnnnnnnnnnntgaaaaatgggcggtgagaagtnnnnnnnnnnnataaggagagagtgtaacgcggggcatgggagtaataaggctcgaatggtgtcgttatagcgataataggccgtgagataggggcataagtgaaggcgggaggaataggtcgcgggggatgggatacgggataagcgggcgcgtgtataaaaaggggcgcctaagtgcgtgtaggcgggctaaataaaaacaaggcggaaaannnnnnnnnnnnnnnnnnnnnnnnnnnnnnnnnnnnnnnnnnnnnnnnnnnnnnnnccagatttttaaggggaggtttatgcgggtggggcgtgggaaggggggggaaagggccattgaggcgctcggtgtttaacannnnnnnnnnnnnnnnnnnnnnnnnnnnnnnnnnnnnnnnnnnnnnnnntccggaaataaaggagggcgacagcaaacgcggggtgaaggcggggatctaaagggggagggggacaaggaagaaagggggcaggcgttgggagatatggggcaaggaaccggagcggtatgagttattgcgggtacccagtgcccgggttcgagtacgggagcaggcggtcgcgtagtaacggggagaatgcagggaactgggtgaatagcggcgccaggagccccataaaaaaagtccagaagactgggggctggcagtcttcgctgtgacaaagagcctccgtgaggagcggggattagggccgggcagggagcgccattgtggtggacgctcgactgggctggggccgggagggagacgggaggtgcccagaccgtccgtgtgcgcgcggaccgcgtgcggggccgagcgaggacccggctggagctggagcgggggcgggaagaggacggggcgaggacggggccgagggcgagccggaagaaagaagccgcagggcccgcccaaacaagaattttcgccgtaatcccgcccagagtttctcccacggccccatgtgcgcatggcggtgaaggtcgaagacgcgcgacccaaagggccaggttttcagtcagcccagcgttggcgacgggcgagggcagaacacaaccaccaccctagtcccgcccggatcggggcctagcttctatactcacagcgtcggagatcccgggaattccggaccggtaccagctgcggaaaaaagggaaggacgggcggagggcaacacacgcactacg

SEQ ID NO: 449012 - DNA, 936 bp, Homo Sapiens
tgcacttttcttaaaatgaattaatgttcataaattctcacttccaacttagtaacattaatgagccacgtctgaatatttattttctacatatgatgcactctccacttctaaaatgtcatgatatggcatccttataattctactgatgactatataatattagttgatgtttggaatcaacagtttcaaatgatcctttatactgaaataagacacattattttacttcaattgtaattttagttccagagaaggcagtgctgtcttaaaggcttggacaagattttctttttctcttactccaggaagatcacttaacaacaaatatttgaggtttcttaaatgacgcaaagcaatgatgcctttgtctgtgatattcccacaggatattatttccatttccaatatggttttttgtaaattttcaagttgactaagtctcagcaaacagtcatcctcgatataatgacacttgcacagccttattttttcaacatgctctaggccctccatgtgatcaaatccaatgctcatgatacaagagtcggtggcgtcgatcgcctgaatcttgtatttgtccagagggcctgttggaaggtggttgtagtccttctgccacctctcctggccatggtagcgcaccatggccccacagcgcagcaaccactcggatgccgccctgtcagggccaacatccctgatgcgatcataatccaccttattaaacactgcattcaaccagccccagaagtatctggagtcacatgaccatgggagtttctttacgccacacaactgctgggaaatttttccaaacggcatcatttgatagcgtcggagggagggagggagggagcgagccagcgtccccgcgtctgcggcacctggccggcccgctctcgacgaattcgagctcggccgatttggcctgat

SEQ ID NO: 449013 - DNA, 493 bp, Homo Sapiens
  misc_feature (47)..(76): n is a, c, g, or t
  misc_feature (462)..(462): n is a, c, g, or t
tttcaataaaacatttttattctgtacaatatatatgtgtatttaannnnnnnnnnnnnnnnnnnnnnnnnnnnnngcacagagaaaccttagccaacaaatccctgagtccatgggaacccaggacactaacaaagggaaaggagagtccatgcctaaagagtaggaaatatggcaacatctttccctttcctcctggttccctgcaacagagggaagggaacagtcactacaaattactaaaacgagggtttaggtggggcaggaaagtggggtgagagtggtaggatggggaactcagatgccaccagtctgggaaagtaaaacatttgatccagcatgaaagccaacatgaccgcagaggaaaaagaccagactgatgggcatgcagctggcctttggtatatgccaagcctttgcttggtagccccacgcctgggccagcacaacaaatagcacctntggggcctataagccgggagggatgggggga

SEQ ID NO: 449014 - DNA, 551 bp, Homo Sapiens
  misc_feature (339)..(339): n is a, c, g, or t
  misc_feature (389)..(389): n is a, c, g, or t
gaccttgtctttaatgtttatttcacattatctaagtacatccagttatgcaaatttacagttttatttcacatccttgtattcctgatatacatataacaggacaaagaacacatttgcaacactcagcctgtaaaactctcttgggggaaacaagattctcagctgccttattcttctgcacatgtacaaataaagttctaaataattggagtggaaataaaaactggtaaaagagaaaactgactacatttttatgccacttgaggatatttgtacctgacttttcaaatggtcttctacttgctgagttacaatttaataggtaacacattttgngagctccttaaaatatgccaagaagcttcattgtttctagagtgcttaanatccacatgaagctgacatcagctacccatcactaatgcttagatgtggtgctgtggtgctgtgcatttatctaaaatattttaaaaggtagtaatcagcattggtatccctcttttatgaaaatatcttgccaggctagaaacccagcatatttctcaatt

SEQ ID NO: 449015 - DNA, 967 bp, Homo Sapiens
  misc_feature (57)..(118): n is a, c, g, or t
  misc_feature (587)..(588): n is a, c, g, or t
  misc_feature (591)..(591): n is a, c, g, or t
  misc_feature (595)..(595): n is a, c, g, or t
  misc_feature (597)..(597): n is a, c, g, or t
  misc_feature (748)..(748): n is a, c, g, or t
  misc_feature (789)..(789): n is a, c, g, or t
gctaattttttgtatttgtagtagagacagggtttcaccgtgttagccaggatggtnnnnnnnnnnnnnnnnnnnnnnnnnnnnnnnnnnnnnnnnnnnnnnnnnnnnnnnnnnnnnntgagccactgcgcccggccacattcagttcttatcaaagaaataacccagacttaatcttgaatgatacgattatgcccaatattaagtaaaaaatataagaaaaggttatcttaaatagatcttaggcaaaataccagctgatgaaggcatctgatgccttcatctgttcagtcatctccaaaaacagtaaaaataaccactttttgttgggcaatatgaaatttttaaaggagtagaataccaaatgatagaaacagactgcctgaattgagaattttgattttttaaagtgtgtttctttctaaattgctgttccttaatttgattaatttaattcatgtattatgattaaatctgaggcagatgagcttacaagtattgaaataattactaattaatcacaaatgtgaagttatgcatgatgtaaaaaatacaaacattctaattaaaggctttgcaacacaaannaanacananaaaccaacaaacccaataaaaataccacacttccccaatacattcccttttctctccttaccccctttgtgtgtatttcgccccggccccaacgaaagaccttctcacactttttttcgggcgtgcgcgggggccataaaatgaaaattcnacctgttgtttgtgcccttttctcctacagaaagatttttnttttaccctcttttttgtgtggcccccgccgctcaccaaatgggtgggggaacgatattatacccccctttttttacccacaacaattaatggtcctgcattaaaaataattcgttcatgctctacccccacccaaaataataccttttgccgggggctacaaaaaataggttattct

SEQ ID NO: 449016 - DNA, 662 bp, Homo Sapiens
  misc_feature (540)..(592): n is a, c, g, or t
  misc_feature (635)..(635): n is a, c, g, or t
tttctgtgcactcctggatttacagttagactctacatggagagtactggggagtcccataaaccttagactatattcttgtctggaatatgttctcatagacactcaatgtcccaatgatccccagagactttcattggcttgcccagtttcgtgtccatctggtcctttcaaaccaggaaaaacaatatggtaattctattgttgcgtctagtagccttttgcgtttctccatcgcctctgacagcatccagctaaacgggtgtagcgtgttaaggataagcggaacccaagttgtcctttctcagctgagtcactttcagataatctgggactgatggagggtgatgcgccgcggatgaggggtcaggggtgggagaggagagaggggcgcgggtcggggaagaggcgcgtctggaaggcagtggggagagggactgagaggagtggggttgaagtccagctgggagcatccagcggcgctgtctgcagacaggggcgaaggcagccgctgagagtgaggcaagagcgggaagccgnnnnnnnnnnnnnnnnnnnnnnnnnnnnnnnnnnnnnnnnnnnnnnnnnnnnnctgagcggctgcaatttctgcggccggctcagtaggagatccntactcccagaccgtacagcctgcattt

SEQ ID NO: 449017 - DNA, 1269 bp, Homo Sapiens
  misc_feature (668)..(740): n is a, c, g, or t
  misc_feature (1121)..(1173): n is a, c, g, or t
tttaagtgatcccctgcgcttgtactcccgtgtagctgggcctgcaggcatatcccattgcgcctggcacattacatttatttttaagagttgcagagtatttcttcataatatgggtaataatctgtttaaataattcactattttgggcattcatgttgatttcaacttttgcaattatacacaaagctgtgatgcttgcaggtatatctttgggaatgtctataacttttagaattaaattctttagaagaaaaatttctggtcaagggtatggcagagactactaggtatccaccaaattctgttttctccttcctacacatatggctgccctaccgatcaacatttcccagccttccatgcagataggtggtttgcccatgtgacttacattttttccaattggatattagtggaggagatgcatgccatttttaggcccagatcccttacaaccactggtcataactcctctgtgttatttttcctcttcttgccagctggaacttggttgtggtggtgactcagttttgacctcgcacatgactatgtaatgcctcccagctatccttttctggttcctcatttatgaagttgtagttcctattccttgaccatttttctgccatagatttttaatagctttcaaaaggaagtgtgagaannnnnnnnnnnnnnnnnnnnnnnnnnnnnnnnnnnnnnnnnnnnnnnnnnnnnnnnnnnnnnnnnnnnnnnnnccaaaatgttgcctcttgctgtgtcatccagtgacttttctgtgcactcctggattctacattagactctacatggagagtactggggagtcccataaaccttagactatattcttgtctggaatatggttttcatagacactcaattcccatgatccccagagactttcattggcttgcccagtttctttccatctggtcctttcaaaccaggaaaaacaatatggtaattctattgttgcgtctagtagcctttgcgtttctccatcgcctctgacagcatccagctaaagggtgtagggttaaggaaagcggaacccagttgtcctttctcagctgagtcctttcagaaactgggactgaggagggtgagcgccgcgnnnnnnnnnnnnnnnnnnnnnnnnnnnnnnnnnnnnnnnnnnnnnnnnnnnnngtctggaaggcagtggggagagggactgagaggagtggggttgaagtccagctgggagcatccagcggcgctgtttcagacagggccacccaggcc

SEQ ID NO: 449018 - DNA, 629 bp, Homo Sapiens
ctgctgacgccagccgccggtcccgctcctccagctgctggtgctcgttctgcagctcactgcctcgttgcagcagcttctgcttctcctcttctttgactgtcttgtgggtgacataagagtgcacgatggccagcatcccagtccagggcacaccctcgtctttctttaaggccttctgctggcacctggggcacacccacccgcccttgggcgccgtcttgaggggcggctccaggcagctgaggtggtaggcccccgggcaggtgccgcagggctgcaggttggcccctcgcttgcaggcggcacagtgctcatcgtgggtgatctcgttcttccagcaggggtcctcattggctctcgctgtgaggaacagggggttgttgagatagttggaggccagccgtttcctctcggtctccaggaggccgctgtaggcagggttggctgtgcttcttctcttccgctcctgtcgcttgctctggatttcttccaaatgttccgtggtaaccaggcctagcgctaccatgaaggcgattttctcggggttctcctgggtcgggggccggtcttccttcttctttttggtggcctgagctccctgagatggctcctctgtgggcggccgc

SEQ ID NO: 449019 - DNA, 647 bp, Homo Sapiens
  misc_feature (408)..(408): n is a, c, g, or t
aagtctgaatgattttgttttagaagaagttaatactttcatacttctctaccaccacaagcaacagcaccaatttcatgtcactcaaaggaagtatgttaaaaggctcaactttacaccatgctagcagattcaagaataaacctttaactagtcttcttaaatcatttttttaatgagttaagtgtttcattattgacactcaaaatctccttctgtgtggtgcagaacttgataaatttggagtatccaatcagtagaaaatctaaaatctacaaaaatatagaacacatttgttttacaaaaacagacatttttaactcaaacagttttcgtcattagagatagagagcacgatgtttagattcatattttaatacaagctatttcataaggagcttgctgggnggagggaaatcttgcttcatgtctgtgacacttataaaaaccaacacatgaaaaaaaatccgataataaggaccggagcagccttcattcaagtaaaattttaaaaatcatagtaaaaaaatctttctattaacctaaattttaattgctcaccagcatcttctatggatggggttagctagtttttctaacaacattttatataatgtaccctacttttttttaatagcaacttcctt

SEQ ID NO: 449020 - DNA, 1039 bp, Homo Sapiens
gtctcctatcaaaatttattgaaatggtagatttttggtaagtacagaaacacaagcgaaggaaccaggaggaacgtgcacccctctaactgtggggcagaggcacatttcccttttaatgttaaaagcaaacagaggtgggaaacagctttctatcctgaagccgttttaactgcccaacccttagattactataaacaagagaggaatggattgcaattagtcgcttggttgaaagcagcaattgccattgtcctttcccataataacactgtttagctcagtcccttctggggctaatcccctattacacccaccgggaacacagatattaaccaaagcgtgtgagtctcttccctgagtccatttctgctaaagcttgtctgaaagatgaattggtccacggaagccaggtgacctactggcttgtttaatgatgcctgggctccctccaggagcaacacaattccctccaatctcagctctccttatccctgctagagctcacaagcaggctagatatcaccccaggagctgagccccccccagtctgaggcagatgtgggaagaaggccaacaagtcacaagtagatctctggctccaactctgctcagcagaaacgcctacaatttgcccatcttcagtcctgcgagcgtcagagatgaagcaaaagtttcagatgcctagaagctttactctctgttcctccaggattcctgcggtcacaccttgcaaccagtctcccactcatctgccacagtttccctaaatcagattctctgaatctggaagttccaggaaaccttaggccgagtccagtgacattactcgatgcaacagcccaactgtttctccagagatgctggttcttggtgacaatgtcccttcttggaatggttatttgaggttgggcccagataagaggggctccatggctcaccggagttggccattaacgcctctggagcgcctctggtttcctggggtcacctgtgagctcgacgctcgtgctgcggttattatctggctcacctgtca

SEQ ID NO: 449021 - DNA, 562 bp, Homo Sapiens
  misc_feature (100)..(100): n is a, c, g, or t
  misc_feature (104)..(104): n is a, c, g, or t
  misc_feature (107)..(107): n is a, c, g, or t
  misc_feature (110)..(110): n is a, c, g, or t
  misc_feature (115)..(115): n is a, c, g, or t
  misc_feature (231)..(231): n is a, c, g, or t
aatgaactgtttatattatctccgttgagtcaatacattataatgtattaaaatggaaaggtacaaaattgaaataaatactttctgattcatgtataantctntgnggnggggntgttgtcaagatgacttttatcatcagtacatgtcacaagaaaacatttaaaatgacactgaaacaatcattgaaatcatggtgcatgggggaaaaaggtaaagaaaacaactttntggcttgttttgggcatgagaccttgatacaatttgggttccccaaaaccatgtgaagggtggtaaaatagaaatgctcaaaactgacttaaaaaaataaacaggctttacaaaaacccctcttttttcttaacccacccacttctcgacatggtctgcacatacagtagatacattcattattgtccaagggaagacagtaactgcctttcattttaaagagcttggtggagaggctgaagaaatgtgctgcagctgaaggtgagtagaatgttccagagaacacaaaagtctagatggtcttcagaaacagcactgagcatgatgtggg

SEQ ID NO: 449022 - DNA, 514 bp, Homo Sapiens
tttttctttccaccggtgtcttttattaatgaatgcaaaatacagtactaactggcagggcatgcatcagagacaacaagaatgcaagctacagaaaccaggaatggagggcctcctcatgtctgaggtagagtaagacggtgtcagggggcggacccgggggcggagatgagcaccggccgcactggggcatcatcccggcccacccgggacgatgggccgtgggagggctcagggcggtgtggtggccacactgcgaagaatggatttttaaaacacttcatagccccgaatttgtttcagctccctcttcgtggacacaacttcagggctcccttgtcactggcttgcgggggtggtctccccacttgcagagtctggtctccacaggacaccgtccttcccttcccttccaaggggcaggccccacgcaccctcgcccaaaaaataaaggagctttgtgtttgaaaacgccaaggcagccgtccagggagctggaggccaagtgcgttaa

SEQ ID NO: 449023 - DNA, 1040 bp, Homo Sapiens
  misc_feature (76)..(88): n is a, c, g, or t
  misc_feature (151)..(159): n is a, c, g, or t
  misc_feature (420)..(428): n is a, c, g, or t
  misc_feature (540)..(579): n is a, c, g, or t
  misc_feature (790)..(807): n is a, c, g, or t
atagaaaaccgccccgccttactcgcacccagtacctccgcggggggcgttccctcgggcggcgtaaatttagtcnnnnnnnnnnnnnaaacgcccgcctcaatattccccgccgccgggggtggcttttcccaccagagcggtggatacnnnnnnnnnggcgccccacggaaaagcatattgggcggggcatttctctttggtcggggcaaaaagagtgggtagggggaagaaaaaaaccctcctgcggagggggggcatccgggcgggaggtttttagtcttttgggccccatattgtctgaatttccccgttttcgaggccccaaaaaaagggccccggccccccgtggggggcgtgaaaaacggcccgccgtcatggggacatctggtaaaaaaggcacatttggcctgggccccnnnnnnnnntggggctccccgggggccccctggaaagggaggggcccctctaagggcgcttggtatcggtttcgcccctttttcccggtttccaaaggcccccccatttcccctccccatnnnnnnnnnnnnnnnnnnnnnnnnnnnnnnnnnnnnnnnncccctcgggagaaagtttaggattccccccagcttcaagaaatccaggggcaaaagaccctaggggtcccctacccccacttttttcagttcctggcatgaggagagaagaccctgctttggtggagctgacaacctttgaggctgggaggagagcagcctctgggcatcgttcccagtgtccctcacactaaaacggcgtagatggcaannnnnnnnnnnnnnnnnngctgctcaactcttgtgtttgttgttctgtttgccccatttatctgttgctgtttttgtgttgtcttcccctgctccgcattttgtaaaatggcccctgggggagtgtttttgctggatctgctccctctcgctctctcactccactactttttggaacaaagtgatggcagaatgcggtggtggtgggggtcttttgtactgttggattaataaaatgattttaaaatccca

SEQ ID NO: 449024 - DNA, 382 bp, Homo Sapiens
ctcatttcagtttcttttgttaaaagtttcttacacaaacagcatctatacaatgttgctgcattactccgagaatctggattcaagtactcaggatcaaacagtctttcaatcttcttacaagaaagtttgcttttaaatttatcttttttgtcctttaaatcatcaacttcattgtgtgagaacagatcagctatacgtgtgagaagatttgcattaatacagttcatgttgcatggggtagctactatggcattcatatttttgtggcaatactgaatacactgttcaactagtgaatccatttttaaaaactccgaagaaataagaattgaaatgacatttcctggctctaaagtgggcatctcacaatctttattct

SEQ ID NO: 449025 - DNA, 682 bp, Homo Sapiens
  misc_feature (292)..(355): n is a, c, g, or t
tttggcctttgataattttattggatcagtaacaactttttgtgtttcaactaagatagctaaaattctaacacttatatgtaaaaattacactccattttagcacaaatgttaacagaaattaacagcacagtgccatgaagaaatgaaaaatacacagctttggtagggaaatggtcctggaaataatgtaatgccaagtttctgatcatttaacatatcactcacctccttcttcatctgatgttatgaaccactttatttatttatttaaggacagagtttcactctnnnnnnnnnnnnnnnnnnnnnnnnnnnnnnnnnnnnnnnnnnnnnnnnnnnnnnnnnnnnnnnnaagcgtgaagttatgaatcactttaattcttcttaacaacccacaaaagtttaagtgaaaactagtaagacttcatggacacagatagaaactcataatttataaaacatgctggtataaatgcatgcctacaaaggttatagattgagaaagaggtcaatatcttggagctatgactttggattattgttaaaaaggaaggcactacatattcatgttatatactaaaaggtaaacctacaagggaaggccaatatgggtttatggtacttaaaacccctattctccatattatttttaaatacaactttttccgatgttgccgga

SEQ ID NO: 449026 - DNA, 297 bp, Homo Sapiens
  misc_feature (55)..(70): n is a, c, g, or t
aagcaattctgacacatgtataattgccgggaggcagagttgcagactacgtttnnnnnnnnnnnnnnnnaaaaatggaatctgagctggtggggccagctggatttgggaacacacagacacactgtttaaaataacatccagacatcattgcaaaaaatgggaggaatgggctgtgcttccgaatgatagtttactttttcctgttttatgaatgcttacaaatttagaggataccagaattgcacaaccgccatcatgacagagcatctgctcagtgtaaaaactttgtttagg

SEQ ID NO: 449027 - DNA, 520 bp, Homo Sapiens
caagattcacatctttattaaaggctgtgacagtggaggcagggcagaacacccctcaatcacatctgaaaacagcacacatggtggggctggaaatcagtgggcccagtctcccttcctccttccatctgcatcaatctgtttccatcggtgcttcagaaccagcgcctattttaacagtctggcatcagaatcttattttaaatgcatcaaaattcactgtgagagccagcactccggtcgtgggaacaagaccctacggaattcctcagtgggtcttcaggggccccatgggatggggctgcagtatgggtacacagacttcaccagtgtgaaagctgaggtcatcagccatggaggctagaggcctgggctgcttgggaagcatcccatgagcagggagctaatgagtagggatgggaaggagggaggaggaggaaggggctgtcgttctgctaatcagagcggacaacctgacctgcctctgttctgctgttgtctgcagcaggtaccgactcga

SEQ ID NO: 449028 - DNA, 530 bp, Homo Sapiens
ctatgaaccatttttctgttctcttatttattgacagtttcttttaattacaacacaatgaattgatggtaaatacagaagatgcaatagtataaaaagccatttaacccttccctaggttaagacacttacagcagacaaaaactgccccacccctaatcccctccttgaatggaaacaaaataaatataaattaataaatacaaaacaaatcactgcacagcccttaactctttgattgccatggcaagaaccatgctgatgattctagcttgtgacatttgtgtggttaaaggttgccgcagcaggtcaaagggttatagcattgtaaacataggtactttgtggaaaagttcagtcatgttaatggtctatagcaatgagattaatagcatgaccccttgacctttaatgacgcaacattataaggagttaaaagagatagtagcttggtgagctgttacatagactagtcaaccactttatttaacaatgtgctatgaggccttgatttactaataaaagacaac

SEQ ID NO: 449029 - DNA, 1060 bp, Homo Sapiens
  misc_feature (837)..(886): n is a, c, g, or t
tcaatgtcaaaaacattactttatttttctaggatgaaatgtcctattacgtacaaaagaattgctgtttagaatttgccacaatttgttaaaaacatagcaatctattgcctacaggtaggaaagttcttgctgcaacaaattttaaatgattaagcccatatatatttatatatatgaataaatagtacagaaatactgtgatgtgatgagatgcagaataattttataattcattaaaatgtagaattcttgcatcagcacagtgcatacaatatgtaacattttttaaaaaagtaaaaggaccaaaataaccccatatttaactacttccatcttaatactttaagcaaaaattttttcatgttttcatattgagcgattagtctttagtttgtaagcataagtttaagtgacatctttatgtacaaaaaggaatgggcttcattagataaaattaacccagaataacctgtacacctgagcctgtaataagaaagaatcgggaactgtagcaacatctttcttttaagaaactgaggtctgggaaaggttttgcatagcagggaaacattaaaaggaaagaaactttgaaaaacaataattagataaattccagaagttggtaggacaaagctaatatgagttagtgcaaaatctagtaaaaatttttgcaaagctgcataatccaactatggcagattttatagaagctattaccacaatgcagtgatacaacgtgtaagaacactgaaaggaaaaacatgcaaaatacatcttcctctgtggtttccattttctcgctactgtttacactacttttccttacgtggaagnnnnnnnnnnnnnnnnnnnnnnnnnnnnnnnnnnnnnnnnnnnnnnnnnngaggatgaggtcatctaaaaaatgcccttcataaaatataagtagctgtgtgtaattggtaatttgcctggtatcacagaatgtacagatgaaggcaatgtgtatcttgtcgcattaccgttctcgttagtatgatcaactgatgcaacaggattagcacccctgaagattttt

SEQ ID NO: 449030 - DNA, 478 bp, Homo Sapiens
tcttcaggagactgatctcccctacctggtggatggagacttactctcacttgtcttaagcaaagagatgctgcaattctacttctttcaaggatctactgagaaaataaacctgccactacacccagggcactttctctttttaagaactttcctttttttctctccttcctctaagtctgttctcctaaacttttgttggtggtatttagacatgctgtttttttctcctctgggtgtgctctaggatttgatctaattgtcctgctgttcgagtgtcacttggcattattattgggaagatgaatggtatgtgggtcagagttcagcaagaaggcatctgctcgcttccactgtaaagtggaaatgcttagaggtgatctttaatgaaagcttggaaaagatttgcacaaggcaggctgtcctctattcctccaaagcagaggggaccaaaggttatccttttctggagggacag

SEQ ID NO: 449031 - DNA, 974 bp, Homo Sapiens
  misc_feature (66)..(66): n is a, c, g, or t
agcagtgtacgtcggaatacggatcagatgctctcagataggaatgagctttaagctcggtctcangattcttagaataaactttaaagggatatgatggaatgtcatacagaatgaggttatctgggggatgagagatgaatggtccttctggagttgtggcatttggcttatttcacaaataaagtgaaaccatttaaaacgatgacacgatatataggccatgtggaatacaatagatattaatttgtggttggtttttctgcctgctttaaatgaaatgtattatgtttctgggttccttttttagctgtaaaaatacttcgtcactaaagcatgaaatttaatcagcagttgttcttcaagttcctgaaagctataaaagtttctcatgacttgagtggttttttccctgcccaccagaggagaaagcccttgtagaattctgcagtgttacaagtgttccctacaaaaactgaaaccatcagctcctctttaacaagttggctttttaaaagcacgtaattacaatttaatggtattctgtaaagtggtgctctaggcataatttaaattctttttaatgactatatttcttcaaaactttgaaagaaaaatgtgttctttttgctgcatcctttgtaagaagactgccaacagaggaaaaaggactttacaaattaagaccatcttggtttcatttccacaaagatgagaacaaatcatggtgttaggaaaggatccttagaagaacacaagaatttgaaagcccttggtggttatcactactatatttcatatttccacagaagtgacttagccaagctctgcattttgagcctgctgactttcatttaaaaggaatgaaaggctgaaaatccaggctgctgtgtctgtagataaaggtcaaaccatgtttgagttcttcactgttgtgtccacctaaataaaactgagtaagtaatgaaaaaaaa

SEQ ID NO: 449032 - DNA, 421 bp, Homo Sapiens
atggtggacagtgatcatttgccccaacagccatctgaagccaatagtcctgattattaaaaatcacaaagttatataaatgttctcctccttttcgaaaaccatgttcatttttttcccaagaaacagggctgtctgcaaagccttgaacggacagtgtaacccatggagctaacttcggttcatcaaagtagtgacagagatgttccaataggagacagatcttctctggaagtatgaagccagtgattgtacacaaataagcttttgccaccactgtgcttggctcaggacagcaataggttgatatgaaattattaggctcattatttaggtcgacattactgaagacggcgccgagccagtcgaagagctccagagcccggcaggacacctttggcgttccctccagctcgctgct

SEQ ID NO: 449033 - DNA, 333 bp, Homo Sapiens
gttggttgcccgccccgcttttaaaaggttttaaaatagtttaatgaaaaaataaatatagtgtatgaatgatctaagtatgagaaatagcaaggacaaaatagcaaatatttttgtaggggagaaggaatctgaatgtgtatggaatattaaggagaataagaaattaatttaacaggggctgtgggggggggtgggagaacatgaggaaaaatagctaatacatgctggacttaataccgaggtgatgtgttgataggtgcagcaaaccaccgaggcacacgtttccctatgtaacaaacctgcatatcctgcacatggatcctggaactt

SEQ ID NO: 449034 - DNA, 678 bp, Homo Sapiens
tgcagatatttcaaccggtttattgtatctttacaataataaaaataaattagtcacacacaaaaatagtcatttttgctgaagagaaaacagaccatatttactcacataattcgccttctacctttcacctgcttatgtaataatttaacactgtagaggggacatggaggtgacggagtatttagtgggttccttgctcctggctgtgcagttcacaggccccacaggccttggccccagcatccccagcagggacagtggaagtgtcagagcagtaaatgccaccacttccctctcagcctctccctgtccccgccagccacctgcctcacccacggctctaaccaagcccaccgagcaactgacgctgccagtctaacaacggggacaaagcaaagagaaagggataacagacaccctcccatttccttctccaaatgtctgtggatgaggggaaggcagattagatgaggaaatataatatttaagatgaaaaagtagcaatcaggttcaggtacaatgctacctgaatgagtcgaaaagcagagtaatttatatttgatcttaaacctcagggaactggactgattagcatactaaacaattgtaactatggactgagaaaaagacatcaatcatcggacagcgacattccaggaggctgggttaggtatg

SEQ ID NO: 449035 - DNA, 668 bp, Homo Sapiens
  misc_feature (595)..(595): n is a, c, g, or t
  misc_feature (605)..(605): n is a, c, g, or t
tttttttggaaatgtaaaatggtggctttattttaatctttactcaagagtgatattgaaacaaagctcttactacaacacccaggttaaaaaaacagggtgaatcaatgcttttgtttgtctgtgaactagaaatttcttacttatggagttatgctcaggaaacaatacttaaaatcttaaactgtaaactcttagcttgtaacattttcatttttcctgtatcttgcatgtttctcagtgccattaaatatattatcttctatttcttcttaaagaactagtgttcataaaaggatcatcatcatcatcctcacttgattcaaaatcaacccctttcgatacttgactctgggacatgattttgctggatgatgtgctggaccacctttgatctgtcttgaagtggtaggaaaaatgtcttcttccacatctgattcatctacctcaatcacctctgaataattctagtagtgacattcgggaagggcgcgtctgtagattaaaggcatctataatagacatatttctagatgctgacacgcgtcttgagttcctgctacgggtagagtctccagaccatgtctgctctccncttgagaccnccttcgagcgaatcggcctttcactcttgactcttctcggcctccctgtggtgcgcgaagcat

SEQ ID NO: 449036 - DNA, 428 bp, Homo Sapiens
  misc_feature (312)..(332): n is a, c, g, or t
  misc_feature (346)..(347): n is a, c, g, or t
aatatttttatgtaataaaaagtaaaagtccttgtccagccatcctcgtggggcatctgtctgtctctcacacaggtcactcaagttaatgggaaagaaagaacagggggcccaagtctgaagttataaataatagaaaataaaagatcttccgtctccagcgggggaatagatgagaggatgggagggcaagactgggtggggacgggcaggggcagagcaggaaccccccacccctgctggaccctggccctgccctctgtgaggcccctcccattcaaggtgcttggcaggaattccccagctcccctnnnnnnnnnnnnnnnnnnnnnctgggagtggtccnnccttcctggggaagagacatagatcactctaccctccacttatggaggtctcaggtcgcggccaggaacaatcttcattcc

SEQ ID NO: 449037 - DNA, 250 bp, Homo Sapiens
  misc_feature (156)..(157): n is a, c, g, or t
  misc_feature (172)..(172): n is a, c, g, or t
  misc_feature (219)..(219): n is a, c, g, or t
cctgtaatgaatatggcttgaaataaaggacacattttgaacttatgtccttattaaagtaataagtgaaggtaaaaattcactaaattgtatgatgaggagctgcagatttacctttttagtagtatttgacttaatatcaaaactaacttgctnnttttgttttcctttnttaagtttttattcaaaactatacaaaaagtggatgaaagaaaaaanaaagtagcccaaatgcctgcccaagtagcaa

SEQ ID NO: 449038 - DNA, 431 bp, Homo Sapiens
  misc_feature (365)..(365): n is a, c, g, or t
taatagggcacaaggtattttacaggtcctcatcattctgcttggtattctgttggtgtaacttttgtgtgtgataaattcttctccagagacttatcctctaagctctccaatgtgtctttttagctggagctaatgtgtaggaaggccatttttaaagcaaatcaaaacattaaaaggtttaacatctgttaatcgggtgttttatctagaggacataaaagatattcacaatcctctagcttaccgacttaacgctttcctttatactggatatttatattgtgtaggaaattgaaaccattatcacaatcagtgggaattattccactttcttctaagacaagcagggaaaatgttttccntttagggttaggaatttccatggattaggtaaagtgtatcaatagggccatgcggagagggcgatt

SEQ ID NO: 449039 - DNA, 409 bp, Homo Sapiens
  misc_feature (385)..(385): n is a, c, g, or t
  misc_feature (395)..(395): n is a, c, g, or t
aatagggcacaaggtattttacaggtcctcatcattctgcttggtattctgttggtgtaacttttgtgtgtgataaattcttctccagagacttatcctctaagctctccaatgtgtctttttagctggagctaatgtgtaggaaggccatttttaaagcaaatcaaaacattaaaaggtttaacatctgttaatcgggtgttttatctaggagggacataaaagatattcacaatcctctaggcttaccgacttaacggctttcctttatactgggatatttatattgtgtaggaaattggaaacccttatccccaatcggtggggaattattccacttttcttcttgggccaggcggggaaatgttttccctttggggttggnatttcctggntttgggaaaggggt

SEQ ID NO: 449040 - DNA, 640 bp, Homo Sapiens
tttttgttgctttgcacatttaatagtgagataattattaacaacacaaaaaacaattttggcaattaagaacaacataaagaatcatgtgatccacagtttacatttgataaatattcttattgtctcaatttatgatatacttacattttgtattccttttaaataaagaaccaaatcaagaacagcagaaattagcatctgtttaatatattttaaaatatggaaatatatttaaacagcacatttaaagaataaaacaatagacttccatttcttattctctcaatggtacaccattaattaaaaatatattacttaatgtaccccttaatatagttactgtcaaattttctttaagataaactgtatttcaaaacaacattttaatatacccgaattacaaacaaagccataacatttttgaagacatttttggtatacgtttggtttgaaagatccaaaaggatgattaataaatggtgctttatgaatactttagattaacggtaaataagcctaaccacagagtcaccataaatagcaagttatcaatctaaagatcattcttcaaaaagtcagtgtgtgttaaagaaaggccttagagggcattctaatagatagagaaaataaattaatt

SEQ ID NO: 449041 - DNA, 136 bp, Homo Sapiens
gacacagggactccctctgttgtccaccctgaagtgcaggggttcactgcagttttaaactcctgggctaaagcaatcctcccatttaaacctcccaagttgttgggactacaggtgcccaccaccgggtttggcc

SEQ ID NO: 449042 - DNA, 556 bp, Homo Sapiens
ggacttaagtaacaaaaattttttgtctcacagttcaggaagcgtagaagtcctagattttggcagaattggttccttccgcgggctgtgggggaggatctgttccttgccgctcccagcttttgatggtttgctggcaatccttggtgtcccttggcctctgctgcagtcaccccagtctctggcttcatcttcacatggtacttagcctatgtgcatgtctttgtgtccagatttccccttgttatatgtacaacaatcgaattagggggccacgcctatgccaataagacctcatcttaattatatctgcaacaacctcattttccaaataagggcacattttgaggtactaggggctaggacttcaacatatgattttgggtggaagggacacaattcgacccataacaccatggaagcctctattctaactagtggaccacaaaggctttttaggtctcagcatttgtgctggcttagggccagtttccaagtaatccctaaaggcctgggcatttccatttccctaagcacacatgcatagttacatggc

SEQ ID NO: 449043 - DNA, 279 bp, Homo Sapiens
cagtgttttgtccagagcacttgcctgcaggtcaggataggatttcaaggccagttcaggagaaagtcccaaccccccagtgcaaccaacaaaagagtaagttttacctacagcctgggttttcacaagtagcatttttattcctcctgctgtttgacatttgagctccaagctctaaacccaacctgtattatatgcagcagcaggttatctttgttttaaatcacatttgttattctgtacttagtcccctttccgtgtgatctgcatttgaaatgt

SEQ ID NO: 449044 - DNA, 449 bp, Homo Sapiens
cattttgttaaaaatatttatttaaaaaaatacaactgctgtccatatctagttgcacatatatctattaacatatatgtatacttttagacttgtagtaaatttgctacagtgcttttgtaaagccagcctgcattatacaaagcaaattcctctgtcagttcttacataaaatagatttttaaaaatgtatatctttcctaaaagatgcatatcaccattatagaatttaacaaaatttttgcataaaacctgggaagtgatagaaaaaatgatcacctgattggtcagagcaaccccttactatgtctggagatgcactgagtatcaactacacattttttttttcaagcagcatattattataaagccctcaaagtgcttttgcatcctttcgctcacctctctacactctataaagtttctctggccgtatacagatagaattc

SEQ ID NO: 449045 - DNA, 622 bp, Homo Sapiens
cgctaaagctgcctctagtcagacatgatggtatcttgggtagaaacttgaaggccttggagggacttggctcctggtgagtgagtgaattgagatgaggtgtggagggacctgtctcctggtgagtgagtgaattgagatgaggtatggagggacttggctcctggtgagtgagtgaattgagatcaggtttggagggacctggctcctggtgagtgagttaattgagatgaggtctggcgggacctgggtcctggtgagtgagttaattgagatgaggtgtggcgggacctggcgcctggtgagtgagtgaattgagatccggtgtggagggacctggctcctggtgagtgagttaattgagatgatgtgtggagggacctgtctcctggtgagtgagttaattgagatgaggtgtggagggacctgtctcctggtgagtgagaccctgtctctaaaagaagaaaaagaccacctgggcatgggtttggaacccaccctagtggatcccagattccccacagagtctgtctaccccccttggtggcagttcttgagccaaacgagttactgctagaaattgaagggtttcctttgtgataaagtttttaagtatccatta

SEQ ID NO: 449046 - DNA, 998 bp, Homo Sapiens
gcaagggtaacttcagaaatttattcgtatgtcttaattcacagaaacattggcactttacagcaaaacaattagcataatgagaaataagtcactgagtgagatgtggtgttttggaacaggtatacagctctgtctctagaaaggaacagggttctgccaagtgtctttggtttggcaagggttgttctggacttgtaggaacatgtggcggcaccatccagagggatttacttgcagctgattttgtgggagtttttcttggtctccttgtgcagtaagtacagcttcaactattttcataacatttctcttcaactattttcataatatttttctaatattctttaaccaccacgtggaatatcacaggaaggctgttgtgggttcagcttcggtcactcgtcccacattgggacaatgagtgttgctcatagacttcaggtcactcattggctgcaccactgtacactagggcatgagctgtttccgtggacactctgtaattctactgacacacaactggaaggaaggaaggtttcttgcttcttatatcagcgtattcactttctctcttgccatatcgcacataatgaagttctgagggtggcattcgtgccctgagactcagcgagcttgcccatcttccccggcagcagcaggcacacggccatccgaatgtcccgggaggtgatggtcacgcacttggagtagtgggccaggtgaccagcctcggtggcgatgcggtccagtatgtcacgaaccatagaatccatgacactcacggcctcctgggaaaggctgagggcctggtgaacctgcttcagcacccgggggaaataggcggcaaagctgtccccgaagatatctccgccgctgttggcatggcgcctacgggagcctcgaagccctcacttcttctgcttctgggccgtcatggagttggcctctttgggctcctggatgctctggtcttccatcccggaaattccggaccg

SEQ ID NO: 449047 - DNA, 515 bp, Homo Sapiens
cagaaactttaaaattttttattcaacaatgtacacttattgtctctcaatttgatctacaaatttctcaagttttttttctgataaaataagtaaatctgggtatggttgtagagtgtttgtaatttatatttttaaaacactgaacatgatgaagacatcaataaaggaagatcatcacgtaaatgacacttcctcagaatccatgacatcagaaacagctatagcaaatacctaagcatttagcaaaagggaaaatttctggtgactgttcttatatgtagaaaagacctatatttttgactgggcaaaacaaacattgaaacttttttttgagcggggggaacatcctttaacataactgtactccacttattatccattcccccagattaagaggtaactcagctccttagtgcctctgcacgagacagagaaattacttcactcctccagtaggttctaagactgaacataagtgaactactgacagatgcggaagaggaaccatagcc

SEQ ID NO: 449048 - DNA, 999 bp, Homo Sapiens
  misc_feature (526)..(556): n is a, c, g, or t
  misc_feature (837)..(837): n is a, c, g, or t
  misc_feature (876)..(876): n is a, c, g, or t
  misc_feature (950)..(950): n is a, c, g, or t
  misc_feature (968)..(968): n is a, c, g, or t
ccgggttgttccacgcgagggcttcccgggggtgaatgaaaagagtggtttcagcaggagagttcactcaacgcccggggtaggcgctcacgaatctttctttctcaaggccgctggcctacgggcacatatatgccacgggctgaaggtgttttcaacaccgcggatagatacacaccgctgtgagaaaagtgtttgtatataaagtgtgccccccttagggacgctcttttaaaaattcttctgttgaagggggtaacttttgtgtcccccacatatgtggtggcccaccccccccacgacagtatagtggttccttttccccggggttcccccgggctgtcggccgcgttttgcccacgttcgcgggcgcttgttagtatcgcttgcgcggcccgctgtccttggcttatttaatttcggctcctcctcatatgggggcccctttgggaaccagaggaagctcggggtatccggcggaaacttgggcccccccgggggagaatttttgggccgcgcccccccnnnnnnnnnnnnnnnnnnnnnnnnnnnnnnnatatgcacagatgtataattatattgtgtatgtacacatagggcagacattacacattaagaatcagggaactttactctgtaatttttagctggagttatgacttcctgccactgacattaaggctgacagatgaggctctgaaaatgccacagatttaaacggatggaacccgagggctttagctgagctgttccttgagcccagcgggacggggtagttacaacatgcaggccatcacctacgaaggcctctgcttccagctgtggcagctggcctgnaagccttttggggtagagcccagctctgcagagggcggnggagtgtgaggaaccccacccttcctgccagcccctccctcactttactgggcagcacacctgaccttcagccntattgttcctggcagggnttcgttggggacacccagattgggagtcatc

SEQ ID NO: 449049 - DNA, 768 bp, Homo Sapiens
  misc_feature (400)..(400): n is a, c, g, or t
gtttttcatcatcataaattcatcataatcacagatatttttgggtctaagatattcatataccaaggatggttttgtaaagaattctgggatcattgaattaaggattgtggcttgaagtaactaaagaaaaatactaatttccttaaaaggaattataattatgatttacattttacatcattaatttcccaaattatatttaacccgtaagagcgtgcacatgagtttttagcaaacaggtatgaataagcagctatgtatatgtgtttggggcagaggggagcagattactttaacacacttcagaattaaaatcagttcgtttcatgactctgtgcccttaacgtttgtgtgaactaaacttgctgattgaatgaaattcttgggaagccgaacnagtaattgcctgaaaatgtgacccaaatgagtatcgatgtacttaaatcactgaattttatataagcacaagtattaattttaaaaacattatagtttaataaagctgcatttaaaaatatttgggagcaaagacaagcatgctaaatcttcattttgctatggctataagcatatatttttggcaacttatttgcaatattcttgccttaaagtttcctgcaaatttcccccttagtaattcccgaatagcaaaacattaatattccatgattagctctactgtgttgtctcactattaaaatggaattcgttttttcaaatcttttctaatggttaataaaacaaatgtcagatcataataacaaa

SEQ ID NO: 449050 - DNA, 381 bp, Homo Sapiens
  misc_feature (53)..(53): n is a, c, g, or t
  misc_feature (64)..(64): n is a, c, g, or t
  misc_feature (94)..(94): n is a, c, g, or t
ggaagttaactggagttttagagggtccgagccaaaaacagttataccagtgncaggttacaanagtcctaatgacaccttagctaatgcaaantcctgaagtgcctcgtaaggacaattgatcatttatcaagacgccaagccaagcaaattgtttcatcagcaaagatgctgttgcatgaaaaagcagaagccctgcaagaagaggtagaagagttactaagattgccttctgatttccctggtgctgtggcttcttccactgacaaagcatgaagctatctgatgagaattttcatatatgaattatttattgtacatgtgtgttattaaagataacttatactttataaatgaaaaaatacatttcagttatacatt

SEQ ID NO: 449051 - DNA, 345 bp, Homo Sapiens
aaactgaggccttgcgatattttgtgtgaatagatatgccctaggagttcagaaaaagttaaaagtatgttttctaattaaatgcagtgcacattcctggatcaatattcaaagactggtcataacctgctgtgttaaaataatcacatatgctctttttcatcagatttgttgatgatgtaaataaaatgtgtaaatatattagtaaatgttaatattcatgtattttaagttaaggttataaaatttgtcacaatgtgtttttttattcaagtgaaaacagatgtgtgcagctattttgaatattggtttataaacattcatattctttatcaaacgaaaaaa

SEQ ID NO: 449052 - DNA, 2097 bp, Homo Sapiens
  misc_feature (2018)..(2054): n is a, c, g, or t
ctttattattatttttatttttagagtttctagctaaaaacagagctgaagtcattgtaaaaaagacacattataattttccatatgctacttctctagatttttcaaaaaatcccctttcatcacaaaaatccttctgcagaccataaacacataaagatcttttagacattcattccactactgttccttcttagaagcattatattttcgatcacattttaaaacatcactaacattgcaacaacagatatcaaaaggtaataaaacatactgtaaaaaaattacgtgttttgtttgaaatatggcatttattttacaatgcacatattagggtcgaattgtaacaagcattattttccctactcttctagagtatgcacacaggttactctgaatgcaatgcaataagccttttccaccagctttaactcactttctgtaccaaagggcaaacctaccactatggcttgtgatggcttacaaagaaaaactgaagcatagccttaagaaaaatgctgcaagatgtgtctatgaagagcactgcagtgagttgttagggcaaggggcacatggccttacataggctgtcccaggcaatgcccagcctcatcctgtaaggaagtcggaagtctccgctttggaaactagttagctcacactcttttcgggtttgttttcttctgggcactcctagttttaatgttcttcttgggactggctggtttgggagcaggagtctttccctttggtttggggggattactacgactggtgcgcccggctgttttcttcttgtcctgaactgttctccgctgttcctgcagcctctcttcccactgtatggatcttttactaagctgatctctccatttttcaactaagcaattttcaagaagcatcatccttgagcgccactcgtaacacatgatgagaacatcttgatggggcaggatgtgtggacactggcaagaagaatttgtaatgagcgggacttgagttcgagggatgggtgatgaggacttgaagatctcttttacatccaccaccgttgtgacctcattgcagccactcctctgcacagcttttattttggcatgaataacatagctgtagtttttgctgagatatgttgccaaagttggcttcacctttttacacttgcaccgatcggggcttaggcgtttacagtcaacatcaagaggcctttcctgtaccatcatgtctggtgtgatgtctatccacttaacatcctccgggaggtccgtgacgatggcttcaggcgagatgcacacgccacggtcatagacaggcagctcgtcgcaggccaggctttcgggccagctgtggttgtacatcttcatgaggggctcgcagtcgtcgcgcgcgcgttggcacaccgacttgcacggcttgatagggtcgtgcaggaactccagggtgcaaatgggcgcgtacatggcacagaggaagaagcgcagcacggcgctgcagttcacgtccaccagctcctcgtactgctcgatggccaggatggcgttctcctgcgtgctgtggtgcaggtggttgggcatccgcgtgatgttccagggcatgtgccggcacatagggatgcgcaccgcctcgcagggcgcgccgcgcacgcccagcgccaggtgcagccacaggcacagcgccactaggatggagaggaacatggcactgccctctcgcgctgcgaccccggcagacagaaagcgcccttctcttcctgccaccctcatctttcgctgtcccttcgccgaggaagaaatcctctggggcgcaggagagtttcttcccccaaactccagtcggcagcaaagcggggccgcggggtccggccgcggagctccgccgtctggcacacagggcacgagcagcgccagctctcagccttcggggcgcgaacccgcccgggcagctccagtcccggactccgcagctcggagcgcagccccgctctcgacgaattcgagctcggccgatttggcctgatnnnnnnnnnnnnnnnnnnnnnnnnnnnnnnnnnnnnncgccgccaccgcgataaccccgagtcgccctatagtgatcgga

SEQ ID NO: 449053 - DNA, 688 bp, Homo Sapiens
  misc_feature (12)..(12): n is a, c, g, or t
  misc_feature (21)..(21): n is a, c, g, or t
  misc_feature (52)..(52): n is a, c, g, or t
  misc_feature (65)..(65): n is a, c, g, or t
  misc_feature (81)..(81): n is a, c, g, or t
  misc_feature (108)..(108): n is a, c, g, or t
  misc_feature (135)..(135): n is a, c, g, or t
gccttttccctnccggaaatnatccttaaccaactgtaaaaacttttaattnttccagaaaaatncccttatttcctacanctccgaagacatttcctttaataagtnagatgggggagctagagcttacattcnactgcccagaaaagggtcagttcccagtgttaatttccccagcaaacacctgagagaaaaactgaacagaaaaagaatagtgataggtggcagagcagtgacacctgtgcccagaaagccgcactgcaattgtctaatatttgaggctctcctttgttataactctgccaatttaaactagaaaattctggctgcttgaaaattcaaagcagatcaatacatttaaatcaccggttcaaaaaatcactctttttcatgttataatgtttttattgcaattgaggatgttttcaataagtatcttgagcttgaggccctggctaagtattccttttgtactagaaatcagatttctctggcacaattccattgcctgcaatggtctttatcaaaactacaaaagccagcacacttatttcaatatgtattcagttgttcatatctaaatacctcattagctatgaaacaaaccaaatataaatgctgaatatacagtacatagcaacagattcttcacagaagaaaacaatgaaagactaattttctacaatcc

SEQ ID NO: 449054 - DNA, 473 bp, Homo Sapiens
atttctaatttttttcacataaaacaattatcctaaaggttaatagttgatcgaaacagaataatagaaaaattctactttaatttccattaaaaagcaaatagcattgacacatttaaagcttttcatttaaagtagtggatgtttttgaagtatctaaaatagtagcagaatattttatacttggtccttgcaatggtgtgagttttaatgattgcattatcgtgattggtggttatgagtttcagaaatctatacttggcatccaactcatgagtggattttatataggatggaacaggaaggtatgtcctgtcagtatcttaaccctttcaacaagacatttacctatttgtctttccttacgttctcaaaatattaactcgaattgtaaattaagcaaaaatttaaaaagtatatgttgatgggacaagaagaatagtatttatttaataaaacatatattatattga

SEQ ID NO: 449055 - DNA, 447 bp, Homo Sapiens
  misc_feature (240)..(248): n is a, c, g, or t
gaagcctcagtcataaatttaatcaattctaggttgaatgctaagaaaagttttaattgtgcaaatgtggtacataacatttcaaatataagtggaaggatcatcagtagtgttatcaaaatgcataatacagaaactttttaagaaaggataaaaaattacactcaggacccataactcttcctcattataagcatatgtagtgattcattcatgcaggtttttatatgtagataggannnnnnnnnccttttcaagaattccattgtagccatgagatgaaaaatgtattatggtaatggtatagctttcttctattttgcttttagtgttaggtttgctaaaagcttatttaaaattcccaactgacataatgtgttttcaataaggaggacgcctgcgtgtccaatacccttcccctggtcattgtcggtaccatatctcctg

SEQ ID NO: 449056 - DNA, 531 bp, Homo Sapiens
gcataataccaaagaatttattgtaaatgtagtggcaaatacattcagaataatcatcattaaaaaggaactagaaaattatacatgtttaaagtatgtgcttttttcccaccacctttaagttaatggctagtaccaacattttaagtaatgaaatacttaatgtgatgacccattttcagataatttcatgactgtatcttcatcttaatttttaaagcagttgaccatgaatttcagtttcagttattctctgtttttatcaattccgtaatgatctgcaggaatcttgtcattttcaagggacatctttgggattttcaagcttttttcttaaaactgaatcaatgagaactctcagctgcttgaaaatgacagctatctttacaggggcctgaaaatagatccagccatcaatagaaagaagacgttctcggtgctgaacttctatatcaccaccaaaaagtaaaactggaaaaggggttattagggtagtttctctcaaatacactctgcatactttattttttc

SEQ ID NO: 449057 - DNA, 522 bp, Homo Sapiens
gactaagtctctcatttctgttttgcacttatatttacaataaccacatccaaaaactctgcttcgaactcatggacatctgatttccagcatggcctggatttaggcacctgcagggagaccttgggcatactgtcttcacaggaaagagggtttgtgggggaaaaatgcagaatagaaaaggtgctatcaagaatccatgggtgagctttggtgcacaattggtgaaagaactggttagtgctacagatactggcccaggcaggacagctctgacttataaatgtgtgcgtgcagggagataagatggtcaggtgatccagaaatctaggctactgcaggaaagaggttactggtgcagattcaagatctgggaggtagaaagaagccatgaatcttcgggacacttacgtggcctgttagtggaaaactctagaagcagtcctcagtctcctttgacccttggaggagacctagaatcacaggacaattcacagtgtgacagcttgtctgcaaaaaaaa

SEQ ID NO: 449058 - DNA, 389 bp, Homo Sapiens
aaagtgctatgatcattgtaactttaatcagataaaacgtaattattattaacatttttacattatagctgatttgtctaaattctaattacaataaaatatatcgttttatcttatcaaatagtttttatattgagagtgaaagaaacagtaaaatagtcagaggaaaaactagtgccatacccaaaagtattacttcagaaatttactttaatatcatatttatattaaaatattttatttgtctccatggtatttctatgagatattagactgtttgtccctgtatccctattttactcatggagaaacaaacatagtatgtttagtaaatttttcaaggtcattcactatgtcagaatagcgctgggaatctaatttattatatt

SEQ ID NO: 449059 - DNA, 769 bp, Homo Sapiens
caactgcaaaggtgctactgtgtccccaggagcctaatagggtaggcccaaatctctgtttgctgaggaggtcattgccatccatatttgggagccactgggtggatggggcagggaggcaaaatgagacaagtagccttggttagtcttagagttgctgatgactgtggcttcccaagaactgggtacaagcagtgcccttattgtatggttggttaacagtctgctcccctcttcccttccttctttttttcctctactgacttctctccatactctttcccctctatttctttgtatgactgtcatagacacatgggtgcttgaagaaaggagggacccggaacttgggccaatcagcctcaccttgtcccagtccactcctaacactagcatcagtcccactcatctcaggctgagccacatctcactttttcgctcaagctatataatcctagactggaagagtagaatatcatatagggaagaaaccttaaacaccacagtgttccatgttccagtcactgatttttacaaatcttacagtccaaggcattaacctcaaggccctcccagcaccccattcttgtatacacatggcaaaatgtgaagaaactcctttcatctcagcaggtagaggaggactgatgacacgagctgccatggcgggaggaggggcagtagttattgatatggtgagccccatctctcagttttcatgacaggtctatatttctacctgggccaggccaggaaagagactatttaa

SEQ ID NO: 449060 - DNA, 1747 bp, Homo Sapiens
  misc_feature (173)..(174): n is a, c, g, or t
  misc_feature (177)..(180): n is a, c, g, or t
  misc_feature (183)..(194): n is a, c, g, or t
ccccccgggcgtttttttattggggggggattcccaggccttttgttcatggcccaggatttccttagggaaacaggtatggcccatgttcaacttaccttctgggggcccgcgggcccaaaagaaatgttcttgaaagcttcttcgaggcccgagggcggccgacatttttnnttnnnnttnnnnnnnnnnnntttttggctttttttaataaaatgaagcctattttattacttcaagtgttaatgataaaaaaatttcagcacagctgttgcatttaaaaaagtgaaactacatactatgtttctagctcagtaaacagatgaacctgatgtctttaaatgacataacaattgagcattgtacagtacatcttatgaagacccgtaaattaaagaactactggtttaaagttagtgattatgaaacaaaaacatattcatagtttcagcttcttttttcttcctcgaccatcaggtgcgccatccattttacgtttctgtgttgaaggctttggtcctcgtttctttttctctgccttctccttttcttctagttccatgttttctctttcaatcaaagtaattaaggtattacatctcctctggagctccattgcagttctggacttaagaaaccagtcaaatctgaactgaggagagttgcgaatacactgtcgcaattcatcataaacattttctttgtcaaatccaagtttgtgaagcatacgaatcagaaaacgatcttcttcttcagtatagtttttttcctttgttagtaccatatgatattctcagctgatgaaaaggtgctttgtaccgtccaatctttgtgtcaagtgctttcttgatgcttattcttctttgaattctcgcctctcccctttcaatctgagccataatcttctctatgtcctggagctcgttgcacctttcccaaaacacagctgaatattcaatgacttcttctggagttttgccttctacttctcttgctatattttcaatatcatcacgaccccacttctcattagctttgataaactggttaaaatctctcttattccaattggtaaatccctgtgttagaagcttctctttttcctctaactcttcatcattaagggattcagcttcatcaattttaagctgttcttctttttgtgcctgtgctgcgttaggcagctcaggatttcgaggtaccttgtacccaatagtttttctgtaaaacagaatttctttttccagtaattcaaataaacgtggaggaaagaactggaaatcctgaacattgggttgttttggaggtcgaggagccttgggtgctttaggttcactaacacgaagagcttccctgaaatatgcatcaacggcatagttggcttttctttctcgtttaggtggttcaatccactctgtgaatgcaatcttttgtttttctctatagtcttctccttcgaagttataaacacttgactctgtatccattgtaaagtttctaagtgaactttcgcccatcttggagagcttttcattcatctctgcagtcttctttgcacctctttccaaaataccatcgatatcttcatcagtgatctcactttcctttgaagcaaacacatgtgttgctccatgtctaatcatttgaagcatttcatctttcccaattttgttcagattctgatccacaagcctcccttgttgaatgactattgaatccagtctgagtttcatctcagcacgttcta

SEQ ID NO: 449061 - DNA, 462 bp, Homo Sapiens
  misc_feature (228)..(254): n is a, c, g, or t
  misc_feature (318)..(318): n is a, c, g, or t
  misc_feature (354)..(354): n is a, c, g, or t
caaatttaaattttattagtcgattagctgtactttttaaaatgttttattctgaaaatgaattttccacaataatgcaattcaaagtgaactcatttatctggcttttctacaaaggacaattgaaacacttaaggcgaaattcacttattcatctccatttaagaatggaaaaaaagtaacagacttcagatactggttaaggttaacaaaatatgggaaggctcnnnnnnnnnnnnnnnnnnnnnnnnnnnggtagtctcgtgtaaaagctttacattactatggatattttataggtaagacacttttgtttcntgactttctttataaacccatttttaaattttaaanggcacacaataaagctttatgcattttattaaaatatacacattttggttaaatttagaattttcccttagtagcttgataaatcaatatattgtcaacaccacacat

SEQ ID NO: 449062 - DNA, 440 bp, Homo Sapiens
aggagatctaaattaaatttattaataggagagcttgatgatgcttaattccagagaccagagctccgattggtgaggctgtccttgggaaatgggtgaaattgaaaaccatcaaaacaattggacttcttaaaaattggattgtatgagtgaaaggtgtttatgagaagtcgatgactccggatcttatcatccaagaggacagcaccgaaatagttaattttgtttcttgagggactaggatgctggacgtctttttctgatacccgatcattacgtgactcggcaaacgagtcccgcagctcctcctgctgctcccgctggttcctgcggcttctgctcagacaccaacgccagacggcgatgcctctcgggtggtgactccagcgcaggaacttgaagaagcgctttgcccgccgtcctacctggcagctctcctg

SEQ ID NO: 449063 - DNA, 477 bp, Homo Sapiens
ttttttttccttcaaaaaatagtttattctgcacatttcctagtaggctctctgcccaccgttccagggtagcagctactcataacttgtctttctctccaaaaccaagagggccttcccaacagaaaaaccttcagttcccaaagcagcatcgattcttcccctcaccccagcaaacctcggggtggaataatgaatcattcaccttctcccacccctcactgccccgccccaccttcatttgccaggactgtcactggctgatggtcagattttgtctttttcaacttggataccctcaagcatcccagcttttggaggcttccctgggcaacctcatgggcttccacattgaccaggcattacattcagcatccttggacaaaccacccatcagagcagtgggttgtggccagctccctccacccccgactccgccccaatggaagaaaccagaggatcacagggcccccaggc

SEQ ID NO: 449064 - DNA, 717 bp, Homo Sapiens
gatgacaaagacatggctttaatgttatccaggagacatctgattcacatagggttattgaacactagaatctgatcttgactctctcatgtcaacaacagacaaatgcattacaatttagggacagctgttttctgggtacctcccaggtgtttgcagaaggcggctagaatttgcttccaggcatcttcctgggccttagaatgagccctgggttccccaacccatatcacgtgtttgttcagtaatttgtgaagggaagctgggcacagggggaagtaaggaggctcagtgtaaagcccagtcccagggtaacagatgatctggggtttttcctttccatgggcccgtaaccgttcagagactgggcatacaactcactcctccagttatggtcatcctgaccaacaatgaaaatgatggggccctgggccttctccattgaaatcatgctggggttcttataccctcctacaagatcattctttatatccacgacgtccacgaggcctgagaaagctaccttgattctcctcaagtcatagcccaatgtggaatgctattctgcttaccagttatgcctctgttcccactgattccggatccattgatggaaactgtgtctgagtcattccttaaagatgaggccattgagagacaaatttagcttcctgagaaattgcccaaacccagtggctggcccttttccctgggatg

SEQ ID NO: 449065 - DNA, 840 bp, Homo Sapiens
  misc_feature (391)..(391): n is a, c, g, or t
  misc_feature (695)..(695): n is a, c, g, or t
  misc_feature (764)..(764): n is a, c, g, or t
  misc_feature (782)..(782): n is a, c, g, or t
  misc_feature (801)..(801): n is a, c, g, or t
  misc_feature (822)..(822): n is a, c, g, or t
ggccagaaaggatcgttttattagtttccatccataatttccgaagttccattatgactttgttaagtccatttcctctgaattagtcagatttttaactcagtcatctctactgtcatgatagactttttttcttatattatcaaaaatgctacaagaagagcaagctttcaaaggtagatttaaattgtttctgttgtagaaaggaattgtcttacaagtaagttagagactgagagtagattgttatcttatggacctatacagaaagagcttttctccaatgttttatttttaaggatttcattagcatatttctcaaaatatttaagatattcaagtgggtttgattttcaaaatgcatcattacatcttgtgataggaaacaatntaaagtgagacacaacaacttttattttacttcatttattaccatctaattaaataaaaaccagcaacaaattaaaatctaaatcacaaaagtaattatccagtgtatttcaagtgcatttttcaaatatataattcagatattcaagcgttattatataagctgaattcaaatttctttgaatatatttaaataacatttcaagtatatttatgggaatgttagaaatagaacaagcaatatttgaaacaaaatgtaaactttttaaagttcagacactttcaaaggacagataaaagtaccngggggggaatctacctttaaaatgatatctttgttagtgggaaaatgtctgggagtatccggaatggcnatttaaggttctgttccnccaaatcaccaaaacaccnaccttccacactttccaaggncattgtggggtcccccta

SEQ ID NO: 449066 - DNA, 780 bp, Homo Sapiens
  misc_feature (690)..(709): n is a, c, g, or t
cacacgtacattaggtcctgggtggaggaagaagtggtggagcctcagggccagggcaggcaggagcaggcactgatgctagagggtgatgaccctgccctctgccacccaggctgcgtccaacagcctgtgactcttccctggagaccccttctctcacacttttatctactggcatcacccaccccacatggcatataccacccatctctggtctggggctgagggcaaggactgcactagtccagggagtaggggacccttgaacaccaagagcaaccttgagaggtgccaacaatggtgtgctgggggtggggttactttagaaaaagtggacacagaccagactaaggaagaagtctgaggcagacggtgagggtggcccaggagccatggcctcacacagacccgaggcagagaacagctcattgggtcactggtgatcatccagctgctgtaggagtgtccgccgccgcctctccagctcaccctcactcagctcactttctgacgtgtcccagccttctccttcttgattccaaagcctggggaacggttagggagctctgcctgttggagctccctgtccttgtcctgttcttgttctttctcatcgctctccctgccagctttctcctcagggtctgtctcactctcaggactattcgacttgtgtcttctcttcttagnnnnnnnnnnnnnnnnnnnnctcccctctctgaagtcagcagggcaggtgggaggaggggtgaggagtcacctcaggacctcccctcattt

SEQ ID NO: 449067 - DNA, 532 bp, Homo Sapiens
  misc_feature (322)..(322): n is a, c, g, or t
attgcattttaacttctttaataattcactcaaaactgtaacacgagaggaatccactgtttagttaacatttacacacaattataaagaataaaagactgaatacatttatgaacaaactgcagtatgtctttaggttcataggctgctcaacacatttaaagcgtatagcaaatgaagtcacagaactatagggctacaagaaaatcccacaagtttatagcttaactggaatcagatttatcttgatacagaataatctataaactcatttaatggtcattttgtctcatctaacaaaccacacagatgtcaaccaccngggccttgcaaatgcagagtggccatttacatttaaaatgaagtattatagacaaccagaataaaatcaattcccgtgtttactattttccattttcaatatgagcatttgaaatgttaatatgagatacaatttcactatttaaactcacattacatatactgaaactaccaatgagtacagcaagaatatagacatactgcagccttt

SEQ ID NO: 449068 - DNA, 695 bp, Homo Sapiens
  misc_feature (657)..(657): n is a, c, g, or t
gacttgggagttttatctttagatgccaggctggcctgtgcagacgcttttcttgtcttgaatgttttagtcactgttgttggatctactggatcaggcatactgctaaagctttccagtgattcttcatcaaactggcgtcttcttccgtttgtatctaattgatttttgcggttactacttgtagatttttctacagacactgaaaatccagtcttgataaatggtttctctacttcaccttcttgttcatataaccatggtgtcctactgctttccacctcctcttcaggcagttttttattccttggtttctctgctccaatagaggaactgctttcaaaaggttttggaaaagctatatattctgtttttcctgaagaattctgggctaagggttgctgctgttcactgggtgtagagatattctgagaaaaatctccaaaattagaaggaaataaagggctgaaattcatacctggtgcaaatgatgaaaagttagtaaatccaggtatattgaagagatttacaggctgtgtttggaagctgaaaggacaaaataaacttggagaaaggagggtgcgatgcactactgcctctttccttgccctccagatttttcttgatgctgattttgctggcgcataagtcatttancatttgttcaacctctgaacattattctgttgcctgtt

SEQ ID NO: 449069 - DNA, 1172 bp, Homo Sapiens
atgaattatctttcaatggtgtagaatgattccaaagtgtctccattagcatatactgagcaggaattaaataaagcatcagatactgatctgagctgtaagctggtagaatctgagccaaagtagactgcttaaattgataagctttgctaaagagttgtatgcacaaaggatgattaattctgggactatactcacaccaaggtctgctgtcttatagccaagaattacagctttatttatagagagtgaattatgggtattttttcagaaaatattgtcatctgatatacacataaaacaactcacattgttggagttaactaattatccccatttcatggttttcagtggcaacttactgacccttgtttttgcctgtgcttgtatgcatgcattttcaagcaagtaataaagcagcctcatttaattctggataatgctgggttttacatatagactgaatgctataatcaaatctattgacagtatctgcagttctttcagaattccagggaaataatataacgacctgatatctttctacaggaatattttcagacattatatagcacattactgatttaatgcttttacttttatctttcaaaacaaattcactaaaaataacacctattgattttgaagtcacttttctcaaaccttgaaaatgagctctaggatctctataaacatttctaacacttttcctgtagtttatatagacagacatctgttgttagacctgtgtgtttttaaagaatcatatgttaacaaatacccatgcaaagagcttcaaaaagtgaaaccgtgttaaaggaacacaatttttctcactcagacatatttgtttattgaatttcaaagttttattttaaatccgcattttcccccaaaaatatatcatatgacgctagttcccagggggcttgactgaattggtgttttgcctgggggggagacaggggtttttgttaaaacacttttaactaaaaaacggagcctgaaaaaatggttaaattagaatttcaccgaattgccctccccttcgaaaaatttttaaagagtccatttggcggggtttcctcccaagggcggaaaattccgtgggtgaaaaccaatttccctccaagccattttacacctaacaggggaaattctctttttttcct

SEQ ID NO: 449070 - DNA, 495 bp, Homo Sapiens
  misc_feature (154)..(180): n is a, c, g, or t
ggggcttttaaaacaagtagttcatgaaagaagctgttggactcaacatagagtagagtaactatctttttagtctggatttctgccctgcttagattttaaaagtataagcatggattgccaattccacttgatgtaaacaaaactttttttnnnnnnnnnnnnnnnnnnnnnnnnnnnaaataacttattgtatcagtccaggttcagaaacttgtggtaggccagttccagatagtttcatttcacctgtaaactgtatcactttgactgatattgtaattttcaaatgtataatatgtttacagatgtgccctgcatttagtctgccttgttcctattttgatttttgttgagtctcctgcctgcttgccaaaagctaggatgcttcaggcccatgtacaattgaaagcagaggcatccttgagctttaaagcattgaacaaactggaaaatgcaacataccacataactgaagtgaaaaaagtctgtgtt

SEQ ID NO: 449071 - DNA, 586 bp, Homo Sapiens
agtataaaatatttattgaaaacaacagtatttaaaacatttacagagagtcccatagaggattctcaaatattttaaacttaggatgcagactgctattcacaatgcataaagaaaaaggtgatctctagagcaactatgtatctgcaacataaaagaaacatttacttcaatgcttttacattgaggaaaacgtcattaaacgtattttaattttagtactctcacagtaggaagataatagtctgcttttacacaggtctccagaattcctgtttttcctttagataaatttgacttcatagtcaagagtctcatggtaaagaaaaggtatcaaaatactcatatttttgttttcagctcaatttcccccaaatgttaacttcagctattctttattccacttgatgacatttttcatgtttagcaacattacatggttgtcctctttaaacatttaaaataattagaacattttagcattatctcaggtttcaagctgatgtatgtcagtttatatacctttgtatcttacaaatagtaaaacaaagtacattctatatgtctgatattaatgtaataagaa

SEQ ID NO: 449072 - DNA, 567 bp, Homo Sapiens
  misc_feature (543)..(543): n is a, c, g, or t
ttttttgaggaggcataaaaacatggtttattccaaacactgcaatgtggaataagagagtgggaagggaagttggtggagaagtgtggactcccagaccctcccctccgcaacccagccccagacccggctggagatctgggcagaggaggctttttggaggtctgctgggtcatcactgaagggtcgcaaataagggttggatttggaagaggatgtgcttggtggccaagtggggtggtccggaggtgcggcagggtgggaagttttggcttcagggaggttgggttcatcgcggtgcaagggaaggcggggcttccgttggggacgtgtcctaggtcagagtagggaaaagcgaccgagggtggaagaggaggagggggtgtcacggtttgatgtcaagggtcacagtctggtcggggcacagtctggggttcgggtcacagtttggggtcaggggtcacagtctggagtcggatgaccattttaggagtcggatgtcacagtctgggtcaggggtttctgtgtggcggggccaaggtnctggggtcacagttttgcgaacgc

SEQ ID NO: 449073 - DNA, 464 bp, Homo Sapiens
tttctttgatcaagtttttaataagcttttttcttacatgtacagtcatcttaaaaagacaaatattaactattataagttaaatactatacaatttatgagaaatgtaattttgtgaatttgaaaagtaaaagggaggtaactactaaacggattaaagaagaaaattctactttttaagacattttaaccagacagaaagtgagaaattactaatttaagtaaacactaaaaacttttactgaagctggagaaccttatactattttagatcaagccttcatctacacagctttaaataaactttaaaaaatcttttctagtacatataagactgctaaaaagagtgcatgactgggggaaaaaaggcatatgctagaatgtgaactcctgaagaacagaaatacatttcattcatctttatccctggattcctaacacaatgcctggttcaaactaaaatg

SEQ ID NO: 449074 - DNA, 498 bp, Homo Sapiens
gctttaaatgattttattaaaaattgtaccaattgatggggggaaagatatacacacatacacacatatgcatgtgaagaacataaacacataaagccaaaggctctggtacagttttttaaaaaatggggcccctttcttcttcctctctcccagaggcagagtgcccagaccccagggcagctaccctggggatgaacaaaatgctacattctcactgggtctcctcgatagcccctgtggattccagggatggggtagaaggctagcaatgctcccagagcagggaggggcactggccacctgcacagagagagggggcagttggggctcttgagcacctttaagctggggaggctggctggggcacctatggagctcagctttttttccgctattcccctccaagactccaaaagtccccaccaagccctcaggctggcctaagggtgacaggtgagccccttcctgctagggtgtctggccaggatgcctggc

SEQ ID NO: 449075 - DNA, 547 bp, Homo Sapiens
gcattatttaagtaaaaagctttatttttttccctcagtgtctgaatcttctttattgtttaccaggattcatgattccttttgtaacttgttctcagtcatttattcagttgagtaattacactttgtcagacaaatatctaaagttttattatgtaacttgcagattttcaggacgagtgaaggaggaaaatggcagaagagttcaggaaagacaaaaatgcaagactgtgtctaagtttatgcctctcttgagtttgatgatccaattttaatttaatcatttgagtatctcttagggattcttcctccacagtggaggaaagtgggctctactgaattcattggaacaccgtcctttaaggagaaagaaactttgaacaatagacgtctttttcaacaactactgccaatgttttgaaagttgtcatttgttttcagctagataacaaaggctgaagagttgccttctttccaattgatccgatggtttactggcgcttttaaaacacattacataaatctttagaaatcttttgtgaaggta

SEQ ID NO: 449076 - DNA, 505 bp, Homo Sapiens
cctaagagactgaaaaaagtgaattgttggcccagaaaccctggggccttttccataaaaggaaatttggggcttgtcaactccctctttaaagatatagggtagaaagaagagatttttaaccctttgtctgcaaaagaaaaagggttaaatgaagcatctatacagatgactttgggagattatgacaccttttgccatcttcagggcttacgtctttactttcttggctaaccagtttcttagaagaaaatgtgtcagggacttggggatctacagtcatgctttagcatggctatggagctaattatcaagcttaaagggtaactttgggaggactcctcccttcactcctagtctcccttggaagagcagtccaggctcagggaagggaatggataggatgacacagtaagtacagaaactgaagctgtcaatagtgaaggaaaaaggggaattcttcgttgctttggcattgacacataagtactttgattaaaaaaaa

SEQ ID NO: 449077 - DNA, 200 bp, Homo Sapiens
acgagcaaacaaaaaattaaagtttctatctcccaccctagatagtacattttaataactcattagttcttacatgtaaggaggaggcagtttggagtcattaactaaaaacaatattattttttatttacccatctaaaataatcagatgtaccaacctaccttctatgggttagaccgctttcgaatttcctcttgaa

SEQ ID NO: 449078 - DNA, 317 bp, Homo Sapiens
  misc_feature (181)..(181): n is a, c, g, or t
gtacatgccatcatgcccagtgattattttaagacataccatttgttaatttgtcatgtgctaggtactttaaatatttatgtttaatctcaaggataactcaaggagaaaaagccagtatcctcattttacagaattggaaactggaggctagggagggggaagagaaaaagttacccanttcagggggaggcaacgcccgcctggcggccccaaagcccctgctccttttctggcccacacagctccctgtgctctcagaaggtggcctggggaggccagaggcccacaaatgggcgcagccagcatcaaagtgc

SEQ ID NO: 449079 - DNA, 643 bp, Homo Sapiens
  misc_feature (231)..(241): n is a, c, g, or t
  misc_feature (379)..(447): n is a, c, g, or t
ggggttctccggccggcggcgcgggcgcgggccgggccaggctgggtctcttcctcccggccccggactccggtgcccccgggacgcggcgctttacagacacatacgggagcagccccggtcccccgccccgcgcggccgaacaaatggttctctccagagcttgtgattatacgttttattagactcgggaggggtatggcagggcttcatcagtgttccttcaaattnnnnnnnnnnntacaaaagctacgtagaaaacgtcagatcagacgactaaactttcccgactcagggccaagttcttcttgagcctgcgctctcgggacgcctgcgagtcggtctccgagtacgggggcggcgcgggcgggtagtaggnnnnnnnnnnnnnnnnnnnnnnnnnnnnnnnnnnnnnnnnnnnnnnnnnnnnnnnnnnnnnnnnnnnnnagtagccgccatatgggggggaggtccccggactgaagcccttgtccgagggtcccgtaccgtggggggtggggaccttgggtcgcgaaggggggcgctccgaaccctgaatctcctatgggggggtcccgggacgtggggaagtcctcgagtcgtttggcttataaaaggtgtcccggtgcggttcccggggggc

SEQ ID NO: 449080 - DNA, 395 bp, Homo Sapiens
  misc_feature (328)..(328): n is a, c, g, or t
  misc_feature (383)..(383): n is a, c, g, or t
tacaaattatatacatttatttttaataattttaaataacactcttgtataaattctttcatatattcaaatcatacacaaatttagaaatgcatgatgaagcctagtacagcatatgtatgagacacattttttaagtttgtgttagaattttagtgacataaatacaagtttaatgtttcagaaacattccctaattgctcggcctataatttaatgtattatagagtgcttatgcctagcattacaacttgactttaaatcatttagcttttggactaacttagatctgaagccctgggcttactttctagggctgctgctgccnaaacaagtaaacaattcctacccacatagcccaaaatatgggaaccagggatgtncattataggtgg

SEQ ID NO: 449081 - DNA, 1382 bp, Homo Sapiens
  misc_feature (155)..(155): n is a, c, g, or t
  misc_feature (737)..(772): n is a, c, g, or t
attttaattgaataatccatagtaatagttgaaataaagtgatacattagactatatttgctacaacataaaacttcataacaagattatgaaagtgatttttattattttggtaatggtgtcccagtataagtaatgagatacaattttttttnaatttggtatatcaaacagtaaaggctacatataaatgttgtttccccagaatgtactttgtctacaactatgcactgtagctattatgcacacactaaaagcattcatgataaagtacaaaaataagaaaagattaaataagaaggtatccttgagttataaatgtctactaaagtataccttttaatcacacagttgtgtcacagctaaaaaacacacaaattaacatatactgctatgcaactatttgatctaatatagatctactaggaaaatattaaggctgtagtaacacttcacaggtaaaggctaagttctgggacatgaaagctttttagaaaattcaccaaaacaaccttgagacatctttttgttttggaaaaaagcaatttgtttatagagtcaaagctttgacatacaaatgaagcatttaataaacattatactttattgcaataacctggagtaaaacttctgactttaatggttgtcagcaaatacattctctctccggtagaaacacaatgagggtttctgattaaagcagtaatctgattactccagcctccaaattcagttannnnnnnnnnnnnnnnnnnnnnnnnnnnnnnnnnnnactaggttataagcatattaaataagccaggtaaactccaagcaccttactttcttccatataaacacagctttccttttgccgcaagcatctgatgacgactgggcctacatacgtaaaaacagattatagcacatctggacctggttgacataatgaggcatccagattggttcatgattatttttgcagctacacatttctcaatctaaaaaaataggctacagcagcccaaattcactgtctcagccttggtggggcataatattttggaatggcaagtgccaaaaaatttaaatgtactgggcaagcctgctttgtgtagttgactctaatgcctttaaaaatactggcatgattttttatattcaagaagtacagctatgaaattttaaaataaaattacatgaagttttttaatattccaaaccacaaaacaggtctgctatgttgtagacttttttaatagcctatttgagatttaactctgctacgccaaacatctttcttctaaatgtccatgctttgaattttgtgctccaaattaattaattcagaatgagtgggaaaatgtttaaccatctttccttcttttcagtgtttctctccc

SEQ ID NO: 449082 - DNA, 343 bp, Homo Sapiens
  misc_feature (211)..(211): n is a, c, g, or t
  misc_feature (219)..(219): n is a, c, g, or t
  misc_feature (257)..(257): n is a, c, g, or t
  misc_feature (321)..(321): n is a, c, g, or t
gctcttgcattgaaattggttttactgtgctgagctctgtgcaaaggagaaaagtgaagtttgaaattcactaacacctgcagaaaatctcttactgctctttaacacacaagcaccaggacttgactcacattattacaactcaatccacttgaacactaattggcctgcctgcttcatgccaggcctataaataggtgatcaaaatgancatcaaantgaacagggagtgccaaggtcctgagcagagaacggantgacagcaaaggaaatgagaccttgggtgaggtgaaccctgggtggacgctcagcagaggagangggcaccagggctctgggagcc

SEQ ID NO: 449083 - DNA, 693 bp, Homo Sapiens
  misc_feature (588)..(596): n is a, c, g, or t
atgagccaccatgccaggctgctaattctcctttttagtgagttagggaactgagcctcagaaaacttaaacgatttctcagaaaacactcaagtgataaagtggccacattggaaaggagtttttatcttctcattgtcaggccagtgttcattgcacaatatcatgctacctcttgaatctttaaaatattcaattggcaaatgtttttcaatgtgatttactcatgtcttaagtgtatgaggaaagttcaaagcaaaatagaaaggaataattcaaactgaattgtccataatcagcttccagtctttcatgctaatcagcttcttaagagactgaagtatggcatacctacaggggaattccttcacaccatagcctgtatgaacagtgttccttggagttctccagtgctcagcttgagaccttgatacaggggccatagcccctgtctttcccaaatggaaatttatttacacttaccttatccctatggacttagtctgattttattggctaggagtctaacagtcctgtgtggatatacagttttgcccatgacaacaaaggaatctatccgaaatatcnnnnnnnnnataataaacttccaagatttgctgtcttccagcactttgggaggccgaggtggagtgatcatcagcctgggcaacacggcaagaccctatctctatt

SEQ ID NO: 449084 - DNA, 373 bp, Homo Sapiens
tttttttgaacaacctatgacaattatttgaatgaaaaagatcaggtaccaaggcattgctagacacttgtctttctggtgggtctggggtttcagtttttggtggtttgtcagttactctatttgctgtggggtatttaaaccattttattctgcctatgctctgctgacatgttttaagtataaaaatagcctggttgacatctgggtcaacatatccttggctgctctgcatcacttaattaaaaaggttttatcaatactgagtatgtttcacaacgattgggattcaaacccaggttcttggaacagcatgccaagggtgaactttacagcacaggttaagggttactttatttaaatgtgtaccaag

SEQ ID NO: 449085 - DNA, 989 bp, Homo Sapiens
  misc_feature (480)..(510): n is a, c, g, or t
  misc_feature (927)..(927): n is a, c, g, or t
cggcatgcacttgttcggtggtgatcaacggtgcgttataccctcggccttctcgtgtcgcgagcgggagatatgattactagagacttgatatagaacgtgctggggggaatataatagcattgcggcgggcgccccgcggagggagtgatataggggggagtgacccgtggggggccacgcaagaaagttatggggcgccaattcggcgctaccttggccgcgcgttaaacaaagtggtgttctacagcgatgatgcgcacaccaggtggggggggcaagggcttccccgtgggttgtaatggttggccggtgggactgtgcccggtgggaaaacaagggtgggcgcgcgagttttcgagggaatggcgttggtatccagaagcctagcggatgccagaaactgcaaaagccccaaagaaggtgtcacagccctggcttggggagctcctaggtctgggctccctgaagggccacagnnnnnnnnnnnnnnnnnnnnnnnnnnnnnnngcgtgcaatttggcaagcaaggggtgcgtttcagccctgtttatgttgcaactctttcagccctgctagttggcaggtcccgagttcttgtcctgagtccaggaagaatgaggtatgtgggcaagtagaaggtgagcaaggtgaagaggtgctttattgagcaacagtacagctcagaggagacctgcagtgggtagctcctttctgttggcaggtcatcccaacgtctgttcagctctcagcagctgagagagacgcactgtggttagctgtgcccacgttgctgaggctgttcgagctgaggagtgccttcaggccagtgctgagccactcttagccccacctcaacctccctcttgtgctcgtcactgccgaaagtctggaggggggcgaggtggcagggggctggcacgtcancactgccctgagcttgcacaaaccgggccgggttgcgactggtgcctggttcagcctcaact

SEQ ID NO: 449086 - DNA, 433 bp, Homo Sapiens
atatattaggtacataaaatatgaaagtacatcaaatatagattatatactgtacatataatatcaatgtacccgaaatatatattttatactctacatgaaatatcaaagttcaaaaccatatattatatactgtgcataaaatatcaaagtacccaaggtatatattctatactgtacaaaaaatatcaaagtacccaaagcatgtattatatactgtatataaaatatgaaattacatcaaatatatattttattctgtacataaaatatcaaagtacaccagatatatattctatagtgtacataaaatatcaaagtacccaaactatacattatatactgtacataaaatgtgaaattacatcaaatatatattatattaggtacataaaatatgaaaagggcggccgctctagagtatccctcgagg

SEQ ID NO: 449087 - DNA, 1076 bp, Homo Sapiens
ttaacactgaataaatatttattgtgattttttccccggtggcataaggttgtttatttttcctagctctccaaatgacacagttgcggaacctctttcagctggtcttgcctgtgactcatgatatttccatcctatcatgtaatagatctggtatgtagcaggtactgaaccatcttcatttctgtacatttctctgtacactgccgcagctgccagcattgtgtctcgatgcagcagggcttttctattccaagcacagttactctcacccataccttgtaaatcttccatcaattcaaacattccaggatagttaacttgaatttcatcagtgtcctatttaaaaagaaaaagaaatattcatttgacattcatgatacaaaattccagatttaaaaaagaggccgcagagactacccagaccaatctcccatgctaagcaaaaaatatttacaatattcttcatagatgtcatctggcttatgtttgatttatgaaagtctctaattgctgattaaatatcctgcattgtgagagaaatcatcctaaaactccatcattggttctagttctctccttgggaaccacacagaataagagtattctgtaccctacaaaccattgccctctcctccaagtctttgaaaaccttcaggacacaaaaatctgggagatccttacatgttctgactacatgtccctggacagtgtcaatatcaatctttcttaaaatggggcacctagaatcaaaatatttcattctatatctagtaatgcagccaataggcttgtttaggaaatgagcacattgctgatacatgtggagtttgtttctcaaatgaacaattgggtaatgacttcctcttctttttgaagcctgatacaggacttaactgttggtacagtggcagagaccactgatgctccccaaatatccaggtgttccttgacacttcccaatctcaaacacatatttcttttggccaaagaaaggaggggcaagacagttaagagctagagccttttccaggccatctcttttgctgtggtgatcttatagaacacagggcccc

SEQ ID NO: 449088 - DNA, 696 bp, Homo Sapiens
  misc_feature (116)..(116): n is a, c, g, or t
  misc_feature (122)..(122): n is a, c, g, or t
  misc_feature (600)..(600): n is a, c, g, or t
atttacggaaaaattcaaaaaatattttggggttattattgaggtgtagtcgtgaataacctctccacccaaatactttacagtaaccccatacacaccatgaaaattatgtatgnatttcntaattcatggggaaaaaaattaacattctcccagagtagtaaacaatcacatagtatttttccacataaaatattctataccacccatcaatactgacctaggtagggagaaaataattctgaatccagcagagtaccaaaaaagctttttaatgcactatttgttttccaggcaaaagatcttcagaaaatatccgtcatttagtagacttacaaatggcacttttggctacataggagaatcagatatgagacccacgtgttttttctgataagctagtagtaggtcagctttataatacaaccctttcttagaataaaaaatggctaatttgttttaaaagacaggaaaagctgaaaccctaaaggtcttgtttttaaaaaatggggggcccggcacagtgagacagaacattcttctttccccaagaagaaagtacatgtgcaagggctggagggagtgagatagggtccccangaaggtaggggtagtctttttaattgctgtgtaaagatgtcaggggtgggctggaggagtaacttagggaaagctctcatggcctttggcttttga

SEQ ID NO: 449089 - DNA, 479 bp, Homo Sapiens
ggatacaagataccaaatacagaacttattcatcagagttcccccttgctgaagagtgagttagtgaaagaagtaactaaatctgtggaagaagctcagcttgcccaagaagtcaaagtaaacatcattcaggaggaatatcaagaatatcgccaaacaaagggaaggagcctatacacacttctagaggagatacgggacctagctctcctggatgtttcaaacaattatggaatatgagaggctcttacttcactaagagctgtcatatgtgaatgttttacagtcttttcaaacttaacatttaatgtgtgtcactcagtgctctagtcgatcaggactgggtagctatttcgcatatatgtaaaatgttttcagccgggcacggtggttcacgccctgtaaccccagcccttttggaaggctgaggcgggcggatcacgaggtcaggagattgagaccatcctggctaacacggt

SEQ ID NO: 449090 - DNA, 192 bp, Homo Sapiens
aatgtacatttgtgtgcaccagaatggaatgtgctctttttaaagagctggacagtggttgcttcagacttctgaataccagaaagacttgccttttaatttttaaatattactttttacatcataaaatgtgttatcttatccatgtatttgaataacatcatatataaaggtagttttttgcttgtgctt

SEQ ID NO: 449091 - DNA, 372 bp, Homo Sapiens
aaaaaccttcagccagattgaatgctttacagggaagaattcatactgcagagcggtcttaacaatgtaaagaatgtgcaaatgtcctcagacaagatgcacaccttgctcattagtgagttcatttcaggcagccagctcttcctcacccactacatcaccaagtcctgtggatatatctgctaaatatttttggaatttatccacttcttttggttccccagtccaaaacacagtcatttcacctggactatttcagtcattacacaggtgtccaaccttttgtcttccctgggccacattggaagaagaaaaattgtcttgtgccacacatacaatacactaacattaacaatagctgatgagctaaga

SEQ ID NO: 449092 - DNA, 399 bp, Homo Sapiens
  misc_feature (376)..(376): n is a, c, g, or t
tttcctggtgctagaacgaggtcacttttatttttctttttgtatgaaattggggatgcaaccagaaggaatcacacagagatatgtgacacagacccctggggcctgctcttgggagtatcaggaagaggcaagggtcacagggcaggctggggagagaaaagaggcagatgggaccaggtaggattgtctaggggtggagggagttgaggaaggacatccaggagccctggagctgggggaggagcactatcctggaggactagagtttcaggacaggtggatctggggaaaggatatggtttggcaagcaaagggcatgctcacacacaccagggatttgaagaaggagcaagaaaaggaaaggcgtaaaggngaggaagcaagagagacccattt

SEQ ID NO: 449093 - DNA, 601 bp, Homo Sapiens
acatctgagagcagaggctttatttacaatgacattcaaacaggatttagcaaaggatgcctcttcctgctcgcatcttagcagcatgggttgtacttcataaacagaaaagagaaatatcctgggagcaggaagtgaactcttttctcagataatgttctctaaatcccaacacgttccatgctcccggctcttagcaggtagttggtggacacttggttatagcagctgggtgccagatgcctgcatctcactgaggaatgtgttcagggaagatgtcaacactggccgggaaaaacatcaggctttcacctcactcatgggcctccataaggcgagcgctgtttgtgactgctgtcgtcaggaaaatgaacctgtagcctttctctctgcccaggaaccggagggctgagatctcagagaatgtacaaccacccaagaacaccaccaagatgaggcgcagggactcactggaagccttgtcttccttagtcatatctgtgaatgcaaagtcactgcagttgagcagccgtaccacctcatcaaggccctgccagcttcgccgctctagcacctgctcaatgattcggcagctcagggg

SEQ ID NO: 449094 - DNA, 454 bp, Homo Sapiens
  misc_feature (426)..(426): n is a, c, g, or t
tttgatggatgccatttttttcctttaatttggatgtacaatgtttgcagcagttaaaaaattaaatatacatctctcgtcagtccttccctttgctctcagaagcattcaggtctgggtggggctccgggactcgcccatcacagccctgctggctccaggggagctcaagctcagctgacagtccctctgaccacggtgcaaagcagtgagacctgggacaaggaggccccacttgggtcagagcccaccctccgtaggcaggtccacgttggccacgatcctccaaggctggcagttaccacccagattgcagcgggagactctgctcttaggaaacaactgaggggaaggcgttcctttgactgcaccagagcgtgacaggcacatgggggaagagcggcccctgaactttccagtttgccnttagttgttcatgcgggcattttgaagt

SEQ ID NO: 449095 - DNA, 709 bp, Homo Sapiens
  misc_feature (22)..(22): n is a, c, g, or t
  misc_feature (98)..(98): n is a, c, g, or t
  misc_feature (107)..(107): n is a, c, g, or t
  misc_feature (131)..(194): n is a, c, g, or t
ctctttcatctctccttctctntcatctttcccattctttcccgtctcacctttttccatctctttctctttgcatctctcctttctcattcccattntatcctctnttccatcttcttcccccttatcannnnnnnnnnnnnnnnnnnnnnnnnnnnnnnnnnnnnnnnnnnnnnnnnnnnnnnnnnnnnnnnttcttcgtcatttttacttctgctgccactgcttctttcttttctcctcccttttctgtggcatcttcaatattttcttcttttacttccacaatttctttttcagaagctggtgcctctgtaattttggcttctccatttttagcattttcattgtagtcttcttcaacaactgcttcttgcttggtttcagcaactgcttgggcacttgtatctatgttttcttccatcatatcactttttgtcttcattttccttgaacttgatgttctttctaggcttcacctctggtgtaactggcactcagcatagcagacaacctggcagatcttctctttggctcctgcctcatatcaccttgacctgcagcctttcttttgggcattgttgtagctctctataggagatcttagtcagcagaaaaaaagccgaaggcagtcactgcctgactgctccaagagcaaatgagttttcaatgaactaactgcagcacgacctgtactctcctctggccc

SEQ ID NO: 449096 - DNA, 373 bp, Homo Sapiens
cagaacataactattttattacaaaacttaacattatttacaaaatgaaaaaataatcaaatgactattgcaggccaaagttaaaggtttttcactcaatgattgaagaaaaattaagcaatatttccatgcactcacaccagatcatttctgaaatatgcaaactcttaaaattcatgttagtaaaactttaatgtattcataatacttgctatgtttattagaagatggtcaaaaaaaatccatggttctgtacaataatattaacaggtttgttcattttcctttaatattttttggcttccatgaacactcgtagattgaacattctgcaagtaagaattataatagtacctctgtcaccttgctgacc

SEQ ID NO: 449097 - DNA, 782 bp, Homo Sapiens
  misc_feature (341)..(341): n is a, c, g, or t
  misc_feature (365)..(365): n is a, c, g, or t
  misc_feature (533)..(542): n is a, c, g, or t
gaacattagaggtacgactttattaaatctgtactttctgacccatttatccaagtttagtgacagtttgctctaaactgcttttttaaaaacaataatatggtaaatttggattttgtggaacttaaactatctcatgtcaaacacagtgcaattttggatttcaggattatgacagttgtgttagaaacaggctacctgggctatgtctgagttatgttggatccctgatgtaaagtttgacagtgtatgttgtgttcaaaatcaacagttctaaacaagaatctaaagatcccctaggggcaatctctggactttgggggggtccacatactctgggnacctgtgtaatgtgaatatgtatngttttgttctattttcctaggagatgatccacagcttttatcagattctcaaagggcttataacccaaaaaggctaggacccagagcttcatgtgtttaaatagggaatcttccactctagtcccctttatcacagtgtgttgttcagaacacagatatagaaaaggnnnnnnnnnntctgctttgctcttcaaccctcttttctctaggctatagttaaagatgtttatatgatagactgacagcccttatgtctcagctgaaattgatttactatcaaatcagcattaaagggaccagcaaagattctgacttttatttattttgctgaagctttcataccattccaggaagaatgggcagttttggccagtcaagaaaagctgacagtggccagggagaacctctatattcaat

SEQ ID NO: 449098 - DNA, 553 bp, Homo Sapiens
  misc_feature (400)..(400): n is a, c, g, or t
  misc_feature (491)..(491): n is a, c, g, or t
  misc_feature (521)..(521): n is a, c, g, or t
ctggatatgaaacaaaacaattttaatttcagaatattacaagaatataaaagaaagacaatgcataggatcgtttctttacaattacatatacatagtcaaataagaatgaaaactttaaccaaaacacttaagaaaccttgtttctcttgttgagcaagctcagggataggacaaaggcaacccttgctctgcagaaagaaccctggggtgagggaatatttcccccaacaggttctatctgtccccagacatgggccaggggagggctccatggctctttaggcacaggctgtggccttcacacactccagtctccatgggtaacccaaggcacttcagggctatttatgttcccacacctccttcgttgggcctgctttctgttcaacttttacgntgggtaggaagtttttcgggctttaggctgttttggggggaaggttaacttcctaacagttgggtttttagtttgagtttaattcaccatnggggtaaaacggtttttgctttttaggggnccccaattttttccccaatttttgggcatttt

SEQ ID NO: 449099 - DNA, 342 bp, Homo Sapiens
acaaaaggaaaaaatattttgtttgaaaatctttgctacatgtcattatttttgccactgtaaagcttagcacagatgccagcaatacagaaatggccaacaagaaaacaaaacagtcaaaaataaaaccctgaaggaaaagcaaaaacaaaacccccagagcatcttctcgctatcctccccttccccaaaagccctataataactgtacaatattatagtcttgatcacatttaaaaagtcgattattaaaaaacaagggttccattgggaaactcaactttttggtttcgtaaattgtggatataaatatatatgtatactgtaagtgtggcacatggg

SEQ ID NO: 449100 - DNA, 1602 bp, Homo Sapiens; identical to SEQ ID NO: 131966
  misc_feature (174)..(174): n is a, c, g, or t
  misc_feature (186)..(186): n is a, c, g, or t
  misc_feature (245)..(245): n is a, c, g, or t
  misc_feature (291)..(291): n is a, c, g, or t
  misc_feature (366)..(366): n is a, c, g, or t
  misc_feature (422)..(422): n is a, c, g, or t
  misc_feature (460)..(460): n is a, c, g, or t
  misc_feature (522)..(522): n is a, c, g, or t
  misc_feature (527)..(527): n is a, c, g, or t
  misc_feature (838)..(867): n is a, c, g, or t
  misc_feature (1218)..(1231): n is a, c, g, or t
  misc_feature (1251)..(1312): n is a, c, g, or t

SEQ ID NO: 449101 - DNA, 778 bp, Homo Sapiens
cactgagaaaccttgccacatttcagcagttttgttttgcttttggtggagagcacctgatctcgactttacagccaatgtatttactctaaattacacttttatagatacaaggtaaagtgtagctgggtgaaggcactcaggagccataaaatgtggtcaaccacaataaattaaaatgtaagctaaacaaagtattcacacttgcatttttttaataaggaatttaagatccatagtatctttaatgcttggaagagacacaaattcaaggtgataaaaatattaattagaagacacataacatgcctcaagtatatcaacacttgactccacaaacaaggcataaccatgaaaacaacactccctttattttgggctcccaaaatcaaaagttagaactaatttatttaatcacagatatttagtatactcaataatgcactaacaatttctttaaaaaaacactaatactgtacagtatttctgtgttttagtttttcccacagctgttgaaaatttcagccttgatttgaaacatgacctgcatgacaggctataagttgtcaatagttctttttctttggaaaagtacagttgtggcatttactcactttagcagatagctaaaagggaaaaataaggaaaaatatacactggacctgcagttaagtttttgacaatgccaaggatcaaaaacagatgaaacaacatttgctgaagatgaaaaggtattgcattggtcttaatagatgttgccatctctgggtgaggatcc

SEQ ID NO: 449102 - DNA, 1181 bp, Homo Sapiens
  misc_feature (22)..(22): n is a, c, g, or t
  misc_feature (33)..(33): n is a, c, g, or t
  misc_feature (73)..(73): n is a, c, g, or t
aagccatccggtaaccccaaancaaaagggccnaatttcaacctggtacaataaatccaagtagtttgtaaangggagcaagtatttagttttgcctatttgccatctcccaatttaataaacaaaactagttgtgtacccaactatattaaattcttgagttgataaacatattgcatgtaaattatgtcactttaaaaagttattaaattttctttccatgttcaaaaaactggggtaaggggtaggggcatgggaattccatttcagtgcaacaaagcaacaagaaaactaatcaaagccttacaagaatgtccttgcagcaattaatcctttgttgtgcattgagtttcttgttgcgtttcttcatagctgtagtaaaaggactgcaaaggcagccagatgaagtgctagaacagcaggataggcaatttctagatgtttctcaggtgtcaacttttctcttgagctacaggcccagttttatcactaagtcttgctactttctgacttgcattatctccatggatggtgagaaatgggttggtggtagctgtgtgaagtgggggtgcctgtgtacctgcaagaaggttgtttatgggtatttgtgttggtccagggatctgcagctgctgaagttcaggttggtggtgctgctggtggtgatgttgcattaactgatacaaaaaggcttgatgttgttctggtgtgagctgttgagaatttaacaactgctgaaactgctgttgatgaataagtatttgtcgttgctggtcagaaagtaatcctagtcctgaggcactgttagtcagtgtagctggcattggatgtgttgcattaggtggtacggttgtgtgggtgagaggggtagggttctgggacattgtgacaggagtctgcataaccccatttaaagctcctacaatgccattaattgccagttggttacctggcaaagctccaattattccacccactgcagacacggcaggaatggtggaagttacaggctgcattccactagctagtgcccccactgtcacgccattgacctgctgaactccactcactcctgagccttgttgagccggactctgcccagcaggaggtggggtagaaagagctgatgagctgctggtacttatccactggaggttaagtcctgatccggagaattccgg

SEQ ID NO: 449103 - DNA, 602 bp, Homo Sapiens
gacaaggtaggaagcaaaaatctttatttttaaaaaattcacatttattaaaaacagcaatttctagccaaataatataaagcattttaaattatttgaaagtatatacactctttgtataagtgaacacttaaaactgtacagatttaaacaaataatcatttagcaaacaagttgggtcactattacctactcagcactttgtaaggtgtttgagtgtttcagaaataaaagatcaaaagacaagaaccaatgtcattaaatatttttataagaacacactccgctctgtaaatcaaattaaatcagtcacgtacttactgtacaataatcatgccctcatttctttggaaaggctattaaaaatcaaatgtacatataatacacaaaactggatattttacagtttatttcattaaacatgtatttaaaaaacagttaagtaaatacaatcttcctaattcattcatttcatggcaaagaatgaatatgggccctcttaccttctaccttctcaaaatagagagtaataagctcaatcaagcaacgtccatcaccaatttaaactgagtgaaaaggaagtgacctcggaagtatgtagt

SEQ ID NO: 449104 - DNA, 1054 bp, Homo Sapiens
tatctttttttagggcaacgaatcttttggctaaaactgaagtaagaggtccaggccgcttggcagtttttagtgtgattagtgagtgctctctctagcctctctagagccgcctagtgtcaggtacgggagataagaaaggacgcatgtcagagttggctgacttcatatctatctgccttgcttttaaaataccaatgaaaggctgatgtttaacaaaaggtgctttataaaaggatctatacagctgagttttaatcaaataagttgtagttcttaatatattacaactcttgagagctagcaacatatctggcttgtaacagactatgtaacaaggcaaatgctcttctcttttttcatcaagattcggtgtgtggctgtcagaggaagtcattagcatgtgcagctggagtactaactaattaacacagatctaatgagagggcactgacagaaagcagcctcttttcttgaaattcaaacatcatctcaacttgattttttttatctttctgacaagaaaaagtacaccttccttcaacactagggaaactcaaaatgtttattcattaatttccattcacctccctttaatttacagtatgtacgctttaacaatgacagaaaagtgaattatcaaacttcattgataaatactgacataacaggttaaatgtatttcttaagcactatgtatgtgttcttccacattcctatcgtctacttcagatctgaaatgctggctccctcctggtactcctcctctaagcaggctcttcagcatagaatagcaactcaaaggccaaaccttcttgcccaaggtgaaagtggtcaggcttcgattcttctttagaaaatgctgtgcggggtctcattggatggccttgtgagatccgaccagatcacattctcagccaagatggtaaaaagcctttatatagactcatgaatccttcacctttgacagcctgaataagcagtcagtcgatgatttatacaagtcccttccttgtttatttcgtggttgattcattattctgcttttgatgac

SEQ ID NO: 449105 - DNA, 591 bp, Homo Sapiens
atgttctggactggtacttctattctgggacaccacccgatgtcatcaaaagcagaataatgaatcaaccacgagataaacaaggaaggggacttttgtataaatcatcgactgactgcttgattcaggctgttcaaggtgaaggattcatgagtctatataaaggctttttgccatcttggctgagaatgaccccttggtcaatggtgttctggcttacttatgaaaaaatcagagagatgagtggagtcagtccattttaaacccctaaagatgctacccttaaagatacagtgttcagtattattgaaatatgggcatctgctacacataccccctattatttctacctctttaggaaggcacctattccacagagactgatttatagggggcagcactttatttttttctggaaacccaagttctctttgactcctctttttgtcccaaagtgatctggtcggatctcacaaggccatcccatgagaccccgcacagcattttctaaagaagaatcgaagcctgaccaccatcacctcgggcaagaaggtttggcctttgagtgtattctacgcctggcatggaatt

SEQ ID NO: 449106 - DNA, 594 bp, Homo Sapiens
  misc_feature (147)..(156): n is a, c, g, or t
attgcaaattgttttatgactataactcagccatttgtgtgtggaatacacatgcgtaggggaagactatgaaactcacttgttactcaaacacacttgtttataaatacatatatacacacacacatatacatatcaacaccaacnnnnnnnnnncccaaaattcaagtcaacaatttagtggcagagagatgctataaaaacattatttttagatgccacacaagtcatgagaaccattaattttatcatacaactgaagtacagccatcttgaattctacctggattaaagttgatcattttgttaccaatgcaaggtttaaaactacaagtgtatacacaaaggtggtcctcatcaactctgagaacattaatagttgcggtaggaaaatccagtctggaaaaccagcagtcattatgccccttatctcttctgttaaacctgcattctcaatcaactaaaaaatattttccacacctgagaacatcataccttctctgatgaggattttggaacataagtagaaccacttttccttccctccaactcatatttctctcctgaaaaacagttttcagtatatttacatgt

SEQ ID NO: 449107 - DNA, 2391 bp, Homo Sapiens
  misc_feature (1385)..(1385): n is a, c, g, or t
ttttttttaactgcctgtttttgtataatttaataaaaaccttttaaacattactgcttttgtctgaattttttgcgtttgtgtttctgtccctctgagtcattggtcttctttttgttcctgttcctatttttcacgttgtgtgtttcatagtagcgcacaccaacttttttcggccgttgctgtcgtactgctcgcctccgttcttttgatgtaagcgccctgggagctttatttgaatgttcctgttcctcttccctttgtgccttccgcttctttccctttttggaaggtgctctgtcatctacatcttcttccagtgtttttctttgttcttcaggttttgcaaatatcttttcactcagtcccttggatattctgactgctgaaaactttttggctttggctttgtctagaaacttctgatatttggcaatcttctcatccagtgctttaataacggctttggtgtcgtttcccacattttcctcctcaggctccgaggaagactcttccgcatcatctctttgttgctcctgttcctcctcctcttcatcagaaaagctctcaagctcttcctcaagatctgacacctccacaggaaccaggtcatccccagaaaactgaggcaccacgttgattttaccaaagttctgccgaactcgtgtgagaatctgctgcctctctgtgttagcatcacagtgactgttctcttctgtttcttccttaatgatggattctgacccttcacctgcagtttctgtgacttcctcccctggattgttctgggctgcttctgggacaacttccaaagatgaggagggtagaagctggggggccacaagtggctctgcattgggtggcttgacaaagaaaggaatccggcccctctgccagtcattgaggaccatcttacccacagtctgcaagtcgggctctccaccctttagtaacttcccagtccggaaagcgagcttctcaagaaagtcctcagcattctcccaagaatcaatcttgtatgttttgctgatatattctggctttgctcgttcaagtacagcaccaatgtggtcttcaggactcttaattttttctacttgaacaactccttttagcacaatgtctgtctcggagtcctcagaggggtaaccccccacctggacagtcaatcaggaatatccgacgcatcaaagtaatatactgccagacctttgtttcacctgcaatgggagccacgttgcaaactttcttagaacgcaatgtatttatcacagagctcttgccaccatttggatagccaatgaacccaacactgatctgtttcttgtcagtgtgcaactttccaaactgccgcagaagctgaatgaatgctcccttgccaaacngggttagtaaggcttgcatgggaaagcaagtgttggataatcctgggagaggacagccaacccaccgttttgttgcccaggttggaacaaggtcacatttgttaagtacaaaaatgaggtgtttccaaggtttttccttcttcaggtaagtttcaatgtgaggggaacgagtacccattggatctctagcatcaagaacttgaactacaacatctgatgaatctatcaccttgtagagctcaccccatattcttttggactgtccctttttatagatctcttcttgagcttcatttctcacaccagtgtcttcagttaccaaatcacgatccttgccctggtcatagctctcagtggacatttcagcattttcgataagagactgcatatcacttgcaaataagtttggtcgtttcctctgtgacttagggccaaatgtagtttcaaaactttcagtatcaagaatgtgcaccttcaagttatgaggccggattcgatcatggagaagagacattggtaacttgctttgcttcatgacaactttgtatggatccttcataactgtatccatttcctcttgaaatttttgtaatgatgactgcttaatcacacgtgtgtttccaaaccatttaatatttggctctactcttgccactgtgccagaagccaccgttgattgatattgcaggggtttaattattttaccacgactgttcctgcgctccttttgcctatacatattcaggcgccggatggtggcccggtccctcatgttttggcctcctgctccctgcactcgatctgggtttgtgctggccttggacgggttgatggtgctccgtcctttgtacttgggcttcaccatcttggcgacgagaccgggaccggagtgcgaggtccggcttacgtggtgaaacaaacttttatgttcccaagcccggccgaagacacccgcctgaaccacgcgccacccagcctcgctaccttaggacgttataggtactgc

SEQ ID NO: 449108 - DNA, 830 bp, Homo Sapiens
  misc_feature (558)..(558): n is a, c, g, or t
tcactttggaagacatgtttcatatgagagaaatagagttgggaccgatagtcactcacaggcagatgtcctgcttgatgtgttagacatcggcagggcagaaaccaccagaatctggacccactcgtcgttctactaatctctcataagttgcatactaggcaaattgacttgctgctttgatccaccattctgagatgggtcgtctgaatttagtctgccctaggattattcgaaatcctgctggtgggctcctgtactatggcccctgattgatggtctttctctttcttctggacatacaagagcactcttgtttgtgggtccccttgctaaaaaatcttcccttatttttcatatggctaagcaataaacctttgaactacttatagccattggcttgagtggcgtctttagaagtctcttagaaaatagcagtcttgacaatgaactaaactagatattaacaaagtaaaatgctatttctcaataaaaatattttttccacattttcttaaattgctagatatcctgcaactcaacacctctgttctatanttaaatttagattttaacttaaaacatccacacacttggatacagttaaaaatactttctctactatctgatgttcactgagaagctacttcttattacatatactccatacaatataacctcatagtaaatgctttcctatagtttcctacagtttgtgcattttctctggcctcttgacttcacacagaatgattttccacattcattacacccatagggtttctcgacgcgtggtcgacgatatcccatacttccggaccgtaccagcc

SEQ ID NO: 449109 - DNA, 155 bp, Homo Sapiens
tttttgttttacatcaaaaaccatactttattttatgtatagcaatacaatttacatattaaataacactataatagaatgatttgatatagtttaaacagaagaaaaagggaaaaatttcaggttacaaaacccctccccctgaacaaatttaa

SEQ ID NO: 449110 - DNA, 736 bp, Homo Sapiens
gagatggagtctcactctgttgcccaggctgttctcataatgaatcctttccataaagtactataccagttcctgacctacaaaagggtttaataaacaaaccttagtaggagagccaatgattgttggcaaaggagttttaaagaaccagtcagaactccgttgagaggaccccaaagtgcttggtgggaagaagttccaaggctgccaggccgactgggctgaggcgagtagctgtacccagccccagtatgggatgggcacacggggtcagaagtgctgttttctgagcttctgcttgttctgatagatgtcagtgagtggtgggggcgctcttgcagtctagcacccgataagagagactgtggggactgagcttgtggcactggagaacctgaggagtttctactcctggagtcatggccctgaggatgcccacagcagcactgactgaattgctcaggaatggtaccaaccaaaggggaaggtgagtaaggcctagaagacccagtggagagccttcgtccaactgtctgtgctgtgtctgctggtactggggagcatgatcccggccggaggaagcccatggggctggtgttggaccttcgtaccactgcagatcttggagaaccatgtacatttgtgcctgagctggcagtagacgtaagattctgctctatgcgctgataattccttatttgagtaggaactggaattggtgctgtatcgctgtgag

SEQ ID NO: 449111 - DNA, 508 bp, Homo Sapiens
  misc_feature (29)..(29): n is a, c, g, or t
  misc_feature (67)..(67): n is a, c, g, or t
  misc_feature (78)..(78): n is a, c, g, or t
  misc_feature (102)..(102): n is a, c, g, or t
  misc_feature (145)..(145): n is a, c, g, or t
cctaaaaccccaagggtcgttcctgtaantttaaaaactgtcctgtgcctgcccccctgaatgtcgnaacaataatgnggaagtcctttccccttgttggantctgaataaacttccccgggtaactgaaacaagatcctgcccnaaaaacactgcccttgctcctgcctgcctcggcccgctgccctctcacttcccttgcactaagaggccaatgggcacattcccgtggctcattccccatctttcgactgttcttcagcaggccccatgacgagtaaccaaggctaacaggttggaagatgcttgagttttagggattttgaaaggagctgtggtcttagtaggagagccaatgattgttggcaaaggagttttaaagaaccagtcagaactccgtggagaggaccccaagtgcttggtgggagaagttccaaggctgccaggccgactgggctgaggcgagtagctgtacccagccccagtatgggatgggcacacggggtca

SEQ ID NO: 449112 - DNA, 517 bp, Homo Sapiens
  misc_feature (469)..(469): n is a, c, g, or t
agtctgatattattcccttaagagatatcaaatgatgtcacaaatctaaacccactgaaagaccaatagctattacagttgtactacagaataggtcaaagtcaccgttagaaatattacactttattgaattctggagcagctaatctaccctcccctattgaccaatgacaagaatggaagaaaatatacaatggttaaagaaagagtctataaccactgtttgtttaaaatgttgaaacaactttcactgtactggtgaaacagttttaataccctaacatacacagtaatgattcattcttgtttaaaacaagaagtgatttcgacttgggattgggatttttattttttgagatggagttttgttcttgttgcccgggctggagttgtcaaatactgggatttctgtccacaacagggaatggggggaaccttttaaggggttaggctgatttcagaattttgncacttaaaagcccacattatcactataaatggaataaagggattaaca

SEQ ID NO: 449113 - DNA, 1091 bp, Homo Sapiens
tttttttgcataacactgacatttttattagaattcatttgtaacaaatggaacttgtgtcagcaaagaactgattttcatacagacttctttcgccaccaatgtaacgaagtaagaaaataaaaagcacgcctttcattctgtaaaacatttacgcgtactactaattagaggtaattgtattttttaacaagccattttacaagttatttgttttaatttttcagtctatgcatccaaaacgagagcaaagaacacaactgttattatctttgtaaagacactccaagctgggatggcaaagccacataacggatggatagaatggatctgtagccttctgatctctgctggagtatcagggcacccataaacccaaaaggaaccaaaacccaaaaagaataaacaaaagagggaattcaccaataaacaggacttaaagcaagaaccgaaaagtaaacaggaaacgagataccaactacgtgcattactgcagacttttttgcccttcactgatttctatcgttgtgtctatttaactaatacactacaaatttgaattttccgaaagccagtcttgcttgaacaagaatggggttccaagttaatatccattcatacagggagttgctacagaaaatcaacacttacgggcaagttgacaatacactaacaacaaaggattaagtcggaaaaggttgcacaacgtttacccttagagaagggccactgttacaccatccccccttgagctggatcatacggacacggatattccttaaacacactgtgcaaaagtcaatgtttgatacactacaatggcatgccttaatagctcacaaggttaccctgtattgacccaaaacatttcagcacgatgatgatgtcaatatactttcacttccagtgaggaattatctagtatgtgaaaccccatggtgtgttaaaccctaaaagtatcactacaatcgctttcacgaaccatattaggacatttacccaacggtagcaaccgtttcgggtctacaagcttaccgttcaggccccccgtgtaccattggggcataacgtgcacatgggaactccacaaa

SEQ ID NO: 449114 - DNA, 984 bp, Homo Sapiens
  misc_feature (373)..(455): n is a, c, g, or t
  misc_feature (523)..(559): n is a, c, g, or t
  misc_feature (720)..(816): n is a, c, g, or t
tgttacttgtattatcgaataatggattgtgaaatcagagatatttcatttacaatgattgaaatgatgtttgaaatctaaaattgaataatcattttaaagatcaggtagaagtacattcactttatggttgttagagattagcaacatcaatctccttagaaccaggaattatttgctactacaactgcatattaagacaggtctatgatgacttgattggggagtggtctttggatcaacattgtctttaataaaaattcttataaaagagtatttgcatatattcctcaactgaagactttttctacaagtaaaggtaactgggaaaagttccaaagcaattttttaaaaaaagattaaacattttaannnnnnnnnnnnnnnnnnnnnnnnnnnnnnnnnnnnnnnnnnnnnnnnnnnnnnnnnnnnnnnnnnnnnnnnnnnnnnnnnnnatagttggactacaggtagatgccaccatgcctggctagaaggggagaagttctctgattttgtgagnnnnnnnnnnnnnnnnnnnnnnnnnnnnnnnnnnnnngaggagacagggtttcactcagctgtccagattggagtgtagtggtatgatcatggcttgctgcagccttgacctcctgaacccaaggaatcctccctccttagccttctgagtggctgtgactacaagtgttcctcaccacacccggctaatttttaaannnnnnnnnnnnnnnnnnnnnnnnnnnnnnnnnnnnnnnnnnnnnnnnnnnnnnnnnnnnnnnnnnnnnnnnnnnnnnnnnnnnnnnnnnnnnnnnntgagccactgctcctaacttgttttattttgctatcgacagtttgggctaggttatatgaccctcacccccaaaattaactgagcatttattgtgttcttggtagtgtttttagcactttactcatattctctcagctctcttggttggttatccccattttcagata

SEQ ID NO: 449115 - DNA, 848 bp, Homo Sapiens
  misc_feature (409)..(412): n is a, c, g, or t
  misc_feature (499)..(610): n is a, c, g, or t
tgttaataaactgtggagaacttagcaagtcctatttgtcccagattcttcttggtgtctcgtatctgtgaggataaagggtaccctatggaatgaaggtttttatgatctactttcaggggacagtcacttagggtttatggcctgcttcaggggagaaggggtaaggggaaggtatgagaaaccttgcttctgcagttttctcaaataacagggtgcaatgttttggggttatgtgtcctgaatcccatcaacgttaagatggagagaccagcccaaatctttggttggattccagctaagtcttatacacctaagggacagaggagtagtcatatatatgccttcatatctggtcaccttcacaatgagtcagaaaattggtcagacaccgaaatcacaacagaannnnaaaatctttatttctaccaacttgtcccatcaagagagtaagatatacatatgtaaagagatggagtcccactctgtcatcaggctnnnnnnnnnnnnnnnnnnnnnnnnnnnnnnnnnnnnnnnnnnnnnnnnnnnnnnnnnnnnnnnnnnnnnnnnnnnnnnnnnnnnnnnnnnnnnnnnnnnnnnnnnnnnnnnnctggccaattatacttttaaaaaaatattttgacatttatacttgtttattatctaaaagcatttttatgaatagttctcaagaagtcctagcaaaaattgtgcttcattcttttttgaataactctagctaataacattcatttgcgccaaaagccttattatgctgctgctaataattgcaacaaatttaccttagattattaaaaactattttttcttagaaaactataattcaa

SEQ ID NO: 449116 - DNA, 685 bp, Homo Sapiens
acaaaactcgaactttgtttaattaaaaaagtactttgctggttttacacttaatgatgttattttctattttccccattatcttagacattaacttagtgtattcttttccgtgcaaatccagttgttctttcgggtgtaacatctagctgttgctgcaccatcatcgctgaggtaggcacatccttcactccctctcatgccaaacgatttggtaaatgtagctccatctacccattgtcctgttcgattttttgccatcttcagtccaatccagtgatcagaactgcatttataccgcctaagaaaattcatttcttctatgttgtcaattatagttaggtcggcatgttgagtggaacagttgtatttacttgaattccaatctccttcttctttagagaaataatagcatttgttttggaaaccaatccaatcataggggcataaactctgagaatctcgagttagtttaactatcagagtaataatattagttgttattaaaacaccaacaattataaaacactttttatgtttggtcatcataccgtgcttcttttaatcagcgttttgattttctgctagcagctttgtgtcatgtcttgcagaaactctcttcaaagttgtaactttatttaactttaatataaaaatgttactcttgtttttaccagcacccgct

SEQ ID NO: 449117 - DNA, 949 bp, Homo Sapiens
  misc_feature (840)..(890): n is a, c, g, or t
gggaagacctttgttttaagacttccacacaccaaggctacaatgactgttaacctggaggaagtctctggtatggagttctgagagcttaagagctaaacatgagtttagacacacaagattctaaaatgcaaatgtttattttgaagcaggcattgacaacacaaaaactgtgtagtggtcttgatgctggattgtttctagagtcacaatgaattatttttatgagattaccttatttttatatatgacaaactacttctataatgcttattatggtaaaataaaattggaaaaaattaaaactgacctataagagtgttaaggacctaatagagtgacatatataaattaagcataaaatatgtaaccaggaaaagactgttaacattacatttatgcaaattaaatgcccttaaatttcaccatttgtctttcattttaaaggttatttgctcccgattatatgattcaagtgttataagttttagcttgaactactttgcagtaatttatttgacagatctctattctataaatgtgtaatgtgatgaagaaagagatctttctttttttaatgaaaacattaatgtgttaatacccttgtatggataatgcttgacatttagtggtttccaaaatatattagtatattgttgaacataccttatgcccttagaaatgcacattcctgtattttgtgggatgataatctaattcagtatagaatatgctgtttggcaatgagtttgtggccagatttcaaatagggagttaagtggtactttcacaatccaaagatttttagttaaaaatcatgtagtctaatatgctgcagtnnnnnnnnnnnnnnnnnnnnnnnnnnnnnnnnnnnnnnnnnnnnnnnnnnntactaactcagcatgtaacaaccaatttacatggaaataaatcgaaatatgataactat

SEQ ID NO: 449118 - DNA, 684 bp, Homo Sapiens
tttttctctatttaatgttttattttggaagaaagaattgcatgttcagggcatccatgtagaccagttggtcctcggtatgtcggaacaacacagagaaggctggaggttttatcaaaagaaatgtcagtattgctctttgagaaagtttattggcaccaggaagggtgttgggagctggcaagctacaactggtgagcaaccgggcaggcaaaattattcctagagcttcagcaagttctctcagcagttatggacaaagctggtcccagcttacagcacgcagtttcaccagctggatgtgcagagaattacattactagattaatgttatgtgcctgaggtgcttttatccctggcttcttgacttttgattgggtgtgataagaatgacttaatttggtgtaatccactttcacagcactgagcatacttagtatgtactgagggttgctgaattaacggtgtgtaccgcaccccaggaaggcttaatgaagtaggattactgcttaagctaagacctttattaaaattttgtcctctggccagtggtggtggctcatgcctataatcccaacactttgggagggcaaggtgaaggattgcttgatcccaggaattcaagaccagcctgggacacaaagggtagaacatggtatattttatttagactaaggcgtgcta

SEQ ID NO: 449119 - DNA, 498 bp, Homo Sapiens
  misc_feature (26)..(26): n is a, c, g, or t
  misc_feature (38)..(38): n is a, c, g, or t
tagccattattattttaataataccngggtcctttttncctttacccggatgtattttccctacctccatagcccaacccaattaaatccagtatcctgtttccaaatatttttagaaagtgtagttttgtatagctgtagtactgaggtttgaggaaaaataaatgttgatcagcgagaccacgtatttaaaattctgaatcttctgggacagggttgtaactcagccttccaaagggaagagtgcagggggacggggccatgatatggggaaatggtgtaaactaatgtatttctttattggctgttattctgtataacactcatatctttgccgaaagttcgaattttatatttaggcaactgatggtccttttgcatttaggattttcgttgttgttaccttatacctcatgatataaggaatgggctcatgtgtcttccgtcttttggaaggaggttgacatattttaaataaatgcttttaaatacagtagc

SEQ ID NO: 449120 - DNA, 137 bp, Homo Sapiens
ttttccttttttcttttcccagctacaaaatactctggggagatgcattataatttaaaatatataatattgcacaaacaaccaaaaggttaattaaactaaagaaataattacaaagagaaaaaccccatcccgtc

SEQ ID NO: 449121 - DNA, 524 bp, Homo Sapiens
acacagggaattgtagatgaggcctggggctgcgaaaaaaaggcaagcgctgattgtggggaagaggaagccggacctgaactttgtgcagcccattcctttctttcacctggaaagtgcctcggagagagctttgctggcccatgtacaattcattttcaccacctgtgagcccccccacgtcccagccttggcaaaaaggaattgaatttgtcggactacccaggaccccagccagcctcttgagtcctccatggtggtgacgccagttaacgtgatccagccaagcactgtcagcaccaacccagctgtgtgtgtcgccgagcctgtggtctcctacacctctgtggctacaaccagcttcccactgcacagtcctggtctgttggagacaggcgctcctgtgggtgatatttctgggggagataaatccaagaaaggggtaaaacggaagaagatttcagaagagagtggagaaacagcaaagcggcggtctgcccgtgtccgaaacaccaagtgcaaaa

SEQ ID NO: 449122 - DNA, 511 bp, Homo Sapiens
tttttgactgataacactatttttattctttcttcattatttattcccccttaggtggtgagtcaagaaaagtaccaccaagatgagtttaaagtagaatgtcaaatctgccacctcaaaatttcacaaggaggaaacccccaaaatcatgcacaacaatattcacaatcaatcatcttgaatccagactcaatagacaatgtgaagagtgtaaacaaaagaagaaagtgttagcgaaaaagggggttcctcaaaattatcctgccatccacagaccttggtagaaactgggcatctgtgtggtgttgcacactgtgcagaaaatcagtaacagagcaggcctcaacctgcgatccttggaaaggcctgctttcaggttggcccctgggtggtgtctcagaacccagactccaggagggttggcagcattttttaacacatgagaatggcttgctcaggactaggtgcccatgaacgtcattttatcctctggaatcagctatgacgatga

SEQ ID NO: 449123 - DNA, 173 bp, Homo Sapiens
aatcaaacctttgatcatgtctttatttagatatagcccatcttgttgcaaaacagatatctcagcaacttacaaaaataaagtacaatagcataaaaataaaaagattagggtaaaggtaaaagcagaaagctagaatgaagcgagtctagtaggagactcagcacaattgg

SEQ ID NO: 449124 - DNA, 703 bp, Homo Sapiens
  misc_feature (37)..(37): n is a, c, g, or t
  misc_feature (53)..(53): n is a, c, g, or t
  misc_feature (88)..(88): n is a, c, g, or t
atgccagggaacctcccaaacccaaacgtgcaccaantcggccccccccggancaagcccccctcggccctgaaatggggggccccanagctggggcccgggggtcctcattattactgcctatcatctccgaactcattttgggaggagcatctcctccgagcctgaaagttagcaacagtgacaataaatcaagatgatatgagacaactgttactttttaatgagtcctttaatgttttacattactttgtgtggtacaatcattccttgtgcttttaaatttggagatccgagagaaaacagcctttttgttgcagtgctcacctctgattgtaatttctttcttctggaggatttcttcccctgtgtatacattcctggctctgcaggcataggtgcctgaatcttgcagggaaacattcatgatggtaagattaagagtgatggagtgctccttagtgatggccattttttgcttgctaatactgtagtgcattgttctgttattaactgtccgcagtaaaatccaagtaacgtctctgtataagaacttgttaactgtgcaagaccgtttcaggtcctctccttctgtcggcatttttttccaatttacatgaaaaccatttggcacatctggatataaaaagcttatgttctttcccaagtcccaaatttattggaaacttgcaaatgtagattc

SEQ ID NO: 449125 - DNA, 465 bp, Homo Sapiens
ttttttggtgtcacatccatttattgtccatgaggctacagctccattctcagggccaggaatgggcaagcctgccagatgtgccattcctgcctcccagctctttccctggaggcctaccatggtgccagcctggagctctgcctgtcctactgggaccgagcagacagccccttggcccaccattcgtaacacagggacttggctggcctcaccccactggcggggtctcctccagtgctgacaacacttgccggtgccttaagtttggctgcaccctcctcctctttcctagtgtggctcatgctggctaccgggcacttccccatccatggccagtttgcaagattggctctgccttggtccaagttcctggggttgtccaagagaccaccctcggtcccggatccacttgcaagcccaagcttccagcctagaggtctttaggacgcctgtctgagagac

SEQ ID NO: 449126 - DNA, 482 bp, Homo Sapiens
  misc_feature (418)..(418): n is a, c, g, or t
  misc_feature (440)..(440): n is a, c, g, or t
ttttttaatgtttttagatttattttatcatatgtgcatacctaaacacagaagtcttaatatctttcataaatatctttcataaacatttcagtatttattcatatgcattttttccatgttctttggtcattcagtactcataatagacttcatagttatctgagggaagtcggctgtgtagtcaattttttgttttaacctataaaatggctaataaaggattttcatcctgtggtcacagtgacaattcaaagatttatggaggtaaattgatctgtaatcctaaatgatcataaaataatatcagtaaatttgtcttaagcttttccaaatacattctgccctcaacttgtttttattctcctgagtgtcaaatcaaaatttgtttctggaaatggcggcagttgaggacccnctaaggtaaaaggagtgggggntttttactccccggccagggcagggccaggggtgggggaggt

SEQ ID NO: 449127 - DNA, 912 bp, Homo Sapiens
tgggactttagaatttatctttgacattgatgttcttcaaggtcttatggcttttttatgttatttttccaccttgtgcatttccaggctgactgagatcattcacctttagatctgagaacgtcttggtcgtcgttgcttcatgtcaatgacttcttacttttgtattttgcagttagatggatgtgaatgaacacctcccttacccatttccattcatctatctctgtacgttgtctctctttacgcctccctgctattcctgggagaatctcctgagctgtatccactcaccccatctgctggatgcttcatttcaaggtatgcgttttccacactccgtctgcaccccagtccgtctctctctggctgctgcttctgcatccccaccatcctgccctcccttatcactggttctactttaaagtctccccacagcggtccattcatcagcttcctctgtgacagctcccttgctttctgtgagcaaccaagctcactggactcctcctcctcctgctggtgaaattgtctgccctggggcctcagctaccttggctggttttagggtgatgggggcggcagcccagaccctaagggggccttcttaagggagagagagtcctatgttgcggtgtgagtgcagccctctccattggccaccccactctgcagaggagcccccagccaccacctctaccctctgcctcttccttccactctgggcccttcttccaggagaagtcagcctcagcccatgagtgccaggtgctcgggagggctggtctgtcctcacccagggagtccctgcccctgcgatgctgccctccccccactgctgatgctcaggtaggggtgggtggggtgagcccaagggagttcggcctcagtccaggttgcccctccacacca

SEQ ID NO: 449128 - DNA, 544 bp, Homo Sapiens
  misc_feature (202)..(226): n is a, c, g, or t
  misc_feature (413)..(413): n is a, c, g, or t
  misc_feature (432)..(432): n is a, c, g, or t
ttttaacagcgaaagtgagatttttaataaacagtcagtcttgcaaaatcgggtgtctgacggacaggcacacccagcagtttcaacaagcaatttgtccgctagtgtgcaggctcctcccccagtttcccacaggctgagtactatggggtcacaaccttcctggacgtcacctattgattgttaggcaggggctttaggnnnnnnnnnnnnnnnnnnnnnnnnnagggttgtcttgctgcattttgtcacagcccacaatgcattgcaatcctagtcagctcaggggctcttcaagtatttcacttacgacctaagtagctgggctgggctgataagaacagacaaagggagctattttgcaggctagtagtaagctttcattttagactaaacttctttcggttctggtngaaggcaactaatgggggnttaagcggggaaaggggggaaggcctacaagcaggcatcagcttttccaagcaggggcctcgaatatccctgtttcttctgtaagtctgctgacctaagccattttaaggcc

SEQ ID NO: 449129 - DNA, 992 bp, Homo Sapiens
  misc_feature (503)..(530): n is a, c, g, or t
ttttacatgtgaaagtctagttttttattagttttacacaaccagctattcatgaactgtagttaaaacattgtaaatctgtatatttactgctactcaattacaaaatcttcagatggcattgaaaaaacatatccaaagtaactcaagaaaaaagtaccatggcttcttaaacaaaaaatcaaatgaagtatgtcacttgataggaagtttaaaacacacatttaccatactttaaagtaggttttcccctacttgtagcacagttcaagtgcctggaaactaacataataatttactgttaaccatttcaaacttaacattttgcatttatcactttaaaacacatgctgtctaaacattttaatacatgatactttaaagcagaatacttgccagtcagtaccaatgagtctcaacaaataacctaaatatcagagttgtcttgggttaacttttgagatatacagctgttggcttgttttgggaccacactttgattnnnnnnnnnnnnnnnnnnnnnnnnnnnnaggttgtcttaaatgcctgaggttcactgcacattcttggtgtgttaggtatttactcgttataaactgacctacttttaaatttttaaaatactcaatattttgaagtctctttaaagtcatatttagtcccttctttaaagcaaaccagtatattattgttcaaaaacaaaagcatatttctaacctgtatactgaagtttcttggcaaaataggcatcctgaagaccctgcaaccagtgttttattttagaatgagatattattaaactgttttctgtcatgagtgtttttaaaaaaaagataaaagtaaatacttgccatgttcttaggcctttaaaatatagcttataaaatgtatactatttaccaggagagctcacatttttctgcagttttccagtggacctgcctatggaatactgtaaagaaaaatctgcaaaaatattcctagcaattgaa

SEQ ID NO: 449130 - DNA, 483 bp, Homo Sapiens
  misc_feature (41)..(41): n is a, c, g, or t
agaggacggccttctttagaggacagccttcttcccaaccncttcttgaactgtcgtttccctcaggaactgggtcttccctgattgttgaaccctgacccgaagtctctgggctagctactccccccagctcctagttgatagaaatgggggttctggaccagatgatcccttccaatgtggtgctagcaggcaggatcccttctccacctccaaaggccctaaagggtggggagagatcaccactctaacctcggcctgacatccctcccatcccatatttgtccaagtgttcctgcttctaacagactttgttcttagaatggagcctgtgtatctactatctccagtttgtattatttcttgaaagtcttttaacaatatgataaaactaacgattgtggttttgttatctctctctcagccccgatactcccaatctggatctttcagtgaggtatatccccatcctcccctgtggaa

SEQ ID NO: 449131 - DNA, 439 bp, Homo Sapiens
  misc_feature (208)..(290): n is a, c, g, or t
  misc_feature (322)..(322): n is a, c, g, or t
  misc_feature (396)..(396): n is a, c, g, or t
agatgaacaccgttttctcttgtttatttaaatttgggagccaaatggtatggagaaggtaatgatggttttcaaaatacagtaagtcttcatttaacattgttaatagaacaatgaaaactccaacttttacgtgaaacagtgtatagccagtcctcaaataactgccttttggttcaacatcctttccttgtaacaactgatgagnnnnnnnnnnnnnnnnnnnnnnnnnnnnnnnnnnnnnnnnnnnnnnnnnnnnnnnnnnnnnnnnnnnnnnnnnnnnnnnnnnnagtttaccaatcttagcctcagattgggctanggcagggatgacaaaccaggctcttgcatgggtctttaaatggactgggcaataaatgaagactttggcctgtnaattcctaaatagcttctttgcttttgtcctttaggaatgcac

SEQ ID NO: 449132 - DNA, 379 bp, Homo Sapiens
ctataaaatatgaaccattttattgaagaacagttatacagtgtagctacagatactgactagatactaaatatttctgcctgatttttcattgtcttcacaagttagggaatagaaatcaaaaaaccaaaaatctcaaatgatttagctgtccagaacatatttgacaggttgataaatttataacagctctgacatataaatttctaattagagaatcctttcatttgaaaaaattgagatgatattaccctaatgaagtttttacctgaagttaacaaagtcctggatttgatatattactttgaatgcattaattctgaaaatttatatttagttctactttataacatttcttctcttaaggatgggatatgag

SEQ ID NO: 449133 - DNA, 443 bp, Homo Sapiens
  misc_feature (258)..(258): n is a, c, g, or t
  misc_feature (288)..(288): n is a, c, g, or t
tattggcagctttattctttttttccttacaagatttagaatctttttggttatatgtctatttttcaattttgttatatttttaatttaagtggccaatgtggttatgaacaagatttgtatggtcagcttctgttctttcctaaaacttcagataaatatcattttagctataacctaaaaaagtgtttaaataaaatgacagatgttaatttaaaagcagcatatgctcatttactttttcatatgatgatggtnctaatggaagttacatatgctttcttttgntcctaactctgaaaagtatatgtcagagttctggaatatgtctttagccaagaattttattcacttaaatttgtttacaacttgtataaagcaaaaaagaatgtgtgtaactatagtgaacgcatagttttgcttatattatgtgatgtttgcca

SEQ ID NO: 449134 - DNA, 756 bp, Homo Sapiens
agtataaaataatttagtaaattaaatcatttaatataaaaaggaattcaaagacattacagattggcaccacataatttaagtcagtcacttttagacactaaataactttaagagattttttttaatgaaggaacaaatcaaaatcggctcagaaaaatcagatggagtggatacacaaataaaatacatgttaatgcttaacacattgaatacaaattttctttatactaaagactttaaaatgtccatgtgttaatttcttttggaggtggaaaaatagtttgtccaaaaagacacttttcacagttgaaggaacttgaaagttctgtcccagtgagtcctaatggttttatttcaggcagcagattcattgtcaaatatcttactttttaaggtctgtaggttatgctgaataaaattctctgcaccatgaacttcagagaatctgaagtcacttctcctgacagaccagtttttcatttttattgaattctgaattggtgtccgatgtaaagtaggtaaactatagggtcaaaacaaccgttggaaacagcaatacagagagtgattggggtacattggtccttactgctgccactactgagcaattaaccaatgttgtgttctcacaagaaaatataaaataagattgatattgtgaggaacaaaacagaaacagaatatgatcaatgtacaaaaatcattttttaaaccctgatttgttattgttcttctacttaatataacaagctt

SEQ ID NO: 449135 - DNA, 487 bp, Homo Sapiens
  misc_feature (312)..(312): n is a, c, g, or t
  misc_feature (386)..(394): n is a, c, g, or t
tcatttatgcataattttaatataaaaagaaaaccaaacaattcacacaatgtagcatcaattttctttatggtaaggcatattataagcaattattcaaaagatatactatactaattgtttaaacattttataatgataatttgtaacaacatatgtaatcaaggtagaactaagtttcttttcttttcctgacttcatgtatcgaatttcagacccacctcagaccttcttatccaataaattcaagagtataattacgacgtacattatttggaataaaactggaactaagtgtttcttttcctatantttcctgtgaagtactattttagctgaataaatattattcccccttgtaatcttgttttttcactgagaagtgnnnnnnnnncataaaaaaatatttcaaatgataattttatgatagtggatataggaaacaatccatacatgacgaataaatgataaggctgatggtattata

SEQ ID NO: 449136 - DNA, 443 bp, Homo Sapiens
tccgagctgtcactgggctcctgacctgcccctgaactccaccctgccaggcagccaacagacaagctttttttaattgacccaggcaagagaggggagggattggaggagaaagctgggataggcaggccctggaaaggtcacctacctgctggctccaggccagtcttgaaggtgccaggggttctggcccagtgcagcccacaggcccccagcagcccatgcactccaggctctgaccacaaggccagtctagagggatgtgtgtgggcagagtgaaggggcaggggtggagcagagcatggatgcatagaacaagaaagaacaaggacactgcagtcccattgccctgggagtcagccccagcttcatggctcctggggacctcagagaacattgatagaagatcctagaagaaccacaacccgtggcaggtggtttta

SEQ ID NO: 449137 - DNA, 896 bp, Homo Sapiens
ttaagacatttaagagtggtaacagaagagtgatgaagtagaaaatgtgttacattggaacagtaataaaatcagtggataaatgtttttatttaataacattgtttaataaaaaactacatatttaacagaaaagttgttaaagctccaaggtaaaggcacattgaaggagaatgctttttaaatccaattttcagggaattcactttacatgtaaataaagcagaaaatgcaggaaaattattttgaagtttttcatcacttaacaatttctgggaaacaaagttcatcctattttcccatagaggacccctgttaaaatataagattatattcccctatactaggattcagcattcaaataaatcactagtccaacttcaatgtcgtagaaccccaaaaaaatataactatcctaaaaatatataatttaaaatataatttatagttatactaaatgggaataaacatatggcacacattaattaccaaggatatattcattactactaagtacaactatgtttcataattcatactacagatcacaatgcaaaatctatgcaagcagcaagcactaacatcatagtacacacattatacagttgtattagatatttaccactgaggagccttttaaatatagtgtaggctaatatgtccaattatgtcacacaagcagatcttaggattcactggacggcagatcacgatagcctccaggttttcaccaggtcttcgatcttgtaaacagtcgtccagagcagagctgatcataacatatcatctactatggaatccactctgaaacatgtcagactgggtaggcgcaatagaggccgacgtagagggatatctgtagtacgcgcctacggcgctcgccttaactcaggacg

SEQ ID NO: 449138 - DNA, 416 bp, Homo Sapiens
ccagagaatttgttttttaatcaatccgatcaattttacacaacaaaatatcattaagaaacatagaaatcatgtgaattgtattaaaactatgacatatgacaatattatataaagaaaattttaactctaagagacaaatataattttttaaaaaagaaattaaaaatatcacgtcttatgctaaatatatatagatatatttattatgatgcagcaggttttggaatacagggatttaggcaagttaaaaataaaaagtttatatgcttaaactttctgaatattgtttgtctgatttcctatttaaatatcagacatcattataggaaatacatagtctacttacgattgcaatggcactttcaaatataaggcaattaatattttagaaagcagcaacttttacttttttt

SEQ ID NO: 449139 - DNA, 456 bp, Homo Sapiens
aggctgtggaggactttattcattagacccagagagccatgagtgcctcccacgaagtccccactgcagggagccagggtcctagatgccaggccaatgcatgtgccgtgagctggccgaggggtctgctggtcccaagagcgcctctgtgttcttcagacagctccgggtatggtggcctcgccaggtggctttgaactatcttcgctgccatttgctgctgcctcatctgctggcggatcttaaagcccctccaggcggactggatggctgtggccgctttgtcctggcgatgcggctgcctgggactcagggcagccagctggtaggcggaggcccaagacactgccccggggccctcagtgccctggcccatgccctgcaccacacgggtgggctgtgtgcgtccacaggtatgacaggtgcgagggctggagcccactagcatcaccacgc

SEQ ID NO: 449140 - DNA, 492 bp, Homo Sapiens
gctttatttgaatataattttctcatcaattttgcttgcataaatacagtttgttgcttgttctggtttagtctaatagtaagttggagaagtcctggagaatgggcatcctggtggggtggcagaatggggttctcgcttcagcagatgcagccccccaaacacagcactccatggatgaggactcaaaagatgaatgtcattttctgcccctgtgtctcagagatgccctgaggctgtctgacaaggtgagctgttccacacaaaaaacaaagaattaatcacaccttagtccagcctgagttggggccagtctattgcctgggtcctgagatgtgctgcctcaaatgtcttcactggacgtggtcatgcctgagaccagaatggaatagaacaatccatttgaatacagcgatggatggtcagagatgtccacacacatctctgctcatcctcaccttcctgcaaactccattcatttatttatgggga

SEQ ID NO: 449141 - DNA, 433 bp, Homo Sapiens
acatttgagtacagaactttattaggaaaattataagtgcatatacattttttcattggtatgacttcaaagtagaaattgttgtttctcaaagagttgtttcttatttattttttaaagcacgctgcgtataggaattggccttctcctggaccattttcacattatctgggagatgcaattgaaacaatacaaaatacagtattcatcacatttaacactgaatcattcactgctcagagactgagagtccagcgaggttgcaaaataacaaattttctacatggttttatcagtggtctgcttaggggatttggaagtttctagggaatatttcccaggaatggggctccttcagaatgagtcagggaagctctgtagagggatcagagcactcaaattctcatccagctggaaaagggtgtagcacctg

SEQ ID NO: 449142 - DNA, 359 bp, Homo Sapiens
ctgagccaccgtgcccggccatgttgcttttataattgagatatttcatttattttgggggttaggcaaatttaatttgccattcctcaaactcagtaacttcaaatataaacaatgcctagaatgaatatggttcctcattatttctatcaaactactacaaatactgaagaatcccaaagtagttttccacagaggcagaaaagcagttcaggggttgaaaatcttcaatattaataagccctgggacattcaaatggcacttcatatttcaaggtaatgcaatatgaatcataattcattatatattgtccccaagagttacttcaattccgtattcaccagttcttacgatttgg

SEQ ID NO: 449143 - DNA, 556 bp, Homo Sapiens
ttgagggttctaacgtttttattgattagatttgtgtacagtggtaatccttccatcatacaggtaatatataataacattcaaaaatctgacattaaaataacttattgactaatgctaatattaacacacaatagttctatctctattaataataaaaaccaaaccactgagtttatcttagaaaacttaaattcaggccattattttacaatttggaagtctgagtaatccaacttcaagatgactttttcattgttgaagtttgctttgtcgatgtgtgatttaggacttcctcttgtttcaagccattcctgcatatgacgcaccttggagatgggaccttgcaattgtccttgcactgtgccccggtcagtgttctggacccagcctaccaatcccagctttttaccctcagcctgagtatgcttacggaaaaacaccccttgcaccttcccaaaaatttcataatccactgatatcagggtgtttccttctgccatgctcaaaccctccttgtcttccccaccggctgccaggatcactccgggacccc

SEQ ID NO: 449144 - DNA, 681 bp, Homo Sapiens
gaaatattgactttattaggaaaacatttgatagttctattcggtcatataatcaatcacctaattttaaaactatgtggccagaggacatcaattacaatatggatttttcattcattcaacgaatatttgagcacctacaagtgccagacattggaggtacagggtaaacaggaggatccttgctctcacggagcttacattctagcaggaggacaatattaatgtttataggaaaatgatgagtttatgacaaaggaagtagatagtgttttacaagagcatagagtagggaagctaatccagcacagggaggtcacagagacatccctaaggaagtggagtttaaactgagagaagcaagtgcttaaactgaaggatgtgttgaagaagaagggagagtagaacaatttgggcagagggaaccttatagaccctaaggtgggaaggttcaaagaactgaaagagagctagaacagctggagccgttctccggtgtaaagaggagtcaaagagataagattaaagatgtgaagattaagatcttggtggcattcagggattggcacttctacaagaaatcactgaagggagtaatgtgacattacttttcacttcaggatggccattctaactccagggggtagactggactaggtaagactgaggcagtaacctctt

SEQ ID NO: 449145 - DNA, 645 bp, Homo Sapiens
  misc_feature (68)..(76): n is a, c, g, or t
tcatttggccatatttttatttactacatatactataaacatatacaatacatgctaccaaaaaaaannnnnnnnnaaatttaactgtcaagaaagtgtatagtgttataatacaatggcacatgtttatattttatttcaaattggtttgcttatcacctatttcaaaccattaacagtgaaatgttacttgtggataattaaaaattatctatttgcattattaacaataaacaattccaacaaattaataagaattaaccatgtcaaatattagtattcaaaaaatgggatttgcagaaatgattatataaaatatagcagccaatttcagtttactttgccaataggatttcagcatttgcttttttttggaagacacttataagacatcctttgatttcttgaggggcattaactgccacactcaacagtcaaatccagcccagtggttcatgaacggccctggatcactgatcactgaggaatccttaggacttgagtagcgctgcctgttccactgatattacatatgatgaaaagagacattacaagccaatatcaaagtcaaagaaaataggaacattcaaatcagttgtgacaggtttttctacaagtattttgatgcctggctgacattcgggg

SEQ ID NO: 449146 - DNA, 1608 bp, Homo Sapiens
  misc_feature (485)..(485): n is a, c, g, or t
  misc_feature (595)..(595): n is a, c, g, or t
ttttttttaaatcaactaaagactcatgagatttatttggttacagtgaataacctggacaaaatgttgagaagagttgttaaaacaagtttacattaaatatactaacaattacgtttggttacatatttgtaagtgatggttatttagaaaaactgcatagaaatccaaaccttaaatattcttgcaaatcaaatcattagcttttctcttctctaataaagtagggtgactagttcttggattaatctaactataacattaatgtagcacttgattatcttatggaataattctctatctcatctaagcctcacaacaaccttgtaaagtattatccccattttatggaggaagaaacaggcttagaaggtggaaaggtagattctctgctcgcacaaccgtattatgtggctaaagctattgaacttgaacttagatttgggacttcatttcaaatatgaaattttttgattaaatctttntatcttgtatggaaaaaatatctcattagctgtcagatgttatttaccctgctaactgttaaaaatatttcattaaaaaaattcagcttcatagcctttcagtttccctntaagagtcaaataaaagtattaattttaaactgaagttgcctgaacagaaaatcgttacctgggggaaagtaccagtttctaaatcttttaaaaaacgttgccagacaatccatgatataactggaggttagtagtccttctaatttttaactacaaaaatattatagaaatttgtgtttagcccacatttctaacagttgaatcaaaggtgtttatgaacattataatgaacaagccaaaacctgcgattgagaatgacatgaatatattttctgttaatgatgagaaccgacatgggcttgacattttaaatgaaaatgtttgcatttaggatactactgatgaatcttttgaataaccttactttcaaaacttagtttaaggttgaacatcccagtgaccagattatgattaacagattggaaaatgataaagcctgaagtctaagtttatccagcagggtgactcatgcttctttgtcatcctcccacggcagcaatttgttccatgtgaatgctagtaacaggcatcatacactgttaatgctaatatgtaggagtcagttggaggcaaaaacccctatcacgattagcattaacagcatacagcctacagcaagccttcagcactcagaggatgaggcataaagaatttaaaccacagatttccccttcctggtttgtgccaccattagagccatctccattgggtgggagagccaaggtgacaggtaaggtctctggtaggttgttcttgaaatgcagacaagttatctgcagtgccaggagcgtctccttggttccccgcgcttgctctgcgggcggctcggggctccgctatccgctcccttcccgaggctgcaggcggcgctgggcccgggctcggccgcgcacaggaagcccgcgcagcttgaaaaacttttttctttttaaaggaaaagtcgaaaaagcccagcgcccgggtagttggtgttttcccctttccctttctcgtgggtcattgcgtgtgtgta

SEQ ID NO: 449147 - DNA, 360 bp, Homo Sapiens
  misc_feature (285)..(285): n is a, c, g, or t
  misc_feature (340)..(340): n is a, c, g, or t
cttacaatatgctgtcattcaaaatgtacctcagaagcaactcaactcatgcatacagtaggcactctataaatgttttaataattaggtgttttttggaatgactaaaaatccagatgtaaaatcccaattgggaagtgcataatcccatcgtagacaaaatatataactttacaataaacatttttataagaatttgccccaaagagggaacacttaaaatttggaaattaaaaaataaaaatggcaaaaggcaaggatggaaaccaaacaataggtaacctnttttgggccatgatcccggggtccggtgggggctttacaggcccgggggttaccnggcacccgtgggcgttaggg

SEQ ID NO: 449148 - DNA, 484 bp, Homo Sapiens
  misc_feature (349)..(349): n is a, c, g, or t
  misc_feature (384)..(384): n is a, c, g, or t
  misc_feature (395)..(395): n is a, c, g, or t
tttttttactaggatagtatttattgagcactctatgtgtggcactgtgctaaggcaagcgcttttaagtgcacgaccccactgaatcatcccacaaccatggatgggagacacactcagtctcctttaacagaagataaagctggggcttacagagaatgtacaacttgtccaaggtcacacagctagccatcagtggcagtgctgctattcaggtctgggactgtgggactccagagcccatgttttttacgaggatgccatactgccacaatggatggtgtctttatctcctgatatatgattgtgtgttgggaggcgtggggttggcagctggaagaatggaganggcatatttgtgggaggatcttcccccattctctngctaccctctncttggagctcccagtcccatctgagaacattatctactctgagaaatcgtcacaacacagcatggttttgagtgcagtggcagaagcct

SEQ ID NO: 449149 - DNA, 569 bp, Homo Sapiens
  misc_feature (12)..(12): n is a, c, g, or t
  misc_feature (40)..(40): n is a, c, g, or t
  misc_feature (78)..(78): n is a, c, g, or t
  misc_feature (130)..(130): n is a, c, g, or t
  misc_feature (483)..(484): n is a, c, g, or t
  misc_feature (488)..(488): n is a, c, g, or t
  misc_feature (497)..(497): n is a, c, g, or t
  misc_feature (501)..(501): n is a, c, g, or t
  misc_feature (505)..(505): n is a, c, g, or t
  misc_feature (511)..(511): n is a, c, g, or t
  misc_feature (513)..(513): n is a, c, g, or t
aagtttaactgngcatctgaacggtgacattaaaaactgntggcaggaagacccgatttctgagtaacccctgcttgncctctttgtgtgtaacacctttactccttccttgtccttgtgtttctgctgncttggaatctgaatgtttcacgcagtccattttcatttgtctctttttgtatatcatctactcagtggcttggctgaattactgttaccctcagaagtttgggcccccacattaattatgataaaaaatgtcaaaataacaagttatctacaaatttcaatgtaactttctggtagaagtgcttcttcatggatctgtgacagagagtggatatggtatctaggccatagattgctgggtcatttagaataatgaagactgaactccacagtcgtagtcagtgctgtctgtctgccctagcattagaaatgagagaaatcagccagacacggtggcgtacacctgtaatcccnncaanttgggaggncgangcgngaagantncttgaggccaggagctcgagaccaaccctgggcaacatggtgataccccatctcta

SEQ ID NO: 449150 - DNA, 436 bp, Homo Sapiens
ccctattcttcatttttgtctagcaatatttgaaagcctatgacattctctgcagtatattaaatagccagtgaaaagcaaggatgaatggaatgttccaaagttatccagcaaattcatcctaagaaaataaacagtttaaataattcaagtaaagaaacattccattgccactcttttttctcattaacaagtttattttgactgcattattctaacacctattgtatcagggtcagaatatatgaaaatatactgtactgatttatatttttactataaataataaaatgtaatataaagtttgttttcctgtgttgggaaactcattttgggagttattttaatgaatgatgtactcttacatcctcttaatttagaaaccaaacaagtacaatcacctcagaagttgtgtcaatatgtttgttttaaagtt

SEQ ID NO: 449151 - DNA, 886 bp, Homo Sapiens
  misc_feature (283)..(283): n is a, c, g, or t
  misc_feature (285)..(285): n is a, c, g, or t
  misc_feature (288)..(288): n is a, c, g, or t
  misc_feature (857)..(857): n is a, c, g, or t
gtttgcagcacaatttattatctggccatagtatttgggtacattatcaggtaccgatttaacaccatgtaacctctcttgacacagagcaacccaaaaagaaaactttaaaatgtgcaacagcaataaatatcaagctttgtcatctaaaatgtataaatataaaatatcagtcatttctggaaacatcttaagaaaatccggcaaccacatgtccatgagtaggtgtctgatgttgacggtgcttacattcagaacatatcacctcagatccaacacaatnanttntatgtcttttaccaacacatgtttgcatatactgaacagcctgggctccttgggtgtgtggatgaaagcccttttttttacaagcagaaacctcaagcatgccagcattggtgagcctgaagatgccagtgtctttatgctttggtgagcaaacaatggcaatggcctctggcaacatgagttgataggaacagtgagtgtgaagatcaacgctggataaaaatgcagtttgagtgggatgtgtatggatccatcctagagtgaggagatcatgttgatcctgaacattgaataattcctctacattctccatgtcacaatagtctggtcccgcagactgctttggcacaattacatgggtaatagtaaattcattatgtgtcagttttccacagagtattccacaggtttctattcctctcactgtattagattctgccagttgcagaaatttgtggcaaagatcttctggcaaaactacacatcgcagtccttcaaccactaaattctgaacagcacttagagtagcagcttgcgtttaagccctgtttacaggaagagagtggctngcattatttgttgcatcacttttattagg

SEQ ID NO: 449152 - DNA, 1026 bp, Homo Sapiens
ccaggtcactcatttcttctttccctcttggttgcactaccttcacaacacccgggtgtagaaattaagaccttcttacataggtcccactctctgtcctcctctgcttttcctcctgttttcctctagatgaagttttccataaatgaagtccacactccagcaccaaacaccccagctctctccagtccttggccatactctgtcccatgtacccagctgatactgatctaaactcccattacaactacgagacccactgtgtttgagactctcccttgcctactttatttcatctctatgtacatactttcagctgtaagctatctctctatccttttagccttccgtgacagcagaagctcagattcagtgatcattctgaattgcttcctctgcattggttcctaactactcctccactatttgcaagcatctttctacccacacaatagactcaaaccacgagtccattgccaagtccctgaggttaccatgcccagtgccatcttaccatgcagtgatgctatttccttcatttaacctgagtcatttgtccccatcccccacattctcctgtggacctagttccgcatattcctgggctcttgcatctgctctgatcctacagtctggccttgatgacggtcatgaaaccaacttttcacatgagatctgtcagtgccccagtttgagaactctgcattcccctcacttttccaccttggccccttgaccagcattcatcacccccacagatttgtgaggttgtctcctgttaaatgctttcagtccctttcttttcctattcacttacgtgacccaacatgcatcccatatgccacctcaaatggctgccccactcccacgtctctctttttctcctcaggattcacattaaaaccttgcatcactcatccacccattttctcccactgttctcttccagacaccctccacttcgtcttcagcatccaattcttccttccctaccctcactgctgaagacgaagggggatggtcacg

SEQ ID NO: 449153 - DNA, 266 bp, Homo Sapiens
tgacccagtcccaggtctcgtcttattctcctcagtagtcacattacaatcttgcatcactcatccacccattttctcccactgttctcttccagacaccctccacttcgtcttcagcatccaattcttccttccctaccctcactgctgccaccattgccacagtctctttatccccagcatgctgtactgcgtccatctgctgtttgaaaccatcctaccttgtctgttccacctatgtcggacacagacaaggtagagccgag

SEQ ID NO: 449154 - DNA, 512 bp, Homo Sapiens
tctgggctggtcagaatgctgcagcgatacttgatctatataaaaacctggcagtaaaatgtagagtgaaagttaaatcctcttgctgttttaactttatcataaagatgacataggcaagctgtgcagctttacattttaaccaggggactctgtggcatttaaaaccgtctagaaatggttgtactttaatgccagtaataatctgcttcctctattgtcattaaaatatatacgtttagtgtatcacacaaaccaatcttataagggtaatgtaaaaaccccaacaattgtacatgttctgtttttgaaaattgtggcatgtatttttgggtgaagatcattagagaagagttctctaaaggttttctgtgttcatacatggtatacagatagctcataatgaagtccagaatcttacttttaagtgaaggcattgtgaattcacctcaagtaaacccattgttccaaagcaattataaactttgactctagtactactatgatttaaa

SEQ ID NO: 449155 - DNA, 244 bp, Homo Sapiens
gtcaaaatgttgctacattttattttcaacttaaaacttcattataaaatttgccaaataaacatgtcaaaaacaaacttaaaaacaaagtgtagctgatatccagaaattgcagcactgtattgataaagggctcttttcattaccagggaaagaatttaatgtccttccttcctccccaaaagcttccttggtgcaatccagtacagaaaacgccaccactttctgatgccaggagaaaagc

SEQ ID NO: 449156 - DNA, 447 bp, Homo Sapiens
gattgtgctcagcaatgattattttatttgacttgttaaattacaaccaaaaagacattcatcgttattcatttgttgttcaggatctgtgcaggttggaaattatggctcttaatgctgtgaaacacagggccacagcatctgggatgaaaacgcaaagccctatcactcatttctccttcacttgccatcaggatgatcatagccaaaacggtcctctgtgtggttgggaggatgacacctcactcatcaaggaattgtactgtttcatttgacttttcaccttgtgactgttaaggatgcctaaggtcagaactcctcattttaaaacttccaccccaggaactttttctgtcatagcacctgtgcttaacgatacttggagaccagaaccacctacttggcttcaggaggacaccttatcagctgaaagaaaatgccttgaaa

SEQ ID NO: 449157 - DNA, 459 bp, Homo Sapiens
  misc_feature (24)..(24): n is a, c, g, or t
  misc_feature (38)..(38): n is a, c, g, or t
  misc_feature (54)..(54): n is a, c, g, or t
  misc_feature (71)..(71): n is a, c, g, or t
  misc_feature (154)..(154): n is a, c, g, or t
ccttaattttaaccccaaatgggnattaaaatggaagnaaaggcaagccaaatnaaattccagcctggatnaccaacccgtatccaagaacaaaaatgggaggaggtgcccccacattatggtgtgtaataggtaacatggggaaaatgcctantcctgtgttttggaaaagaagaaatagtgcccgtccctatttatttcctatatttagaaatttttcctcaaagaaatttccaattgtatcctatgagatgggtttcctaagtatccttattgtgtgttataagtgccttttaatatcatactaagtgtgagcttttggacattttcaagagcttacaaaaactaagtggcattgtatttttataaccccattgagaagactaagtaagaaatgaaatgtcctatcaattttattttgtcatgcttcaaacaataaagacatttttgctttaaaag

SEQ ID NO: 449158 - DNA, 347 bp, Homo Sapiens
aaacatatcagttttaattgtcaagattattccagggcaagagttcatttccaatcacttctctccggttcttgttcctaagcggcccaagccaagatgatcattccagtttattttcaactttccgctggatcttccatgccctccccaatttggccgacgcagagggaggcgaccctgctgggttcacagcagcaaatcgtcgtttaagtccaacaaactagtcaatcttggtcggctggcaccgaacaaacccatctcgctctgggtccccaggtgcagaatcgatgtgtgttcttcaccaacgtacagaccgcttcttcactccagtgttcactttctccagt

SEQ ID NO: 449159 - DNA, 551 bp, Homo Sapiens
  misc_feature (271)..(281): n is a, c, g, or t
  misc_feature (308)..(324): n is a, c, g, or t
  misc_feature (352)..(404): n is a, c, g, or t
ttaacttttattaatctttattttaaaacataaccagatgcaccttggttgtttacattctctggttgccattcagtctcaaagtaaacaccgggagcatatgataaatcgtagtttaaggaagccatagcacttacagagttctcgaatggttacaatataaaatctgtcataaaaatcagtaaaagatgcaaggtagaacacagtttaacactggtacaatggcagtagcagctttgcaaatgtttgtctatatgatttccacaggacnnnnnnnnnnngcctggcctcattatgtagcaaagcannnnnnnnnnnnnnnnngagatggagtcttgctctgttacccagnnnnnnnnnnnnnnnnnnnnnnnnnnnnnnnnnnnnnnnnnnnnnnnnnnnnngctcaagtgattcttccacctcagtctcctgagtagctgggactacaggcacacatcaccgctcccggctaatttttcgttttttgtagagttggggtcttgcagtgttgcccaggcttgttttgaactcttggcctcaagcgaacc

SEQ ID NO: 449160 - DNA, 532 bp, Homo Sapiens
atgctttatttttcctgtggctactagttagcaatccataggggttgtgaatttttaattatttgaatattttgtgtacatataccatatttgaagggttttgggggggtcttatttgtttaaaaggtgtcttctgtttgcctatttcaagtgtacttcagctttgcaaagattatagggctgtatgttacagaaataggaaatgctggccctgtactggggaccactacaaaaattccctttagccgggcgtgagccactgcgcctggcctaaatttcataacagaaccatgacagcagaatctacctttgcaataagaatgtttcccaggagttagagaccagccctgggcatgatggtaaagaccccagctaattatacaaaaaataattagccgggtaggtggagtgcatctgtggacattcgtggtcccagctactaggtaagctgaggcgggagatcacaagtccaggagtttgaggctgcacgtgacagcgtaggtgatgacagagcgagacactgtctcttaaa

SEQ ID NO: 449161 - DNA, 376 bp, Homo Sapiens
aacattctagaaattttgccaccaccactctttctgttgcaaagatggcatctgtgactactggggtagacaagaacgtttgttcaaactaaagaaagccagaagccaaaatttaactgcacagtaacaatgcacttttcatcatgcagccttgtgtttcctatattattcaattttctaacatgcattagaatacataaacttgtattctaatgatttaagtttgattttacaatatggaaaaaatttgaggaagaacatgacctgggaaagagaaaaggaagaacttttaccacaatgaaaatagatacattcgtacccaactatataataagaatataatccatttaagtttccagaaatatacttctcaaaa

SEQ ID NO: 449162 - DNA, 815 bp, Homo Sapiens
  misc_feature (85)..(85): n is a, c, g, or t
  misc_feature (161)..(175): n is a, c, g, or t
  misc_feature (793)..(793): n is a, c, g, or t
gaatgttccagaagtctggccatagccccagcttctgaattacctgggagagacaagatgctcaggttactattttttctttatnctgatagtacagcctctactcagagaccacggtgtgtgtcacacaaccgaggcagctagggcatattctgagggcnnnnnnnnnnnnnnnggtttccttaatgattctttaacagagtaactggattggccaaggtctgattcaagaggctgtgaggagagtagagaacaaatagactttgcctctcagagttcagagctttaagttgtataagcatggtccatgtccacctcttgtagacacttattccttaaaagtttccatcatgaaaaataatatcatgtcaaaattttataagcacccagaatgtcccagtagtcaaatgtagtgtctttctccagtctctgttttcggataataaataccttgctctcaatttagggatgatcgtaaagcctatgttcatggctgtgagtcattgtctcccacagcttttgaaacatcgttctttgtcttttctatacaacacctgattctttgtgcctcagactcattgctatcagggaagagactttgccaagatccacccaccacatttggccagtagtgtatacacattaaagtgagagctgatgaaatcacaatgctctattttgttccgacaatcagtatgaaggggtaggtcccagtttgccaatgagcaacagcctctgtatgctgggtgttccaagacttacacaaaacaagtgtcagtgcagtcacagcatnttcttgaatgctgttgtggaca

SEQ ID NO: 449163 - DNA, 644 bp, Homo Sapiens
  misc_feature (454)..(484): n is a, c, g, or t
ttttagtcagaatcagactttatttaacaatctgaaaatgtgttctttcggctttaagtcttgcaaaatgggtcgtaagtcaaagacagatttgttcactatcctctgagtgtgtgtggttatgtctctgtataggcaagtgtctgtgtctatagatacttttgctttttatagtgattaaagctccactttagttaatgtataaagtcttattctaataatgctaaaaccagaattaaatattccctgagtctaatgttctcttctccccattcctccctctcctgttaacctgcctttatttccttaattgcacttatcaccatgcagaagcctatgtgtttgttcccctgtggagatgtaaaaacactgatgcccaggcctaactcccagagactctgattgaactggtctgggctatggagccgggacatttgcatttttcttacaagcnnnnnnnnnnnnnnnnnnnnnnnnnnnnnnnccttctgcatcaacaggacaaatacaaaatgtgcagcaaaatatatgtttaagtgaatcaagaagacagatctagaaacgattgttaaggaataataatgcattttgtccatcaccacacataagtgatgttgaccagagccctcccagattgagtggtg

SEQ ID NO: 449164 - DNA, 700 bp, Homo Sapiens
  misc_feature (661)..(661): n is a, c, g, or t
caattccaaaaggaatatttattcagaacgcatcaaagggtctactggaattggaaacacagtcatcattcttaaggataagaacagccaattccttagatgcaggtcttctgagtcagtggactccacactcctgggcttgcatccagattatcatcgacttctgtactgatgcttgcaggggaggctccgtgggactccctgtatatcttccgctcctccagctttgattcctgggcacacagcatggaaaaggcaaggcagagggaacacaggcagttaggcaacttttcaccactttttcatctgttctttccccattattggaatccatctaagggaggacatcactgtggactgccgggggatgtcaggcctcagaaaggaagttgaaaattatgtaagaaatgagcccagtgacctccatttccttgcctccttggtaaataatttgtggttttccgaaactggaggcatattttagagttcaagcaaggttggcagtaaattgtcccaaggatcataaaaatgtgcacacagggttttgcagacaccaaatcaaataactaaagtgaagtgaaaccaaaacagagcagatgcgtgtatgcacaggcatatcccagtcccagaactgcagacagagttgtctatcttttactgngtaacataaattctagaatattaaacagttcagtggtaa

SEQ ID NO: 449165 - DNA, 563 bp, Homo Sapiens
cgagaattgtttcgagttttattttttaaaaaattacacttgaggtaaggaaaaaaatacagtaaaattagattttagagattaaccaaaatccaaactatacaacttaattcatgactaattcaatcacagtttgtaacaaaaggaacagaacatttttaccttcaaattcagtgtaaacaataatttatcacatttaaaagaaggctgccaataagcagaactcagcaatttcttgacttaattgacaagcctaggaattctaaaaagtcattaaaaattttaaaacctgtaaaaattattttatctatttcaatccatattcatttcattcagaatattctttttgacaatcagtggaattcattacatactaaaaataacaccatatttatgcacaaataaattaatttttccagtaagagctaatcttcctttaagaagacttcccacatattcacaatacataatatcacagaacacccatatttggcctaaatgcctctgaattgtagcattacaagatggaagttcattgtgcctaataatttgattgagttttg

SEQ ID NO: 449166 - DNA, 460 bp, Homo Sapiens
gatgattttgtttttttattctatacaagaggggagagagtccctggggatagagggacagagatccaccctcctgggggaggagataagcccccacccagaagctctctgcagagagaggtatcgaggcaggcactgacagcctccgtctctccaggtggctccctctgttctagtccctgcctccagctcccccatgcctggtcctgccgtcttgcccctgtaggacaggggctggcagggggccctggggactgggggtggataggggtctgagtccttgcgaggcacatgtcgagggctgaggagggtgttgtggcagttgtcagtctgttcctggctcactggttcctgtggggtcaggaggccgtcttctatcaggttccagcttgtcacaggactttgcccgccgtgtcctcttggattcagggggcagtccgcaggcctgatcaaaggcgga

SEQ ID NO: 449167 - DNA, 1312 bp, Homo Sapiens
acccggctgcgttctgatcgccgccgcgcctcagcctctgccgcgatgatcccccctgagcagccgcagcagcagctgcagccgccgtcgccagccccgccgaaccatgtggtgaccaccatcgagaacctgccggccgagggcagcggcggcggcgggagcctgtccgcctcctcccgggctggcgtgcgccagaggatccgcaaagtgctgaacagggagatgttaatctctgtggccctaggccaggtgttatccctccttatttgtggaattggcttgactagcaagtatctgtcagaagatttccacgccaacacaccagtcttccagagtttcctcaattacattcttctcttcttggtctataccaccacactagccgtcagacaaggagaagaaaacctcctggcaattttacgacgaagatggtggaagtacatgattttgggactcatagacctggaagcaaattatctggtggtcaaggcttaccaatacacaactctgaccagtatccagctcctggactgttttgtgatcccagtcgtgattttgctctcctggttcttcctgctgatccggtacaaggctgtgcatttcatcggcatcgttgtctgcatcctgggaatgggctgcatggtgggagcagatgtgcttgtgggaagacatcagggagcaggggaaaataagctggtaggggaccttctggtcttaggaggagccacactctatggtatttctaacgtctgggaagaatacatcatccgaactctgagccgagtggaattcctgggaatgattggtctctttggagcatttttcagtggaattcaattagctataatggagcataaggaactgttgaaggtgccctgggactggcaaataggactgctctacgttggctttagtgcctgcatgtttggtctctacagctttatgccagtcgtcataaagaaaaccagtgccacttcagtcaacctctccttgctcacagcagacttgtacagcctgttctgtggattgtttctcttccactacaagttttcaggacatgttatctcctgtctttcttcaccatcctcattgggctggtgctctactcctccaacttccaccatacatagcccaggacccccgagtgtataagcaagttccgcaaatccttcaggacctgttgtggacttaccgaccacagctcaggtggaacccttcagtcacatacaccagcctgggccaggagaccgaagaggagcctcatgttcgtgtggcctaggatttccttagtgataatatggaaactaatcaa

SEQ ID NO: 449168 - DNA, 1013 bp, Homo Sapiens
  misc_feature (109)..(144): n is a, c, g, or t
  misc_feature (613)..(613): n is a, c, g, or t
  misc_feature (622)..(675): n is a, c, g, or t
  misc_feature (688)..(804): n is a, c, g, or t
ttttgtataacagttttggggaaggatatttttgttttcacaacggggggggacaaatattttgtttaaaactcccccttcgcgccccccccgattgtggcacaaaaannnnnnnnnnnnnnnnnnnnnnnnnnnnnnnnnnnntgccgaaggggcgcgctgaggcccactcccggggttaaaaacaacggtccccattaaaggacccgggggttcgcccgggcgcgggcaaaattttttgttaaaaagaaagtttggaagccacgccccccggcgaatttttttcttctgggggtggggcaacgcaacaccgggtcttttattttgcctttttggtgcctccccccggggagaccacgattcccaaaaaatttcttcttttttaacgttcgagcaccccccgcgcctggaaaaaaaggtgcgggtatgacccctcttggcacgcccggggaggggtggctaaatccccaaggcattttttggccggtcccggaatttcccatgggttttccaaaggaaatctctctggttggccatgggtcccgggacccactgggctccaacggaatcgattttaattagttttttatagtgttcttgaggggctgagctngtttgttannnnnnnnnnnnnnnnnnnnnnnnnnnnnnnnnnnnnnnnnnnnnnnnnnnnnntagggttttttgnnnnnnnnnnnnnnnnnnnnnnnnnnnnnnnnnnnnnnnnnnnnnnnnnnnnnnnnnnnnnnnnnnnnnnnnnnnnnnnnnnnnnnnnnnnnnnnnnnnnnnnnnnnnnnnnnnnnnaggcgatgaaaacttttagaaaggttaatagttacaagtaagtaggctggacttcactgatgatgagctaggatctgaaattaaatgacagaaaattcaacttgacacagtcccagaagccaagctcatttccctcactctaacttccaggcctaagatggcattaaagttaaaggattcagggctctctccaagcaagttcagttaat

SEQ ID NO: 449169 - DNA, 431 bp, Homo Sapiens
ttttctttttcattctgttttatgcagcaaataattcgttggcatcttctctgtgatgggcagcttgctaagattagactcaggccccttagcttcatttccaactaagcccacgctatcaaccaagccaaacagaggaaatcagtttgggttgaattctttgctggagacaaagaatctacattcctgtgtagataatgctgtgtttgctctgtgcagacacagatggaagggaagagggagacagtgtggggacggagacaacaggaagagcaggagccgccaagggccatgtcctcaccatgcttaggtcatgcgctcagctggcagggcagccatgagacgtgtgtgcgagaggcggcgatgggtggagggaaccccacacccttcctgagaagcaggggcagcctggctgcggctatggagtggcg

SEQ ID NO: 449170 - DNA, 494 bp, Homo Sapiens
ttttttttaactagttctgaaagtgtcaaagaatagcttccctttccaccctacgtaggttccctccttgctggcataaaggccaagcagtgaaatgaaccttgggttagagttatggtaggcaaaaagaaaaggagaatttaggaaataaatatgctataaacaaggtacagtacagtgagagttaacaatcctaggaatcctgcctgtcacaagctcccagttccctgtcattttatcttcatgattagaactgatcttccatttaactattacagaaagcagtaactattgcaactatctaatagttcacacaaaagaattaaaagcttaaaaataatttttaggaaacccaatattcaaaatctaaacacactgataaattattaagattaagattatttatgtgataaatgaaatctcctaccaatccatccagcctttaccagggaagaaaagcaattatttcatttcagatagaaatacaaaaaaaa

SEQ ID NO: 449171 - DNA, 735 bp, Homo Sapiens
  misc_feature (11)..(11): n is a, c, g, or t
  misc_feature (626)..(648): n is a, c, g, or t
agagaatactnttttgcctgacaagcaacagccctcttccccacaaagcaggacagttccttataactaagagtaagttcacttacacatgattaagaaggaagaaagaaatattataaaggagagaggaggcggagtttttcaagatcgacctaaagattaactttcaggtcagcacgagtgaagcgtggtttcctgagcttgaagggctctgaattcaggaaaggatgagtactttttccagagaacactggagcctgtggagttccattgctgcactggattaacactgcacggctaggatcaagaatcctgaaccacattggttgacaggaactgcaggccccctggaatttacctggccatcagacctgccagcaacagtggcaagaggactcagaggtctttatctcactgtgctgaccttaccacattcgtctttcactccccttcccctccaggacacggggaccccatggacacagaaactgaagaacaaggatgcaacgctactcccttcccctttttgccctttcctccccaccccctttgcagaatgcatagttacaattccccttacaacataaagaagcgacgatgaccacatgtgggacttttttttttgnnnnnnnnnnnnnnnnnnnnnnntccaacaacctcttcttaaattcagtatcaaaattcacatttgcataataatacatttcaaggccatgagagaggaatgagagcacc

SEQ ID NO: 449172 - DNA, 537 bp, Homo Sapiens
cgggtcgtacggatgtgcggcgcttctatgggcagctggtgggcaaccagccccagaatgggcggatgctggtctctaaggacgccaccctcctactgcccagctatgagaagtacggcaccattgtcatccagtacgtcttcccgcccggtgtccagggggctgaacacccaaacccaggagttcggtatcctggcaccacacgggtggcctacctcccggactgccctgagggcaacaaggtgctgaccctgttccgcaaggcgtttgaccagcgtctcaccttcactatcggcacgtccatgaccacagggagaccgaatgtcatcacctggaacgacatccaccacaagaccagctgcacagggggaccccagctgtttgggtacccagaccccacctacctgacccgggtgcaagaggagctgagagcgaagggtatcacagatgactgaaggacatcgcctttgccaaggcccctgctgtctgcctgtactaggacccagcagaagcctctttctcctctctgccccctgc

SEQ ID NO: 449173 - DNA, 818 bp, Homo Sapiens
tttttgtgggcttgctgggccaagcaagatttcaaaggcccctgcagtttcattggtaatgaatttcctagtactgcctgcaatcttaataatgcggttaaagcatgtaaactggggtgcggtatccccacattccatcttcctgcccaggtggctgggccataatattgaattattctttcaggaggccattcactgtccttccaatctcctatagttatgcctcttttgcttttccttttagtttcatcatagatggggtatcctaaggcttctccctgttttaggggcattaggaagaaggacggcctaattgtccccagtacacaggcccctgaccatttagctggcagttgtcgatatgcttgtggcccacagatccagtagaggccagagggtgcctgcccaggtatttggagcttcaagttggtaccaagaatggtttaaagatgggaaacgagagaatgggcttgggtgtggtgattcagaattattgcttttgcccctccataaagtctttcctagtgtctcgttgtaatattgttgtcctaggcaagttaactctcctactgggtctgtaaaggcctttccccagcgagcaatacagaattttccaataatggaggtttttaagaaccagatgctctgacttgatggtgcaggttcgagggaagaggcggttagtgtgaaattatcttggggcattagttcccttgcttccctggccattggtctcccatgttcattcccccacagacctaacatgaagcaacgtgcaggctgctggctttgttttcaaccagttgagacaaaaaatt

SEQ ID NO: 449174 - DNA, 1129 bp, Homo Sapiens
  misc_feature (19)..(19): n is a, c, g, or t
  misc_feature (73)..(118): n is a, c, g, or t
  misc_feature (969)..(1022): n is a, c, g, or t
acacggcatttttttcagntccttccgggggagaaacagtctattttctctctttctgtacagtatattttcnnnnnnnnnnnnnnnnnnnnnnnnnnnnnnnnnnnnnnnnnnnnnnggggtttcattcagtttgatcaatcttcttccccttcttcctcaccctgcagtagcagggtggcagcggcggtctcctcctgctgctgctgttgctgctggtgaagctgctcacaggcagcccgcttctccctctgcttctcttgaatcttcttcatctcctccgagtacttgcagaaggtgtgtccgaacttggcccacaccttgtagggcacggtgatggagttgcgataggtgggcttcacctcgctcactcgcataaacacgccgtacttgttggagcccacatcgaagaagaagcgcttgttgtccacagtcaaggaggtgccctcgggcagctcggccggctcctcctccactccgtagtcgtcgatgagcttggccagagcgtcacggaactcgatgagcccctgcgcgggcagcgcaatggtctggccctgcgtggagcccaggccaggcccccggttgaccgtctggcggatgcgcaggaagcggccgcgctggttctccttgagatccatgtagtacttgcggttctcgcgcaccaggaactcgcttttgagcgcccggcgcggctcgtcctgcgcctgggccaggtccggcggctggctgggggcccagctgcgcgtagtgctcgatgaagtcgcccaggtagtcgcggaactccacggccactgacatggagagagtaaggcggctcttgttgccgcccgcgcccacctcggcgatcttcaggaagcggcccttggcgttctgcttcacgtccaggtagaagcgcttgttctggatgtccacccgcttggaggccagctcctgcgtctctgtgctgcagcccccctggggccccaacannnnnnnnnnnnnnnnnnnnnnnnnnnnnnnnnnnnnnnnnnnnnnnnnnnnnnagcctgagcccgagccggggtgccccagggagccgcccgaacccagcgccgcaccatcctgctcgctgccgctgtctcggtccgccatgatgctgcgcctcccgctc

SEQ ID NO: 449175 - DNA, 647 bp, Homo Sapiens
  misc_feature (556)..(601): n is a, c, g, or t
agtctccgcgtcccgctcgctgggagagaggtacctctccttttcccactccctttatcttctcaacaccgtggagatgcagaccaggccagtaacattttggccagctttggtctgtctgctagagacttagatgaactgagtcgttatccagaggacaagattactcctgagaatttgccccaaatccttctacagctttaaaaggaggagaactgaagaaggccctaccattgagttatggtagagatggcagatctgctacacgggagccaccatacagagtacctagggatgattgggaagaaaaaaggcactttagaagagatagttttgatgatcgtggtcctagtctcaacccagtgcttgattatgaccatggaagtcgttctcaagaatctggttattatgacagaatggattatgaagatgacagattaagagatggagaaaggtgtagggatgattctttttttggtgagaccgccgctgccaccctgctactgcagggtgaggaagaaggggaagaagattgatcaaactgaatgaaaccccnnnnnnnnnnnnnnnnnnnnnnnnnnnnnnnnnnnnnnnnnnnnnngaaaatatactgtaaagaaagagagaaaataaaaagttaaaaagtt

SEQ ID NO: 449176 - DNA, 661 bp, Homo Sapiens
caaagctcactgctgctttattggaggcaacagcccctactggagcctgtgtcttagcgttcctgggggtcccagggccagccccggcccccacccagtctgccctggccctgcctggctcccagcccacttaggggtgagtgtgatggggggaccaggtgttcctgtccttggagcccaggcacagtcttgtgtcctgggtttctgggattgggacagggcaagttcgtgtgtgggcaacagagtcccttcgtcctctggagcctggcgcctggttcagccctagtaaccctacctgctggatgagactggctgggtcctacgagtatgtccatcacagaggccctaggctaatgcacagccttgctcctgctcaccctcccatgtgggcccatgtccgtctgtgtggcctggggtcagggcccctgtgactgccttggcctggcagccacatggactgccatcacctaggcccagtgtaggccgtagggcgtgccgacacgcagcaggctctggctggcttgggcacgcacgtgggatgtggtagtgctccacacatgctgccacacactcacaagacaggacctcgccctccaggtagaacttagagtcattctctaaaaatgcgatagtacgtcacctttgttaaaggttacgtccc

SEQ ID NO: 449177 - DNA, 1031 bp, Homo Sapiens
ggggtggggggtttttttggccaacaaggaaactttggcattccttggtggttccgggaattgtggaccattcaaaaggggctccaagttttggaagggggtccaacttttttctaaacggtgacccaggatggatggtgttaagggcaaaaagcaaaagtatttttctcccccctcagggtttttggaaaatagaccaaaacacatagttctcttaaccaccttccttttaccccaacttttgattaagtgcaggtcaactagcttgccctaatcacttctgaactcatcagtggagtatctttccatgtttaagtctccttctggctgcttcctctgaattctcattacggagcaagtgtaggaagacccaggaatgccggaatcatccagtcactgcatgggttcacttcatccatatcttctttttttcagaatactctttattcctgtcttatttcaaatcctggtgtcatcagggtgatgaagggcacttcttagacactcgacaacatggtggaggtgaagatctgttgtaaaatctgagggatatccttggtatccatggcaacgaaagaccgaccagctggtaaagttctctgaagcctggttgcttgatcacctaaagagccaataaaaatggcaaaagcatttacttgagggtctcttgtgaggatttgagcaaacttagcaggatgtattccatatcgtgacagatttgcatcactcaagactatgacaaagtactcatcagcttcttctttgacaatttccttgatggcatgttctgtcccttctaacgtgtggtccccactcatgcagaactgagagtgggcatgcattgtcttcagaatttctagtctttgcttattgtccttggggattttgttcattggaaccagaccaatgttgtagccatctccagagtgtccaacgatgtcatactggaacttctcctcatagttctcgaaggcttccatgaccatacacacagcctccattgtgcgctcaagccggccatccatcctgtt

SEQ ID NO: 449178 - DNA, 525 bp, Homo Sapiens
ggggggagagcacctttattgtcacatataataataacgttacaggctggtggtcccgcccgcctctgaccacccctccatgaagacagagactgcctctccagacctgcctcaagggccagaagaagatcccagggcccagagggaccaggccacagccaaacaggagtaccaagagcactggagacagtcactcctgctgtgaagacagagtgccccagggtggcgccagcaccttcaattctctgagtttgctgccgtggctgtgtcccaggtcccagcccagcaagagaggaacaccagggctgagctgatcacggagaccctggccccagaggccttgagggctccagtcagagctgttctgggctgctagggacctggtgcctgccatggagcctgccaggcccccaactctggaaggtgggaggcaggagcatctcttcccagcaggcctgggactctgtttccctctctgcagcttgcaaaggggacactgggcttgctgtgtcatgcaaaagtagc

SEQ ID NO: 449179 - DNA, 475 bp, Homo Sapiens
caggaggctgcagttcagctttattttcatgcccctcatgtccagttaaggctcaagatcagccccggccacagtcccccagcactgggactcagcttcccacctggacagggcagggggttcttttgccaactcctgccagcctccttcagctgggggatcccccagagaccgctgcctcagcgggagccacctggaagaaccagaactccagcctggagctgctcgtgggggccagccatcccccctgtccacacactcgtcccagctccatctccgggccccggcgctgaccgtggaggatctcagggcccaggcctccttgtccaaggactccccttggggtccctggctccctgagctcttgggctgcctgggcagtgcggaagtggacaagcttgcaggagacacaggggaaagaaggaagctcctccccaagagctggtgggtcaaaagagttggggggctggtggta

SEQ ID NO: 449180 - DNA, 890 bp, Homo Sapiens
acagcaacaaacatttatttttcttgctcacaggtctgtgggttggggccactctgcatcaggctgtgggttgatttcagggctgttctctgactccttgttcttggaccagcagctcccaggcatgcccttctcatggcagatacagaggcacaggggggctagaaggaagaaagtggtggctcttaaggccttggcttggagctcgccccatcttactcccacccatattccaatggctgagatgaggcatagggccaagcccatcagcaacagcatagggagcattctctgcctacagtgggccttgggaaaggtggggtgggaaggaagaattgtgagtaactagtttctcccaatccacatataagaagctctgaagcttcagaaatgatgtaatttgcctaaggttttacagccagtcattagatgagctgggtccgtctgctttcaaggcccacatgccttttcctggctctctccactagcctgtgctctgacccttgcacacctttccagatgagtttcctgctgctgtctgtccctcctgttcctccccactccatggagcctgtattaactgtactgatgtctctcctgactcttcaaggctgggcaccctttctcctgtaccctcagccctctgtcctggtctgttacaactttgagtacactgcagcctcagggtgaggctcaaggccagactcctcacgtactagaaggcagagaccatgtccttgtcattgctaacacagtgtctgacacttgtgattgtcatcagcaatcattggcagattatgtgccgaacacttcctttcttggagacatatgatggctaatcacctgggaggcttctagaaggtccaggtatgccggggatcctcatagag

SEQ ID NO: 449181 - DNA, 299 bp, Homo Sapiens
  misc_feature (113)..(113): n is a, c, g, or t
  misc_feature (223)..(223): n is a, c, g, or t
  misc_feature (266)..(266): n is a, c, g, or t
  misc_feature (274)..(274): n is a, c, g, or t
ctggttttcaatgttttatttcacaaattgttcagatttgttcataaaagatatgttacaggaacattttagaaatcaaaccagttctactgaaacaattgcaacaacgtggncccctgttcatgcaaagcacaaaaaacatttacaataaaactttgtgcacaggaagtagcaaaatacatcatttttcataggaaaaaaggcacacacataaactgcgggnctgagtgagcctacaggacattttggggaaaccaggcacacgntttgggantacggtaggggcaaaactcctaagg

SEQ ID NO: 449182 - DNA, 1021 bp, Homo Sapiens
tttttgaaaacaaggcatctgctttatttgttttcagacagtagcgcatactttgtttcctaaacacgtggcagccccaggctcaggggcatatgcaggggcccagcaggaaacggcagggcacagtggctgtggtcccatgattggtcccttcttcagggctccaagtcactgccagggcagggaatgatgtctgctcctcagcccttgtgggcggcgctcacgcagcgctggtatgccttgaccaggtccgagcacagcagcacctcatgcgggcgatctcggtagcagtggagaatctgggcctgcaaccctgagcagacgggctccaccctgcggggctttattgtgctctccatctttgaggctgcctcatggaattgctctgaagacagtttatacatctcagcattcttcctctcaatacgctccagctgctccttgtagaaggtgtcacggcgtcttagctctgcctctctgctctccagctccctggccagccggactgacttctgctcctcatggctgatgctgccttcgcccgtgggcagggatgccttggagtgcttggtggcagcctctctttccctctttgccacctggaagagcttatcctggatagcagaatgctcctgttcatacctcttgacaccctccttcatccctgagggctgctggccaccactgctccccgacctgggcagtgtggattctttgtgaggggctctcaagttgccatcttgaaggccaaaggtagaagatgtgggagcagggggtggagagctgggctccttcatgcggttcaccacgttttcagacagccggacaccctgcagcacccggacccgctcctcctcgtccactccgaaggacaccctgcggccctcgctgctctccgtgctccccatggcgagatgccgcagggccggcagccaccagacccgagacccggctccagagcaaccgggccaacaacgctttccaggaccctcgtgccgaattcgccacccaggcctcgctc

SEQ ID NO: 449183 - DNA, 554 bp, Homo Sapiens
  misc_feature (316)..(366): n is a, c, g, or t
tgacacagcgagaccctaactcaaaacaaagggagatctgcgtggggaaggggtgtttccctgcccggtcctctggcctctggttcacagccgggcccccttctccgtattcagccctgggaactacccataagagtgggggggtcacaagggcccgcggtggctgggaaacctcagggcctgtggtgtcgccgcgcaggtccagggtggcgcgtggctgctgagcccccgcctgtgcgacgccctcatggccatggacgtcatgctgtgcaccgcctccatcttcaacctgtgcgccatcagcgtggacaggtgnnnnnnnnnnnnnnnnnnnnnnnnnnnnnnnnnnnnnnnnnnnnnnnnnnntcaccgcggcctgtgcgctgtccggcgccccctcggcgctccccgcaggttcgtggccgtggccgtgccgctgcgctacaaccggcagggtgggagccgccggcagctgctgctcatcggcgccacgtggctgctgtccgcggcggtggcggcgcccgtactgtgcggcctcaacgacgtgcgcggcc

SEQ ID NO: 449184 - DNA, 493 bp, Homo Sapiens
tttttttacagttaattctgagcatattcatttctcttctaagttgtgaagtctctgaaggcataaattagttttaatttttcctggtatcctacagtgtgcactagcatggtgccttgaacacagaagacatttaaggatttgtgggatgattcagtcctacctcaaatagatttgtgaatccctctaagccaatattgacaagcaaacagagcaagattttatgaatgcattcactgaccagtaactcaccaagatagtctactaggtgtttctttctttttgcaggacaactcttcaattacttggaaaaagtttatggctactatggtttcctcttcttcaaggaagatatgccctgtttcttcaactgtacctcaaatattttggtcctaagctcttcccacaccctggtcatggtgtaagcacaagtgtaattgtgggacatattccctttcttttgcatttagatagttatgtgggcaacttacca

SEQ ID NO: 449185 - DNA, 962 bp, Homo Sapiens
aacaaaaaatttattaccaaaatacaatattaaagtcaatacatgacaaactcctgtaaagcaaaataaattattctaacattgtacagtatttccaaaggtagttaaagaagcactacagaccttgcctcactgttctgaacagatgaactcgctctcccatgaacacagtcctagagtttccgctttaaggcatgcagcttgatgtgcaggataattttacaaaatgcaaatcatcctattttaataagatacagtgtcagaattaactgtagtctttacatgtcagtattccagaaatttttatactttgggctatagaagcaatgccatagtgttacacaatacttatttccttaaaaaaatacatgtattcatgttcatgaatatcaaacgcaaatttctattaaatatattttatcgaatattacttagagcaccttgctgtacaatttaaaaagattaaataagtgtctatgaaaactaaaaacacaataagtctcaacagagaagcctgcttgtctttgtcaagccaattacagcacgggaaggtgcaatgtaaacatggatgcccaccatttactttgtgagaaaaaaaacagaaaattatgaagccaccagcagccactttcaataggaagaaagatccagaacaaaggcttcggtcggtgtcacaacattgcactatctggccaaagaacttggactaccgatcaaatggaatattagcatgatactgttgaacactgggacacccgccatattctggatgattagagaaagggagaaaatgatagagccctgaaaagtattctttataatgatcagaatgcatcatcttcccccctccccacctttgccatatgtagtttcttttcaaagctattttcactatcacgtcttagtattttttaagtgttcggagcagaaaacaaatactatgagctctgtctaataagaag

SEQ ID NO: 449186 - DNA, 544 bp, Homo Sapiens
ttcttgaggccctgaagcttccaagataaatataagactaaaatttgcttgttccttcacacctgatttctcctagaaccataaatacctcctatggggaactaagaaatcatgaatactgggattttcttattggattttcttacttttgttttgtggggataacgagacagaagtgaaaggaaaactggtgccggtattactgttgaaattaatgtacagtgaatgtttttaaagtattaattttaaaaaaccatgttctctagaaacaagttttaaaaatctatatgaaagttttaaaatgttccagctaactaatggataagcataccagtaaagccaaagtaaaggttagtgcctttaaaactaacctgtgttagagttacatgaatctggctctaaagtatctattttgcatccatttatatatagatcttaaacagaaatactctaggttgccacaccacagttttaagaagttatgctgctgctgttactctcttctaggattctggtggtaaagtaagagaaactcggacactaa

SEQ ID NO: 449187 - DNA, 579 bp, Homo Sapiens
ctgtgctggctgcatctgtagcaatttcttaatgacgaccactgactctgcaaccacaagctcatcacggttggacagcagctgcaccaggccattgaggcaggtgtcacggactcggccgatgttagttgcccagcgtcccatggtctggattgtggctgccacaaagtccttgtccatgctgcgaatataggtctggaattcccgtaggacagtaggaatgttggtctcattggccaggttggtcagcacttccagcttcaggatcttaatctgggtggggtcggtggacctgatgtagaagctcttcaggtagggctcaaacataccccggcgcttgatggacatggtggccacgttctggagcacaacgtactgcacctcactgtggctgcgcagcaggcgcaccagcgccttggcgatgacgcccacttccgccttgggcgccaggtggaagtagagctgcgccaccgccatcaccaccgcggcgctgcggctctgcagcaggggtttggtgttgcgcagcagcagccggtggtcggggtccatgacatagggctttcgggagggggcggtcgc

SEQ ID NO: 449188 - DNA, 480 bp, Homo Sapiens
ggaatggagaacagcctttccaaacataacctgtgagaggagtttctgtaatcagaagactgacttgttggcttgtatccgagaagcctttcctatcaccttagtatgatagttctctggagagctgtgaggaaatctttcttttaaagtggcggtcatctttgaaaccaagcatgcataaggaagtagagcacagtacaggaaaagaaaggccctctgctctgatcacacaccaccacaacatcctgacagatgacctggccatgcacagctgcctctccaggaaaatcttccactctcatcagggaacactggactggataactcaggtattcctaggtgaagtaagtcagacaatatggaaatgaagaaataaaaagagggctttcagggcacacagctcagtttgccaaattcaacatggctacaactgatccccaaatcctgagtaaacacccttgctatttaataagcacaagc

SEQ ID NO: 449189 - DNA, 612 bp, Homo Sapiens
ttttttttccaaatgcagaaaaaaagtctttattctcataataaaaataagtctgttctgtattttacaatatatttcaaatatttccactatgaagcattcattagtcccacatggtcaagaagtatacaaccttttccaaagacagagctgccgggagtgtgtttaggacacacacctcgtacagccgcacttcaccactttctcaacctcgtccacaaaggaggagccgtcagtgcattcgaaagagtatttccgccgcttgctcctcagcggtccacagcactgccctcctgcacacccacctctgcactctaatcgggacaccttcttggttgtttggcaagcagcatagccctgctgcttttggtaataatctcttatcctttcccctcgacaagagatttctcgatcacagctgtcccccgtgtatccactgctgcattcacagtagggctgccccagacctgaaagcctgcacttcccatgcttgcacttgatcgcctggcatgggttaaacagatcctcctcttcatcacagaggacacctccatggccctccaagcacttacagctgtaggagaacgcattgatgggcaagcaggtgccatg

SEQ ID NO: 449190 - DNA, 1104 bp, Homo Sapiens
  misc_feature (889)..(889): n is a, c, g, or t
  misc_feature (1053)..(1053): n is a, c, g, or t
gtatgggtgttgtttcttattgaaattctgtattatggtatgagtctgttaataaagttttatgtcactaaaatttatgcacacacacacacgccaatgatcacttcaaacagttaaagtcatgttgatcctattagtagaataaaattgattgtttttaattttagaaaatgaacccagatgagcagccttcacttcagtttggttgggcagggatggagggtggtgctgaggctcacttgtttcttcttcccccaggatgggctgactgtgactctgcattagcctcttatgaaccagggtggagaccaccccatcagctgctttccagagctaggctctcacagctcagccgcctgctcactgttcaccatgtgtctcctatgtggcagcttctggggacctgcagatcctgggacaccagtctcatcccgaaggagctcaccatcaaggagaagagttagatcagcgagcaaggtggcgtgacatagagtgctgagtgcgagaggtctgcgtggtcaggatgctgcaagagaaagactggaggcccctcgctctagataggtcccagggagctgatgtcatttgagctgtgccttgatggatgagcaggagtctccaggcagagggggcaagaagcaccgttcaggcagggggttggtttgcaagaagcaccaccatttaggcagggggttggtttagggcttcccagagagggacaatctagtggctggagagtagagtgcgctgcgggacagggctggagagttagattaagacccgggaatggcccctcacacaaaagacaaagtctttccttcctcagcttccagagagtcctggtaccaggaatcatgtttcctgcaggtcacagcatttcatcccatcnctgccctcggggctgagatttgctcagtgagtggtcctttgcaggatgacttttctgagaacacttctctaggaaagagtgacctttggttctgcatcatttttcttctggagttgggatctgaaggattgggcctgccagaggaagcttctggccttggtgantttcctgggccaggatccttaaatcatctccttcaaatggtggcaatgtgg

SEQ ID NO: 449191 - DNA, 676 bp, Homo Sapiens
  misc_feature (67)..(75): n is a, c, g, or t
ctcatttacaggtttcatattttgtttgataagaattctgaccttaaaaagttataaaattagtgannnnnnnnngctacttattaatccaaaagaatacaagcatttgagtcccagagaatgtcaaaatgccttgctacctaaaaggacattaatataacagaaatatcatcaaagtcatgacattggaaatattgcagcttttcacagtcattagaaatgcttatttcctgaagttcctttgattgtatcctggattcaacaatgtgcaattgtatatatagaaccattatgataaagccaatgaaaacaacattatacaacatttcaccaagaatgtccactcaataggttcttaatggttctgtccagtttacagcaatactgcgtttaaaaaggctttttatcctcttgtggctgggtggaactgagtcttttttggtgaaatgtacacagtagttctgttcccccagttacatgaaagatgttatttatggtgtggaggaagcatgatattttacaaatgcgattgccgccagctccttacagaactcttctaacacaatcacaccctctagcagtgtgatgtggtcaatactggtaaggaaaaaacagccaattaagcaatcaagatagcagcccctcgtgtttgacgccacccaggcctcgctaccta

SEQ ID NO: 449192 - DNA, 550 bp, Homo Sapiens
ttttttttgtatcacagtgtttagcagcctgctatatggtaaatgtcagtaaatgttccacaaactgaatggaattgagctctggaatctagaccatcttttccatacccatcactcctgtcttagttgaagtccttatttcccatttgaagcaatgcaaaggatttcctaactctaatctctcttttcttcacaccatcctttaaacagccgacagaatggtcatcctaaagcacatatatcctatcttacatatcctagattcggaacctctctgggcttctcaccatataagaagaaattctaacctccttagcaaggtgcataggtcttcaatgggctccacctcacttctctatatatacctatactcttgctacactaaacttctttcttactgttgctggaacaagttcaacgctttcaaacctccctgactttgcatatgcagttcattctgtcaggaatgcccttctctcttatgcctgggatattctcattcattccatatgacctatttcataagtcactccttaatgaagcctttctt

SEQ ID NO: 449193 - DNA, 934 bp, Homo Sapiens
ccgtgcctgccctacctacgctaccacaatcaatcaccctattacttaaactgttttcatgccgagaaatattagtgtaaagtttaatgatgcacaacaactctgctttctcttatgctttccttcactgtgcttcatgataacctaaataattttacagactttcaaaacaaccaagatacaagatatcccaccactgtttgtacattaaggtctaactacttcatctggtactcaaatgaagaatctgttatctgtcccatgctgtaggacatattgactattatgaatttgatgagagaccattttaatagttaattttaactatgcttgctttttatcttttagacatactacagaacttaactctcacaaaagatgcaactgttctgtaattcaacaaacatgtcttgaacacttccatgcagaaggaactgctagcagctacactatatattgtacattttaaactggcaatttaattcatctcccttttcccatgatgttaggtctgaatatgggaaacagcaagagatcacaataagctactgtactttatgagtcctaataacaaagatcagaatgcaccctcacccagagtgggactgctaatagaggtctttaagagatgctaccccattggcaggggtagtcaaaaagaaggaggaagcagggacttatctgtcttaggaggatgtgagtatttctccctaatatctgcagcctgacattatatttcagaaactcagatcccatatcaaatgtacctgtttttgttaagagtttcattcagaacaaggtcttcgtagcgctgccgggcaaagttgcctccgaaacccagaaaagttgtgacataaaccctgtacacgtgttcagtgtgttgcacataacagcccaggttgaactcagccagcaggatctgggcggcttcttc

SEQ ID NO: 449194 - DNA, 615 bp, Homo Sapiens
tttactactaatccttgcagaattcagtactgtacacaggaaattactgtcttctgtgaagacttagtaaataaaatgtgcagaaactgcgtccgttttcctagcagcaatttggctattcctaatcactttgtaaagactatcttatcccaaggacatctgactcccctacctctttatgtctgcccagtgtattgggcatatgactatgctttgagagtgtatcctgtgcccgatctacttgtcattgcagacaaatatgatcctttcactacgacaaataccgaatgcctctgcataaaccctggctcttttccaagaagtggattttcattcaaagttttttatccttctaataagacagtagaagatagcaaacttcaaggcttttgagattcttaaagatcatctgaagaaaattcatcagttttctgcttaactctatatcttatgtgatttctgatattacaataaaattatggtaaactttaggatgttctgcttaaatttgtattttgtgaaattttgatactaagtgataaatatgatggtatacttgagaaagttttctaggaaaaatattttctgcatagtcttttaagaaaaatatatggg

SEQ ID NO: 449195 - DNA, 508 bp, Homo Sapiens
tttttttcttaaataggcttctgggcttttattcaaaacaacactggtggtggctgccgcttggtttctctacacccgggccatgggccagcaggtaccagcgccatcagcaactaggagggaagttcattcacaccatagaaactgtacagcgactgagagtgctagagtcacggcggcggcccaggccgagggctttctggaggaggtggcctctgcctcctcagtaggctgcagcttggcccaggctctgccaggaacactgattattgcacaaagacaaaaaagagtatgtgtatctgggctaaagagcagcttctaagaccccaagcccttacacaacgcagcaaacggggctggggttggccctggaagcggaaggctctgagctgaggatttgggggaagacagcagacgggctttacacactttgtcctcctttaaggggctgcctggtgccggagaaggtagagcagggggagaggaacaggattttggccagactttg

SEQ ID NO: 449196 - DNA, 432 bp, Homo Sapiens
gcccttcagggattgcgtgaaacaaacaactgttcagtgaaactaacctgaaattacacgtctactttctttccccggctggcgctgagatgggcaggtgctggagcagccccgctggaagcgatgcagcatccaggaagacggaggaaggggcggagagggacctctgctttccaggctgcccttttatactgcctctggtcacctgacatggaacgtaccctaacctaatcagttacctgtaccttaattgcaattaacttaatccaattacatgacctggaaaggtctatctgcacagcccactctaagatcatgtccactgctgacagacattctaaaacctacttgtacagctgcaagctttgaagaatagatgttccccgtcagacatgtaacactggtgcctgtacccctgtcttcttttccatc

SEQ ID NO: 449197 - DNA, 1521 bp, Homo Sapiens
  misc_feature (160)..(180): n is a, c, g, or t
  misc_feature (229)..(241): n is a, c, g, or t
  misc_feature (324)..(334): n is a, c, g, or t
  misc_feature (420)..(433): n is a, c, g, or t
  misc_feature (468)..(481): n is a, c, g, or t
  misc_feature (497)..(670): n is a, c, g, or t
ccccatgcgggggatcggggggtatgtggttcgcgccgccgggaaagtgaatgtgtttttcatccccctcctttgttttagggtggcttccccccccttgtcagggagaaaggggggttagtaaattttaaaccacacacaatcctttctaagatagtannnnnnnnnnnnnnnnnnnnngaagaatctttataattattaggccgccccgggatatgacacccctctnnnnnnnnnnnnngagaagaagaatggccttggaaaaacccccgatgggggtgtgttgtgagaaaaaaggtgtggtgtttcttcccgcccgggtcnnnnnnnnnnngtgggggagaagagacactactttgtttagtgccacggtttgttttttgtggagaaacaagattgcctcgtgatctaccccttttnnnnnnnnnnnnnnccccaacaaaaagtgttagagaaaatttttttgtnnnnnnnnnnnnnncgcacgggtgtgttgnnnnnnnnnnnnnnnnnnnnnnnnnnnnnnnnnnnnnnnnnnnnnnnnnnnnnnnnnnnnnnnnnnnnnnnnnnnnnnnnnnnnnnnnnnnnnnnnnnnnnnnnnnnnnnnnnnnnnnnnnnnnnnnnnnnnnnnnnnnnnnnnnnnnnnnnnnnnnnnnnnnnnnnnnnnnnnccataatcagatttattttcctctaataagacagtttagcatctccgagttttgcattctacagtcttacaaactttagttattagcatcagaaacacaaaaacattgcaagacctcaaaacacaaataaataccaaataaaaccacacataatatacaataaacaaaactagaaaacagtaatgctatcagggaagtcaggcatgttgctaactcacagtaacaacatgattattgctgggcaataactcacggtctttttgttttttcttagaagagcggaaaacaggacccaaatcactggtcacaaaatcacttggactgtcaagatgtgtcttcacagcaagcggctactacagacgcaacttttaaaacaggcagattaaaaagacagggtcaaatgagagattggccttctttggtctttgtttttgggtaacagaaccgaacagaggcaccggcagagaagaggctgcgaatctgcagatgctgtgcagcgtcgacactgccctccacacttcacagaccttctcctacaggcatttcttacagaaatcaccggacatcatgccagcttgtgtgttttccaattaagtcattgaatttgctgttggagggtatcttacttgtctgaggggactaagttgtcaaatccagtcatcacctaattacaggagcggtacagcgatcctggacttctagcctcttttcacggtgagagttcacaagacagactagacacagtgctgcaggagaaatgaaacgcaggctctgcttggccaccggggcctcctcacccgcacacctgccagccccgagacggccgaggcttcacacgtctgtcctgccac

SEQ ID NO: 449198 - DNA, 601 bp, Homo Sapiens
tcttctcccctgacaggaaaaaaaacaaagagaatttgaagaatacgtcagagacaaatacattacaaccaaaattgacttcaaggcacttttgaaggagatcaaatttataacaaaataatttagtgaaagtgaaagcttgtggaagatgttggaatcatccatcctgaaaattgaagtcttctgtttatcaacagaacagctaagaagctaatctaagaatgaccagcacctgaaagatgtagacaacattttgcagaatgataaatggtatccagtactggactgtgtctgagaggcatcaactgaatgtggatgttaatgacctggactgtcagggtccacctctacctcccagagcctcagagcccacaagacaaaataattctgaatactgttccatgggggtaatctactaattcaaaatgcctgcctgtgccaattttcaggtttttatgtagataagtattagttaacctgttgcaaaatgatctgacaaacagaagcatttgtgacgtttctgaacagagaacactttggaaatattttttgtgtgacatgattgatagatacatgctatatctagtaaatcatgtcacac

SEQ ID NO: 449199 - DNA, 493 bp, Homo Sapiens
  misc_feature (20)..(20): n is a, c, g, or t
  misc_feature (31)..(31): n is a, c, g, or t
  misc_feature (87)..(141): n is a, c, g, or t
aggtcccatggaaagaaagnaagggtcagtnacgcacagcccagccccctcgccacagaccaccgcgggcccctgcttcgtcttccnnnnnnnnnnnnnnnnnnnnnnnnnnnnnnnnnnnnnnnnnnnnnnnnnnnnnnnctggcggcctcccaccctccccaagaagggggagggaagctacacttggaggctgaccttgtgaatatcaaaagggagccctgggaacttcctcgcaggaggctgccagtggcctaattgtttacagtataatgaatgcatttgtttccttcatcaattttaaatacaagcagaataaaaatcacatttttctcaggcaacagtagcagttcagtaggtaagtggcttgatcacatttgtttgtattagtaacgcatgcaagcagctctagtactcggtccctcgcgcagccacccagctccgcttacaaggtccctgcataggtgccctccggcctccgggccgcggccgc

SEQ ID NO: 449200 - DNA, 1013 bp, Homo Sapiens
  misc_feature (748)..(830): n is a, c, g, or t
  misc_feature (886)..(902): n is a, c, g, or t
tttttcccatttcctagagctggaataaaatatccatgttttatgggacttgagcttggctttgtcccttggttttgttaatgttaattcctcttaaatatctaaaaacatctctacctatttgagagggccatatgctacacaggcttcctaatactgcttagcaatccttctactggttcctaagtggtttactattgtgttccctggaagaggtattacaaacgttttattcttctcaagcctcttagaactgtcaaagttgactgtgcctcctatttcatagagaaaaaactaaattattagatatgaccattcccaaaacttcttcccatctaccttcaagacttacctcttttcagccatgcatcccccttttctaagacatgcttctctttgtgttcttgacctcattccttcccatctaagaccatattccaccctgtttaatttctagtcttcggtttctctttttactagtttctttcctccacctctacatagctgcaggtcttctctgtcttaaatcaacaataacaaaacaagacaaaaacctttccttaacttggcctcttcccttgaactattttttctctctccttcctataattgttatacttctttaaaaagtaattgttactttttgacaaaagtaaatattgtcccttttttccctactttcaagtcctctctgtcttgtgacattctggccctcatacctgcttaattttttttgagatggggtctnnnnnnnnnnnnnnnnnnnnnnnnnnnnnnnnnnnnnnnnnnnnnnnnnnnnnnnnnnnnnnnnnnnnnnnnnnnnnnnnnnntctcaccctccccaagtagcctggggctatagggcacccgccccccatgcccaaannnnnnnnnnnnnnnnnggaaaggacaaggtttttcccccatggttgtcccaggccttggtcttccaaactccctgaagcttcaagccatttggtccgaaaataaaccctaacccacaaggggttggg

SEQ ID NO: 449201 - DNA, 454 bp, Homo Sapiens
  misc_feature (199)..(199): n is a, c, g, or t
tcaggtggaaggattttgcattctcccaagagagattcagtgagccaagtcaggacccaagttctcagtcaagggtaagatgctgtagccgagagttccccaacccccgccctgtccgacgtctcggcaagaggcagcacttcctgcacccggctctgccaatgcactgggcgctggggtgtggggtttgggtcccccncttctcccgccggaagggtgttttagggaactgtgggcctcttcccactttggcagctccgtttaaggctcccagggactgcttggctgctccacagtgacggtcactctgaggtggagcctgtgtatcctggatggaggcagggccggacactgtgacaggtcctctgggcccatctccagctgaacaggaaagtccatggcccacccaagacaggtgggctggtgtcttctctctcctgggcgctgtggagct

SEQ ID NO: 449202 - DNA, 507 bp, Homo Sapiens
  misc_feature (258)..(298): n is a, c, g, or t
aggataattaaaactactttgaattttttatttatcaatctggtttctaatataattttagttaaatgaaagacattcacaaagaatattaggcatacgtacataatttccttctttcattctagtttacatgctgttgcttttagagagtgaaattttgtgttatttcacaggggatggaatcctgtttgactttacagaaagaatatttagcccagcttttcacagcactaacctctgcagtcaccacgctcactnnnnnnnnnnnnnnnnnnnnnnnnnnnnnnnnnnnnnnnnntctagaactgtttcttggcctacttgagaggaacttccatattttcacagccatctccgaaagcagcagttgctgtaaattaactgagacttggaaatggtgcagactgtcttggtagagctgttcttatagcacaattttatctggaaaataaacttgtaaatgcgtgctgtatattaatacatgtgtgcccatatttatttttatta

SEQ ID NO: 449203 - DNA, 252 bp, Homo Sapiens
gaaggtattctgaaacccagacactttatttaaaattatgacaaacattaatgactgtcaaaattgctgacaaaggtacaatgactaagcaatttcatgtttctatgtgctggtacttaattagcattttctaataattaggctaatgatgttttattactacaacctatatttagagttcactctcattgttcccatattagaaataaaagcaaatgaaaatgagtttaatcaggcatcacatgctacagg

SEQ ID NO: 449204 - DNA, 565 bp, Homo Sapiens
  misc_feature (35)..(35): n is a, c, g, or t
  misc_feature (93)..(175): n is a, c, g, or t
tagctagctggtccataggctgggagtgctagctntaaaaattatttatttgcttatttttgagacagagtcttggtggggggaatatacatnnnnnnnnnnnnnnnnnnnnnnnnnnnnnnnnnnnnnnnnnnnnnnnnnnnnnnnnnnnnnnnnnnnnnnnnnnnnnnnnnnntacttgaatgtgtattgctcttgttctgtccaaaagacctaccaagttactcttctgccaaaaacaaactagagtgtctggttttccttcaatttatccatactatgaacatctaagggccacatcaggatcttttttcatctttgcacccctacattagtggtcgacatacagtaaatgttcaataagtatttgctgagttgatctaaatgtatgcctatgtgagacccactggataataaggccaggctacggatgatggatttttgcatggtctgtaaatacatgcacaataagcaaacaaatctaggctctcaattgtaatacaatattaaaaaacacaaaagaatattcaagacaaaagctctatcattattttataccaagaga

SEQ ID NO: 449205 - DNA, 1245 bp, Homo Sapiens
  misc_feature (1072)..(1082): n is a, c, g, or t
tcggggtggcggggagtggggacatgagtggtctgcctgtcgtggggccgggaaggggagggagtcaggcacaagtggcctctttgtttggtcttaaaggcatccatttctgggaatgaagccatgttcgctgctaacacttttggatgttgtgaggccacgtggagtgtgtgagagactaggttttatggatggtctggttcaggtaccaggtctgctggaaggttcctgttcggataagctggtagctacctagctctgagcctgccttcaagaacacctgtgttcatcctctgattctctgtgtgtacctcttgtggcgtttcctctcccgggtgtgaacatcctaaccgttattgtgcaaacccaagaacgtcagatcccaaagcacaacaacctggatggactttgggaacatctaagcaatgtaagagagaggtgcactgagagtacgtcttggtcccctccaccctgagagcatctgacggtcctcagtactgaactcccggaagctgctctgagcccggtgacctcatctgggccaggtgtggtgcctgagctgaatgctcaggtgcttacagtgttgcaatccctaagagagtagagtctggaggagaaaccgtgaaaaagaccttacacaccaccaagaacttccgaatgggcgtgaatccaccgtttcttctctttgcaaaaagaaccaccacagctgctcaaagaacacagtgaactcatcactttggttcatcaaaaaatcatcgcccatgcgttattcctgagtgcattttcttacaactttttgactgcttccttttcttcttctcttaagagttgtgggcttaagaatgggatagagtcataatggcaacctccaagccctctcaattcttgattaagaacacaggtagacatgaatcccaattgtctattgctatcttatttatatgattcgggaaaatacagcatgtaaaaatattgctgaggagcctcagtgattgggtacaagaagcaagagtacagaaattatttttgccaaatttattttgtaaatatgagggtctgtacctaaattttnnnnnnnnnnncacgtagaactaggtattttgttctcttcttagtaaatttgtagtggttgtatactacactagctgcaattttcacatttttctaattcagaaaggtttttcttatattaggggaaaaagtatttattttaatatataaaatcactctgaaaatcactctcat

SEQ ID NO: 449206 - DNA, 754 bp, Homo Sapiens
ggtcggtgatcctgtaaagggatcaccatagatgtggacaaatcattaaaattacagagctatatgatccataattgattagtcaaaataacttattgatgaaatatacaaatattttattgtagcacctatttttatatgcacatttagcattcctctttccttcactatttagcctatgattttgcagaggtgtcacactgtattaggatctgcatttctaaaactgacgtggtatcaggaaggcattttcaatcattcaaaatgtggagaatttaatggctaaatctttaaaagccaatgcaacccacccaattgaatctgcattttcttttaagaaaacagagctgattgtatcccaatgtattttaaaaaatagggcaattgattgggccattccgagagaattgtttgcaagttttgggttttattagaaaatatttgaaagtatttttattaatgaaccaaaatgacatgttcatttgactactattgtagccgattttcgattgtttaaccaaacccagttgcatttgtacagatccacgtgtactggcacctcagaagaccaaatcatggactgtacaagtctctatacaatgtctttatccctgtgggcagcaagcaatgatgataatgacaaacaggatatctgtaagatggggctactgttgttacagtctcatatgtatcccagcacatgtaattttttaaatagtttctgaataaacacttgataactatgtcaaaaaaa

SEQ ID NO: 449207 - DNA, 1021 bp, Homo Sapiens
  misc_feature (770)..(825): n is a, c, g, or t
agacaactttctttaaaaggaaggcccttaaattttccgggtgggaaaggtttaacctcaaaaagtcaaacaattcagggcctcaggagtttttggtgaggtttgcaccctttcaggtgaaacattcacaaaaggggttttcggtctttccttcccggcccccaactttaagtgagcccggagaatggctagagtgggcttggcgtgggagtttcccttccccccagtcaagttaggcgctgataaagccgcggtggggttaggggaggcgacctcgtaagaaagagcagagtgcggcagtctctttcaaaatggtctttttcttcttcccactgcaggaggcacgaggggattttttctccattattcactgtgagaactcggggaagctcccagaaggtgaagggagaggggacaacgacatggttccccgtggatctttaacttccagacttgcccgctctgcgcctccggcactctggtgatgacagctcaggtttccctgcctgtcactgctcgggcagaggctgctgcccagggcttctgctccggtaccttgtgaagctgcattctcctgccggtttctccagttctggggacagtggtttgctctgagacctcgcttcctttatggatccaaggagacttgctttttcagtctgttcagctttttacttgctaggatggaattgcaatttgcaagcttcttcgacaggaaactacaagttccacactttaattttatacatataaatatatacatgtgtacnnnnnnnnnnnnnnnnnnnnnnnnnnnnnnnnnnnnnnnnnnnnnnnnnnnnnnnntgatgatatgtattactgagaacgtaaaatatcattacatagtgatagctggacacacaaggaattcacaactccccaaagaaaatacatctggatgacctgcctagcagtttccccatgagatagaggaatgtctacgtatttcattccctgttcctgccctgaaacaatttttcactgacaaatcattatcatt

SEQ ID NO: 449208 - DNA, 1351 bp, Homo Sapiens
  misc_feature (101)..(109): n is a, c, g, or t
agggggttttcaaaaatgggttttacataaaaaaagagggtttttcttgttttcccctttgctttttcccaaaaagagagaaatcccaagattttcaccannnnnnnnnattctttttgcgggaagggttcctctaggaggtttttcaaggccccatggaactctctggggaaggaagcggacccaatgtccagaccaagaaggagctttgaaaatttggggataaggtttctttctgggttgggggcggcctcttgtcctctcgaatctaatttcctttggttggataagaaaacgggccctttagaaccctcccttttctcgttttgggaaggcttgcctcaagtggggggctgccttttcaagtcccttttctttttgggagttttaaattctggcttatttttccaatgtctggttgaaaaggttttctctcatggatgacttatctactgctttgtaacgtggatcactttgtactttgtcttttactttgctccatggagactgactgtccaagtgatgattagataatagttcaaagaaatccgatttaatcttctcacctgtggtcttggaatcttctttctctttcttcctagcagcggccacaaactcattaaacaaggcttctcggtctttcatcttttcaattgctttgaatcttgaatctttagcatgcttggctgcaaattcactaaaagttgctcttggattaaattttgcttcttccatcatttttttgaaatcttccttggcttgcattattttatttttcttttccctgcgttcttcctctgccctggtctttacatactgatcaaacacctgttttctctctttaggattgagaagtaagtaccggggatcaaaaactatcttgtgcaactccttctcccacgttgaaaaagcagacacccctctctctagcagcatgtccttgaactgcttcattcgagcctccagagggacaatggccctttctcgggcagctttaatttcagcttccatggcagcttctttctctgagtcaatgtctttattatcgtctctcctataaaaaataaaatataagacatcaactgacaaaatattaattctcagatcttattagaaatcttaaaatcaaaggaattttcaagactcactactgagcagcatatttttggcaaaaacaaattatattgagggtttcaaatgaactctaagggataaataactttcataataacaaaattaaaatgggcttctaatgatttacaatggctacattattaggaaaaaaatacacctttaatgggctgtctctccctgacactggttaataacataaaaagggagcaaccttact

SEQ ID NO: 449209 - DNA, 510 bp, Homo Sapiens
  misc_feature (471)..(471): n is a, c, g, or t
tttcactgcaacctttacttatgtttattactgtacctaataaacagcccagcgtcggtgattcctattcacttagtagcctccccatctagaatatactccgtgatctttcttgatggccagactgtgtaaaattcatacagtgtttactacagggatccccaaatattgttagttcgaatgaacaaacacacatttcaaggagggcactacagtgagtagatgaacagttttctgataggagattgtacaagtaatgttttcaccagtgtattttaggacagcagattcagattaatgcgctgggactgaatgcaaatagtaaaattacaaatataaagtaaaaatttggaacctttgccaaagaaaggaataataaattgatttaataatttgaaagaactgtaaggtttaggttttgttcttatttttagtggcgactgagattggagtctgtttgtagacatatcntgaaaaaagtgaagggggagatggaagatggtaaatgcc

SEQ ID NO: 449210 - DNA, 435 bp, Homo Sapiens
tggtcccagggagagacggtgcctccaaaacacatcaacaggtatcccatggcaacaaggcatatccatatcaccaacgagaagaggcgcagcagcttcttaaacacagactcgatgcagaccaggataaatatcgcaaagaaaatcgccagggcagttggaactgttattagacagcgccacatggtcttcaacttccaggcccgagcgcgaagaagacggcgagcagggcgaggcaggagcccatgacgatgagcagcaggaagacgatgagcgggtgctgctggctcatgcagtagtaggactcgtagagccagtcccgggaccgcggcagcccgtctccgccgcccgccgcctcctcggagcggtcccgcaggtagcggcggcgccgcatcgcctcctgccacatcggggccgctcacagggcgcccgccg

SEQ ID NO: 449211 - DNA, 802 bp, Homo Sapiens
  misc_feature (594)..(594): n is a, c, g, or t
gcgggtatgaaggctttgcaagctcccagcaaggcacctggccctgagcaggggagagttacatataggatcagctgggcccggcagccggggaccgtgctggggtaacctgtgaagcgcagatctataaaccatacagtgattgacacagctacttcctgagagcatcaatttattttgacgagtaatttcaaaatgttacttttgaaaagataatgctatttttgtactagaatggaacacaagaatttgactgcaaaattcacctgttcaaaataaatgagacatgtaatttcttacaaaccccaaaactcggggggtcctagggtgggggtagttttctgcagggcgatgacatatcctgcagcgaagtctcagaaaccctgctctgggcagtccatctatttgtccactcatgttcttagacacatcccaggggctggccctgagctactgggatgactggaggagcatccagggctgggggaggggagtgactcccacacagcaggtacccggaggtaggaggctggatccacggaaggttctgatgtcagcactgtctgtaccacaagatggctttactgaaatgcngagtgcaggagcttaatcatggcgcatgtggaaaccagccatgggctctcaggcccactcctgccctgccctggcccctctgtgatgggagaaccaggacaagaaggggctggatcaggtgactggtcacacaacctggggtcctttcacctttctgggggtccctgaaggtaggaatggagtctgtgaactggtgtcagtatttctc

SEQ ID NO: 449212 - DNA, 545 bp, Homo Sapiens
ttcttttaatttttattcagtctgtgtcaagaagaaacaggacttgatcaagcttccagccctcaccactctatcagcatagcaattttaaggatcagagctttgtttacatttgtctaaaaccaagagaaggaaaggaatcaactccacagatcaacatgtatttgaagagacacttcaggacactttgggaaattttttaatcaatcagtttcttaggaacaacacccagtgggcatgatgagaccctcaaagtaggaatgcaggaatgataggcaggtgaggtggctgagctatctgggctgggaggccagcctcctggaatcttaggacaaataaaagggggaaaaatccaacctcacacttcttttgaaggtcggatatgtttacagaaacaatttctgttttggaaaataaatgtatggttcaatttggggctgggggaacaatgacaattgtcaactagagagaggctcatgattctgagataaatgttaagtggagtctttttaaaatgctgagacaaaacattaccttggttactg

SEQ ID NO: 449213 - DNA, 535 bp, Homo Sapiens
ggagtggggtaggcagttgcatgtgtgtctctgtgtctcccctctatgccagctgcagacatcaccaatgaattgggctactcttcgccgtggaccctggatgcagccagtaccaaccagtccaagcttacatgcacaggaggacactagttcaccgtctttgtttttgagtaactcaaattcttgcacatacctcagcttctttttggaaaatccaaatatgactttcctgtatgacaagatgctatagggcatttctcctttagcgaaccaaagaagtcttccctggctttctaaaggcgatcacttaacgtttacctgccctcattccttttctatcgacaaaccttgtatttcagcacaaactgtaattctcctctccacagtaagttattggtgtctcgggaactcgacagacccagtcaacattaaaattgctcctagattggcttttagctctgcttcctaacttgattccgatctggattacaccaggcctggaactctccatgatttattctcaaccagcaatcaa

SEQ ID NO: 449214 - DNA, 209 bp, Homo Sapiens
ttattagacagtctacatactttattgaaagtcacatgaatgagccccaggatctcgtttgttttattatttggatatagcatatgtctttcacacaggcaatctttctagccctctactaatgtccttggcatcaagtgcttcatttcccccaggaaaatgaaggcttttctttatcgaaaacttatctttaaggtatcttgtccttc

SEQ ID NO: 449215 - DNA, 468 bp, Homo Sapiens
  misc_feature (394)..(394): n is a, c, g, or t
  misc_feature (415)..(415): n is a, c, g, or t
  misc_feature (425)..(425): n is a, c, g, or t
caaattattttggctcagttctttattttatagttagcaaatgaaattagaaactgctttggcacaggtcaaaggtggctcccatatactcactagttttcctcaggattatcaatactcattatcaaaatgtacttttgcttggttaccatttaaagttgccaccaatgtaaatgacaggggttagggtgggtatgggtgtggggaacctgagcatacacacaattttttaaatcttttagatgtaatgcaattaaccatatctaatattcttttagaaaacacaagaaacacaaaacatgctcaaaggtcaaggaaatcgagttatacttttcataagggcaccacccatttacccctggataaattgttaaataaatatggtagggggggntaatccaatagggggggcttnaggggttttnccaaggccattccccgttttagggcccccttgggggggtcctt

SEQ ID NO: 449216 - DNA, 201 bp, Homo Sapiens
accaagctattggtttattcagctgccaagctggggaaaggcttcctttcgaagtgaatagcaaaaatgcattcatgagcaaggcacttttatacacacacagagagaaaaaggaacgtattatgaacacatgaacataaacatattttaatattcagacctcttccctacctcctcccacctccacttaaacaaacaaac

SEQ ID NO: 449217 - DNA, 435 bp, Homo Sapiens
attggtcatactacatttcactttattattattaacatttatcatacacggttactattccaatctttcatgcagacaaaaataaacaatataaaatacataatgcactttgataattttaaccatacataaaatatggagtaatggaagctatgttacatgggatattttacaaaggaaaaaaagatgacttttataataacacatcccggtgaaatttatcattaaattttgggtttcatatgatgttaagtatggatatattcaaaacaattactatttatagaaccaatttgatattttgtcatttaaaataatgaatactatgtaaatgagtacttataaaaatatttttaggcaaaaagctctgttctactcatttacttgccagttacaaaaatatatattcatctgaaactctaataaatttgcttg

SEQ ID NO: 449218 - DNA, 485 bp, Homo Sapiens
  misc_feature (161)..(161): n is a, c, g, or t
  misc_feature (437)..(437): n is a, c, g, or t
ttgttttgttttgaaagaataactaggtaatatatgaaactagtttcacactctctggttggtaaaagagatgctgggtgagctacagtaaaggcagccttttaccaagttaccacctattaccgtcaaaagccttcaatagaaagcaaagctccaggatncattctgtttctgctcagtatcagacagataaccttaccctcaaagattctgggttctgagagaacaaactggcccaggatgctaacttctgcttcaagtgaatctgggccgtgtggggcaacaagcacttgtttgcagtctatattttccaccacttggactcactagcatccctcggtaaagacaaggctagggtagtaggtaaagcacaatgttttacaatgaaagggcgcttcactggtcagcgcaggaaataagtacaggagcctgcggcngtttgttttggctgtccatcatgggtgagcggagttgacctctgacct

SEQ ID NO: 449219 - DNA, 467 bp, Homo Sapiens
  misc_feature (42)..(42): n is a, c, g, or t
  misc_feature (49)..(75): n is a, c, g, or t
acacacacattccagggacttttaacaagatgtggtataaantcttttnnnnnnnnnnnnnnnnnnnnnnnnnnntctgtatttaacttccctaagagctggtggattaactggctgaacaggactgcccaggaaaaacaaatgcacagataatgaggtgcgccgacactgttcatgagtaaggaataaccatggatcatgctaactgctctacgtgccccgccgcctggaccctactgttgcctccttagcgacaaaccaccacagtcatcccctaattctccaactcagtagcttgtttaatgggctacctcttaaaattttcatttttaatttaaaaattactcttggcttaaagacgccacacattattactggccagtccccaccaattatatttgttttgataaaaataaaaatgcaaatactccaactaagcctggatgataacacgcattttgtatctt

SEQ ID NO: 449220 - DNA, 708 bp, Homo Sapiens
  misc_feature (70)..(70): n is a, c, g, or t
  misc_feature (78)..(78): n is a, c, g, or t
  misc_feature (86)..(86): n is a, c, g, or t
aattatattatcattttattacacttttttttaaacccagagacggggcttgttatgttcacaggctggnctttaacntcctgggnccaagcaaatcctccaccctctgcctccaaagtgctgggattataggtgcaagtcaccacgcccggcctattttattccacttcggagaccgccccccttgtccctcagatgcatccaaatcaggagttagggatcatactccactgtggtcctgaattatagaataatgaagtcctagatgtcagcggcccctggctgcatgatagtaagagtatggctgagcctgtcttgcagatcatccagtacctgtacaggccaggctacactgttctccagcactctctgtagccaagtgccagtaatcacagactaggctacctctgctgggccagaaatagctgcctgaaccaggagctcacagcaccatccactctcatcaccaaagctatgcccaggagaagtcccacgctgctcacaatgaagcccacagcctcaaatatgaacttaggggcaaacactttccagaccatgagatgcctgcgaaagatggaggctgccaaggcacaggccagaatctgaataccaaggataaagaggtacttgaggcccagctgcagcagtgctgcatagaagtgctgaggcgcatcccggagccgcatctccatcagtggctcctcttcc

SEQ ID NO: 449221 - DNA, 755 bp, Homo Sapiens
gggcaagattttgcacgatgaaggcaatgattgtaacttttctccttctcattgtttctaattagctcctttaaagcttgcatctttgtgaaggctaactgaagatacggttggaaaggaaaaatgagacacaggtttggggaccaaggacccatcaatgatggtgactttagcagaagatgcccacagttattactgccattaatcagatttatgaattttctttggggatcactatagggaatattgtatagaaaatatcttcaagaaaagataggaccatcagtgacagttaagtgtaaggagcaagtggaattgagtccttcagggaaggaaccacagagtcccttcccaaggaatgtaggtcgtttctgtgttctttcccttctaatctttaagatcaactcttcctatcctgctaactctaagatttgataagggccacatcccagtgtttatcttagcttgcatcagggcatgtgtatgtacagtaatgtgtattcctgtggtttttctaatagaaactgaatttacagagacttagcatgttcttgggtgatgtgagtcatgtgacagaagtacagacataactccaatgtgagaaatgtccttttttcattatggaaaataatttaaacactagtgctttagtgtgcactctcctgtaaggtctgtctttgtacagagctaagcacttgtttgtatgtgtttgtcaattgtggaagataatgaccagacaaataggtcgattgtcc

SEQ ID NO: 449222 - DNA, 969 bp, Homo Sapiens
  misc_feature (230)..(230): n is a, c, g, or t
ggctttgcttggttttattgaagttacacacataggaagaggctggagcacacaggcacagctcagggcagacccacaaaaccaggggcaagagacaggaggggctgagctgctggcgggggcggggtctcaaaggtgaggcggggtctctgaggcggggggcggggtctcggagaaaggggtctcggaggtggaggcggggtctccggaggcgggggcgggcatctcanaaggcggggttggggggtgtctcagagggcgaggcggggtcccagaggcgaagggttgcctgaacttcggggcgtcacacttgctgcgggtagatcccggggttcagccgacacatgcacatcagccagaagacgcacacggtcatggacacccagatccagaagtcctcgtagggctcggcgtgcggcctacggcaggcacggccagggcgctcgtcttcctcccggcggcacccacagcgggccttgtggaacctggacctcagctgcctcttctggtaatagccttgggagaagcagccattgccctgggggccgtaggcaacgtggccaccgcccttgcgctttatgacatcgaagactgcgaaggggatggtgatgcagccctcactaaccgtgatggggccctcggcattggcctccagaggggcgtcgtgacccgcggtgaccaggccaccttccttctctttgccttcagtgatgtcagtaaaggcatctttgccttggacatcagcagggaaggggagggcaagggagcccttgacctgggaggggaggccaccagcattggtctctggcagggcgtcgtgacccactgggacgaggccctggccgcctccttccttctcgttgccttcagccacctcagcaacggcatccttgacatcagtaaagatgaaggggaaggtgatggaggcctctttagtggccacaggcctcgtgccgaattcgccaccca

SEQ ID NO: 449223 - DNA, 968 bp, Homo Sapiens
  misc_feature (42)..(42): n is a, c, g, or t
  misc_feature (91)..(91): n is a, c, g, or t
  misc_feature (119)..(119): n is a, c, g, or t
  misc_feature (131)..(131): n is a, c, g, or t
actagcatcttcctttcagattggcaacactggcttcttaangcattggagaatggtcttaaacataacataaaatgtggcgatggctgcntaacaaactttagatcctattcttggtngatgctctaggngggttttctcaaattcaggcaaaacaatatccaactcctggatgtcactggttttcattccttctggacaccaaatgtgcacaatgtcagaagtatctggacctatggctttacttcttgatttcttccttttgtcatgagatatcttcccttttttctgagttttcagattgactttctattgccaagttctctttttcaacagagggctgggcactaaggggtcctgtctttttagaagtgacagactcagctggtttctctgaaagttctgaagacgctgtggttcgaataacctcatgacgttgtgtacttattttctctgctgatttaacttttctccttgtatcactttcttcaatgctttcagagtcatcactaatgggcctgagctttcttcctggcttttttgcactaatttttacagattcgatttcacttgcttcatttccagaagtgtctgaacttctttttgcttcttttcctggaggagttgaagagagagacagtccacaatgtttggagaattcttcttcatcagcatatatagctgtgctatgtaaaggaggatcaaaggtctcataagtttcttcatctttctcattttcacccagcctgccaatgcttgagacatcagaattatcaggaaagtcaaacacgtcaataggcttgcacttttgaccagctttatctttcatggaatgtgttctttctaaagtgttctttgaacgtcttgcgctctcagacctgtgaggccgcggccgccgccgcccccgcggggccatggtgccgctctccgctctcgagcgactggaagctcccgccaagccccccgct

SEQ ID NO: 449224 - DNA, 666 bp, Homo Sapiens
tttttccagtgtataatacaagtttaatcaatttcccttttgtttccgaaactcccacctgagggcatatacaggttcagctagccaaagtgatgctgaccctggtgaccaagtcagtgagcggcacccacccaagtacaaggctcagtccacagtcatgataactatagccttatactcattataaggctatagctccaaggaagctcagtgccaaaggtcaaggtttaaatcagaaaggtgggccaagcctcaccagacaatggctaccgtcctgcccagagacaaagcatttgcagtgacaggtaccactggagggataacagacatgagtaccagggacctgaaccctggggtcacacctgcaggcgaaggcttagggctcttagcttgctaatggaactgcagtgaggtgggtaggtgcgtgtgttatcagggcagtaactgggggcagagccaggaggacatggaggcgggggcccaccctgagtgtcactcacactggcagctctgaggttgggtggagctcaggccatagtgaccaggccagtaggagtcacagtgctgaccccatacacacactttgcagcaacactgcccagagaggaggccatggatctcattaatgtgagcatcacacaaatccccttgcagacacccacaggg

SEQ ID NO: 449225 - DNA, 261 bp, Homo Sapiens
tttcgcatggattccctttattgaactgtactagttactgcagtcagattaagtcacatttaaaagcagaccatccagttgcactgaaaccgattatattcattacatagttttaatcactgtccggtgaactggcaaatccaatcaaagcattagtctttaattaaaaaattaaaaggaaatattcagacaatagccaagcaatcacatcacgatgcacaattacctagaattgcaattaaaaagtagttaaccgagggg

SEQ ID NO: 449226 - DNA, 801 bp, Homo Sapiens
aaaatgcaaaaagcaaaatgtttatgtcaagactagagaaagcctatgaagcaaggagatttactcgaattgctgtggatgaagttcactgctgtagtcagtggggacatgatttcagacctgattataaggcacttggtatcttaaagcggcagttccctaacgcatcactaattgggctgactgcaactgcaacaaatcacgtttggacggatgctcagaaaattttgtgcattgaaaagtgttttacttttacagcttcttttaataggccaaatctatattatgaggttcggcagaagccctcaaacactgaagattttattgaggatattgtaaagctcattaatgggagatacaaagggcaatcaggaatcatatattgtttttctcagaaagactctgaacaagttacggttagtttgcagaatctgggaattcatgcaggtgcttaccatgccaatttggagccagaagataagaccacagttcatagaaaatggtcagccaatgaaattcaggtagtagtggcaactgttgcatttggtatgggaattgaataagccagatgtgaggtttgttatccatcattcaatgagtaaatccatggaaaattattaccaagagagtggacgtgcaggtcgagatgacatgaaagcagactgtattttgtactacggctttggagatatattcagaataagttcaatggtggtgatggaaaatgtgggacagcagaagctttatgagatggtatcatactgtcaaaacataagcaaatgtcgtcgtgtgttgatggct

SEQ ID NO: 449227 - DNA, 752 bp, Homo Sapiens
  misc_feature (478)..(520): n is a, c, g, or t
tttgcaagttgaatatttatttaaaaataaatctcaaaaatatctattgacagtacagtaagaggggcatgtgcaaacaacagaaagggggaagtcagtcctgctgtgggaagcccacacatcagtgtgttggagcaaagttcacgaaggccatgggctgactgagctgtggtgtacgaaatgacattcagctaatactggactcggttcacctttgacacctggagaggtggggaagccagggggtggggagtccagctggggatccttgtgtttaggaagggggcggccaagggatgagcctttgggagaggccccgtgtggcaggagggctcatttcacaagccaacaggcctctagctcgccgctccaggtggatgtttggtgacctgaagggcccttcccagtccaagttggctttgcaatgggaggggtaggtgcagcgagggtcccagagacagaaatcctctttaaaggnnnnnnnnnnnnnnnnnnnnnnnnnnnnnnnnnnnnnnnnnnngaaccaactgaacagggagtggagagattagcaaaatgaatctgaacggaagtggcaccttctcccttgtcagacaacaaagcagccattggttgagatatctgagtcgctaagtgaactcccacgtggacacagccagcccacgatctctgccacctacatggtcaagtgcaggcctccgcctctgagatcaatgcgttagtacttcttcaccgtgaaacccgaaagtcgg

SEQ ID NO: 449228 - DNA, 1450 bp, Homo Sapiens
  misc_feature (143)..(144): n is a, c, g, or t
  misc_feature (152)..(152): n is a, c, g, or t
  misc_feature (169)..(170): n is a, c, g, or t
  misc_feature (210)..(210): n is a, c, g, or t
  misc_feature (1346)..(1382): n is a, c, g, or t
ggggggttccccctttctgtttttggaggaaaggttggttttggcctccggaatggaccatccaaacatttccagttcttgcccagcaccttggggaggataattccagtgaacagaaagcaggtttccccccaggctcccannttcatttntgaggaacctgggaatnncagccgccttttccaaccaggtgccccgccccttgaccanggttcaacttcaccacaaagggcacagaaactttccccaatgacacagtggcgggagaacttatcaaaatccaccacggtcaggagcagggtcctcttctgggcctccaggaaggggatctcgaaggtgtagcgctcctcaaacacgggcttctgggtcttgcgtttgaccccggtctgctttgagttcttctggtctggcaggagacagatcttgacgtaggggttggagtgcgccatgtcctggcgcgagccatcgtgggagatgggaggtggcaggtccctggcctcgatcacgccgcacggtgaggtgtttgtgcagcaaggtcgttactgagttgctgaagtgcagcatgcccagctggtacttggacaggatctcctcgtctgtcagagagtccacatcgtcgctgttggagtcgagggagtacaggtggggttcgaacttcctgaaatagtcgtcggggttataggtccgtctgagcaccgaaggttggatgggctccttcttggcgctgagaacgccaaactcgatgggtttaatatcgatgagtggagagctgggacgtcttgactcaagactcgaaatcctccgcgtcaggctgtatgtagacttggatgtgtctgaggacgagcgtcttccatccggggaattggtccgtggggtcagcgggacttcgctggccgtgtggacagagtcaccatccttgtcactgctccggctggccatcagccagggaggggtctgagcagggaaaggtcccagaatttcaacttcatcctcacttgactggcaacagctggactcgtagcacttctgacagcagtgccggcaggtccatctgcacagcagcagaccagagattctagaaagaaaaccctcgtttaatggttccaacatcctgggaagggagctgacttcctaacatcctaacaaggtgttgctattttcaggtctgctggtagcctcctggttaaccaacaccaaataaatgggaaactttagcatttcgatttgatttgcaccgtatgctgttatgaatcagagcgggcggatagatagtcatgctatccaatgcagccacacttccaggacccgctctcgacgaattcgagctcggccgatttggcctgatnnnnnnnnnnnnnnnnnnnnnnnnnnnnnnnnnnnnncgccgccaccgcgattaagctccggttcgccctatagtgagtctatcagtccagttccgtgtgggttt

SEQ ID NO: 449229 - DNA, 332 bp, Homo Sapiens
  misc_feature (308)..(308): n is a, c, g, or t
  misc_feature (321)..(321): n is a, c, g, or t
ctaaattggggaatatttcttcatatcatttcacattttgtgcaaaaagcaagacgttgttgagagtttaaggacaccacactgtcaaatttgcattattccatgttgcataaaatgagtctgagagcggtttcatcgtgggtcttaacccccaagggacagagatgccagtccccggggattcctggacagctactgagacctcttcccttcctataggatggccagccggagcagtgacaaggatggtgactctgtccacacggccagcgaagtcccgctgaccccacggaccaattccccggatngaagacgctcgtnctcagacacat

SEQ ID NO: 449230 - DNA, 719 bp, Homo Sapiens
tgaacccaacagaaagtggaatgtatggggttttattaaaggtgttttctgctgttctgcctgttatcttccaggagtcatagactatgaattcaaaatcaggactatcttcatcacggatgagttcttcagcttctagcggatttacacccatatgtgtgagtagagtttcaacatatcttaacatgtcaaaggagctcaggtctgagcgcagctgctttgctttctctttgcccaaatctgaagccaaaacaagaaagtgggcatccaggactgcttctcttgctcgggacacttcattaaacagagtgttagcctcttcaaggacctctgttaatttgtcaccggcattcagtatgtcctcacggttttgttggacggagttgatgagcgcccggtactgatggcggatctggcggcacaggccttggtcggcctccgcctccaagctggccgggtccatcatctcgtccccggaatccgacggctctgtgtcctccaggctcgggcgctctggggcctctctgcgctcccgcgcagagccgcggcgggacctgggcgacaaaggggaccgcgagcgggagcgggagcgggtgcgatcccgatgcgggtcgcggccccggccccggccctctggcccgcggccgctgctgtccccagacatagcgccaattcaccgtgcaacttcggaacggcggaagttcgcgccagaaactccc

SEQ ID NO: 449231 - DNA, 420 bp, Homo Sapiens
aaaatttaaaattggagtttatatatacttatttatacatgtgttaagattctcaaatcctatgatatatacacagatgtagacatacacacatataggttatgaggttgagccgtatgttttgttaaatatctagcaaaattaaattgagcttaaactatttaattttgaaaattagtgacattaaattgttgtctttaaattaccactcagttatagtgaagagaatccagcctttgtccaagcttaggagcttactattacttatgtttttatggctagagattaaaattaatttgctggtttttaataaaattttgaataggtacttgaaactggaaaattcatttcttcacaaatggtagaaaacatattgatgtttcataatgaacagaaaccttgagatatttttaaatatgg

SEQ ID NO: 449232 - DNA, 845 bp, Homo Sapiens
  misc_feature (440)..(460): n is a, c, g, or t
attttacaaatccaatatttattttatcttgtatgtacaaaaagtaaactccaagtgaacatccaatcaaatctaatccttttggccacatgactggttgttctttatctcatagttacaatgaatcatataaactgtagactgccactaccacgatacttctgtgacacagaaggaatgtcctatttgcctatctatctgaggaatgttaaatagagaaaaatagattataaaacaacctggaggtcacaggattctgagataatccctctgttaaaaaacatctgaacagcaaatgtccaatctgtaataaaatagttaaaggtccaagtcaagtccacttctacttggctggcccagcacaagaaatctaacagcactttgtaatcattttgcttttctaattttcccggaggacatgggccattgacatataaggnnnnnnnnnnnnnnnnnnnnncgattaagtaagttgtgtgatccctaacctgtgagttcagaggaagattttgcagggcaccattatttccatagaagattcttttaacagagatgtcatttcaaatctaacatagcaatggtgtgtcaggatcacccagaatgaaatgactctgctgatttatggcaaaacagacataccttgggtaaagaaatgaagccaatgataacatcacacatgcaaaaagattttttttaaataaattgagctatatagttttattctttttgctaaactcagttattaaaaggtttcttaagaaacttaacatctttgcgcaactatgtcactcaagtgatttatctacaggtttgttttaaaccgctaagcatcctgagtccatttc

SEQ ID NO: 449233 - DNA, 826 bp, Homo Sapiens
caggaattatgacaagaaagagaagttgttcaatgtgtacgtacagatgtatcttgtttcccccgaattatggtccagttctgagtctgcttgaatcccatggatgtcaaagcccatggataaggaaggacctgacctgtatttttcttaatgttaaaatatattgactgtcttaactacatctaccataagtcatttttcatatcagtttgtattcctggagcacacattaactgatgttgtaggggagtggtccagcagcatgcatcataaggaaaaatcactagggcattgaaaactcttccatgtatcatccctttctacggggtgctgtccaaagaaatctggatgtactgcaaaatagaaaggcctcaaggcattgactgcttcagctcccgataaagctcttgaaaagggaaaccagtgtggaaatatcttctctagacataacctcctcataggtctcaggtggcaaaacatttctgaatatatatgtacgtcaacttcgaggcatccattaattgagttctggcaagggtccgacgcgagggctttgtccgactagttccacctcccacccagtacaccagaagggaggacagtcgctccgcccgcagggctgttcggacgcgcatgcgcactggggcgtcagctggccaaccagcgcgcgacgcacggccaggcgctcccacctgccctcgccccggtgggcgacaggctttgacgggctcctagccgcagtgccctctgagcccccaacctgaacttctcagctgggccctcccggctccacctgcccccaacaccctccccgctccggcgcggc

SEQ ID NO: 449234 - DNA, 800 bp, Homo Sapiens
attaacgggattaaactaggcctgataggtatttcttttcctggaaaatttgggttttaattttaaaaggggaactacactttttattaataaaaaaatttttttgccatccccaataaatcagggtcataaacacaagctgcaaatacagtttagttagataaaaacttttacatacgtgagagtgtttcccactctcgagacttgttcaaggtctttcagtcagggtccttgaatcccagtaaaggagtaataagacttgtcccatttgatgggcctgtcatgcatccttttagcttctttgagaggctgggtatgcatattagtattcaagctttggatatgttcaacagataaacggaagtactaaaaggttcctggccatcggaggaactctggtctgtttctcttacataaaatgtaagctgagttggtttcaaagacttgaagcctggtttctggaggttttctaggtagacacttaaccttttaagagaattttcattgatttccctttctacggggtgctgtccaaagaaatctggatgtactgcaaaatagaaaggcctcaaggcattgactgcttcagctcccgataaagctcttgaaaagggaaaccagtgtggaaatatcttctctagacataacctcctcataggtctcaggtggcaaaacatttctgaatatatatgtacgtcaacttcgaggcatccattaattgagttctggcaagggtccgacgcgagggctttgtccgactagttccacctcccacccagtacaccaggagggaggacccc

SEQ ID NO: 449235 - DNA, 412 bp, Homo Sapiens
tttaccgaagtagtagaacaatgcagacatttattagaagtttgctcctttgaaatattattattacactgaaagttggaaaaaagctaaacatccatcagaggaggttgattacataaattatgaaagatccatattttttaattctatgaagccataaaatgataatactgatatgtatcattgaacccaccactgattgtttgataaaaatttcagataccaagaattacatataaattagaagttggttttgtaatatacagcatagaaatacatacttttctattattaaatatttactgatttctgaatacttacacatgtataagataggtatttagaaagattaaagagggcatacagcacacagacgtttctcattcctatctcccatctcctttcccagaga

SEQ ID NO: 449236 - DNA, 586 bp, Homo Sapiens
  misc_feature (348)..(348): n is a, c, g, or t
cgtgtgctacttcatccagaagtacttccgggtggcgtccaggacctgcagcagctggatgacaccacccagcttccacttctctcacacttggccgaaaccgtagaaggactcaccaccatccgggccttcaggtatgaggcccggttccagcagaagcttctcgaatacacagactccaacaacattgcttccctcttcctcacagctgccaacagatggctggaagtccgaatggagtacatcggtgcatgtgtggtgctcatcgcagcggtgacctccatctccaactccctgcacagggagctctctgctggcctggtgggcctgggccttaccttacgcccntaaatggtctccaactacctcaactggatggtgaggaacctggcagacatggagctccagctgggggctgtgaagcgcatccatgggctcctgaaaaccgaggcagagagctacgaggggctcctggcaccatcgctgatcccaaagaactggccagaccaagggaagatccagatccagaacctgagcgtgcgctacgacagctccctgaagccggtgctgaagcacgtcaatgccc

SEQ ID NO: 449237 - DNA, 479 bp, Homo Sapiens
  misc_feature (28)..(28): n is a, c, g, or t
  misc_feature (426)..(426): n is a, c, g, or t
  misc_feature (439)..(439): n is a, c, g, or t
  misc_feature (441)..(441): n is a, c, g, or t
attctggtggctgaggacagaacttaancgaccatggagtgttgcccactggcttgcttccccacaggtctcccaactacctcaactggatggtgaggaaccctggcagacatggagctcccagctgggggctgtgaagcgcatccatgggctcctgaaaaccgaggcagagagctacgaggggctcctgggtgagaggctcagggagaggggtggggaagagtccaaggaggagtgtgtctgggttgggggccacaagggagcctggggatggggtggcactttcggatactagctgtggcccatgcctggtgctgagcccagcccggcccccagcaccatcgctgatcccaaagaactggccagaccaagggaagatccagatccagaacctgagcgtgcgctacgacagctccctgaagccgngctgaagcacgtnantgattctcatctcccctggacagtagatcgggattctg

SEQ ID NO: 449238 - DNA, 768 bp, Homo Sapiens
ccctggaagcatggggtaatttcaaaataaggtatttttgaggatttagataagatataagagcatccaagtttcaagtatcattttagcagggacactggacctgagaggctagtgtgaggcaggactgagcaaagagtcctctggcgggaaacctgagagaaacctgagatggagagtccttgggtttgagaaggcagactcaaagacaggaggcagagcaccaaagggagagcacaccgcgacttcctgattaccaactcattttaatgagacaagtcatcttaagaaaaaagttggggaggtcagtatttcaaaagataagaattctttgaaccacttgttaaaaatacaaggacttgcaaccttatccaagaatatctgaatacaaatctttagaaatggggtccaggattatgtaatttcaacatatttccaattgatttgtgaacacgataaagtttgggaatggtagcaagtttgggcatttaatggagaatgaactggaatcatacctgccactgaattctagattaccagagtggttgctcctggggatgtcttgctggtctgtccctccggaagaatgatgatgcttcctgcaggctgacagaaggaaatcggggtagagagagttgacggcgtcctcgtcggggtggtcgttgctgattttgaaaaggaggtgggggaggatggcggtgatggcctcctggttggggtagtctctgctgaggaccctcatcatcgcaggaattccggaccggtcca

SEQ ID NO: 449239 - DNA, 788 bp, Homo Sapiens
  misc_feature (201)..(201): n is a, c, g, or t
caagaaaaggcttcgggttgcccgccccgggggggtttttttatttgggggaggaattccccaggcccctagtccttggcccaggattttccttaggaaaaaggctaaggaacatgtttcaacttaccctaccggggcccgggggcccaaaaggatgggtctagaaagtttttcgagggcgaggggggccgacaaggtttnctctttctccgtttccttgttttgcatgctattaatattttattggtatactgaagaaagagttatgaccacattatttcaatgtcatggctttctgaaggaagttatcttcttatttattttctgccactgaattctagattaccagagtggttgctcctggggatgtcttgctggtctgtccctccggaagaatgatgatgcttcctgcaggctgacagaaggaaatcggggtagagagagttgacggtgtcctcgtcggggtggtcgttgctgattttgaaaaggaggtgggggaggatggcggtgatggcctcctggttttggtggtctctgctgaggaccatcatcttggttaccactatcaccagggggtctaggtaggagtccttcaggaggaggtctctggggtccctgatctggtctctgacttgagtcctctacatctggtatggtgaaagtaaagtcttcatagttcacatcattatctgtgctctgagctgagctcagagccagaaggaccactgagagcaggaccagcagcatcttgaaggaggctctggagttgctcccaactctgcgttccc

SEQ ID NO: 449240 - DNA, 1663 bp, Homo Sapiens
ttttttttaataatctagaatttattttttctagaagagacttagacaaatccaatatccatcaaggtaacacgagtctatctctgagatggaaagtgtcttcctctccctgaatagagactttaaggatcactagtgaatctgggaataactggagagatactcccaattcatctagaatgactactaacaatggcactatatttcctttgagttctgcagtttagggcatagttagaaaagatttaagatgtcctttcccaacattctttccaatccattagcgtagaataactccagttcctggatgttccagtattgtagtttcaaaaaatggtagaagtactggcaggaaaagtcagggtggattccagtgaatttaagcccctgctatagaatctcttctgtgagcataataatggtgtctgggtatctgcatcacgccgagcctcctgctttagttggtggaatttgtgctgcgtccagccatatactccacagttgagtagaccctgagatgttgccgttagagcctggagaacataaagggccatgtgaagcttggtgtcctgtggcttagtcagctttatgatcattagaatgacagctgtgaatacacaaagtgtaaaccttcttgtcagccctgactgtctgaagtatcaggttcctccacacacgtctgggccccagcagcaaaagaaggccactgggtagaagcgcacccgttggtccacaatgtgaatcactgcccactgttcactccccagaaagccagttgacttcacaaacttcttatacaatgtctgggctcggataagtaagaccataatggtaaggaggctgagtacaaagctgcccaggaaaatggcgataccataaaaataaagtgtgctacagacagatgtgttggcagaaggtggaagttcagccatggctgatggtggtgagtgcatcaagatacacttgtggctctgactgaagttttggaaacattcactagtatttcccagacagaatacaggtgtcatcaatagcagaggtatcaggcttgagaaaacaaaggccatttgacaaactcgacaagtataatctatcaccagtggagatgtgctctgtccactctgggtgtgtttcatcctcagctctgtgtacaaataccagatgtaattgacggtgtagagaaatgaggaaatgtagaatatctgtccaactgcttgtaggttatagcagatgatgtccttatttgctactgaagctccatagagaagtgtctccgtgagccagcaaagtcccaggagcaggtcacagaagctcagataaaaaagtggtcttatctctggagatttctgtatattatggaatacagcataggcaataagtgaacttgaacctataacactcagagtagccatgacaaattgtatccactgtattgcaggaagaaccgagggttggagcgggtcccaaccaactgcctgacggcccaaaggcaggaagaaacgatggtaggccttgtcatcttcgaaggagaggaaggacagcaaacgaattgctatagcgtccccatgcgcacttggcgcttctcctcaagcggagcaggaacgcccctgggcggacccgccggaagactcggcgagtgcgcgcgcgcaggagcccattttcc

SEQ ID NO: 449241 - DNA, 550 bp, Homo Sapiens
  misc_feature (29)..(29): n is a, c, g, or t
  misc_feature (68)..(68): n is a, c, g, or t
  misc_feature (183)..(183): n is a, c, g, or t
gggtcacagaacctcagataaaaaatggnccttacctctggaaaattcctgtaaattaggaattacancatgggcaaataattgaacttgaccctataaacactcagagtacccatgacaaattgtatcccactgtattgcaggaagaacctgtaatcccgacactttgaagaggccgaggcnaagacgatcacttgagggccaggagtttaaagaaaaaagaaaccctgggagagaaaacaagtcccaactgtcctccagaatgctagcgtctagtggaaaggtcatagggacttcagtcccagctacccttgagcagccgatccttcctagtcaggttctgaatcctgaagcagtgaacaggtggctccacccctatcccagctgggctcctcctatactgaatcctgctctgtaccgagggttggagcgggtcccaaccaaaccctgacggcccaaaggcaggaagaaacgatggtaggccttgtcatcttcgaaggagaggaaggacagcaaacgaattgctatagcgtccccatgcgcacttggg

SEQ ID NO: 449242 - DNA, 1244 bp, Homo Sapiens
  misc_feature (167)..(183): n is a, c, g, or t
ttttttttcagaaatggaaatttatttaatgtataagatgacttactgaaaaaaagtagaggggtagggaatgacattttattataacagcatttgtataaaatcattttgatcatctttaagtatgcacaaacagctatcgaaaggcatgtaaacatgaaccaagnnnnnnnnnnnnnnnnnctaaaagcagtaaaaacatttatacaggacattatgaaagtctaatgccatcattaggacccaactgctgcaggttaccagtgtggaattgcatatcaccagatgctgttccacaaatggacaggcaagcaggatgatagcattctcttgattactataatagtcacaataatacttataattaaagtaaagcttcctttagctgggattaccctgcataaatagggcaacacagttaatcaaatgtaaacatatgttttctaacaccagtataggaaaatacaaaactaattacaatcaggaacaatttcttaccttatcctactataggtaattattacgctttgcttctttgcggtgtgatctctatgttttttttcccattcatcatcttctgtgtcttggtcaaatgactcaggatatgctggtaacttgtctttggggcattcttcatagtaacttctaatatattttcccacagaccatcctttgtattcttcaggcgttttgcattccaggccattaaaatggacattgtagtggtgctttaaccagtagtagaggtagtgaatgttgtagtcacatctccaagggttatctctgagccacaagagtttcaaaaaatacaagtcttctaatacgccatagtcaaagttttgcagactgttgtttgataaatctaattcttctaaatgtgtgagccctaaaaaagcggcaggatcgatgaattcaatgccattgctgctgaggtttaatttcttcagctcatgaacatcttcaaattccttgggtcgaagttggttgattttattgtatgacaagtcaagtttaacaatatctggagggatgttgtttggcacttttttcaactctttccttttgcagtccagtgtttgtatgggaaacacataattgtggcaaaaagttgagtccacctcaggcttgatgactgggggtctccctgacacttggggtttcgggtccaattgttccttttcttcattacacaactgttcagattttatctgccgcagttttttatttctttgttcttgtggccc

SEQ ID NO: 449243 - DNA, 646 bp, Homo Sapiens
  misc_feature (623)..(623): n is a, c, g, or t
ctcacagctgtcttttattcctgttcattccttgttaagaggctttgactctccagaatccaaggggcagcccctcttttctgcccctccccacacatctctggctgctttctcctctgcagctatgcctgtgtcttttgtgctcataggaaaacaggctggtcagccacagcagtcctccttttctggagagttccgaccctgttgactcccctgcatcctgcacggcacttccctccaccaaagtccctccgtggcaggcctgggccatagctaaggggagctgataacatgcgccttatttaaaagccacaaaactatcttctcaaagtaatccttctgtgagctgttcaccacatcagcctggcctgatgccccacttggcctcagtcagcatggcttggctctgaggccagaagataggaaggacgctgcttttatgtccttgtagtccactccagcctagcctggcacagaggacaggttaagccccctcagtcctggccccgaatgtctgcttggtttggcgcaatccagcgcgcctgacctgctctgtctttttcccaggaaagagcatctacggtgagcgctttcccgatgagaacttcaaactgagcactacnggcctggctggtgagcatggcca

SEQ ID NO: 449244 - DNA, 417 bp, Homo Sapiens
  misc_feature (60)..(70): n is a, c, g, or t
  misc_feature (136)..(164): n is a, c, g, or t
gcttgatgtttggcctgatctccaggcaaaaggagtgagatgaatcaaaaccagtgaacnnnnnnnnnnnaatgtttttaattcccttttaacccagtgtactaggtcaatcaggaggcatctggaaagggggggnnnnnnnnnnnnnnnnnnnnnnnnnnnnnttgatttccatattttattttttcaaaaccctaaaatattacaaaataagtcccgcatatactttaatgttttaactcttttggacaaaggaatcaattacttgaagttgcttttttgactctgcctacttctgagcaaactatttgcgactcacccacaattccttggagattaaaatcctacagatgcctcctgatgggacatagccctaactccttaacaactgtagcaagaactgcacggtacaaaccc

SEQ ID NO: 449245 - DNA, 906 bp, Homo Sapiens
  misc_feature (455)..(455): n is a, c, g, or t
  misc_feature (502)..(502): n is a, c, g, or t
  misc_feature (623)..(623): n is a, c, g, or t
  misc_feature (906)..(906): n is a, c, g, or t
aaataattactacaaaaagtaataaatatgattacttggtaatatcattctccatctaaaatactagtttcacctgtgagcagatttcagctcagtttatagttaaaaacaatgagggtaaaatgggattcatgctcagggaatgaatcagccatagttagagtgggaaattattattttcttcatttaaaggtagattttatgtttatttccctaaattgcataagataaaattgtctgtttaataaaaagacatttattaccattattaacagtcattttagagccaaatttaagaaaaggatattgaaagggtctttattggccttgtttgggtaactctatgctgttagatagaagagacttaggtaaataactttttatgtctgaggtgagtacacaatattggttcttggaaaaatagctgtttcttcataagatacccaagtgataanttttttttcccctagactgtcaggcctatggagtaaatactaaatcntattaggctgtctccactcatcaaaccaaaccaaaccaatacaaacagatgaggagaggaaatgtagtaaaaatactggctgggtcttatgattgggatgagtgattttataagaataatntggggaataattttattctaggattttatttttggcctaatataggaatgtttaaaaaaggcttttctatgaaaattagaaatttatacttgaaattaaaagtctagaagggggaggaccttaaagctaagctaccagtaagacaatgaataattcagaagagaacactattcttttactgactgagtgcccaagatgccaatttccatgaagtcttgatttatatatatgtacacatgttatgcacatacatgtttgttttctaacagttattttttaagcn

SEQ ID NO: 449246 - DNA, 452 bp, Homo Sapiens
  misc_feature (41)..(41): n is a, c, g, or t
  misc_feature (78)..(78): n is a, c, g, or t
  misc_feature (215)..(239): n is a, c, g, or t
  misc_feature (277)..(296): n is a, c, g, or t
  misc_feature (376)..(408): n is a, c, g, or t
ttttttaacctaaaaactgggcctggaaatcctgcctcacnggtgaaaactagtattttagatggagaatggatattncccaagtaatcatatttattactttttgtagtaattatttcctactcactgtggcatttaatgtttcatctgtaactctctatcacaatgccctctatagaagcagcaatagtgaaaacataactacactttggggnnnnnnnnnnnnnnnnnnnnnnnnncagataacttttaagtggatctttatccaaatacaatnnnnnnnnnnnnnnnnnnnntgtccgtaaacattttcattttatgtcaatgccatttccaaatttaccttccactactaccatgaacagcagaagtggtnnnnnnnnnnnnnnnnnnnnnnnnnnnnnnnnnctctaacctaatgatctatagaaaaagggagacaatttactcac

SEQ ID NO: 449247 - DNA, 321 bp, Homo Sapiens
ttgttgccagatttgaaagtcactggaacttgcatattttcattttaatcctaagtgttattacgcaccagttggggttcacccttcatccctcacatttaattgtctgatatagaatagtgttgtgtccactgccccgctagacggctttcttaggggaattttcttctggttgtttcacaagacagattctgtccttgtcacccgggacagaaaactcagtcttttcaccctcattcagatgaagggactcaggacaggctctgtgacttacagggacccaatcaattcacaatgagaaattaccggccaggcgtggtt

SEQ ID NO: 449248 - DNA, 493 bp, Homo Sapiens
agcaggacagaggtataaatagagatgcaaacgtacacggaacatgaagtcccctccgaaggtgggggtctgggtaccagcagggtctctgaggactgggagcttcttagattttcaaagggaagggaggcttcccagcttctgcctttcctccctgaccccaccaagtttcacatttctcggaatttgcagggctccgatgggggccccaggggtcctcaggaggccggcctcctgccggctggtgcaagcaggcacagtcggagatgggggtgctgggggagagtggtgagggatgttgtgcggggtcccactgggcagaaggcagcaggggcagtctcctggcctcccagcaggggtcccccgcccgcgcccccaggtgctccaggtccctcggggcagtcacacggagctcctgcgcttcatgaggccgcggaaggtggacaggctgtgcagacccgtggacaccgagctgatggcggagcgtggcgcc

SEQ ID NO: 449249 - DNA, 512 bp, Homo Sapiens
  misc_feature (332)..(332): n is a, c, g, or t
gtcctggaggtagatacatggatgggtagaagaggcccggggccattgtggacaggaggaaagggttgaaggctagcgggtttgagggcaatccagccggggcagtagcagcaccaacagatccattcgcagagtcagcagccgaaacagcatctgtgcttttctcagagtctttgttctcgtccttcattcctcatttccctttctccctctccttttgaagtgctgtcttccggttctccttgaactagaagcagtagtggtgtttccagttagcagctgacagagggttattcaacagcccgcccaagcccaaacacgttgggcaggcnccgccattcctggcagcatcaggggcagcacagcagcagggttcttcgcgtcgcctccggcggtggcagctgttgccagtcctggagggaagcccatgaggcctgccagctggagcgactggagattctggagattctgaaggctcgtcaggtccattccagcaaacaggctgttcacca

SEQ ID NO: 449250 - DNA, 513 bp, Homo Sapiens
ttttttttaaagcagatcatctctccaaatcatcacttctatcaagcctattgcttgagcagtgttatagcactcagccctcagggcaaagataagtcttcaccattgtcacacgtagcacacacatattcagccatatcatgctgaatgggaatacaggactttgtagaaacagaactgattcctgcagaatatcctgagatacttatcaagctgttaaaggagacatcagtcttttgtctgtattgcccttgacacctcctcaaggaaagtatctagaaattctttgtcttctgaagaaccctcagacctcttaggtctaatgtaggttaagtgccctgcagatctccctagaatagaaaagcaccttgaaaactgtagtctgacttaatagacacaaatataatgaaagcactaattcataagatcctgttatttgaaggaaaaagcagcaaaaggcacaagcttcagatattggtcttgcacagggaaaagctggaattctaccctaaa

SEQ ID NO: 449251 - DNA, 1113 bp, Homo Sapiens
  misc_feature (926)..(926): n is a, c, g, or t
gggacacagggatatacaaactggttaacgaccagagttaatagacagtaacggtaacgcacaatttaagatagccacccttcatccaccactaccatacttcttcccagtggtattaattctccaagccaatcatatcagaggtgcaggatgccagacactatttgcatagaaaatcagtcttcaagactaaaccttaaagagagttcatagagattaaacttttttgaatagttgcatttcgttgcgtttcaatttcttcatccatatctgttctggtcatacatgatttttttcctgtcttgtttatccagagagattaatacacagattaatacacaaacttttgtaaatagcattccagttcaaagttgcttgtgatcatagccacgtgtgaaccgttagacaagtgtatgctatgccccaaaatgttttataattcttcagtgcagtttcttactgatgtttcccttaaaattaaggcttaatgaaagagaaatccatagtattatgaactgattttctttagcttctgaattaagtgcactctttccaaaatcaagtggtcctggagtaacgttaagacaacttgtattaatcagtgtcatgactgaagtagtatcttactggaggtcccggcaaatcttcatctccatcaatgtctggagcaaatgacacagtaagatccacatatttcttttcagtagtaggttttacaagtttatgcattgttaacttcaatctttttgcatgaccaggcattacaggaacataaagcattttgactccctgtaccaccattgttggctcaattccatacttctctttgactgcatttatgaaatccaagagggtgaaatcttcttttccatgtacggtccatcgatcccaaattgtaaatgatattccatttctgattttagttnttcttacttcagttgtctctgtaaatactacaaattggaatggcttaagttaagaaaacaatttttgtaagctgcaaatggatagcccccagttactttgatcatcttcaaagcaaacaagcccagaaactgtaccagtggttgttggttttacaaggataatttttacagctatgcgccttggttt

SEQ ID NO: 449252 - DNA, 539 bp, Homo Sapiens
tttttatttcaggcaaagtttaataggcttgtggctctagcagcacaacggagcagagtacagaaaaggagtcctgatgttagctcccaaaagggctctgctcttgtcattttaaggaagttgaggcaggaaaaaggagcaacgtgtaggcaatgtttaggcagggtcttctctgcacctacacagtgaggtctcatgcccaaacatgaggcacatgtgtcagaggcatttgaaccagagtcacctccatcttgaatgggggctgggtaaaataaggttgagacctactgggctgcattcctgagagattagggcattcttactcacaggatgagacaggaagtcggcactaagtacaggtcacaaagaccttgctgataaaaagaagtggtaaagaagccggccaaaaccagccaaaacccaccaaaaccaagatggtaacaaaaatgacctcgggtcatcctcactgctcatgcattagcatgctaaaagacactcccactagcgccatgacagtttacaaatgccatggcaacatc

SEQ ID NO: 449253 - DNA, 1457 bp, Homo Sapiens
  misc_feature (14)..(14): n is a, c, g, or t
  misc_feature (50)..(50): n is a, c, g, or t
  misc_feature (71)..(71): n is a, c, g, or t
  misc_feature (78)..(78): n is a, c, g, or t
  misc_feature (369)..(369): n is a, c, g, or t
  misc_feature (379)..(410): n is a, c, g, or t
aaacccagggccancctaaagcctagctgtgcaagggaagaagtgaaatncccgggcatagatggtaaatnggtaccntttaccccaatccctccctttttggcattttccccatccacagataatcccaaattttacctgtcacctcaaggccttaaacatcaatatgtctcatttcagaaaaataatatttttccttataatcgcagtgaaaaaaccagaaattcttggtttgatttccttcaacttgaaaaccgtatagcataatagaagggaatatgggtttgatagacagatgaggatttgaatgctggccttgctacatactgactgtgtaatcgtggacaaattatttgatctcttaggacntgttataggnnnnnnnnnnnnnnnnnnnnnnnnnnnnnnnnaataggtaagttgcttcacatggtgccagacacatagaaccttttggtgtttaattctagaattatccactttcttcctttatcctctctaaaatcaagtcttccagagttcaaaagacacataccctctaatctcttccagaaagttgttccatcaattattcctttctttgatctatctttaatctttcctactcccctttactttataaatgtataaaaatctaccctatctgaaaaaatttgctttaacccaacatcaatatattaccataacaccttctcgcaaaggttgggcaatttcttgaaagactatggacatcctaagtctctatgtaactagtcctacttattatctttcgtcctcccagaatttgtcctttacctaaaaagttttagaaaagcctttaaggcaacattccttctaagcattcattctctttcagcagctctgtttcccctgaatatttattgcacccgtaacaatatatattatatacacaacattctaccaattattccccatgtttgacctttttaatgcaactaccaacttaactttttattccactacctattcaaaaccattctaatctttatattgcttttatttatcaggttttattgcatcatatttcttgttatctggaaccatttcaacaaatattaataacttattttaaaacagtctttaatagaaaatattcatactaagatcagctgtaacagtacatgtatgtgagtttattttctctgattttcactggaaatattgcctgccatataatgattcataattattttaatttcttgactttctgcctacacttccttaaagtgccatcttaagctactgtagttgcccttccattattttttgttcagtattaaccatattaacttggcattctgtactaaaaacacaacttcagttaagtaagatttgcctcagagttttttactttaactcacctccactcacccactgggatccatattattaggctcagtgaagctttgcattcttctaagccaagcatttaatct

SEQ ID NO: 449254 - DNA, 884 bp, Homo Sapiens
  misc_feature (776)..(807): n is a, c, g, or t
tcacaccccagaaagtattcttaacggaatctaagaagtataattttataatacccaatacactacacaaatatagaaattacatatagtataggaaaaaaccaccacaacacagaacatttccaccaagagaggaaaaagaggagaggttttcttgcccctcttcactaaggagttttaaaacatagatcttacaaattagcccagagatttcaacatttggtctgctggctatggactcttttgcttgatggtttgtttgatttttgtttataaaagtttggcatttagggaattgtttaaaagttttgttagtagtaagtttatatttgacccatcatataccctacttaaaaaacaaactcctttcctatttagttttttgtcagaattcctcaaatttttaatcccatggccaatctaaagtctatgctgtgcaatggaagaagtgaaataccagggcatagatggtaataggtatcttttacccattccttcctttttgcattttcccatcacagatattccaaattttacctgtcacctcaaggtcttaaacatcaatatgtctcatttcagaaaaataatatttttccttataatcgcagtgaaaaaacagaaattcttggtttgatttccttcaacttgaaaacagtatagcataatagaagggaatatgggtttgatagacagatgaggatttgaatgctggccctgctacatactgactgtgtaatcgtggacaaattatttgatctcttaggactgttataggnnnnnnnnnnnnnnnnnnnnnnnnnnnnnnnnaataggtaagttgcttcacatggtgccagacacatagaaccttttggtgtttaattctagaattatccactttcttc

SEQ ID NO: 449255 - DNA, 565 bp, Homo Sapiens
  misc_feature (527)..(527): n is a, c, g, or t
aaagctttaaagaagaaattcttttactactgaatttcaagtcacacacacaaaataggtgagaaattattttatcatatttagaatcaaaatatcccttaaaatatttacattttacagtaaaaaggatagcaaaacacaagatcatgtacaagcttaagtattcaagtttctgaagagccaaaaatgaaaatgaaaataatggcctaccacaaagctgtagtatatggtaataaatgacttcaatgagtgcagattaaagcaataaatgtaccccttgggcttctgattcttggtcaaaaactgctcaactaaatgattaggcataatctgattatgaagttgcttgggatttttgttggctcctcttacagtttctttaaaaacagtgcaatttaaaacaaaacttacagagcacacattactcccaaattagtcattatataaaggacattcactagaggaagtaaatatattccatagttaaccatatttaccaattaaggaataaaactaaaatttctaancctttattgcatattaataaaacaaatctttgaatata

SEQ ID NO: 449256 - DNA, 508 bp, Homo Sapiens
  misc_feature (23)..(23): n is a, c, g, or t
  misc_feature (28)..(28): n is a, c, g, or t
  misc_feature (34)..(34): n is a, c, g, or t
  misc_feature (53)..(53): n is a, c, g, or t
  misc_feature (82)..(82): n is a, c, g, or t
  misc_feature (88)..(88): n is a, c, g, or t
  misc_feature (163)..(163): n is a, c, g, or t
aaggggtaccaaaaaaatggggnaaaanttttgnaatttggttttaacacacnccccaaaccccaataccccttgccggganaaatgnacgggtttcccccttaatacaggaaggtttttgccacaggaaatttggtcccccagcccttggaaggaagaagtntccttcgtttaccttagtgaatggagtttcctggcccgcagatgtgccaagtgattgaagaaagatataccccaatatcaagtgataatttattttcctacagactgaatttgctttatttgaaagatgttgtaactctttttaaagttagattttaccctgaggtatagtatatgtaattttgtgaagattgagctggaagggaagttcacaatcctcacatttaaaaaaatatagtgggtgctaaatgttttcttaaaaatctagtacagcatttgatctttgttatgcacagcatacttttattttacagaataaattttcctgtgatagtcacaacaagac

SEQ ID NO: 449257 - DNA, 652 bp, Homo Sapiens
tttctggtggaggagagaaactttaatcaaatacacagaaatatatttaaaatctcaactgggataagtgccatggtgctacaggagcttatattagagacaagggacctcatgcagttgtgagggaggagggtttaagaaggctccccccgccccaccccaccaaggaacaattgaattgagactggaaggatgaggggagttactgtggaggggataggaaaaagtcatctgggaaaagagaacggccttttagaagggcaaggccatcgagaaattaagctggagttgcctgaaagatggaaaggatagtggctgatgtatcaagatgaggaagtggctcgacattggtcaggcagaggtggcgtttccaagtctgggagaagggatgagttccagggctggtatgtggatggcgggtgcctggatcttgatggaatataatgccccagaagtggcagaacctgtgggtggtgaaggctacatatcgggcctgtggactgtgaaagtttgcaataactggcactgtctccctcttcttccaattgaaaggattaacacacaatggtcaatatgaaagcacaaaagaaatggaatacactttaacgagaattggtatgtgtagcagcttggaaccttgtcttttgaagtc

SEQ ID NO: 449258 - DNA, 925 bp, Homo Sapiens
ggaaggggcaaatatccaaactgtatcagcactctttgaaagattacagagtgaatatctttcttgcgtcagaaatggaatgatccccgcctcgcgtacagtgaatatcctgacgactctttagacctcgacccctccatgttggactccatttggaaacctgatttgttctttgccaatgaaaagggtgccaactttcatgaagtcactacagacaacaaattgctaagaattttcaaaaatggaaatgttctttattcaataagattaacattaacactttcctgtccaatggatctcaagaattttcccatggatgtacaaacatgtataatgcaactggaaagctgtctgggaaatttaggtctaaagccaaagagggagtgaaaagtgaagatcaactattaaaagccatatacagagtggttcaagaatcagatgaaatagctgaagaggcgaatgtacgagaggaaataaaacacaaacaagaacagacgcttaagaaatgcctacatttagaagttgttggaaaaaattccagacaaaggcaaagatggcaaattaaaatcaacacgattcaacctcgaaagagaaaggactgtgaaggagttctgtgtaacaaaatcaaatgctgcaaagaaagtttgtaaggtacttgaaaaaagcaattgttattgttacgaagacaaatgtgattagaataatgatggtcaaagctggaatctaaaaaggtctggtataagtgggtttaaaatgaccaagataaacagatcgtaatcggtggaacccactggaaagtaggcaaaaagagtttaacctactggaaagcaagagctgtcagaatcccagggtccacttttgactgaaatctgactgcagaaaggaagaaaagaaaatgttcaataatattaagacgtgggaagca

SEQ ID NO: 449259 - DNA, 389 bp, Homo Sapiens
  misc_feature (376)..(376): n is a, c, g, or t
gaatgcaaactttatatttacagtcagtaagtttataaatatatattacattcttacaatctacagtacattctacacgcagatggatttggaagcgggcagcggctgcaggtattcaacagaacatgacacaggtaagaatggaaagaaatatgaggacgttactgaaagcaaaggattctcattgaaaaggggtgacagcttaatcacccaaccaaacaaggtaggtaagcttgcggacaggagcaggtgacttactggctgcagaaacctcagtctcaagagcaccacagttgcaggggagagggctaaggttggggaggggtaaactgggtgaaatttacacacacatgatcttaaagaggattttcaattnctatgggagagga

SEQ ID NO: 449260 - DNA, 952 bp, Homo Sapiens
ggaggaaatcaaatttcttgcaaggctcatagatttcccttttgcgttcactggttaatgagtttccagtaggtttgttgcccatttggaaacagtaataaagaaatttggggtgtttttttctggggattctttgcatcttctggtttcccatctggaaagtatgtctcttagggaatctggaacaatcccactttcatcactggcaacattaataatgttgcagcccagtgggtgcagactttgaagagttcctgaataagcaggttcatctaggaggacattatctccaggattaatgatcatttcaaacaccttacaaagaccttgttggctgccagatgtgacacatagatccatttgtccttgactgggtgggtaatggatggtaggaggattatgcaattttatttgtaactgttttagccaggacaaaagctctggaattccagcactcggagaatactgaagtgctctcttcatcatctcttctccaaattggatggtctttccattttctacagtgattacggcagtcttaaaaggaaacatgtttggatttggtaagccaccagccaaggagatcatcgattttggtcctctgctcaatatgtcagcccgtttctcactcatggtccggatgggagaagggtttctggctgcgctcgctgccgtgatgaaccgtgcgtaattcatgtcttctgacagccaagcatcaagcttcttcttcagtggttgaggactagaaaaaccaaagagcctcgtcaagtcctgcctgctaactcctcactctggcaacgccaccgcgagatgtgtccccccgctgcgtctggcttcccgcgcgcggtgcccggagaacgccgccgaaactccccggctggacgctgcgttcggtctcccggtcctaaacgggtctggggctgtgtggcgagcccggcaaagtccacgccgc

SEQ ID NO: 449261 - DNA, 514 bp, Homo Sapiens
gttctttgagaacaaaggctgtgtctatctcatttctgcacgcagagcctggctcaccgcgagcgtgcacaggggtacgcatggatgcaaccaagcggtggcttgctagggaaccctccttagaggctgtgcgaggaatgccccaccccaaaggagagatggtcaccccgtttctcactcatggtccggatgggagaagggtttctggctgcgctcgctgccgtgatgaaccgtgcgtaattcatgtcttctgacagccaagcatcaagcttcttcttcagtggttgaggactagaaaaaccaaagagcctcgtcaagtcctgcctgctaactcctcactctggcaacgcaccgcgagatgtgtccccccgctgcgtctggcttccgcgcgcggtgcccggagaacgccgccgaaactccccggctggacgctgcgttcggtctcccggtcctaaacgggtctggggctgtgtggcgagcccggcaaagtccacgccgcacgcgctctgcggcc

SEQ ID NO: 449262 - DNA, 1222 bp, Homo Sapiens
  misc_feature (942)..(968): n is a, c, g, or t
tcttttcaacaatggcacatggaattacctgcacacagttttcagggaaagaaaccaaaaatggaaatggcaaaggaggcccaccaggatggccatatcaaaggaggatgattaaaaggggcaagagggacagctacacaaacttgctcctttatgtgactttccctccacctgtctattccttaaactgtaagacaaagccattttcaaaatacagttccaaaactgagccagaccaaatttatcctgctacaaatagaaaagaatatacatagaggcactttagttaaggaacagacaaaaccatcattatattccaatcttcctcatctccaagcctttttgagccaagtctctatctgcacctttaacatggtgttattgcagacctgggttaactcgggattgggggagtgcaacctctgctttgtatttatgactgttttatttgctagtcatttatttccatatagtgtgtagaaagtcactaaatttgcaatgaggaaaagatgtaaaaccacagctcttgacaactcttagagcactatttcacagctttcacatagcacagataactcgccatctgtgctaagcattatagtttatacaaattatttttaaatagtatgattcctgtaccagggcacaccaatgggattctaatcatccccttatatcccccttagatataagctctttgggggcacgggactctgtcttgcttacccattgtagccctactatgcctgggacatagtagggacttaataaatatttgttaattgactggaaaactccatttagtgagtaaataatgttttaggcgcacacggagccaactactctctccaaccacgggaaccccacccccacacggagtccatagagaaggaaagagagaaacgtttgccccccactaccaatataattaagccaagcccnnnnnnnnnnnnnnnnnnnnnnnnnnngtaacagtcctctttatatatcacataatttaaggatattaagagttggtaggttaatggtaagcatctatattttattttctaatgttcattgattttattcatgtctccctgagagctttatttttttggactgaaattttacaggtagctttactgacacacaattttaaaatgacacatataaacagcatcacttcaatatacttagagataaatagatctgggcatctctgctgatgttgacattttgt

SEQ ID NO: 449263 - DNA, 540 bp, Homo Sapiens
ttttttttaacatcatacaactttaatgttacaccatctacaaatctaaattacatttaaaattatcagttgacagttgtactaggatttacattaggaatcactacatgatcaaatagattgtttttctgtgttttattgccaagttatttttactgagttaactactccagtttcagactcttttaaatgtttttatgctaaagtatatgtattagtccattgttgcattgctataaaaagtgcctgagactcggtaatttataaataaaagaggtttagttggctcacagttccatgggctgtacaggaagcatggcactggtatctgatgggcttctggggacgcctcaggaaacttacagccatggcagaaagcaaaaggggagtgagcactccacatggccaaagcaggagcaagagagagtgaggggtgaagtgccagatctcatgagaactcactatcatgagtgaagtaccaagaggggatggcccccacgatccaatcacctctcaccaggatccacctccattagggaa

SEQ ID NO: 449264 - DNA, 421 bp, Homo Sapiens
  misc_feature (326)..(346): n is a, c, g, or t
gaagtatctttttatttcaaaaggcatcctgttaatcacatacactcagcagatctttaacttggccaacttaatgttcttaaagttcttcctaaactttatctgtaatattgtagagttgacaaccacagtggtactgtcactaggtaggatcaaattgctatagatgttgacatatgataatagactcttaggcagtgaagatacgttaggatactttctctcccgtacctcattttagagttcaataaacagagacaaagagaagtgaactgtccatacagcatgcaagtagcacctctagttcctaatgtagtctaatgccnnnnnnnnnnnnnnnnnnnnngaaaaaataaacacaataattattacaaataagatgtatataggtacactgaataaaatttttacattttaaata

SEQ ID NO: 449265 - DNA, 538 bp, Homo Sapiens
ttttgtcaaacattttaatcactcaattttgagtcaacaaacatttatagagcacctatatgagccaaatatgggctagagaataagagggaaaaagaaaagacatggtacttaccctcatggagattgcagtctagcagggaagaaagacatgaaacaaggacttacaacaatgttaagtgttatcaaatagaaggtatagggaaatcttgaaatatatagcaaaagggttctaaacacgttggggctgaggggtggatatctgggagtctgggaaaacttctctgaaaaactgacatttaaactaagacctgaaaaatgaacagccacagaatgctgatgtgagcgcagcatattccaggttgaggaaacagcatgtgcaatagcctgaggctggaaagagcatagcattcaagcaacatgaagaagtcaagattgacttgcacacagagtagagaaagggcaagtgtcaagagaagagactgagaaggtaggggagcggactatatagagtgctttctaagctaagttaggtatt

SEQ ID NO: 449266 - DNA, 517 bp, Homo Sapiens
cacttctcacattttattagccaaaggaaattacatggctacacataattttaaacagaaatagaattgaaattctaccatatgtccaagaaggggagaaccaaaatatttgtgattggttcaaatgactatcacagcattttaacaatcaaccagaattcaatatttagatggttacttacttttgctacccatattacccatgacctccattttgttggcagaacctctcatataataaccctcctttttgcgctcttcagaaaataaaactccagacttatgttagggtcaagggggtagggtaggttactcagtgactggaatggggaaatgtgatctaactgctagagatttaactgctttacaggaatctttaacacaatccttcttatttggcatgaggaactaggattgacatttcagatgcctctatatgtcccaccatctaaacagaatttattctagtcccacagtctgaacaggatcgattctcagctcttcccacttcatgact

SEQ ID NO: 449267 - DNA, 328 bp, Homo Sapiens
  misc_feature (38)..(38): n is a, c, g, or t
aaagttagtgttattaaagtttttttatgatagatcanaattgaggacctgtgtcctgtttttataagattgcaacccagctatgctcatttgtttatgttttgtatatggctgcttttgtgttacagtggtagagtttagtagttaggacagagacctgcaaagcaaaataatttacagtctggccctttacagaaaagtttgctgactcatggtcaaaataaatgaaaatttttgtgttagggttgttaagctagggttctttttggtatcatatgcttattttatgtaaatctctcaataaaaaattatttttaagagaaaaaaa

SEQ ID NO: 449268 - DNA, 474 bp, Homo Sapiens
tagatttaaaataagtaattttattatgagggtaagaaaaagattttagtccacttatttacttcatggatagcttttttcatcataataaaataaaaatttttccaaacagcaaacatacaaatagaaggcaaaagtcgtcctttataaaagtaacacaatgcagtttactggaaatattggcaagctttctcatttattcattcaaaatgtggtaaaagtttggaaatacaatttgaaatacagtagcttggaaccagttaaaccaaaacccgggaactctgtataaatttattatatttgctgacttttctagtaaagactttatatggaaaagaataaaagatactacacataaacagaggtggtagtacattaatggtgtgcatcaggtataaaattgattatattttaattatttttataatttcaagaaaatactttagtcaccctatatttagttaaaatgttaaa

SEQ ID NO: 449269 - DNA, 664 bp, Homo Sapiens
agaataattttattattagatttaacagatcaaatattatttcaatactcagatcaaatgtgcaataagacagggttgcaaaaaatgcacactttttttattaaaatcatttatataagtaatttatataaaaataatattacagttgcaactttctgttgtttctcaactatgaccaaacagaggttacaagtaaagtagcaatcccaatactaaactgctatatgtgcattttgaatcaatcatgtgtatgtcaatgaagtttttaatgtgacagatttgcattttggttgttaatttatataatctaggttggataaatgacaatgccaatcataggggataatgttgatcctaaatgttagtgtgttgatttcataacactcaatggagaagccagtctcagagaggcatggtgctagactggaagacaagaatttgaaataattacagtaagctgatggaattcacttttatctatttttataaagcaagtgattttgtatttttaaaatttatcttcaattcttcatcaatagctacttttaatcattaaccttataaatttaattatatttcaattatattttaatagaaagaatggatttcatgttttttctggtgtggatctttgataagaaaataaaattcaaaatattctgtt

SEQ ID NO: 449270 - DNA, 445 bp, Homo Sapiens
taaataattaagggaatgactagcttgtcattcctaccagaacaactggtacctgtactcatttctctaccatattgtttctctttagcatagctacagacctcctcagggcatgctatcccattttctgaaagtcaaataagacaaaatcaaacatccaagtgagagacacattagacagttctcattccccagagcatctccatggcacagatgcatgaaaaaaatgggaacagattcctcatttgcatagaagctaaatagctatattaaatcttattttaagagtttccttttacctttgcttcgtaaccattaacaacttctgctttatctgtcctccagccccagaatccggatttagttctgataaaaagtgaacaccacaaatttctacatgtacaatatgccattcagatttatatctgtagcctttatagttttt

SEQ ID NO: 449271 - DNA, 740 bp, Homo Sapiens
  misc_feature (124)..(124): n is a, c, g, or t
  misc_feature (126)..(126): n is a, c, g, or t
gaaacaaaagagttctgtttattggcatctccctaggagtaaaaagtgatttttaaatgtctgaagcactgcccatgtatcccagctcacagacattgcatttacaaaaataatctctcaattntnataaatatgcagcactttaaaagtaattatttatcatcactttcagaaacatcattatttttcttcttggaccttggaacttcacatttttcatatttgttagatgctttacagctccatgcgaggcccccttgtttagacagtcaagttcttcattgggttctgtatgtaagttcccacccacggccacattgattcagcctctttttgaggattgaggagatgaccacaatcccagacccatagatccaaggccaagaaaaggaggtgcatttatgccatccgcgggtcactctactgattgcagccatttaaatgtctgcattgagagctcaagaaatgaaggcatccacgatccatgaggacacatgagtttcaaattaaagattatgaaaacacaaacctacaaagtgttaaaaacaaacaattaaaacagcaagtgaaacacccaaagttggaaagattgtcttcatttcaatattgatacaatccctatttaataaggtggccatttttaaagccatcacagtaccttcagcctcctgtttttagactttctcggtgaccccagagcactgcctgcctttccacttgcctcagggcaactgctgaga

SEQ ID NO: 449272 - DNA, 357 bp, Homo Sapiens
cccttattttaaagattactatgttatagatgtgatcttctatataataactttccccaaaagttctatgttaattaaacgccaggaactcaaatcattttacatggattaagagaatgtgctacatggctcttagaaagcagtggctgaaaacagatgtaagggggtcatatgtaattgccaaagacgttttcaaggtatgcttcaatatcaggaatactagtgctgcagtcactgtggcataaagaagaaaatttcctactcaatgaactctcaaattctctggggtaaactcttaatgcagtaaaaatttttccaaccttcatttgcagttacacactggtcgtatcccaacag

SEQ ID NO: 449273 - DNA, 453 bp, Homo Sapiens
ttattcacaggcatgatcacagcatacttcaggctggaactcctgggcttgaatggtctttctgccttagcctcctgagcagctgggactataggtgcatgacgccgcacctggccataacactccttctcagctcatttttgagtcatgaaaaatgctctttcaagaatcaccaggcctatgataagtcccatggaacaaacctatcactgtgtaagagctgagcaggagaaaaccatctctcctcatacacctcatttgttcattcaataaaaattcatgacacaccactatggacatcaggaagtagagatgaataaggctgggtctctgccctaagtgattagcctggaaagccatactggacacagtgtccatactggcctccttgtctcctttcctgcccctccctgcactcctttacataacagccagaacagttctctcaaacat

SEQ ID NO: 449274 - DNA, 441 bp, Homo Sapiens
aggcaaaactattttcattttactatgattggcaaattatgatgtatttgattgataaatctcagatttatcagattgattctagttcgtcttcatgtggcagaatatgtgttgtcaggagtgatttggtaattcagaaaagcagctgaagaagcatggaaacttccctacaagtatatggccacagctggctaaggttggagacagtattctatccttgggcctcagactcacatatgtatgtacatacacatattattcacccatatttccttccttctcccctcccccatctgtaaactgatatctaaactttacaaattacagttacaagaaaagttttgttccatttgaaatacaaaaaagatcaggagaagcaatctgctttttaattttacttatgcagtagttttttaagatacagtcaatttgttttggcac

SEQ ID NO: 449275 - DNA, 901 bp, Homo Sapiens
aaataaaagccatgtaaaattaaggactaagttgtctagtctgtgctgaaaaacttagtccataaaaaataaaagccatgtaaaattaaggactaagtttttatggactaagtttttctctcattataaatttgcttaatgggggaataatatataatgtgtatgccacctatccttacatacattgaaaatattttagcttagaagtttgtagcatacaattcaatcatttataccataccaattatttcttctttgagaccttgacacagtaaggttatattctaaatgtatttttagcaattaaatatcaaatctaacccaattagtctaatagaggagatttgttcaatcacgtgtttatgtttttctctctatgaaaaagaatctaaattggctttttttcactatgcagccattactgtgtttctggactgctcccagtttgtcagctgaacagttctgggtgcagcttgtctgatgacggatagcacagcccctcaatctgagtgctcagcagagtgcttgtgaaggcagcaccacagcaacagttgctcagagggaacggattcaggagccttgacttagcaatagagtccagggttttcagctcagtgtctttagcctgtctctgctggtcatgtcagttacgtactattccatccaggaggtgctatttacattgtagtacatacacagtcattgcctaatgagtcatacagagagaaaagtaagttataaattatgtcccccatttgctgcaactctcagtgttaagaatgattcagtgcagctataggagactacttccattggcatgccacctgcgtaaaatacacaattttgttaagatatacaataaaattattatgctaatagcaaatattttatgtagctcact

SEQ ID NO: 449276 - DNA, 647 bp, Homo Sapiens
gggataatgtgtttttaaaaacctccttaaaagaagtaatctggcagtcacccactggccattttgcagtcccagtattgttcctgtacggggaatactgggagctcatggtccccatggatccatgaactccaccgctaatcccatggtagtacacttaacagcaggttaaaggatgatgagtagagatgtgattttgccgttatcaaacaagtatttatctagtggaggtactgatttaacttgctagcagtttattcattccaagttaaccacttcaaagaggcatataaaactaaccaagcaaattgtttgctttttgtgtagataaaggccttaggcaaacaatttatacaacacacaccaatgaggacagtctttcactttgggttgtaatatgccatcattctataataaagcaatgctttcttggcaagcagggggttgagcaccatagacaaccctcctcagtgctatgcaaaggaaatgcatggaaacaatgtcgtcttggtctagcaattacagaattccaaattctaccctttatacatatgtcatctgtatctaggctgtcctaattcggaaatgcaaaatctcatttctatatactggataaaagaaagagttttagttattcccggacgcgt

SEQ ID NO: 449277 - DNA, 455 bp, Homo Sapiens
tgcacaagaggcctttttaatagtttcaaacagaatcaaggtccccgccccctttccaaacagaacagcctatcttgtctggctacatttttgaaaaggttatgaaaaagatcagtgtccatcactggtcttaacctcagtgagttgaagaaaatgtcatttaaaaagacaatcagcaatttatgtactcttaaggccatatttcattcagcagcacaaaataatttactggaaacctactacctgtgctttaaaagctctggaaacactgtactctataataattgatgtagttatgatacactgtgggtatgagccctaactgatgggggtgggaggctgaatttaaatgagcagtagactctgaaaacagattatgaaattcattcaaactgttactaaattatttgatttcatccaatcatctgtcacaccattgttcaaaattaaatgtg

SEQ ID NO: 449278 - DNA, 344 bp, Homo Sapiens
gtctaaacaattagttggtaatacagaataactgcataaacctccaaatgcctccaggacaacttttccgatgaaatataaataagtaatctctttgcaagaaagtaaagaacaaacatgtgcaaaatcttaaacctaggaactagaaaagtacatgaaacatctaaaacatattccaaaagcattctacattttctggaggaaggatgggtaaactttttctgaaaaagactagagaacaaatatttttgcctttgtgggtcagagggtctctgtcacaactattcaactgcaactactcagtgcaaaagccagccataaacaatatgtaaacagacaggcct

SEQ ID NO: 449279 - DNA, 445 bp, Homo Sapiens
gagtttcactgatttcagctctttattatttccttttgttggcttacctttgggtgattttactcttctttctctaggttcttgaggagtgagcttcgattattgatttgaaacttctccttttctgctgtactctttagtacattttagtattagaaatttccctgcattgctttaactgcatcctacaaattttgatatactgaatttgttttaattgagttcaatgcattttttaaattcccatgagatttgtttgatccatagattatttagaggtgggctctttcgttaacaagtccttggagattttacattattggctttacaaactttgtggatttgggcaaaatataaaaatgattttttaaaatgttttgcaatattttggttaatgtaaattttatttatgtagaatacttaatttttcttggctcatatcttg

SEQ ID NO: 449280 - DNA, 371 bp, Homo Sapiens
  misc_feature (134)..(163): n is a, c, g, or t
ctctaaatagatattttcatgtcatgatttagataaaactagaaaatttaatagggtagttaattagttctatttctaaaacttttatgatagtctattctaaaatatgaaaattcattccttagctgaaaggnnnnnnnnnnnnnnnnnnnnnnnnnnnnnnactccaaatgaatattttcatatcatgatttaggtaaaaccagaaaactttaatactgggcttattacttctacatctaaaactttcataatggtctattctaaaatatggaaattcaaccctttccttatctgaaaggttactagatttctatcctaaggcaaattttgaattattatatgacagtttaaaataaaacactgtcatg

SEQ ID NO: 449281 - DNA, 438 bp, Homo Sapiens
gtgcagcagggcatctcagcaagagaggaataagtgtgtcacagtggatttttacttagcagtattttacggaccttaaagtgggatcttaagggtaatttagaccatatcagcagccatgtaggtcatgataaatgattacacttgtagacattttggtgtctcgatgatagcaataggagacagttaaattcctaggcagacgaacaggtccctgttgaaccctgatcttcaagccaaagacagcctgatgcctgaaaactgagcttccagttccaggtagagtacatgaccagagtaagaacctcctcgatgtcttttagccaattgaatggtgctttttccaggcctgcccacggaccaatcagcatgcactccccaattctgagcccataaaagccctagactcagcctcacaggtgactacctgcttttggg

SEQ ID NO: 449282 - DNA, 460 bp, Homo Sapiens
aaatatttaaatgtttattaggtattatacttatgaaaagtgcaaaaacaaagaactacagcttactgatttatcacaaagcaaacaccacataggccaagaaatattacattgcaagcaccttacatactccactcatgcccctttcccatcaccagcctctccctccctttgaaaagtagccatttagtcttaatataatgcagtcatttctttactctcctttataattttaccacctaagcattcatatatatgcatgtgtataatacagtttttatctacagaagtgtaaataaaactattgctttgctttgcctatatttgaactttataaaattaaaatcacatagtgtatggtattcttctgcgctgtttttcacgtatattcatgaaatcaatccacattgtggcatactgctgtaatttgcttatttcattgatatataatattgtacaa

SEQ ID NO: 449283 - DNA, 516 bp, Homo Sapiens
agattgctctttaattgtatctgggaaggtttagagcgtagagagtgggaaacaaatacttaagcattgcagtagcctgccacccatcaaaagcacttcacttcttaaatgtcagtatccttatttgtaaatgacgactttgttacttgtcttgccttataagcttttggaagcattttagagtaaatgagttttttgataaagcactgcaaatttaagatcagtttgataattttctctaatttaaaatgtacaataaaagatggacagcttatcttttatgaagattccttaaaagctctaaatacaatcagggttacttcactggattaataacagaattaagtcagtatttattgcactaacttcctacacttattataatgcaggttattacctgtggtaacttcttttctaataaatggattcaaaatccttatatgtaaagatccaaggagctgcaatttacaatgaaaaacagtttgatgcttaataaatctcctttaataagcattc

SEQ ID NO: 449284 - DNA, 323 bp, Homo Sapiens
gcttggcccagatacttcaaatgggtgaatcttttggagattcctaaaatccacatttgatgaatgtggatttttcaaaactgtgtaaaatatccattacctttctaagatcacttctttcctttagtctgcttaaatggaaaagctggtaatttcatctgcgccaacattcatacaaaataaaaatgtagtctgtatttaaaagcagcttttgttcatatgctttaattatttcatttactaacacatcaaggcttgctgaagcaaaataactggcccgtaatcaaaaagcaaataagagtcatctggatttcaactctggt

SEQ ID NO: 449285 - DNA, 256 bp, Homo Sapiens
ttttttttggctcttagtaatgttgaacttcttatatattcaccagccatttatgacatttttgcacatacctgatgtcatttgatttttactttttaggttaagctatatgaacttgcccttttgtagatataatatagttgcaaaccagcaatttcatattgttcaaacctaatagcttagccttcaggattctgaagctgtatcactcacagtgatagaattctcaattggggatataagacatacatacatg

SEQ ID NO: 449286 - DNA, 531 bp, Homo Sapiens
tttcaaatgttgccaaagtcatgggaactctagttaggaagatttcccctacttagagcatgtcactctggcgtggaccttcattcatctctttccccggcctggggttgatccattctcccttcttcccccttctcctgccctgcccccaccttctcagtcacaatctttgtcttcccagtttggcaggacatcccaggggcccctgggctttccttcctgaggttagaagatggtgctttgaaagaacaattgctcctacaaccatcaaatcaaacttttagaagctgataaagaccttaaaaatcattcaatctcctcttctttctccttctgtagatgaggaatctgagggtctaagaggagacatgagctgctgagattgactgagctaggcagggccagacatagactccacgggcaggcccgcagtctttccaccaggtcaggccactccctcgcccagggctcaagattccttttagagttcaacagagcagctcccgagaacagaccagccctcaagactca

SEQ ID NO: 449287 - DNA, 606 bp, Homo Sapiens
attcatttcttttttgtttcttaatatttgttgaacattttgaaattccttgtcttagcaatattggaggaaattaacaaaagggagggatgtgcttcccttctggccagtgttcataaggcaatatgaagaactgagggatcaggtctagtcttttccacagcacttgaaacaactaaaattaaaagttgaacctccagaaggtgggcctggggctgctgtaccagtatttttttcatagagatgttctctgggagggctggaagctttaacaactatgaccagtgtctccaagacggtactttagtaccatgggcattgtctttaatcacagaagtggctgcacttttttttagtgctttctcttcagctctgaatggctctgcctggagtgtcaattggctgccctgcagactggtggtttttttggctgggtgtaatcttgccttggtagtactgctgccttcttgctgtcacttggtgccactgcacagaactgctgcctggttcctgttccttcctcatcctgccttctggttttcacggaatttgggatgcctgattgcatgctaagccttaacaaattgtcttgcgcatccttgggga

SEQ ID NO: 449288 - DNA, 556 bp, Homo Sapiens
tgatcttcgtgcccaatgttatcttggtaaatgtttatgtgctttgctgtaactgcagaaccaaaaatcaactgtttttggcacagtggttaagacaaagaaaggttttcatggggttatatttcagaagaggagacaggacagataatgaataagtaatatgatttcatacagtcatgagtacaatggaaaaataatgagatcagggatagacagtgattcagagatactttatgtaaatggctgtctgtaaaggaaacgtttgtgcaaagactgaacaaagtaaggaagtgagtctatgaaagatggtgaaggatgtttaagacagaacagcaagtgagaagtctctggaattaggaatcagccttttagagtgacaaaagaaagaaactttgggttgtagcagcataatgggaattgaagttagggggtaagggaggagccacagtataaaggaatgtctaggcaagtagtcagcaaactatgtcccatggagccaaatttagcccatgacctgcaaggtaaggatgatttttaaatttaagaggttgtaatt

SEQ ID NO: 449289 - DNA, 489 bp, Homo Sapiens
aattttgctttttgtttatttattttcttttcttgatatagtggatatatatatctacttcataaggttttagggagaattatgtagcattcaatgagacagtcatcaccgtagtaaaaggaacagttggagggtagtagcaataataatactagtagaagatactgtgtttgaaactcttaccaaagtcacaactaaaaatgatcatagctggaattccaactcattttctgactttaaagcccatgttgaaaatactgtgtaaaatgcacgaagcacctggcaggcagtcatctgtgattactggtttctttattgcttgagttggatgacagtcctaggtcatctgattggattttggattcatttgagacatctggaacctctcttgggaacttcttcctccttgggcctttgcagcaggacagatgggctctcaacaccactgcagatttcaggctctctctcactggaacattaagaagtagt

SEQ ID NO: 449290 - DNA, 393 bp, Homo Sapiens
cctttcaaaaaaagcttctttgaccatctcaatctaaattaacctcttcctcccataaactccctttgactccattaagctactgacagtttatgaaattatgtaaattccagtttatatgttaaatgattgcttaatttttcttacattatctttctaactagattgtttgcttcttctggatttgatcccccagctggcacctggctcagacttaattaatgctgcctgttcttgtctgagtttccatgaacttataaatacaagttgtttttgtaaattgagtcccaaacccatatgtttataagagcaaaccccttgagcaggattaactatgtgcaggtatggatattctgttgcatttttttctaaataaaatcttatttattggct

SEQ ID NO: 449291 - DNA, 471 bp, Homo Sapiens
tttctattgaatgatttttaatttaatggatcaactgtcctgttaacaaaagaggcggtggccgtgtttggcgccaggcgggaggcagcagtcaggtggtccaggggctggaggtgagggctttgccgcaggcgcatgctgctctgtgagaactccgaggaataactcactggagggctataaatgctgaaggtaaccaggccaaggactccagtgcccccagaagtcgcaggggagagacagtctgtcccctctggtccagcccagggagggcctgcagcctccccatgggagccatggccaagggggagaaaggtctccagggctggagggcaggtgggcggtggggctcatctcaggggcagggcatgggggtttgtgggccaggacccacccaagggctgggtctgggaggtgcttggggagcccagggcgacctggtgtgtgccctgcgggatgccccgagggctc

SEQ ID NO: 449292 - DNA, 211 bp, Homo Sapiens
tttttttactcatagaaatttaatatataataaaggtaacatcacaaatcagcagagagaaacataactgcccaaatagtgttggcaaaattaactgcttggggaaaaagagttgttctcagcaccaggaagagcttccaaagcattttaaaaacagacatcacacatacacacacaaaatacctctgggcatcaaaaatcgccacaaaag

SEQ ID NO: 449293 - DNA, 453 bp, Homo Sapiens
ttaagagataagttatttattgggaacatttgacagagcttttgtacatcatgggaagatttggctagaaaaaactaacaaattttaaaagtaacacagtttaactccaggaaaaataaaaagttacataatacaaaatgtaatcatcagatactatttggtgtatgagaaaacaatatttacatagtgcaaataataaggaaaatacaacattttgataaattgaaggatgagtaaaggtaaagtattgtgtctcctctggccagatgaacaaagaatcatctttctgaaactgtatcactatcagattaatgcccaacatacacacatcttcctctatatgataaaccctatctggagtgctgagaaaccatgacccttaaccttccttcctttggagtcagaaatctcaactttcctctgtactaggtcctagctggtggatagttccat

SEQ ID NO: 449294 - DNA, 357 bp, Homo Sapiens
  misc_feature (72)..(81): n is a, c, g, or t
gcgcccagcctcatgagggtctattctttacattcaccatggtctgatggttgctacatgtttgtctatgannnnnnnnnnctattatcaggtgtcttggccggttcatgccccacgatgaaagggccagaggttttcatatgagtaaaagaaaaaagcagaaatgtgaaacctacaattaggctaaacaaaaatcaactggaaaagtacaggctgaggggagaagagttggctacatgtttatgttaggggaggagggagtacattttagctatgtattcaaacagctaatagtttaatgttgctgcttataaacttaattttaggctgcattaataaaagtgtagtctccaaacc

SEQ ID NO: 449295 - DNA, 446 bp, Homo Sapiens
aaacggtgaaaaggataagagctggtgcatctatatatagttaaatttgtatttatacccagagaaacataaattggtttggagtaacaagaaaaaatgatgcaaatcaagttcaagtagacagaaatgaaaaaggctgagaaatactgacagaagattgcaaataaagatagattttctaaattttcaacaataaaaatgcattattttgtaacaagaaaaattattctttcagactatatgaagacacagcatgataaaaagtgattactaatagtatactgttcaatagtattattttttaatgcaatatgaaaactaaaatactttgataaaaatacaaaagaacaaaattccctacttacatattctcaacttccttccctaataaatctttttgtaacttgttaagaagaaaaaggtaggctggtgcagtggctcacagc

SEQ ID NO: 449296 - DNA, 646 bp, Homo Sapiens
ttcaagccaagctggaattacaaattgtagcccatttgaaaatgcatacaaatgtgtgacatatacacccagaggaaaagaagtcacagttatgaaagaacaaagtgggaaaatatctttttcatgtaagattgagcattttggttgatactgtgataaaaaatcttgtgactgattctcttttgcattggtttttagtgtcatgtgcactctgcccaactcagataaaattgtatatgatgtaaatagcaggaaactataaatggtgatattgtcctgaaaggaagccacttcatttttcaaagatttcttccgcggcagggatctaggagtgtgcagggatggagttttgcatttctagaggaaacagcaggcagggtgtgtgcagccggaaaggaggcgtctaggttccaagggcaaatcccacccccttagaggggattggagagcctgggaaagaggctgggctgcctgtgatccccaccccacaccctgcctcctacaagcccctagaaggtccacactttgagttgtcagccagagacagtaactcaaaacctcggcttcgggcagccagaagcccagaaatgggggagagggcaggcctagacaccagggatgaaaataaagtgaatattaaaaatta

SEQ ID NO: 449297 - DNA, 434 bp, Homo Sapiens
  misc_feature (376)..(376): n is a, c, g, or t
  misc_feature (400)..(400): n is a, c, g, or t
atcataataggcaatagctattttattataactccattgggtgtaaaaaaatgactcaagatggcgaacaagatacagtaaaatagaaaacaacacatacaaatgagcactaggagatcaggacaagttatgataacctacacaggcagtcagttagggatacaaactgagcattctggcaaccaaaatgagaaggtcatttgcttacattgttttagaaggaaaaaaatatgtccattcttcaaggaaaacaaagcttttctaatacttagaattaagatgaattactccattggtcttcatgtaattatacaatgtctttgatataaaaaaatttatatttcataacacctagtatacagcagtttctctgggngaataaatatttagttcatagcanaaagtccagaaaggcagatgcgaagattgttctt

SEQ ID NO: 449298 - DNA, 256 bp, Homo Sapiens
  misc_feature (174)..(174): n is a, c, g, or t
cactgctttttcagggtataaagtatctgatgtaatgaactaaccattaaatgataagttggcctcctcaaaaaatgatgtccagttaggaaatcagtattgatttatgttttctgcaagttttgacatttgacaataacgacagctaaattcatcttggaaaacagaaggctnagctgtttcaatatgcataggctccacccctggcaatcatggcaattttattcacactctgacagttgatgaaagaggcaga

SEQ ID NO: 449299 - DNA, 452 bp, Homo Sapiens
aacataagattgtctaattgttggtaaataataaaatatagggagtaaaatccagggagtcagtcttggtgcagggtgaagattgtctaattgttggtaaataataaaatatagggagtaaaatccagggagtcagtcttggtgcaaggtgaggccacagagctggaatgggcctgaccagcctcgcactgtacaagcaccaatctagagctaggactgaagctgcaagatgactgacaggactctgggggcattagctccctccaacaaatggtggtctcacgtttcaagggctgtggtcacctccttcctcatgacacccccggacatggtggaaggtccatttgcagtctcagtgcccgctggtggccagtgagctgacaccttcctccagacttcagagcctctcttatgccaagctgccctcctctctccaatcctgtactacaatg

SEQ ID NO: 449300 - DNA, 411 bp, Homo Sapiens
aagacgagaatacatggtaggtatattttccttattaattttaaagtttacaaagcaaagattgatttcaacccagctgtttcatgttatacattctaaataatatgagatgtgagctaataagttttttgtgtatattaccttattgattgaaacatgtgacccaacttttagcattaaatgtaaaaattattgcagaagactgctaaatcttctcttttccattataggtttttctgttcatgcatctcagggtgtattctaagatgggaaactgtttttaaagttttagattaatacagggtcctgtggttctcaaaattgcttggttaacaagaatacctagatatgatgttattaatcatatcaaatgtttttctgttaaaaatattaaaataactataaaatgtg

SEQ ID NO: 449301 - DNA, 450 bp, Homo Sapiens
tcatttaacaagtatttattggtactattctaggcactggggattcagcaatgaacaagatagacaacgttccttctttcatgcttacatttttaaatgggtgttagggataggtaaggccataataagacaattcagactgtgataggtgctatggagaaaacaggttgatggtggtgaggtgtgagaggtcagggaagccctctgtgacatgaactgagacttaagggaagaaaaataagcagccatgcagaaatcagtgggaagattccaaacatctgtgataagtgatttttttaacacactaaatttacaaatccaaaagttcttcctccaaagtagtcatgagctacaggcttgttttctgcttccattaccaaaaacatttcttggagcttatttggaaatgctttgagaatatgctgcacatctttggaatgagttgtgaaa

SEQ ID NO: 449302 - DNA, 460 bp, Homo Sapiens
gtcatttagttattctttaatcattattactttaaaatacactaatacattcttatctacttccctccaccgacaaatattttgctaaattaaaaggatcactggaagtattatgacccccctcgtcacaggtggtcagaaccaccacagttttgtgaatgaatcagagaaggcaacatttcatcaacgaaaactcatttaggtttcaaaaggcaggatgtagtacagaatgcattattctgactgtcttctggaatagaaaaattggaaaggatgaaagaaggaagttagctccagctccactgttaccttggcaaccgtggcccaatcacaggggcagaaattaattttgtgccgtaacataacgtggcagaggagtggggagcgtggagtggggagagaatgacggctgggtttaaatgctcagaaggctagtggggagggttacaagtcagccgtc

SEQ ID NO: 449303 - DNA, 289 bp, Homo Sapiens
gtgtgagcccccatttcttttttgcagcctcacctttctttttcctctcctactgttggtgatcacttctgctgagtatctcttcctcttacttctgccactgtcccatggctcacctttcctgccagtccccaccggcacacgggaccgcacttacctctataggagtgtggcagccactgccagccatcttccccaacgtccatttctcccctttcccctgcgtgattgcctctgggaataaaagaccacatttcccaggctccctcattctggccttggccatgtg

SEQ ID NO: 449304 - DNA, 445 bp, Homo Sapiens
  misc_feature (268)..(268): n is a, c, g, or t
ggaagagaaatctgctatttattaaacactgtttcgagtgttcggtacatttcctttcctttgtaacggaagaaatgcccagaaggggctgaggcctgaagaccccatccccattagaaacccaaagctgtgtgtacgagctgctctgaggctcagagggaactcaggaggcccggccgggcaaaggggccgttgaaatgaccttgacggtgggtctgacaatgtgagaacagccgggagcctctgccgaatgactgcgcttctgtcnccacggcgtgcccacgccagcaccggggagactggaaccgtctctcgccaggaaggcgtgggcagtggtgttgttcggctgcccccagctccaagtgtgggcagtggttttgtccgaccacccccagccccatcccctggaccctggggcacagctgtggaatgcgtggctggtctc

SEQ ID NO: 449305 - DNA, 307 bp, Homo Sapiens
ggcagtcgttcaaagcacatgttttagctctcggcaggtggcctggaaggacccgaccccagcccctgtgctccatgcaccatgccaagtgcccccatggccccacttacctgctctccccagccctccagggaggcagagcaaaggcaacagaggggtcgcctgtcacctctatatgcgagtggccttcacacccagggtggtcagtgcagcggccacggcttggaatgaggcccatgactttggcccacccgcagccctgccgacctggctaaatctgcaaatctggcaggagtggcccttgcag

SEQ ID NO: 449306 - DNA, 460 bp, Homo Sapiens
tcctttgtggtatccacaggcttacttgagattaaatgaggctagacacatttgtaaaaggctgcacaacttgtttgaagattacataagcatatgcatagatccacaaagctttcagggaaagtctgttccctatgtagtcaatattttccttttttctatgaatatggagcttgggaatagatgtattaattttgcacccagttccatgttttattccattgaattcgtgaagcttttgttaggctctaagggaaaccaaactggctaggagggatgacaacagaacaatgatgggtacattattattccatgttatttcctcttgttcccacatcactgttacattcctctgattattgcagtctcaaaaaatgtgctgatcactgtgtgtgttaggcaacactgcaagaccgagaagctaatatcccagatagagtacattatgcatctgatgtaa

SEQ ID NO: 449307 - DNA, 427 bp, Homo Sapiens
aaattctggcttttctcaaactccccttcacattctcttacagaaggggaattcatggtggccttgggtatctctgacctagctcttttcctgtggaagcccttggcttttaccaggcttgatacatctgtagggagagggaggcatgaaaaggtagctgagggccccattcaaggtgaacaataagaggaaatgagctggcaggggagggtatttcctataacttacacagcagagcttgaattatttggggggagaaattgggggggtttcatttcctgaaatccagactgaggaagtggaaagattttctaactatgtttccacataacatattaccaaacagtattacaattctttaaatgatttctatcaactgttggaattagttataatgagtcataataaaactcatcttgaatttata

SEQ ID NO: 449308 - DNA, 401 bp, Homo Sapiens
  misc_feature (324)..(324): n is a, c, g, or t
ttaagagttgcatattttactttatttttattaaattaaaagctacagtctggcagcgattccagaacagggtaaggaggttcctcacaggggtcagagaagagcggagaaagacagactgacggagactgagacacaggagagaaaggacaaggttaagggagaactgtatctgatgaacacacacagccggctccatggcgggtgacggggagctcacatcagcccaatttctcctccccggcacccgaagttcagcggtggagcagtatgtgggggcggttaggaatcaagagaccctcccttccccaccctaggtccttntctcggcttggtcgtggagcacagcacattaccagaaaaagccaagggcaattgaggggcagggaaaccgggagtat

SEQ ID NO: 449309 - DNA, 404 bp, Homo Sapiens
tcaaatgtatcagtttattaaaaatgcagcatttttcacatgagctttaaagatgtggaagatggggtacaattaaaaccatgagagttgtgcagggaacagccgtagggcctgtttgcaccttcagatattgcctgctcccaaaaattcagacccccagatgcagggcaagacaataagaaagggtgagtgcaagcaaggagagcctcctgctaagaggctgaggtcccctctggttccaaggatgggatgtcagccttgaccttccggggtctgcagtggccagaggctgcctgtcgccccttcctcctccccttcttgggcactgtgggagcttctgggtcctgctggaggctggtcccctcaggccgctgggttgagtcctcttaggaaggtctctcttt

SEQ ID NO: 449310 - DNA, 748 bp, Homo Sapiens
cagctctttcagtgagtttttattaactggataacacatgtaacacatagtagaatacatttcagaggcagagttccttggattattttttattaatattagtgtttagcagtttatttaagggggtgccaaatatagcatccttctgttgtttattttaaatattttttaatgaaaagggacttaaaaagtaaacatgattatctaaattacttaaagttttttaatcttagtaaaaattttaggaaagttatctagtttaaatttcaaatgttttaaaatttgtaggcatttaataaattatctttttttggaggggtggatgctgcatttcattggaaatgtcatttttccaaagtttctagctatatactctctttccttcaaataacataagtctgaaagcaatgaaaacgtcaaaggaaaatgtttatatacatccacatgtttatttaatatgtttctcttaacacctgaaacttgttttaaaacaaaaagcagtattcacttcaaatcataaacttagaattctgtatctcatgtcagaaatatgtttatggccttgcttttaagtggtgctgtttcccatagggcattagttctcggattttggaatgtgaaataatcacctaggaagttggtttaaaatgcacactagtgagcccaccttagacttcttttggggccttcgacctcactttgagaaataccttcttcaggttattctttatgtttgccctgtggaaaa

SEQ ID NO: 449311 - DNA, 432 bp, Homo Sapiens
cgcgcacgcgccgcaccaccccgtggtgcacctgtcggccggcggcgcgccctgggagtggaaggcggcgggcggcggggccaaggcggaggccgacgggggctacgagctgggggacctggcgcgcggcttccgcgtgcggggccaagcccccgggcgtgtcccccggctcgtcggtcagcgacgtggaccaggaggagccgcggttcggggccgtggccaccgtcaacctggccacgggcgaggggctgcccccgctgggcgcggccgatggggcgctgggcccgggcagccgggagtccacgctgcggcgccacgcgggcggcctggggctggcggagcgcgaggcggaggcggaggccgagggctacttccgcaagatgcaggcgcgccgcttccccgactagcgcggcggggccgggggcgggcggg

SEQ ID NO: 449312 - DNA, 533 bp, Homo Sapiens
gggggaaaatgtatttggttttgttcctttcatcctgtctgtgttatgtgggtggagatggttttcattctttcattactgttttgttttatcctttgtatctgaaatacctttaatttatttaatatctgttgttcagagctctgccatttcttgagtacctgttagttagtattatttatgtgtatcgggagtgtgtttagtctgttttatttgcagtaaaccgatctccaaagatttccttttggaaacgctttttcccctccttaatttttatattccttactggttttactaaatattaagtgttctttgacaattttggtgctcatgtgttttggggacaaaagtgaaatgaatctgtcattataccagaaagttaaattctcagatcaaatgtgccttaataaatttgttttcatttagatttcaaacagtgatagacttgccattttaatacacgtcattggagggctgcgtatttgtaaatagcctgatgctcatttggaaaaataaaccagtgaacaataaaa

SEQ ID NO: 449313 - DNA, 351 bp, Homo Sapiens
ctgttccttcttcagctggttcacaactgattttcttttccgcaactcatccttcagagctctgatcctaccttcaatatcactctggtcagatgtagtttctgactgtgtcatagataatgactcatctgaccaactataacagtgctgatgggacttgataggcaggtgacattgtcctccagtcctatgacttcctttgctagactcctgctttgacacagatgtgcagcttttgggaagtgactgttcaaacagaaaaccaaatggaaaatgtttactaggagaggtagaagattctagttcctgtgaacaaatcatttcttcagtaagtatactgtgatctggact

SEQ ID NO: 449314 - DNA, 417 bp, Homo Sapiens
  misc_feature (286)..(319): n is a, c, g, or t
tgacagttttcaagtattttatttgaaaagtagcaaaatgacagttgacatatttagattgaggataactataacattactgaatggattattattcttcagtgcgatacactctgatattcagccttgccctgagttaatcaaatcactggagaacaaaagcgaataacagcaggtctctcttttttattccaatttcttacatttattgtcaatgatgaattcagatgccagtggcctgcctagaaagccactcttaagcaacaaggagtctgccaatccactnnnnnnnnnnnnnnnnnnnnnnnnnnnnnnnnnncctctatgttaatgaagcagcaactgtggccccctagcctcctccacttcaagtacaggtgttcctagcagattaagtcccttaatcctccagcgacc

SEQ ID NO: 449315 - DNA, 945 bp, Homo Sapiens
  misc_feature (286)..(319): n is a, c, g, or t
tgacagttttcaagtattttatttgaaaagcagcaaaatgacagttgacatatttagattgaggataactataacattactgaatggattattattcttcagtgcgatacactctgatattcagccttgccctgagttaatcaaatcactggagaacaaaagcgaataacagcaggtctctcttttttattccaatttcttacatttattgtcaatgatgaattcagatgccagtggcctgcctagaaagccactcttaagcaacaaggagtctgccaatccactnnnnnnnnnnnnnnnnnnnnnnnnnnnnnnnnnncctctatgttaatgaagcagcaactgtggccccctagcctcctccacttcaagtacaggtgttcctagcagattaagtcccttaatcctcccagcgacccctagcatctgatgtgctatctgcattggctccgtgtcagtatcagctctggccttggcctacagagcttccaatgaagagactgtaatagaagaagccagaaggaaaaaacaaacaaggcaacatgggggtatttcaagactgtcggaggtgttcctgaatcggtggcattaatctagaggccatgttctgcagtgggagagcaatgggcttgacatcacagggaccaagattcagttgccggctctgagggttcctttctaggtgatctcaggcaaggaagcttcttgcactctgagcatgtttcctcaagtttcaaatgcagagataattctgacctcacaggaattgagacgatgtgtatgaaagcacctattttactacctggcacacaatgtaggtgctcaatagatggtgtttgaatcttaaacttacctggggaaatttttaaaacttcaccattcaatagataggagttagcaaattagcaatatgactgcttacttcctttggtttatttatacacc

SEQ ID NO: 449316 - DNA, 358 bp, Homo Sapiens
  misc_feature (300)..(300): n is a, c, g, or t
tggtaacagctttattgagatataattcatataccatacaaatcactcatttaaagtgtacaattcaatggttttatggatattcagagttgtacaactatcaaaataatcaatttcaaatatttttatcaccctaagaagtaggaacataccctttagtagtcactgtctgcatccagcccaaggcaaccactaatctactttctgtctctataggtctacctatgctaggcatttcctataaatggaatcatagaatatatggttctttgtgactggcttctttcactcttcatgttnttcaaggttcatttatgttatagcatgtatcacttcatttcttttgatgaataatatt

SEQ ID NO: 449317 - DNA, 643 bp, Homo Sapiens
  misc_feature (20)..(20): n is a, c, g, or t
  misc_feature (48)..(48): n is a, c, g, or t
tgtcattagaaagtttatgnatgtaactgatctcattaacagataaanggagaatacccatatgatcatcttaatagatgcacgaaaagcatgcaataaaatacctatttattataactgctaatattttgtgtttttccttaaaaatgcagtgtttttaggaattaaagttcagagcagcaaaagtcaaacaaaaaccaagtctgagcaatagagctactacagtgcccatcacagtgtctgctcaggtgacttcttaaggtcatgtccagctctatgtttctgtgaccacaaatagcatctttggcaagtctagtttcagttggtctttgtccagctcctggattcctccatgcagggcctgagaagccctgagggataaaagattaatccggttcagtggactctgtggttcctcaactccaagtgcccccagcataagtcggacctgcctctcacgcaatggatcccctggcggcaacccgagaccggttctcctacccgcattccgccaagtctctcgctctgcccaggacgcacagatgagagcgctccgaagactggtgggtctatctttcggtctttcctaattttcccgtcctctggggaaaggtcggggatacctgaaccaaagtgtgtgtcc

SEQ ID NO: 449318 - DNA, 515 bp, Homo Sapiens
ttttaggtttattttttacttttaataagccagtactataagagcaccatttcagcacaacacaatcatttgtgaagtaaggggttttagttgagatctgtgaaaatagtttatatgggaaagaggtatgatggctcagagtgctgtcaagaacagctttctttctaaaatgaacctgtaactttccaacaaccttcaaatgcacagaagtcttagttatcattctctagcattagaagtggagctgggagaggctcaggaataccagtggtagccctggggccagccagggaagcgagagggtggcctttactatttgaatacagtttataactgtgaaggcaatattgctgtaagagaggaattggagcattgtaaatctactctgtgcatctttccatttaggagatcttttacttataggaaaatcagaaaaatagccacaagcaaagccagaaagctaaagactttaagaaactttccaagggagatggagactttgtcaactcgagctt

SEQ ID NO: 449319 - DNA, 451 bp, Homo Sapiens
  misc_feature (341)..(341): n is a, c, g, or t
  misc_feature (351)..(351): n is a, c, g, or t
  misc_feature (430)..(430): n is a, c, g, or t
ttttttcccttgtgtccaggtttattttacattctcttccaaaggggatgtggggctgggggagagccagcaggcaggcgggcagcacacagcagtctccctggggaatatttgagccaggctagtggtgcctggccccacagtgcggggtgatatgccagggccagggccaggacttggcagcccctgggaagaggaggccttggggccagagctcttgccaggcctagatcgctaagaaggtgctgcgtttgtcccccgccttgctccgcccccccacacccagctggaggccagaagggaaagagggcagccagcaagctggggtgctgggaggaacnccagcaggcngggggcggccttttggtctctacgaggctaggaagctgggttcttggttagaggaaccccgtggggcaaaaagcggaanagctggtccctgttagaggaa

SEQ ID NO: 449320 - DNA, 864 bp, Homo Sapiens
ccttgggaagttggaaaaggggtaagaaaattttttagcccattccttatttcagtaagatctggggaagaaggtctcaaagatgcccttggtggttttgaattggcccgggctcctggcccaccgacccattaagtgagtggagtgttggggccgggacggggttgagggcagagtggggggctggctgcagctgttgcagccttccggcctgagggagctaggatgcctcgcctcttcttttcccctccccacttcccttttcccccatggggtcgctaatggcattgccgcagtccaagggctccttcctgttactgactcactgtgtgaatggggggtctgcagcaggatggagggagtagagctgtagggtgggctggggcccccttccctatccggctgctggagccctgtgctctgctcacctgtaccgctcaccacattgagaagtggccccttgccttcttacccatctctgtgacttgattaactctgctcccagtgagaagttagtgggtcccagtcagaagtggtctacatctgtcaaggcccctcctgtggtggaggcaccctgacctcagtgaccattctctgctgggaacccctatggctctgcactgagacttagaatgacagctctgtggatcatctattaatgcccgggccccagctccccccaccacacagtcactgagtacttgctgtacacccgcgagaacagaagtgtctcagcaacaggctctgagtggcccccttggagtccaatacatgcggcaagggactcacagctccgccccgaagctgcaatgtattagtgagtcctcccaggctttcccatcccgggaatccggaccggtccag

SEQ ID NO: 449321 - DNA, 1487 bp, Homo Sapiens
  misc_feature (1462)..(1463): n is a, c, g, or t
caggataatttaacagtcctttttttgttgtgtggaccacaagcaaattgagttataattggtgcatatacagatatatatataaaattcaactgctttgtgtgtctagtcgctgcgttaaataaagggacagaaaaactaaaagccaaactaaaaagccaaacaaagcccaggatagaggagacaaagcaggcctatgcgcacagtctatgtgttactggatataatcagggtcaccaggaagaacagctttgccacttgacacacaaacactgcggggagaggggctatcagtgggcaggagccaaacctcttggccttttcacctcatctgctctcactgctgagcaggacctgattaaaggtaggacagaatgggggtttgggggcaaagagatttccaattccccaaatgttcttgaattcaaaggtaggatttcctccagggtctgggctctgcctgtgcacaagtcggagcccggagcgggagctgggggttgtgctccctccttgcactgccctcacacctgcttccttctgcctcctgacagggcaggcagggggccttggggaggcagtgagaggccagctcaagaaggttcagctgatccgaggcgagcagagccaggagtgggcaagggcaggttgcccctcagggcagaagtgctttcctagttcccctgggtgttttcctgacccgtcagcgctggggcaggctctgtcaaagatgagaagagtgggaaaggagggtgggtgctgggccttccaggtcactggtgaacgctccactttccataccactcccaaaagacaggttcagaagccatgtcctcaggtcggctacctccagattccccttgcctgtaatgctcaccaggcatctcaggccaagtgctaagtatttttagatcagcactgttgtaaaagcttgctcgtattcattcaaaaacatcgaaatgtaattttctgccaaatgttttctaggttttccttctaaattgttgagaactgacttcagtgttcagcttttcccctctaatatgtaattttagaccctgggggaggcagtatcctaacgatttataacaagtagactatgccttttctaaagattgatacaatatctaaaagagaaagacaccaaaatggagagaatcaacaaatcccgtcagagcagagagaagagtaggaagacccggagggagcagggctctgcccccccaccgggcaggtcctccagacccactccatggtaggaactctagaaacagctgagtccctgaagtctaggacacaggtcctagaatctgcaggtgtgaacttgaaacaggaatccatttggggcaatgacacaggctaaaaatgtatatgcccaaagattcttcttaaagaacaggtacctgtaacctcccctggcatcgaaagaattccggaccggtaccagcggtttgtgtggagcggnntgctttttgttcgggtgtgggagt

SEQ ID NO: 449322 - DNA, 319 bp, Homo Sapiens
  misc_feature (182)..(233): n is a, c, g, or t
ctttttttattttcccttgtcctatgctatggttatcagaaatattgtaattaagcaacaggtataattttaacaggtctttttttgtgtgtgtggagccacaagcaaaatgagtttataattgtgcaatatacagatatatatataaaaattcaactgctttgtgtgtctagtcggtgcgnnnnnnnnnnnnnnnnnnnnnnnnnnnnnnnnnnnnnnnnnnnnnnnnnnnngcccaggatagaggagacaaagcaggcctatgcgcacagtctatgtgttactggatataatcagggtcaccaggaagaacagcttt

SEQ ID NO: 449323 - DNA, 800 bp, Homo Sapiens
gtcagcacctaagctataaggtaaaaatcgctactgcagtaggctccattgttgaataaaaggaaagggaaatgtcattgatagtgatcttaaaatatttaatagtctttctttaaaatccaaaatgtgattcttacaagttatgtgccacatgaagcaggtgttattttttgagaaatgcaggtgataactgaaaaacatagcactgaggtattttttatttttaaaattgaaggaaacaaagtctggatctaattatttttacatttacaaaaactgctactgcttggctcttttgctataagtttaggttctgaatacatgacaatgagtatgggaaagagcagaataatagtacacgcagtttttaaaagctatgcacatcataacctggaataatgattacacagcaagaggcctgagtggaggtaggctaacaacacattttgactttctcctcaaaggatagcttctgaaaacacaagtgtataccaattgttacagcaaattaacaatggcaatattaaatcggtgacaaaacgatccacatttgtatacaatattgtattatccaaacatacataggtcatgaagaatcagagaacctaatatagcagccgttgaagaccattcattatccttcatgcgtgtatgcacattcagaatttctggcagaaggacaagcaaactggagaattgcctttcgtttcctataaagtcatttggaatttcaattaaatctttgccttagtaaagggtatttcttatctcaagatcaattagccgttttagctccacct

SEQ ID NO: 449324 - DNA, 790 bp, Homo Sapiens
tttttccagattataaataatttcatttttaattctctgtacaaaacttctcaatctatgaaaataaagtttgcaaaaggcaaagtagcacaggagcctcaggtcaggaggctaagcacgctgacctacactatgtacacgtctctctcccacgacggagagagaggcctctggggcagagccctgcttgcagtccgggaaagccaagttggcttccgtcagcacagggaaatgtacccctctcttccctgtacacaggaggaaaaaagccactaaggtgcctgcagagcaaggaggggggccccccaaaatggctcggcccctgcagtgccccgatcggccaccagaggtcagcaccatcatggccgccggtcttagggtcaagatcgcgcccctcgggccttccaccgcgaaggcacacagcagccgcaggtcgaactgtggaggccagagtctcttgcactgccttcggccttcaaagcttcgacgcaggacagaagctgcacgggaccaaagtggctagagacatgggtgctgaggccggggacacggggtctagcctgaagtgacagtggtcccaccgcccaggcgcatgagcatctgctgacagtcgtgcagcagccggcgatcgccaagcttctcgagtgtgcgcgccgcctcagccagcatgcccacgcgctgcccgggcgccgacaggaagccggggggcaggtagcaggccagcagcaaggcctccgcgtgctcccgccgcgtggccgcggctccagctccgccaccgcgcctccccgct

SEQ ID NO: 449325 - DNA, 613 bp, Homo Sapiens
tgagggcttttgctcgggctttttatttcacaattgatgcttaaaagtgcttttaaaggcaatattgcaactacatttatttatttatttatttgctgcagaaatgaagttatttattaaaacacacccatggtagcaagttctgatgggtctgaagaggaggcaggagcacggtgttgagcttctaaacatcgtcctgccagggagggaccctgacaggtgcttggctgacatgctgtggccgaggcaggaaggaagttgcagaattccacgaaggcagaagactaccagtaggcaggtcccatgtcatcacacccgtgagagtggcagtggtctggtggccacagagatgtctgacagcgtgggtctggagccggtgatcggctggctttgagaggttccttcaggaggtgcctggaccctgatggacagcccccagcctcacgctcccccttgaggtttgcagagggtgccagaagtgaccccagaaagggttctctgaggtgctgcggtccctacccagcagccaggggctctgtctggaagtggccgtgtcgtggccgtgctgaaccgctatgagtccagagcttccccgggcctccctctgctcctg

SEQ ID NO: 449326 - DNA, 378 bp, Homo Sapiens
gttgttgttgttgttttatctcagggtgctgagattatggttcttaaacagatgaagtcttcccagaagtgctccaggatgaggcagataagtgtcaacatgaccaattctatgtgattgtcatccaatggcatggtcttccaccgtccttcacatgaagaaacaatttctgaaactatttctgcttgtaattgcctgagtatttgccacgtggcactgaaatttcctggtaattctcttgcagtggatgcttatgatgcattgggtatcagtggtatttaaaatgttctgctagcatttaaaatgctctccagaggttgcagaattcagtgagcctggagaattctgagagccgattcataattatttactcagact

SEQ ID NO: 449327 - DNA, 422 bp, Homo Sapiens
  misc_feature (373)..(373): n is a, c, g, or t
aacactgtgggaagagtttagttgctttatcaagtcatattatatttttatgagctaagatcatagaggcaaatggaattcttagaacattacctaaaaatagatttttaaagacagaggtcccaactcattcttatatacacatgcaaaagttcatctgtcacagacagcaaatgttgaatttctacattggagtttctggcagcatcctgcacatttagaattaaaatcaacagacagagaaatatcaaatatatcgagatgagttgttcaaatttgtgcaggacagaacacggcccctctgggactactgcctatgtgctcactgctgtttctcaaaggcaaacaccaagtaaatacctaaagaagaaantaaatagaagtcagtttctcatatgattacaataaataaaacaatctgt

SEQ ID NO: 449328 - DNA, 434 bp, Homo Sapiens
  misc_feature (272)..(292): n is a, c, g, or t
ttttaagcaaaccaaagaactttatttggagtaatagctaagaaaacagctttttatggaaactgaaaaagagagcagaggaagtataagagctaccccttaagaaataactttaatagttaaaaaactttcgtagaatcttactaaaaaggaggcaacattagtttaaaaaataactgaacaagaatctggcctaataaccagacctcggattagcatactttctagttatagatgtaaatcttcaaagtacatatattcagtacaagtcnnnnnnnnnnnnnnnnnnnnnagtgccagaccatcctttactttttcatgtccttgaaatgagaagagtaatgtacttaagtaattccttcttaagaatgtcccttaaactataacaacttcatagcatcttgacttagaatataccacattttccaagtccc

SEQ ID NO: 449329 - DNA, 482 bp, Homo Sapiens
  misc_feature (96)..(105): n is a, c, g, or t
  misc_feature (378)..(378): n is a, c, g, or t
  misc_feature (384)..(384): n is a, c, g, or t
  misc_feature (445)..(445): n is a, c, g, or t
tttgtcagctctttatgtcatgtcactctcttctggcttttgagtttccactgaaaactctgctgctagatgtattggttctccattgtatgttannnnnnnnnncttgctgcttttcagatcctttcctcattcttgacctttgggagtttgactactaaatgccttgaggtaatctttgagttaaatctgtttggtgttctataaccttcttgtacttttatattgatacctttctctaggtttgggaatttctgtatttttattcctttgaataaactttctaaccctatcctacctgctctttaaggccaataacttgccctttttgaggctattttctaggtcctgtaggtgtgcttcactttttaaaaattncatttntccattttcctctggtgtaatttgcaaataagcatgtctgcaagctcattaattgtttctnctgctgattcattgtgctaaggattccaatgcattct

SEQ ID NO: 449330 - DNA, 490 bp, Homo Sapiens
ttttcttttggtatttgatcttgctcgatgaatgtggacatcagctatgggttaggaatgctattcaggaacatctaatgtgtttgtgataatgtatttgacttgtggccaaatggtactcttgagagatgtggttgtgactttgacagattaagccaaagttaaattctgatgaagtgcaaaggaattttatcggtcccaggatggttgccaactgtgttgggcaaaagagtgattttccaaaaaggtccagagcaatccgcatgtattctgtcacctctacttccagtttcttcaaaggccagccaaaagcttcattttcctacttcctgtcatttccaaaaccacagcttaaacctgaaaaacaaatgggaagctgtgttcctgcctcttatgattgctgccacttacaaaccagcaagaacagagcacagcaagcagaggagagttcagtcttgctgatgtcacatgaagcagaatgagggactct

SEQ ID NO: 449331 - DNA, 543 bp, Homo Sapiens
tcagatttttgcactgtagatgagcgtatgtctcagtgctgccccaagccccagggatttctcattatgttcaaatgtcctagtgatttaccttaatcattgcaaacaattatgcttatgaagtttacttacaaacaagcaactgagtcactttattttctttagtgtagtatgtgaaggcactggttcaacaggatggctccagaactgtgtttttctaatgtttggtaaggggctagtgagaattttaatgatatggtgaagaaaaatatatctgtataattaatttattatattggtgtatgggctgtgagttcaccttttagtggtcatttgtcatttcataacaactatgcattttggttcactgtgatgatgatctatatttagtgactgcaacatgtttataccactgattcaaattccatccatgatgaagttatacaaataatgcatatattgataacttttattgcaaaaatgtaaatttaaaacttgtataatgttcttgtgctttttaaaataaaatatatgtgtatattt

SEQ ID NO: 449332 - DNA, 883 bp, Homo Sapiens
atctgttagagacattttatttagaggcaagaaatggttaataagatgagacccttgggtctaggagcgtttgctctttgttttcttccttagagtgacagattttttgctgttggtgaaggcccttgaagactgtggtttaaattcaactggaaagtggtcgctgacatccagggcctcctcttcagtcaggttgtaagctttctggaagtcaaaaacactgtttgacttgggaacaacagaactgacgatttcttgtcctctaagcacaatcctgtcatatgcacagttggtgctcttcttcaccgtggtgtcctcttggtccccgatcagccaaacaaacctggggtcagtcctcaagcggatgttcttgcaggccttcttggggacgtagctgcagccggcgttgaagtcacccatgatgatggaattcttcgccttggcagctgtgtttcacgttggtgtagacctgatccaactcatcgatctccttaacggatgtctctggggtggtgtgcagggggataatcacgaagtctttgacagcagtgtggggagattggaaccagaccacaaagggctccctggaaaacacatctgcgtctccatcctgatagtcatggtagtgataactcctcttcacagacaccagcttttccttgtagagaaaggcatattgttctttatatgtgtttcttccaagccgagagctaatcacatagttgtacgttatgcctctccttgaatttctgttcagcttctccatcagtatggggcagatcctgttgttgctgtccttgatttccatcacgagtatgatgtcacagcgtttgatgaccttcacaatgacatccatggcattcttgtcttcctgcttgctttc

SEQ ID NO: 449333 - DNA, 580 bp, Homo Sapiens
atatttagtttcttttcatcgtttcttgggtaacttcaaccacatatgttaatttcattagattaatccacagtaccatattctaaggacttaccacaaaggaaggaaaaacagactcttaacccagatgataattacatatttaatacgtgttgcttttaacagcaatttttaaagtaaacacatcatagaccttataacttattaaagattttatagtgcttacaaagttgattctaaaaaatataccttatttgttctaaatgaataacattatctggaagatataataataaattatagtagtatgttttccaccacgatagttaagattgtgtacacatattcaatatgaaatcctcttaggattttcacaccttcagcctgaaaacataaaagcagattaaagtttggcatacaagatctcagtctgatagtaattgctttaaaactcaaagtgtaaaaatatctacttgacattctaggaaagcatggccacatgcacagacacattctctcactcactccaacacacacgtgtgcacacatactcacaccccagagtactcagaagatcttg

SEQ ID NO: 449334 - DNA, 785 bp, Homo Sapiens
  misc_feature (572)..(572): n is a, c, g, or t
agggaaggctcggtccacaggtggagctgacctggaccggccagggccagagtgagccgtctctcaggcatcaaccaaaggatccactgaatctcccttctcccccgccaacaaaggtacaagtagatgttgacaccccctcagacatggaaggagacccattgtttctttttctagttctggataaatggccttaaacaaaatatgcaaacaggctccttgcgtctcccaaaggcagcccaccacagaagccctgccacagcccaaggggttagatgctgccaggatctgtttccgccacagagcagctctgtgcagcacgttcctgccaaccaccctgagtgcttcagggcttccgaggccgtgacagtgagggcagcggcacttctgggtcaccgtgggacaggtctctgcctcaggacacggattgacaagctctctgagtgggccaggagctccttaatgtgagccaagcccagccctgccaccttggccccgttcacctcgaggatctcatcgcccacccccagcagccctgagtacagcttggccatgctcatgtcagccatctncctgcacgtagatccctgagtctgggcgcccattcccagaggccacgcagaagccgaaagtgccccctggggagcgctgcagctgcagctggctggtgccgtctgggaacacctccaccaggcggcccacggtgcgagccaggctgggagcacccacgtcctccacactgagcctcgtgccgaattcaacacccagcctcgtacctagccgtt

SEQ ID NO: 449335 - DNA, 1027 bp, Homo Sapiens
  misc_feature (303)..(318): n is a, c, g, or t
agcgggtcctttaagaaaagtgaatgacagtagtaccaaaaaggtattttcctttctcatttaaaagcaaaaacctccctttttaattgcctgtagaaggtaagattttctttcatttttgtccatttgtgtttcagaatcagcacaggtttgaagattagactgttagtcatctgtgctttctttaccaactggctagaacggaacagcatcacagcaacgctgcggatcttggttacacagtgtcagagcttttgttttttgatggggttttatcctcttcaccaccactacccactccannnnnnnnnnnnnnnnaagattagaggaaaatgaccattaagaaccagaaaaataattaatctctctggaaaaaggaaagctaaagaagactatgataccatacccatctagaaaccaagaactagtttgaaatcgtttatattcatttctgtagcatgacagggatttcaatcacctttctgaaaagagtgggctgataaacttgtaaatccacacacaactctgagaatacccactgccagcatcaaaaagcaaagatactaattttttaagccaaaaatctgtactaacacatgtaatttcttaatgtgcctaagttaatttctgtatcaattcaataaatggaattgactgaacttcccaacgccactaattattaaaatccatctgcttattctaatgctagtcaccaagagctagactccatctttccaataaaaatgagccctatgtagcactaggtttgaattctaaaattcaaaacaggcatttcattttcttaaggcacacttcctacacacagctatcaggggaaaaagctataaatgtcctgttctttttctgaagtgtggatatcaatataaaatttgttaaagaatatttttaacagctgacttacatgatcgttttcctaatacaggaatacagcgacagacctatctgaaaagtctgtttgggggcatacttttcatatcttattgactaaagcccttgagccaggaaa

SEQ ID NO: 449336 - DNA, 414 bp, Homo Sapiens
ttagtttttactttacacagtagtgaacaggaatcacagcatacaggttactgtgtttccatgaaaagcaaggataatattgaacgaaattcattatcaattagaatttattttccttctagaaaaacgattaggcttcatttgtcttttcttcagacacttgctcactactctcgcctactttttgtcctaagctgcttgcttgactttcagccctgtcatccttcatcagaccttcagtttttgcttcttctccctcattctctgcctcttctacctcttcttcttccacttcttgaaactacaggtttatttcaataggtgtgcaattaagatcgcctagaaataaccaatatgttaatgtccttataggaattatataattatagaaattcacatataacatatagatcc

SEQ ID NO: 449337 - DNA, 319 bp, Homo Sapiens
gtgaaacaggtgccctattttactaaaaaccacatatacattacattttacaaaacagcaactatctgatctctcggtcccttccttaaccccataaaaagaaggggatatttggggaccgacgggaacaggttcccctccaaatgctgagggctacccaggcatctccagactcctggtccagtgcagggcagggggcagcggagcccgctcactgctcccatcagcccagggttcctggagcccgtccagagccctcagtgcctaaccagggctggagggaccaacctggtgggcctcagctggactcacagcagct

SEQ ID NO: 449338 - DNA, 455 bp, Homo Sapiens
  misc_feature (42)..(109): n is a, c, g, or t
tttcagtacagacagggcttcaccgtattagccaggatggtnnnnnnnnnnnnnnnnnnnnnnnnnnnnnnnnnnnnnnnnnnnnnnnnnnnnnnnnnnnnnnnnnnnnaccgcgcccggccagttattcttaactaggtaatacactcctgaggagcaaaatgtattttaaaagatatgcctgtgtaaaaaaatagtgaggatattgacatgtgtgaataagcataaaatcaatagctaaaataacaatatgaaaatatatgctaagacattttcaaaggtggcaaagtggttaaaaggaaagagtagctttgatgaagccttaatgatgtagtagaaatcacagaacggagaatacaaactttactggggcaggattgggaattcctgctgtatctcttactagcaggggtaactcagaacaagcctcataattaatacctgggcctttattt

SEQ ID NO: 449339 - DNA, 808 bp, Homo Sapiens
gcggactcgcagactttaagcaaacacgtgtggggccgctcccgcctggcgggtcagttgtccgcgtcggtcaccagcggggccaggtagtccgagtgccggatcccgaaactccagccgcggggcttccggtgctgcgggcccggagacaccgttgacctcgcggggccggcatcctctccgcgccgggacccctggacccccggggattctgatcccatcactccgacctcaggccctccccactctcctgactctgacccttgaccctgggctccaggccacctgatccacgttgtaggccgcgggccctggcttccgagtgttgtcttgggggagcgaagtccgcgccagaatcgtgaactggggggcccgggacttgtagacccctggactcacgacctgataggcgcaggggcccggggtcttgctgaggtcctcgaagaaactgccagccgctctgcggccgtagatggagcaagttggggcggagactttgccgatgacgcgcggacccaagagcgagggcaccgtataggccgcgggacctgggctctgctgttccgcctggacaccccagtttcggggagcaatggtgtgccgaggcgcactggggtacgtcgcgttccccgctcgctccgggaagtacctgccaggtcccggagtgaggaagggcgctgagcaacgtgagcggccgtagatggagtaggcgggggcgccgtcggtgccgcgcacgttcatgcgagcggacaccaggtggcctggcccggggcgcacgtcgtctgctgcgtggggaagcgcgcgccga

SEQ ID NO: 449340 - DNA, 1072 bp, Homo Sapiens
gcacgtgcgtccttgacaaggctggatcttacaagtgtgcctgcttggcaggctatactgggcagcgctgtgaaaatctccttgaagaaagaaactgctcagaccctgggggcccagtcaatgggtaccagaaaataacagggggccctgggcttatcaacggacgccatgctaaaattggcaccgtggtgtctttcttttgtaacaactcctatgttcttagtggcaatgagaaaagaacttgccagcagaatggagagtggtcagggaaacagcccatctgcataaaagcctgccgagaaccaaagatttcagacctggtgagaaggagagttcttccgatgcaggttcagtcaagggagacaccattacaccagctatactcagcggccttcagcaagcagaaactgcagagtgcccctaccaagaagccagcccttccctttggagatctgcccatgggataccaacatctgcatacccagctccagtatgagtgcatctcacccttctaccgccgcctgggcagcagcaggaggacatgtctgaggactgggaagtggagtgggcgggcaccatcctgcatccctatctgcgggaaaattgagaacatcactgctccaaagacccaagggttgcgctggccggtggcaggcagccatctacagtgaggaccagcggggtgcattgacgtgcagcctacacaagggagcgtggttcctagtctgcagcggtgccctggtgaatgagcgcactgtggtggtggctgcccactgtgttactgacctgggggagggtcaccaatgatcaagacagcagacctgaaagttgttttggggaaaattctaccgggatgatgaccgggatgagaagaccatccagagcctacagatttctgctatcattctgcatcccaactaatgaccccatcctgcttgattgctgacatcgccatcctgaagctcctagacaaggcccgttatcagcacccgagtccagcccatcttgcctcgctgcccagtcgggatctcagcacttcccttccaggaagttcccacactcacctgtgggt

SEQ ID NO: 449341 - DNA, 403 bp, Homo Sapiens
ttctatttcagatgccttcaatgttgtgtttattgacacatccacccctttcccatttctttttcaatagggaggatactgggatgaggatgcttgtaatgtggtgcacactgattaccagaggacagctgagatactgttgggtcctgtctcctcccaaagcacacatcacatcccagggtgcacaccagtaaatgatcagattctggacatggggagccaaggacaggggaaggcagagagaggagcagaattgcaaccactgtcgtcatgaaggaagctaggtgagagagctggcacaaggtggcaacatttgcatgaagaggacaaacaactggaaataccaccagggggcgtgtgtagctgtaacacaccagtcatgctctttccctacagttaccag

SEQ ID NO: 449342 - DNA, 425 bp, Homo Sapiens
agcggccgccggacgaacgacgagggaagcgagtgtggaaaatcccccaattttttgcaaagtcaaccgcgggcgctcgggggccgggccgcgtgctgcccccgcgcggccgtccgcgggactgtgcgccgggagggggcgccgctgttgatctcgtggttctcagactctgagaccgcacggtgggccgggaatgaggcttcattcctgaagccgaatgttaatgcctcttctgggatcatcacagcctgccactaagccgtgttcttttacttttctttgccattaagtcagagatcacgcattaaagaattggtgaagtggatcttcaggggacaaagccactgagcagaagagctgccagtgcttttccttggaccccacaagcagtcagggccagaagctgcccctagcaaacacttagc

SEQ ID NO: 449343 - DNA, 566 bp, Homo Sapiens
  misc_feature (444)..(444): n is a, c, g, or t
  misc_feature (494)..(494): n is a, c, g, or t
  misc_feature (508)..(508): n is a, c, g, or t
  misc_feature (552)..(552): n is a, c, g, or t
tttctgattaaaaactttattttcagaagcagaactgtttttaacacaaagttcaaggaagcagtctgtccaaaaagcccaaattccacctttctaagtggctgcctctagactaactccctttcaaaggctctagaactttcaagcagggtctagaaactaagcatcctggattcctacccccgaagccccatctttagagctctcttcctggggtttggacgactgccactccaagctcagacttggtgtcccaacttctctcccttctacacctttacgacagttctatttccacaggaaagagacagcccgatctgccttctgaagaggccgtttccattgggaaacaagagaggaaggggctcttggcaagcagtgaaggcgccttcatagggaagcaaagccgctccacctcctcctcacagtcgtagaatttttcgnatagctcaggagaagtgctggttgcattcaaaccaccttcctcaaggtgnccaagggccggagngcaaggcctttgggtggggcaagggggttcaaaggaaccctctntggtccccttgtgc

SEQ ID NO: 449344 - DNA, 668 bp, Homo Sapiens
ctttatgcagttttcctcgtgcttcatttcttcctcccctacatggctaatccccatgtaggcctgtgtcactaggctgcttctgtgtggagacctatctctataggtactactttccatttcatcctgttgccatgggagttatgttggacctggtatcttctgacagccctttaaaattagtttttcttggccttcctttgcgactgttctttgtacttttaggtgatgagggctccagttcatgttcattaaaactttcttctaaatcagcttcggagttatgtgcagttttcttgtgttttcggcaatagaccatgtaaattccttgtgaaggtttctctcgtatttgagctttatcatgcaatgcacagtggtagtggtatgtcctgtgacatgttttcacatcacaaccaattgttgctccaggacaatggcacaaagaacacatcagcttcgtgcctcttttaatttccttttggacatcttcaatagaaaatccaccaagactttcattatcagagtgtgatgataccaaagcagatgaaaagagcatgcacttatggtgcgctgccaccttctggttttcagatattagtaactgtccacattccttgtctctatttgacttacaaagccacatttgcgctgtcttgtaggcccccgct

SEQ ID NO: 449345 - DNA, 710 bp, Homo Sapiens
  misc_feature (274)..(287): n is a, c, g, or t
atcatcgaaataatttatttaccactagagcaccacaaaaacagacatacatcgtgttaaaatacagcgtaattggtcatcaaaatacaaaacagctaatcttatattccattttttaaccatgccaacgatcaaattgtactgctgattaacacaaaaataattgctgcccacttgcatactagcacttcaccccttccttgccacctccaccccccctcccatggcaatatttacttatgggaaataaagaccttacagaacccccaaattnnnnnnnnnnnnnncagattcaagagatcttaaaatagagcatttaaaatattatcagtgcattcatgaggaaagacaaaataatacaaaacaaaatgtcatcctatctgagaggaaaatgtctgcagaaataaaagtgatttacacataatagaaaagtggaagacaaaaaaataatcaacacacactcaaatctgggattgggttacatccaacacaagggctgtttactattatggcatcccatctcttgcttttccagttttcaaacttgcaaatccaattctttaattaatggtcaggaaattccaaaaaagaagtagaccatatcaaacaacttcactttggattcccgcctccttatgctgctctttaggtgaaactgcaaatattccattgctttgcctattaatttttattttaaagctaaataagcg

SEQ ID NO: 449346 - DNA, 632 bp, Homo Sapiens
  misc_feature (200)..(237): n is a, c, g, or t
tttttttacttataaaaccttttatgtcaaagttaggatttcacaacataacacactaatgcaaaatccagtagcacctgaaagatttaagtaaatgctgtcatcatttaaatgcttttaaatatctgtaaaagactggaggaaaaaaagataaagtacattctccagagaacaaatgtatttcaaaataaaaactgtannnnnnnnnnnnnnnnnnnnnnnnnnnnnnnnnnnnnngtacaagattcaatagttatcacatattaacttatacacaatgggatcaacctcctcctccatgtcgcttcaagtccacatgttcaggctatagtccccaacattattttctgagaaatatattaccacagtttgatttaaatatagatacagtatataatacttgtctctgggaaaaatcaaattttaatatgcaaatgtttatataatacagaaatggaaaaaactacagtaggcacacaacctaattatgacttgtggatgatgatttctacatactctcctactgtaaatgaatagttaaaagtcttaagaggattttatttatatgtgcacttgtgtccaccttatcccatatactgtacatgtctattgacaatctgggaatttaaagg

SEQ ID NO: 449347 - DNA, 663 bp, Homo Sapiens
aatgtagttgtagagatagtgctttgcaaataagaggaaattggcaaaggaagttcaatatattgctatatgagacccaaggggtaaaatgtgttttaatgtagattgaagtcaattgtatttcttgatgtgtctttccacacattccttttgtgtatgataatgtcactgttgggcagtggaggcagagaggggaagtgaataggtaatgatgctaatttaccttgtccaggagtggggcaaaaatgcccttctgcttttactaagttagagggagaaagtgatgtgggagtttgctttagaaatgcacggcaaaagaaaaattgatctttgtctgtgtttgtcctcttttgttgatgtgggaacactattgaacgacttttggcaactactaatcaattgctatcttcctcctaacaatcttttctatcattgtttgatagtcttttatctcttttctcagtatattcttatattagtactattcatttactcagacattttattgagtgcttacctgtggtccacactgtactaggcataacaaggagtaaatataagtacagaagaagaaaaaatttaaaggtttttgctgtaaaaacataatcagttatcctatactcaaagacctgttgctcatgaagtatgtaattaatatgtatg

SEQ ID NO: 449348 - DNA, 491 bp, Homo Sapiens
  misc_feature (410)..(449): n is a, c, g, or t
ggacccagatatgtttccatttttctttcatcttcagcatggtcttcataggctaactcccctcaaggttggaagatggcttctgcagtcccagacattatgtgcagttacgaaaacatccagcagaatataaaggactatttttccctcatgcttgtcttcataagagataagaaattttccttgaaggcctttcagcaaacttaccctcatgtttcagtagccagaacacatgcccatccctgtgccaatgactggcaagggagaaaggatccccaaaaatgactcagaccccagaggattaattttgattacttgaaggggtagtgggctctgccagtaaagcaaaagcaggttggctgttgggtacatcatcagaagtgaacaagggccgggaccaatggctcatnnnnnnnnnnnnnnnnnnnnnnnnnnnnnnnnnnnnnnnnaccagccttggtaacatagcaagaccccatatgtaccccccc

SEQ ID NO: 449349 - DNA, 473 bp, Homo Sapiens
  misc_feature (356)..(397): n is a, c, g, or t
acatttaaatacttactttatttaacccaatatacccaaactattatcatttcaatatattatcaatataaaaatcaatcataaaatatttaacattttttcatattaggtctttaaaatccagtgtatattttacacttacagtacatctcaacatcgcaattcagttactaaattttcaccagaaaaatctatatttcatacgggtcactgttgaggaagtggggttcacacatctaggttttttccaaacataaaacattttccaataactgaatcgaatctctgtcttaaattttaaattaaacaaatttaaaattccattcctcagctgtaccacctacctttacaagcannnnnnnnnnnnnnnnnnnnnnnnnnnnnnnnnnnnnnnnnnaaagcttcagacattgcaacctggcgtatagactaaggtctccttggcagtggtgggtggacaaagtatccctcaa

SEQ ID NO: 449350 - DNA, 375 bp, Homo Sapiens
  misc_feature (282)..(332): n is a, c, g, or t
ttttgttcctagccattccacacactgcaggtataccagtctccccagtgattctctctgtgaagtgctcttctttttttgctccactgtgttactgtaaattctttttaaaattttaattgatacatgatattttacgtatttatggagtacatgtgatattttgttacatgcatagaatgtgtaatgatcaagtcagggttttcaaattatacatcaccttgagtatttatcatttcttttgttcttttgttttaaagaaagggtctcactctgtcacannnnnnnnnnnnnnnnnnnnnnnnnnnnnnnnnnnnnnnnnnnnnnnnnnntcagcttcttgagtagctgggaccataggcatgcaccaacttt

SEQ ID NO: 449351 - DNA, 468 bp, Homo Sapiens
gagcaggagctgggcctttgagggcccctgctccaaccccaagctgcatttatgatataacccatcacagctggattttaaaaatacacaaaaaaatatataatatacattataaaacctaggtggggtttggaggtggcctgagcgatatgcaaacagtgaggaccttcaggaagctcgggcagggtcgggatgaggaagggaaggggcacagtacttcatatgaaactcataaatacccacaggtggctgctggacaggcccagctggctctgggggcctgggtgttaagaagggacagcaggtgaagggttaaccttcagtcccagaactgggtctgggagctgctactctaggcaggtagattgaggtggggaagaacctaagggagcagtgcccaccaaggtttgtcagattcaagcctcaggcaagagaaaaatcaaaagccttctgctactctctccctct

SEQ ID NO: 449352 - DNA, 354 bp, Homo Sapiens
cttttaaaaagaaatattttaaaataaaataataagctgagagcagagggatgaggagacactgccagaccaaagggaggaaagaaagttctagacaggtggttctggggtgggtaggggctgggcatttgaggaatttaagaaggccctcgtggccaaagcttggtgagcagacagtcagcggtgagtatgaggtcagacaggctggcaaggccagaccacataggcaccagcagtcaggaacaggacactggttttcatcctaagagcagtgggcacccactcgaggggctggagccaagggtcaggaattgaaagatgagctttgaaaagagcacgctggcaggggcccct

SEQ ID NO: 449353 - DNA, 695 bp, Homo Sapiens
  misc_feature (93)..(182): n is a, c, g, or t
gggtttaaagccaaattttatctaacctttaataaacaaataatggcaataacaaaaatttaaaaaattcttaattttgaatgttaatatatnnnnnnnnnnnnnnnnnnnnnnnnnnnnnnnnnnnnnnnnnnnnnnnnnnnnnnnnnnnnnnnnnnnnnnnnnnnnnnnnnnnnnnnnnncaataatataccacagctaagcatattatatttcagaaatggtttaaaacaagaaatcagaatgaattataacattaaaatagcagaggagaatgatatatgaacaaagcaaaagaagtgataggatttgaaaaaatataagaagttagccctaattatagagcatacttgcatacaacaaagtaaatattagttgaatggtaaaatattgtactgatttccattaaactgtttaaacaactaagacactggctattaccccaatacttgacataatcgtatttattttaataaaagtaaagaaataataatgattttaaaagaaaattcatttccattcatagataatctgactgaatacacagaaatctcacatactattaagaatataaatagattaccagtttatggttagagtgataatggcaacatccaaatataatatgatagtatgtgggaaaactatcagtatcagaaaaatcatgaatgcactttaaacagctactctggaaa

SEQ ID NO: 449354 - DNA, 889 bp, Homo Sapiens
gaaagaaacatttgggcttgagaatgagtttctaagaaggtagagtggatcagcactcttttcccagaaatttccatcttgatcttgattcctgactcttgtagcctgttcttcgtatattttacaataaggaatgccaacagtgtactaggagccagggctctcaggctagtgttacagagttgtagggaaattctaggatgaagtttttgctgggacaaagcagatgaaagagttgagtttttccagatctggagcttacctgttggggatgctgtagacatctagaggcagcagggatatcttcagtctttattgtgtagtgctggtttgtttattcagaccttctttaatcttactaataaaactcttcacttgaagacctttcagtccttgcctgtgaaaggcatgattgttcttcttgaagtcacatgcttttgatttctaaaccatttccattttcatttgttcaacctgttctccctgtttcattcctcttgcttcacgatgttacaataagaatgcattcctagttgtagacctaaggagcagtgtaaggcagggaggcattcccacaacttccttgagcctatcttaggcttaattaagcctatcataggcttaattggtcacagggacagaggttagtcccaaatgataagaaggaatctgtttctacaaatggagtggcccttggggagagcttctgtctcatctttccaccagcatcactgtgtgaaccaggcatgtctgttctctgcaagttaaatttgtttgtctgagtagtagggaggagtattatctcctagccgtctagaggtgccgatgaagctgttcgataaaagcagagttacacgtttaaaaaaataactcaacatcgctgatcact

SEQ ID NO: 449355 - DNA, 634 bp, Homo Sapiens
  misc_feature (559)..(559): n is a, c, g, or t
ttgatttctacatatttattttatcacacttcgttttcaatttacaacaaatagtgggctagctaaactttcatttcatgtgtctgtgtttagtggaaaataagcacctgtcatttgttttgggtttatcaccacatctgtttattaataaatatttgcaaatgttcaacatggatcttttaattcatacaaataaaaacatttttttccttatttcatattttggaaatccaaatccaccagtttcttgaagcaatgttctcttagtcatcctagctattgtgcagagtacagttaaatgaactagagctctcacccccaaaaaggtgagataaaatgaggatgtcccttagaggacagtgtaccatattacagtctcaaaaagacacagcaaaagaaaaatcaaatggagtttctgaaattaattttcctgattcctctgtgctaggtccaatatttttgcagggctggaggtagagacctgaatgtctttggaacaacctcactaaaatggtcagcagaaagatgagatgttatttctatgtgccttctaccttanaggcttaaaactaacaataacagagacataaatattaattcttgaagttggctaacaagtcttttaaaagtcttg

SEQ ID NO: 449356 - DNA, 901 bp, Homo Sapiens
  misc_feature (716)..(716): n is a, c, g, or t
  misc_feature (718)..(718): n is a, c, g, or t
  misc_feature (888)..(888): n is a, c, g, or t
cccagttctaatacaacaggctttattctgttctacaattttaattccataaaattgataaaggcagtcactctattcattttacagaacatgaagtatttattttatggactcaagttggagtaaccaaagaggtttgcacacagtgacaggatgcagtgtttggggcccagttctattaggcattataaatgcccaagatgagagttgtaaccatgcagagtagtgttttctgaatatttggaaagattcttctggtctagtacaagatggtagaagagagggttagccatcctggagtatgaactcggcctaaaacatttccagtttagttgatttgttggaaggacttaacgtggcaggtggagaggtcatcagcagcatcccagcaactccaagtacagggaagaaagaaacgtaccaaacacacaaggtggatggggtatggtgcttgttctcataacagtaatagccagccttctagagcagtggctcctcaggcagccattcatactttatgtgtagcatgctttgcaacagtgaagctccacatttcccacacctccattttccttacactgtctttgcccattctgcttttcctctttcgcaattctttttgtgctttccttttctcttttgcctctgaatccaagatttggtgagttgggtagagaaagagagcttctgcatttgtataatttcgctttgactantntagcttaaatgattatagaattagtatgtaagatgacttctccttatacacctattatatctaatgtttataattcagaaatatcttgtgccttgaagaatggaataaaattggctgagcttggattcctgttgtgaaatgcaggtgtggaaattcaaaaccattgtttnctcaggcatcgcc

SEQ ID NO: 449357 - DNA, 592 bp, Homo Sapiens
gtgtgagccaccgtgcctggcctgatttatatttctcgcattcttactatgtattttcacttcatggaaaccaagatgcatagcatgggtcttatttggcacacaagaaactgatgtggaaatataataatgtggtgcatatgcatcaatggcaatgcagattttggggtgtaagaatgtgaaattaactttcagtaagattttcattataccccaataagtatcctaagccacagtgtggggcacgtaattcaagcacaaaatgcggttataggtttccaaaactgcgttatttgatttcaccatgaaaaaaattgttcttgatcgtttaagagcctagtggtgtactgctattgtgttatggagtatcctactgagacaggataaaactatgttggcagaaagaatgtgattcattcatagagaaaaaccattctattttattagttaaaacattatatctatgatacattctgaataaaacattagcaaaatgtgcttcaagcagataatgtgagttctactaaagaatatgttactctacttctgttgattaaactcttcactctgacaactactctctcttcagttt

SEQ ID NO: 449358 - DNA, 510 bp, Homo Sapiens
cacgctcggccaccaagtaggtagaacacttggttgaatctttatgccctattaactctgccttttaaaatacggcatttcaagttcttcaagtctgactccagtcttgctttgtggtctcatattccactagacctctcccacactgtttcagccattttcactattcaatgccctcttcatagcaaggccattctccctcttcttaccttaagaaaatctcaagatgagaagatccagcttatgccagtcacctcttcatgcaatccagattcccctgggattccgaacctcctagtcctactgcattttatggtttgtaccttcatgttagcatttaacatgttttggtcactttttatattcccaacttataacaaccatatggaatgtataagatactcaaaatttttcacgaacaaatcttttagtaataattcctgcatcaagttttgatgcttctgcagtcgagctaatgatcccaatgagtataagccctctgagggcagg

SEQ ID NO: 449359 - DNA, 815 bp, Homo Sapiens; identical to SEQ ID NO: 96396

SEQ ID NO: 449360 - DNA, 435 bp, Homo Sapiens
  misc_feature (109)..(163): n is a, c, g, or t
tcatgatttgaaatttttattttctgaaatgaaacaattgtacattgtacaaaccatatctactgatggaataaataagtgaaaaattatactgctgtacaacacaccnnnnnnnnnnnnnnnnnnnnnnnnnnnnnnnnnnnnnnnnnnnnnnnnnnnnnnnctttatgcctctaaccaggttcttggcgataatgaacattccaaaccatgacaccgtttgctaatgggaggtcaccaccctagaggaatcggtccacagccttccgggttgtgggtgtaagtgccagcactttgtggaatgtgtagccgcagcttccccgacttcacgttttggggggaattaggtttgccctgggagcccttgaggccacggggcctgatgtccacggaaggcttttgctcgggatcccccgccccctggctcgaagctga

SEQ ID NO: 449361 - DNA, 514 bp, Homo Sapiens
tttcttagccaaaatataatcttctttaatataaaataagtccacatgatgtataatggtaaaatattttcaaatatctcacatttgttatacaaataaggactgtatttgattatttttgattgccacccaataaatccagacaataaacataattatctctacacccaataatgagcattgattccaggaccacaggagaagagaagacttctccaggaagttcataaacactttgcaattgtccactctgagattccaagatccacactttcccatcagtagatgctgctgccagcaacatttcattgctgccattgtcgttatggaaagcaaacggtgttgcatagacccttgaagtagtttcaaatttccactgcaggtgacctttcatgttacaacagtagataaagcaatcatgggaaccaaaaaatattttttgctctgatggtgaggtacacggggatgaaaagattggtccactggtagagaactgccaaacctgttctccacc

SEQ ID NO: 449362 - DNA, 674 bp, Homo Sapiens
atattaccctcctcctttccgaagactgccctcagacaactttgctgcctcctttgcacttctctcttcattagaataatttcctgaatcttggctagtttgggaactgtattttttatgatcttcatcagtttgattagtttcttctactgtagcaattgtgcttatattctcaattatgaaacatttttcgatttgttcctcagaagttgaaagcagaagattcttcaatggctgttcagagaaatactcatctatactggaagaaggtttaagtgatggaaagaagacataattgatgcatctcaagaagactttcgcagcataaatgacaaacgggagagcaaataatgcaatacaaattccaactataagccaaattttagaggtatttcctggttttgttttctcacatacagcgtcactaaaaacactgcttttattcagcttttcatccatggtgtgtgctctggctttcacacaatatacagtcagtggtttcaaattaggaactgtaacatcagtttttttctcgataatttttctctcagcatttgaagtgttttcccagaaaataatttcataaatcagtggataatcctggatcacaggcgtgtttccagactgttttggagcaccgatatagatatggttctagatcgcgagcggccgct

SEQ ID NO: 449363 - DNA, 742 bp, Homo Sapiens
  misc_feature (578)..(650): n is a, c, g, or t
agtgaggctattgcgtgaattagccttcgacccagactgcaggagcttgggggttctgaggacagcacggctctactttccactttggagtggaacctacctggcgggggtcacacagcagatagtttgtgcagctgggaagatgagccctggacccgaacggtatgaggatatgtatcctaaggccagctttggtcccagttcactgggtgccggctgccccagccagctatggtctgcagagcccgaaggcaggcaggaggatcgcagatcgaagatctgcaaggactgaggatcgttcctagtgtctgtttggaagcccgtgggtcttgcaatgcgagggcagacaaactacgaagcgggttccggattccgatgagccacacgacctctccggcccctgatctgagcacccctcaccttggtccatctgctgaccatctaaaatgtgtaagcccagcgtcagggctcagtgtgtgaccaagaacagttttcctgtttgaggagttacctgataatgctcaaacacaggcgagttaatttgtccccaactctggagatctttttcctgtctggcnnnnnnnnnnnnnnnnnnnnnnnnnnnnnnnnnnnnnnnnnnnnnnnnnnnnnnnnnnnnnnnnnnnnnnnnngaacttctgcctggcatcattacaagcaatctaacttggtagttgagaaaacaaagaaagatataacgatcgactatcaccatatttgaagt

SEQ ID NO: 449364 - DNA, 478 bp, Homo Sapiens
  misc_feature (327)..(327): n is a, c, g, or t
  misc_feature (437)..(437): n is a, c, g, or t
  misc_feature (458)..(458): n is a, c, g, or t
gattgttttgacaagtttttattgcgcatcaaattgcgtcattgttttgtttagcattgaaaggagttaaattgctatgaacttaatgcgccacccctagtaaaccattaggtcccttctgtgttcctgactttataagtctgtttccctcagaggaacatctgttgtatacttaaatgaccttagttcaaaggcacgatcaacaaaaaatttcttaactccactaggaagcattcgaggggatcgtttctctgcactggtcgtacaggatgaggggcttctctgttagcagctgtgtacatctgcccgtgggggcagagggccctncttctttctggcacatgcattaaaggatgctcaggcctgtttttcaggcctgtttcccactttggacccggggaagtggagtttcgccaaagtttgccattttacagggnatcgttaggccggggttccangcaaatgtaattttttaccc

SEQ ID NO: 449365 - DNA, 624 bp, Homo Sapiens
tttcagatatacaaaaggtttattaggggcaacgcctataaaacataaaagggagagggaacaggaccagacaaggaacacctttagttcgtgatgtaggactaaaacctgagaaaggagaggggccaggaaagatatttgggtaggaggagccttggactgcagtgcagctctgagaaagcctaggcctgcaaaacagggagtgctggtgcaaagattgccctcccgaagagtcccatactggccagaaatggtgagcccttgtaccatggcagtgcctggcctttgcttagaggctgtctgggaagcatgtagcctcagcttgaaagctgaggcagatcttgacagctgtccgctaactccaccccttgtggcaggtctgctgtagggagatctgagtgggacacctccatggctaccacgggtcaccccctgcactgcacagatcgatttccccatacacattcagggaactcctccatggttcccatgggtctctcttcctgaagggaaacttagaagaggtaggttagtaggactaactacagtccctgtcactacagttggtattggagtcacagctggttctcatcctgtctttcctctaccatgtattctaaattc

SEQ ID NO: 449366 - DNA, 944 bp, Homo Sapiens
  misc_feature (76)..(76): n is a, c, g, or t
  misc_feature (80)..(80): n is a, c, g, or t
  misc_feature (87)..(87): n is a, c, g, or t
gtcgtctagtgccgattgaggccgactcgcgcaatggcgtccgttctggcgttttgttgtcccgagtactatgttngtgntggtggnggttttacctttatccacggcaagcctgttttttcattccaaaaaaattccaagttcaggttctcacaggtggaaaaaaagtttccaccatttaaaatttttttccaatttcattatattattcaccagggttcccatttttcttatggggctttttaatataaagcaggataggaagggaaactttcaaagttggattcctttggcactaagttttacataggacattaggaaccacaaaaagcttagtttctattgtaaaatagcacccaatttccattcttcttttaaaaatccaattagaaacatcttttttaaaaaaacaaattccacaataagagtaacagatttcaaattaacagtagtctaaaaatcttcaaaataaatggttttgtatagctgagaatatggtagaaagtgaaagcataattttccaacagtcatttcttactacagtgtgtttaaaattatttttattacttttagactttttctcaaaataattattcaaggaaatatttcttaagtggcccaataaaactgtagagccaatagtcagttacaccatattcaaggacaaggatagtcagctatagataggaactgtctaaaccacgagaactgatctctgatactgaagtacccagaagtggctatattatcactgacttgaaacagatcttagtcacccatgtagcatttaattcaatgtttggttctttgcctcatttctttcttaggtcacaatctatagtctttatagaatttgtctacatttcttctaatagaattaatttggttgtagtaacttttgaaaataaatgtaaatggtgaaatcggccatgtggtttgtgccc

SEQ ID NO: 449367 - DNA, 485 bp, Homo Sapiens
  misc_feature (203)..(217): n is a, c, g, or t
gatctccttccatctttatttttatggactagtcagaacacagtgaaccagccagtgaggagtggaaggggttaatccgaacaatccaagggccaatgtgggaaatgtgaagttcaaggtcacacagtcattctgctgtcaggaagagtgtcatgagtcagggaaggagagaagtattttaatagtgccctgtgggattcttnnnnnnnnnnnnnnnttttaatgtactatgaatcacaacacagtcactgagctatagcagacaggctctggaatttgcattgatgtgtgatctctggcagccgctacatattcaatggacaaagtccgatgcttcctacacagagaattctgctgggtcagctcgtggagtgtcagcaggaaaggccacccagggatgcctgtcttggttctcagtttctcatcagtgtgtactttcttcttggtgagaggaaacacacctggtccctgggcctctgcatata

SEQ ID NO: 449368 - DNA, 358 bp, Homo Sapiens
atatatgctatatttattttgttgttaaacataccttaagtttactcagaattttcaatttgctatacaattatcaattagcatatgggaatatattactttaagatgacttgttttcttttgaaaatacatatgtgctgagggatatgatttatatccctcagaaattgacattgtaagttcttggataagttcttgcaccacagttgaatgaattttcaatggaaaatgtaatttaaagacttattttttcatctgttactcaggtttagaaatgtatgttttaagatctacttgccagtttctctttttgatccaaacatatgatctgcctcgataaataacaacatctggtacc

SEQ ID NO: 449369 - DNA, 609 bp, Homo Sapiens
acgcgtccgtggagttgtttctacaaaagtatttcggaatgactattctgctgcaaacttgtgtaagcgcttcaccttattcctacaataaggagaagtgcactaacaaaatgaacaatgcagcaagggcttcagtcgcagctcaggtcttatcaaacaccagagaaccctcaatgggagaagccttatgagtgtgacaactgtggaaagacagttccttttttgttagtatcacttctacttattgtagaaatatgctttcattattgcatctactcacatttctcactcggtttctggcaccagcaatctcttccatatttataatatcagtcaaaaactctggaattcaaatataacaagacttttctggtcacctttgatagttaatgacttgggcattttgatatattatctcctgctgtatgtattttgtttagtagaaattgaatcattatccccaatcctttatagaactatccaagtccctgtttttatgctagtttccaaggcttggtccttcaaggttttcagggatttaggggacccaaatctaacaaatcctaatgtatattatttgtattatagtaataaaccatatggttactt

SEQ ID NO: 449370 - DNA, 418 bp, Homo Sapiens
  misc_feature (115)..(123): n is a, c, g, or t
gatctatgagttgcagaaagttgatttttctacaaagcagagctgtgattataggttataataagcagcatttacctcttagcattaacaaaaaagttcttctaagaaagatgcnnnnnnnnnctatttgaaaatagttgtctgaacatatcagtttattttatgcatccagtgttcattctagacatttatatcgatagagagagaagtcccgtttgctggtccatgtgaatagataggtggatatctatacaaggtaacagcactttttggaaaaacccaaaggaactttcccaattcaaatccttcaaccacgatggctacaggtgcccctgaaaatgctgcctagctatcctcatcttaaaactaccatatttctcttttttattttgagaacttttttccccattgtcacggg

SEQ ID NO: 449371 - DNA, 677 bp, Homo Sapiens
tttttttgggtttatctgtttataatcagagaatgggggtgcacaggccctccccaaggagatacattttctgtacaatgaaaaattcagtttcctatttcttaactttgtttgcaaacctacacgcctcttctctcttccaccatgtgtaataaaatccatcgcattctcttctatcttcagtcatgtagtttttgtgtttaacatttataaaatgtgttcttatgagtctgaaatctttatcagttcaaatcattcctgatttcccatctacaaccttctaggtctttcttctttctctgccgctttccttgtttgtcagtgttctgtactgaaattccacagggatggcagttagatgaggacttccatcatctctccatcagggaactcgggcttgtgcagcaagctgctgacccggcctctgtggtcaggcgacttcccatggccaggagagttctccagtttctctgcggtccctttggccgctgggtgtttcaggacggggctgtgagcaggggtcgtgctcagccggccgcggctgggaagggaggccatgctgggccagaagagctcggcactcttgtcagtctgtgtgctgctgtccttgctgcctgtcttggcgtgggcactgctggctgccgtagtggaggctatggaggacagtgctgaggtgg

SEQ ID NO: 449372 - DNA, 1172 bp, Homo Sapiens
agttttggatggccatagtttgtggccacaatcagggttcagagcaccgagtggactcaatccgtggctctcaggtataccttcttcaaggcaagggcacactgtccttggatacgtccagtacggcgctttgagacaccatgtgtggaccctcttccaactggatgctagctctgccatgttcatactgggaatgaaaggctcctcaagatggtcaattagacaatattcttgctggttttggctagctatttgcagctccagccactacccgaactgccttcaaaggttcaggaggggaatgaagacctgttaaggactgcttgtgggccctccagcacagggcaagctgcattctggtaaaagcagtcatatagtttttaatgttggtcatggccccttctactcctcactggtcagggcctcctggcttgagcctccagcacagccacctacctcagcctggacaacttggggccagaagcagcattgcatttccctgggacagagctctccataggtataagacaggcctgccgtttttgcctgctatagcccctgcccataatgccctcagatcaagtagatagcaaagaggcttaaggattatagcaggtcttcagctcagcacatctgccttatggaggtgttgtcagacttttttccatgtctgtctttgctcctgctacttctcactgggtagggcctacccgacctcggccccagcacagctaccctgctcccacttgaacacttcagacagtggcacctgtgcatttctctgggatagaattcccagtgacaacccacagcccctctgccattacatacagtggtaccacccttgctgcctgagtatggtttggctctgtgtccccattcgaatctcatgcctgtagatcccacaagtgtgcccatgttattgtgggaggtacctggtgggaaatgactgaataatggagatgggtatttcccatgctgttcttgtcatagtggatgggtctcatgagatctaatgattttaaaaaacaggagtttcctgacacaagctctctcttagcctgctgccatgccatgtaagatgtgacttgctcctacttacctttcaccatgattgtgaggccttcccagccacgtggaactgtaagttgattaaacctccttcttttgaa

SEQ ID NO: 449373 - DNA, 577 bp, Homo Sapiens
  misc_feature (301)..(330): n is a, c, g, or t
  misc_feature (396)..(447): n is a, c, g, or t
catatgaatgccaaaaatagcattagattcattgaaatttgtttgactctgtatttgtacatgctttcattgtctctcttcctgctactctctcctgcccctaccgtaccccaccctatctgctctacccttagacaattgctttttatatctttcctcaacccactgcagtgattatctgctcttagttcctggcttgcctttatttcctggactttggatattctattaccctaccagtttaactacttgctttcgattccaaagtaatctccatttctctgactttatgcttcatagnnnnnnnnnnnnnnnnnnnnnnnnnnnnnngtagccagaactagagtagaaagtgatggcaataagcaagaacatgtgaatctgggaagttttacnnnnnnnnnnnnnnnnnnnnnnnnnnnnnnnnnnnnnnnnnnnnnnnnnnnntgttttccccctgaactgttggagagtgctgacccaatgcccaaccaccctgaatactttattatgtatgtcctacaaactaggacaacttccaacataactgcaatgctaccctcaaagtcacactact

SEQ ID NO: 449374 - DNA, 469 bp, Homo Sapiens
atttggggggcaatcaacgaagtttatgacagttcatcaatcctaagacagcatggaagtcggggtgcctgacacagactgtggggtggaccagcagggacaggacagggtagcacacttttctgttgaaaatgatgccaaaactcccttctctactgttcatccggatggagtccctgtctccaatggcttaaacatggggagtcccaactcacagcagacattatcttatagaaacattaaaataaatacaattagttattacattaattgtatattatcctttggttacattagggtttacagagcttctgtggactagtctagaaacctaacaatatataaaatattatttgggaaaatatttgtaaaactacaaatttttaaaatagaagctattcttaaattagtgactacctacatatgagtgagctgacagtaacaagttgagttttcaaatagccttctt

SEQ ID NO: 449375 - DNA, 446 bp, Homo Sapiens
taggtttcagggcacagtttattaaaaaattttaagtaactgcaagtcccacccccgattccagtatctgtcccctccatatctcaacagaggggctgtctatcatatgtgggtgggatgggaaaggaagaggtatggtcctactatgcaagttactctccagccttcagcttgtgctgtcccaaacctgagtccctctgaccaaggtaagttgttcagagagcagtggtgccaccctgacagcactttaggacagtgccatctcctgagatcactagtcacattccagtcattgtgaccaatatattagttatcaggggtggtcaaaggtagaccagaggcacaggctgttgagggaagaccctctattaaagaaggttctaagaatgaaacatggaatgctcaacttgttaaagtgctcagctacaacattaaaaaagtgtcgg

SEQ ID NO: 449376 - DNA, 685 bp, Homo Sapiens
  misc_feature (296)..(425): n is a, c, g, or t
  misc_feature (491)..(541): n is a, c, g, or t
ttttttgcatgtacaagttttaacattttaattgctgaatatctttaagtgaacatcagtattttctggctatgaaatgcaaaaataacacatttacttaaatacagttaacacctaaaatttaggtagttgtaatgagttgtaataaacaacatacttgtaatagaatttacagaattagaaaaaattttttaaactagaatactctgaaaattttccaagcattgtacattataaaatacatatttacaaataatattagtagtgtattcatggggccaggcatggtggctcannnnnnnnnnnnnnnnnnnnnnnnnnnnnnnnnnnnnnnnnnnnnnnnnnnnnnnnnnnnnnnnnnnnnnnnnnnnnnnnnnnnnnnnnnnnnnnnnnnnnnnnnnnnnnnnnnnnnnnnnnnnnnnnnnacacgcctatagtcccagctaatcaggaggctgagatgaaaaggatcatctgagcacaaaaatttnnnnnnnnnnnnnnnnnnnnnnnnnnnnnnnnnnnnnnnnnnnnnnnnnnnaagcaagaccgcttttctcttttaaaacaattttttaaaagtgtattcacaaacatttgtccactattttaaacttctatagccttgttaaacattaaacccaagaaatggcaaactatctataaaaataagggcacagctaca

SEQ ID NO: 449377 - DNA, 486 bp, Homo Sapiens
  misc_feature (423)..(431): n is a, c, g, or t
gatataatttcatttatttattgttgcttttgtagcctgaggttttggtgtgatatccaaggaaacattgccaaagccagtgtcaaggagcttttcccttatgttttcttctagatttatggcttcaggtcttacattcagatcttttatccattttggattgatttttgtgtatggtgtaatgtaagagtctaatttcattcttttgcatgtggaaattccagcacctatttattgaagagactacccttttctcattttgtctttttggtgctcttgtcaaaaattcattaaccatacatgtttggatttatttctggctatttcactgtcctgtgtatctcttatgccaatactgtattgttttgattactctcgttttgtaatataaatttaaattgggaagtatgatgcctccaggannnnnnnnnctcagaattgctttggttatttgggatcttttgtggatccacagaaattgtatga

SEQ ID NO: 449378 - DNA, 440 bp, Homo Sapiens
  misc_feature (83)..(140): n is a, c, g, or t
  misc_feature (158)..(191): n is a, c, g, or t
  misc_feature (328)..(400): n is a, c, g, or t
atataaattagccaggtgtggtggtgtgcacccgtagtcacagttactcagaaggctgaggtagggggatcacctgagtccannnnnnnnnnnnnnnnnnnnnnnnnnnnnnnnnnnnnnnnnnnnnnnnnnnnnnnnnngagtgagaccctgtctcnnnnnnnnnnnnnnnnnnnnnnnnnnnnnnnnnngggcaaagtcaaactggcctagatcctgggaaactttccttctcctaggagaaataaggcagtaattctagtgacagctaacatttcaaaaaatgctttctgtggtccagctgttgtaccaagggctatatgtgacnnnnnnnnnnnnnnnnnnnnnnnnnnnnnnnnnnnnnnnnnnnnnnnnnnnnnnnnnnnnnnnnnnnnnnnnngcaagtgatggagctagaacaagcaggatgtctgacccta

SEQ ID NO: 449379 - DNA, 542 bp, Homo Sapiens
cttcaaagaaatgcttcagggtcttgatcctacttgtttaaaatttccattgaaattgaaagctttgttctcgtctgcagctgatctgggcacaaaagttttggcatcccttgagtggaattgtgtaagctgaatcagttgagatgtctaggcaattagctattgtttcttctgttaaacattgatcctcttcaattagagcacaaacgagatgatatttttcctcacaaattgatgtgaatggtgtgcttttgcaggcttcatcttcttctctcattccttcttaaaatgagttatccatttgtaaactcctgattgtttgggtgcgttgttcccatacactttttgtaaagcatcaatgaatttcaccattcttccacccaaacctcaccataagtttgatgtttgttcttcatgtaatttttgcataattcatgttgctctgataggggaattttttcaaactagtattttatccttcttggtatgaaagtagattctattcaaacatgttataagaagatggtagaagtccatttggt

SEQ ID NO: 449380 - DNA, 527 bp, Homo Sapiens
aaaataaagaagatgaaggtctactctttattgcccttgtacacaaaggaagggggtgtttggttccaggtagtgagagaggagcaccccttcaaggctggtcgaggaggcatgtcccaaaggaagagttcaaggcggtttccagagaggaaggaacagccagggccttgcctcaacatgggaacggatttgggcctccacttgtaggactccagaaacagaaagggctgtttgacggagctggggacgcccctctgctgcagtggaaatgaggacacagctttggaagaccgtagaggccccgaagtgcccatggtggggggggccctacaggggatctcaccacaggcatggggctgggacttcctgcactgcccagaaacaggccctgggcccttcacaccttcagttacccagagcgcaccccctcccctcgccccagctccacctcagtgtgctgaggggtcctgtgtgcccaggaccacgatactctgccaggacacagttacccggactcgcaaataggg

SEQ ID NO: 449381 - DNA, 953 bp, Homo Sapiens
taacagtcaggattccggttgcagtttttctcccccgccccaaagatacgtggttgcagacgtaagtaacaggaatccatctttctttgaaagtcctgcattgtagcgtctgcgacctgggccctgcgggggcttccccgccccgctaacttgctccgcatttccgatccgggccaaggctgggtggctgcggcagtgccggaggcccgctctccccttggtccgctctttagttcattcccagcactccctctttagcgggtcaagttgccgcagaaaccgcccgtagtcttcctgtttgatacaagggtttcagcggccgaagcagagcctttttaaatagttcccaatgggcgctcacggccaaacgtgaacacctcccctcctcacctgtcacctcctgaactttacagggttgcgagggggagtgtgggatctggttgtcgcctagccgtggtcgtactgtccgggtgtgtctgagagcccccgtctgtcatccctgtctgtctttccgggcctttactttactgtcttaacacaaccagccccagccactgggtgccgggggtggtgtgactgtgccttcaaatcgtgcctgggtactgacccacgtgctgggggagaaatggaggccagagacaaacaagtactccgctcacttcgcctggagctgggtgcagaggtattggtggagggactggttcttcagtacctctaccaggaaggaatcttgacggaaaaccatattcaagaaatcaatgctcaaaccacaggcctccggaaaacaatgctcctgctggatatcctaccttccaggggccctaaagcatttgatacattcctagattccctacaggagtttccctgggtcagggagaagctgaagaaggcaagggaagaggccatgaccgacctgcctgcaggtaggcctcagaaagatcactttgaaccag

SEQ ID NO: 449382 - DNA, 510 bp, Homo Sapiens
  misc_feature (27)..(27): n is a, c, g, or t
  misc_feature (40)..(40): n is a, c, g, or t
  misc_feature (52)..(52): n is a, c, g, or t
tggaggggaagctatttttttcccttnatctttcccagtnatatggattgantctggttggtcatttccaccaggaatcagaggcagctgttaccaggtttcggccttccagttgatccctccactgtccaggctgtctcaggaggaggtgaatcagagctagtctgtcacctttccaatctaagccgaagccacaggtgcctgacaggttcccttctaacaactatttgaccaagagaggcaatcagggggttgtatactgcactggattcgccagagaagggaaaatttaattagtgaaaaggaaagaacactaggaaacatttgagaacctgcctctatcccagaatgtgctggagatttgacactcaaatcagtgtttagtcttctgcttggcaccatagcttaacctgcagtttcttcaaaatgcccaatgccttgtttcctattaccttagattgcaaaccagtctagggaagtctatgagaaagtagcatttaattaaagttt

SEQ ID NO: 449383 - DNA, 615 bp, Homo Sapiens
  misc_feature (499)..(499): n is a, c, g, or t
  misc_feature (532)..(532): n is a, c, g, or t
  misc_feature (545)..(545): n is a, c, g, or t
  misc_feature (571)..(571): n is a, c, g, or t
  misc_feature (603)..(603): n is a, c, g, or t
aacagtaaaataaatcagtgtgtactttattttgagccaatgttttacataagaccaacaaactaagtgtgggcaaactgttcaatcacttttgagaaattacatggttcctatttaggtttgaaaaagtagtttgttgccataacatcagaccttaaggtgttttaaagtgtatcctaagggtactgacagaagaaaaatacagtgttatggaagtatacacaactcatgaccacacagtatagatccattcatggtgaataatgttcatctgttctccaaaggtagtgaaaaatattaagtcatcaaataaatgctcagaattaccaaggaacagttaaaaaggaccaggatccaaacaggttatttatatatttatctataaacaagtgacaacactaaaaaacacattgaaaaccagtgttttaaactctgaatgtgggatttaaaaatattccattaacttgagattgccataatttttttaaacccaatagcntttgactgggcaagtctcatataatttacagcnggtaatattcccnaaagggatatccacatactatagccnatccaatataaccggcattttggcaatccatncaaaatcctatc

SEQ ID NO: 449384 - DNA, 454 bp, Homo Sapiens
  misc_feature (19)..(19): n is a, c, g, or t
  misc_feature (47)..(47): n is a, c, g, or t
tgcccggtttttcaccctnatgtgtaggttagcccgggaggttaacnccaagaaactccagttcccagggcttcgcagggccggcccgcaggaccggagggatggagacccgagcagcagacggcggggaagccctcggggcagcccctccctctcctcgcccaggggaccgtcccctggcaccgccacggtcttggactcccgggcctccttctaggagcaaagccgctcccagcactctttccctccctgctccggccggggtcagaggcgggggccggcttgaatttcaatcagtgtcgcggcaaggcaggtgccgggcgggagctaatccgggagcggaggaaggggtcgccaggccggcttgcatggccagggacggggactctgcggcgtccgctccttccccagctccgggagctcgcaggtcgcgggcgtgaggggagggggagtc

SEQ ID NO: 449385 - DNA, 676 bp, Homo Sapiens
acgcgtccgctgtaccaaaataattagggtctttttatattttttcttttaactagtatctttaaaaaatcaataccaactcagttttctatgtagactcagttaataccggtattatggaaaagctgaatcaagtgtgcaaatgagctttttcaaggtgatatccatgttttcagtattgtactcctgggaagaagatcaaagcctataggaaggtcagtgctggaagcttctctgaagcattgttgctggagtggagtagtggttcctggactggacttctgagactctacatgtctttggaggcagtcattgggatcatgagctattttcggtggctgtagtagtaacgcattctttccgtaaggctctgatggatattttataaggttttaattttaaaatgagaagatgaatcattttgaattaatgcatcttagtagataagagctttcaatacctggagtccacggggacagagccataaaagattcatagtagtacgatgtcgtgacatgtacccatatctttcctcgtactcagattcagcactcacttcctaactttcagttctagcaaagaaacctggaggttagaaactggagatatgcttgaagagaaagtttgagaaatcctagtgctttcatatgataatgaaatttcctatttggaaagc

SEQ ID NO: 449386 - DNA, 585 bp, Homo Sapiens
gtaggctcccaggggccccagggaggtccaggtggactgcctctctcattcccaggagctgtcctgggactttgggatttcttctcagctttctccacctttcagtttctcagttgtttcagaaacatagcaatgacataaaaactgctatggagagaaagctaacatggtcccatgccttccaggcagccctgctgaaggatctaagttggccctgttcctgcaaatcatcaacgtgcctggactcgccagctaaaagcctgggccttccccagccttttttctggggcacctattcctctgccagtcctgctcccctcaccttccttgggcccgtcagagtcttttgtggtgctgtgcttctcagaggcaggatccaagcagatcagcccagcctagcccagctcaggcaggccatggccgctcaagggaaagactgccccagaagagcaagctggagaggctgggcaggggctgatggggctgggtacactggggaatgttagcaagactgggaaggaggccacattcctgtctgcagcagcccccagcgatggtcttcagcaataaaagttgtgtgacctg

SEQ ID NO: 449387 - DNA, 444 bp, Homo Sapiens
ctagtcactaggccaccaaagaaagttccacccaacggccaatcgatccgtcgcagcgactctcttttccctgaacggagggtttatggctgacacctccacttgtttctcagagccggggctgactgccggctgcatctttgaatggcgaccaaaaaagacatgcatttgtctggcaaagtcgctggcgttcgcctggtgcccgcgcttgccgggtcctagagcagccagattttcacaccagcgagtccagcgcccagcgccactcctccttcggatcaccggtttctcacatccgcagcagcactggcctgacagttttccggttgcgacagcgctagttgagccaaacaaaacgttttcctgcttgctctgggcgtcccattctccatccgaggccttctagtcccggtgtcactgtcgcagcacctggcgttctttagc

SEQ ID NO: 449388 - DNA, 483 bp, Homo Sapiens
aattcagtctttgtagacatgtcaaaaattgccattgccaacctatgttgtaagttgtcactttggtgtattgggaaaattttcaattattttaataatcatgcctcagataaacctcattggctaggatactgccactgggcaaagctgtaacctgtctctaacagaatatggcgaaggagacagtatgtcactttcatgattgtattaggtaagactacagtgtctgtcttactaggaaacactcttccttgctgtgttagtgaaacaagctgctacattgtgagctactctatatgaagcaaggaactgagtgcaccagcaaaaaccaaggccctcagtctgacagtctagaaggactgaatgccgccaaccatcaggtaagcctgaaaccctccccagtagagtgctcagatgagaatacagcctgagccaacccttggattgtaagcttgcagaggaccaagctatgctcggacgcgt

SEQ ID NO: 449389 - DNA, 1024 bp, Homo Sapiens
cggtccggaattcccgggatccggaggagggcagcaagaatgaaagacctctagttttccagactcccggagccctggtctctacaccacatggacgttatccacctcctctgtgtcctcccaaggcagcatttcagaaggtgatccacggcaaagccgtcccttcaaatccgtctttgtgcccactgccatagtcaaccccgtgagaagcacagccggccctgggactttaggacaagggtctcttcggaaagggcggagcagcatgagaaagagtaagtggtggcagagagatggatccctgcagagacccctccagtccgggatccccactctcgtggtaggctccctcagacgcagccccaccatggtccttcggcctcagcagttccaattctaccagccacaggggatcccctcctccccctcagccgtggtggtggagatggggtccaagcctgccctcacgggggagcccgccctcacgtgcatcagcaggggcagtgaggcccggatccactccgcggccagctccctcattatggaagacaaagaaatccccatcaagagtgagcctctgccaaaaccgcccgcatctgccccaccatccatcctggtgaaaccagaaaactcaagaaatggcatcgaaaagcaagtcaaaaccgtgagatttcagaattacagccctcctcccaccaaacattacacctcccatcccacctccggaaagcctgaacagccagccaccctcaaggcgtcccagcctgaagcagcgtccttgggcccagagatgaccgtcctatttgcccaccgaagtggctgccactccggacagcagacagacctccggagaaagtcagctcttgccaaggccacaaccctggtgtccactgcctcaggcacgcagaccgtgtttcccagcaaatgaacctacgggtggcttttcctagaccccaaagaggtgaattgcatttaaatacagtctgcctccactgagggcatcctgccattctttggggacttg

SEQ ID NO: 449390 - DNA, 244 bp, Homo Sapiens
ggaatagcaaaagcaagattttattaaagtgagaaagcactctacagggtgggtgtgagccccagcaagccgcccaaggacccggttacaatgttttctgggttttaagtactccttttgaggttcctatcagctaccccttatctgaatgaaggatttggtccttggctaatcaaaggttgaggcgaattggtaccctatgcagatgaaggcatggcctgtgcttggcccacggcccacgcgt

SEQ ID NO: 449391 - DNA, 480 bp, Homo Sapiens
taacatcagaattcacatttatttcaaaaactcggcatggactctcagttcaggctgctgtaacagaaagccgtagcctgaaaggcttaaacaacaaacatttatttcttacagttctggaagctgggaagtctcaaggtgccaacagtttcatttcctggtgagggctctcttccgggcctgcagacggctgtcttctcactgtgtcctcacatggtggagagagagatcatctctctggtgtctctccttataaagcactaatcccattcatcagggctccaccctcataacctaatcacctctccaagaccccacccccaataccatccctttggggattagggcttcaacgtgaattgggagcatatgaacattcaccccttagctgactccacccatgtcaactagataggacacacggtgagtagtgaccacatcttacacgtttttagcacactgctgatgtccgacaggcct

SEQ ID NO: 449392 - DNA, 582 bp, Homo Sapiens
  misc_feature (515)..(515): n is a, c, g, or t
  misc_feature (543)..(544): n is a, c, g, or t
cccatttgcaaaacccctttaatcagaataaatagagtcccaggcagggcagagttcattggggatgcccaagccggattcacccacccttccagctccagcctaggcgcagctgcggcttttcgagaggcgaaactgtcttccttgtcctggtgtcccagcagggtcactgggaggcaacagtgtggtctcagggtgctgggcgggcccgtgaggcccatcgccgtccccctaggcatcctgttcatctgtgagcagggcagggggtgccgcagcctcctcggttgtcccaaccctgctcctctcctccctctccttcctctcgtagatggagtgaagcttgttgattaagaagattttgtcctcaccctcattgctgatctgctccttgagcaggcagatgaccttgcgctggccccgcaccacctggatgttgaggtagatcacggccagcagcagggctgacaccaggaagacaaaagaggtgttttccatcaggtaccggtgcacccagngcagccaggagaccctggggcctgccgnnctcaggtggcgcacccacaccctgccggcctcgtacat

SEQ ID NO: 449393 - DNA, 671 bp, Homo Sapiens
  misc_feature (461)..(461): n is a, c, g, or t
  misc_feature (633)..(633): n is a, c, g, or t
  misc_feature (650)..(650): n is a, c, g, or t
atagttaaaataatcatgtgatgatttatttatattctgggaaaatatttattttcaaatactcatatgcaaagaaaggaatcagtttgagaaatcctgacctcaaacaattcgaaatcttgtttgaaagcggggggttcagggtgtcctccacacactcatgagcggggaatgacacagagtttgtaacgtggtgggatacagccaaacccaatatgtatagggctgaggtcgatatcctttgggtcaacgagaggcttcaaattaaaatgctgcaaaatggcacacaacaaaagaaacaactccatgcgagccaggccttctccagcacacactcgttttcctgtggaaaatggcttgaaatagtcactgtacttgaactttccattttcattcaggaagtgttctggcttaaacttttctggatcaggaaattcttggttgtcatacaaaacagagtnccagagttggcactacgactgtgcccttggggatgaggtatcctctgaaaatggtgtctcgggttgcttcatggggcaggttggagggcacgagggtgatgaaccgctgaatctcatgccaccacagtcatccatgtagggcatgctgcttgcctatcccttgaggcagggnatacctcgtgccgcaantctggggtcgcagggccaaat

SEQ ID NO: 449394 - DNA, 503 bp, Homo Sapiens
  misc_feature (29)..(29): n is a, c, g, or t
  misc_feature (67)..(67): n is a, c, g, or t
  misc_feature (75)..(75): n is a, c, g, or t
  misc_feature (113)..(113): n is a, c, g, or t
  misc_feature (143)..(143): n is a, c, g, or t
  misc_feature (184)..(184): n is a, c, g, or t
actcctgaacggggaaattgaccacaaantttgtaaacgtggtggggaataacagccaaaccccaanatgtaatnggcctgaggttcgaataaccctttgggtccaacgaaangcctttcaaaattaaaaatgcctgcaaaanggccacacaacaaaaagaaaacaactcccatgcgaaccccngccttcctcccagcacacactcgttttccctgtggaaaaatggccttgaaatagtcactgtacttgaactttcccattttcattcaggaagtgttctggcttaaacttttctggatcaggaaattcttggttgtcatacaaaacagagtccagagttggcactacgactgtgcccttggggatgaggtatcctctgaaaatggtgtctcgggttgcttcatggggcaggttggagggcacgagggtgatgaaccgctgaatctcatgcaccacagcatccatgtagggcatctcttgcctatccttgatggcagggatc

SEQ ID NO: 449395 - DNA, 834 bp, Homo Sapiens
ttttgttccttggggggaatccgcatttccagctgtacttgccgccttgggcggaagacttcctggggccccagggtgtctcgagtccccttgccccacacagagtttctccccatcttcctcaccccctctttgccctgttgcctccatgaggaacccaggactcccctcaacacttccctccccccagccctacatccgacaagtcctgccaagagctttccaggggtcccccagctcccctgtgtctgtggcttggtgcggcccctccccaccgtctctgaccaccctccccatcccgccatgaccttttgaaaacccagccacacccccactgctgtggggcagaggaatggccttcatgaagcttcaccagcccctcatacctcattaaactccgggttcagggtttttttcttcaccgctgtcttatgtttggatttcttgtccacatctggcctcaggtatctggaattacatccaacggacaggcagaggatggggacatgctatggggtatagatcaagccagcaggtattcaaagagctttctgtccctggagagagattcctgggcccttcttttgtcctaatcattggattttcccaacgctattttgtggcaaaggcgagacgttgttttcgagaagcaagtggtcccttcatccaccgcacttctgttcacacacacattcctgaagttaaccctggggggcgccctccatccccctaggaaaggggtttttcctcatttctggaagtctaattttcataaagctcacatttcccaccagaacagagtttttagcagagttggtctcttgttcaaacttc

SEQ ID NO: 449396 - DNA, 364 bp, Homo Sapiens
  misc_feature (105)..(105): n is a, c, g, or t
  misc_feature (213)..(255): n is a, c, g, or t
aaattaactggggaaaatgtttttctgttctccatttcccttaagtttgtttttagataccccgcattgcaagtatgtgtggtacagtaaaatgttgctaattgntatttgcgctgataacatgccatttgctgtaggtcagtttcctaccccctcccccaactattcctagccagtggtagcatgcttcttacttccaaaagggtggggggnnnnnnnnnnnnnnnnnnnnnnnnnnnnnnnnnnnnnnnnnnngatcaacaatgtgatcctaaaataaaaaaatgacatatatttgacattatttacatactaaatatgggagcccataaatcaattacagaataaaatcaatttttcaagg

SEQ ID NO: 449397 - DNA, 1015 bp, Homo Sapiens
  misc_feature (964)..(964): n is a, c, g, or t
aacttttgaagattgttagtctttattcatttaaaatatttcttagtattatttggaatattgctggaacaatattggaatagtatttgaaactattgaaatagtatttgatgttgcaaaatttgattaggattacagttttatgttttcttctactcgggaccatgttactggcaaaagcttaaagacaactgaaaacaaagatttctgtcttacttcagatctccgaattctcaatacacttgggaacagtaactttttaagagtaatggaaagttattcagtaactctttcttaatggttagcaaagacatccagaatccattccaactctgccactgtcttgctgtagggttcagagccagccactggagtctcttaggtcttcaacattttctgatgtggaaaaatatataatgcttgttttctttcaccttatgaaaattaatatggtgaccttcttaattcatttcaggctatgcttgggcctgggagtcacacctgaatctgagtactgacttttccacttaacattttgtccttgggaaaatcactaattttaacataatatgccttcaataaatgatgctgttagttcacatttgaatttttaagaggatagtactgatgtcaaccatgaagaagttaattattgtgaaaagaggttaaagaacacaacaagagccctcctttctaaaaaagtgttaaagatgggacattaggaaggttttcaagtcatgaaaattcttcattcacaaacagtaatggagttttggtaggtggtttttggcttttaaagatgtggagggagatggggtagaaatctttgcattgcttaacatttctaaagatctgaaaaatttaagatcatgttatgcatttaagaacagagacaagtgttcataaagttagcacacttgaaacttgatacatttagacatatcaagccctacaaaaaagtttntttaaatccatgattttctacttttgaaagtatgtttggtagaaaaacgtg

SEQ ID NO: 449398 - DNA, 850 bp, Homo Sapiens
  misc_feature (57)..(73): n is a, c, g, or t
ctaaaaaaaattaaacctttttattagtatatttattttatatataaaagaaatacnnnnnnnnnnnnnnnnncagaaagaaaatgcttttatggcaaatcagatttgtcggtgccttcagcctgggctccaggctctgtgccgctgggtgacaacaaagtccgccggttgtaatgacccttgatgattcctgtgttgttgttctcattgagtagctgcttctgcctttgcctattgagggactggacaagtcccaggacaaccgcggccagggagtactgcccaggcagtcttcttgggggcaagatgaatgggttgggttggactcttcccagaagaaagtacgttttgatttttccttcctgttcactgatacccttcacatagatctcccctcggtaatcaaaggcaaagccctggtccttcaggatgagataggtctcctctgggacttggatccggccactaacccccgtgctgtccattcggcttgccaggttcacagttttgccccaaatgtcatactgtggtttcttagcgccgataacgccagctaccactgagccgtggctgatgccaatccggagttcaaaattgttgaatgaatgcttgttgatctcctgtatgctttctgtcagggcgagtgagaagtcagccagagcacacaaatgtccccacttgtcttcacattgctgtttttcaggtgacaggcctgacacggccatgtaggtgctgccaatggtcttaatcttttcaatgtcttgaaatcggtcttcaccaagcaactcatcgaagtcagcaatgatctcattgagcaagcgcaggcattccactccctggttattcattt

SEQ ID NO: 449399 - DNA, 380 bp, Homo Sapiens
gctggatatgtcaattagcttgatttaatcattctgcaatgcatacagatatcaaaatgccccattgccccctataaatatattcaattatttgtcaatttgaaaaaaggtgttgagagaaatagagggtgtgacatgcaaaataagagtgagatgacagtatagactggacaaggaggcatctttagactggtgctcaaggaaggtcttcctgaaggagggtcacttgagctgaggcctgaaggacagaagaagccaggcacacaatgatctgaggaaagctagtccagagagaagtgagtatgtgacgaccccaaagcacggaggagctggatatgaggtagtgtttctcagaccgtaagtgcatcatatgcacctgg

SEQ ID NO: 449400 - DNA, 505 bp, Homo Sapiens
  misc_feature (321)..(321): n is a, c, g, or t
agcggccgccctttgggtttttttaagcagggactgtcatttaattgtattgtttggcttatgtcttgtatagaaaggcagcaaagattaattaaaaataacaagaattcaaagctgctgggggtgagaggcatttctgtaaccatcaaaacgaactgggcaggggcaaggggagcagctggcttgaggggagggagctggaggggagggaagactggctcagcatgttgtggtgtgtgcatctgaggcatatccaagcagggtgtgtgtgaagactttttaatgacgtaagaatacgcctcatatgaaatatcaaaatgnaaagaaaaagctgcttctcatcagcacaacaattaactatctccaaaaacaatttttaagcccacctccttggagtcacaaattctactcaaacttagacaacaaattatagtcccaaaccagaacatcaacagatgtgttcagattcattcattcaacaagtaccgtcacgcatcgcttaaca

SEQ ID NO: 449401 - DNA, 279 bp, Homo Sapiens
ttgccaactttcctttctcagttgatgaccttgcctcataatcatttaagaaaatacaaatgattgaggacctctattttctggtctttataaatcctgctatcaagcaacacttgttgcctaccatcaggagcagcagcatcaggatgtcaacccactatgtgatttgcaggtattggagtcactaagaaagacatgactcacacaggcactgaaaggaacaatgctttactcacctagagaagagagcaagatgagtttcaatagtgtgcattggtc

SEQ ID NO: 449402 - DNA, 283 bp, Homo Sapiens
ttttttagctgtacctacgcttttctaacaagtcacaagggagcgtcaggagggcagagggccgggagcagggctgccagggatattcctgtgatgagggatgtggcgacatcagcggtgatggcagccactggccatgtgtcactctgcacacttgaaacgtggccaatgcaatggaggaactcagttaatttgattttaatttaaacagccccacgtgggccgggcatggtggctcatgggacaggctgggagaggcaggagggccattatatgttgcggt

SEQ ID NO: 449403 - DNA, 516 bp, Homo Sapiens
ttaaaatttatccttttaattcttgaatgagtaaggacaatattttgctgtttattggtataaaacagccctgtcccaggtatacaagggtatacgtaagtctgtaacatcattagctacagtgaatttactttacttgaaagcatagcaaaataggattaactaaagatatatttttaataagaaaatgctttgaaataacatgaaatcaatgaacatttgactgtacaatttactcgtcaaagtatcaacgtatgtcagctcatgtatgaattacactagatcattctaaacacagccatgtgctcaggaatgtgtgaaataactcataagctattctctaagggggtgtactgaaaacttctaaaagtaccccagatatttggtcatagataagagatatactttaaggcagccttccaagtgaatgtaaacttttcggaagtggcctttccagtaacatattactattgtgaatactctgtacttatgtgtagtgctgttggatattttttg

SEQ ID NO: 449404 - DNA, 452 bp, Homo Sapiens
tattaatatacattacatgatctcagaacacataactaacctaccctttctcaaatcacagggcaagattatatatgaagagacataacagcttgggggtgaagtcaaaagaatgcagccatgtactgatcacagactggttggattaatgtcacatcatctctaaaagtagatttttatcaatctaaggctgagcaaccctctacttatcttgtttccttatagtatctgagcaactaagaagttttgtaaatactgtctgacatatgtatattatacaataagatattattaactttaaaaaggagttaacaggttactttaaaatgcctaatcagaatatacattaaagccatcatatgaaacataatgttgatctatctctccttaaactgaatcaggagacattaggtctcatttccctatcacattagaataaaatactttggatt

SEQ ID NO: 449405 - DNA, 1564 bp, Homo Sapiens
ttttttttaactgttccatctttattagaaaagcaaccaaaaaaagggtgaggggtgagcctggccctaaaggacccctccactgtgacacaggcagagcggctcatcccggcgtcgaggggtggatatggccagctgggtgtgggcagatttacaaagtcaacacttcatagaaaaggatgccgcctggcgtgcagatggcgaccaatccaccttcacatggctaaggcgggcccctcctcctctgggctcccatgtggtgtggacagcctgacctgggtacagggaggatgccatgaggaggtgggctgttcaggcctgggtgtctgttttggggagttggcatccatgtgggcctctggtcctgcccagggtcctgcccagggtgcattccaggccttggcgtggtcccctggggctgtgtcgtttgtggtcttgcagtggcccctcaaatgtccatgtagtcgtcgtcctcgtcttgtctcgctctccagcgaggactcctggctggatgtctccaggacctccagggctggctggcataggctctccttcctcacgttggcagcagcactgggcagaaaggatggctgacttcagcttctgcttggtctcctccgagatgctgcctttgggggagagcaggttgggtgggtgcgtgacggtgatctcaggggggaacttggtgcggcggaggggatgaccagctttggcatgttgggcatgggggcgggacttagcccggctgggctcaggcttgcctgggtgaccctctggtggctgggcactcccactgctgggggccttggagctggcagctgttgggggagagctcaggggctgagtctcactcgcagcctcctgagcctccccatcccttctcggctcaggcctcagtttcccctcctggctgcaggtgggctcagcgcctgtgcccagggcagcctctgccggccagcagtgtggctctgccggggaacttgtgggggccatcttcacctgcggactgtgccgtggctcctgaggcgggaagctggtgccctctgccactctcgccagctcttctccctctgggcccagagaggccatgctgggggtagcttcaggcctgtgtggccggggaggcccagggtccttggactggtccagggtggaagctgatgctgacggagggcaggtgataatagttgtggcggcagctagtgcagggcgaggcttggtgtgagcatcactgggccgctggacagagtcagctggcacagggtcaggggctgtgggcaccactgtcacaggaaagaagttctctcggctgtctttggggtgctttggagtggtgggggtgtcccccgaggcctgtctctgggcggcagccccaagatggacctggcagaacttcacagcctgctccagcgcagcctcctcatccacctgcttgatgagcatgtaggtctccgacatgatcctctccacacggcccaggtcataggccacacccttctggccctgctgccacacacggtaggcatccaacagaagtgcctcgtgccgaattcgccacccaggc

SEQ ID NO: 449406 - DNA, 1310 bp, Homo Sapiens
  misc_feature (291)..(291): n is a, c, g, or t
tgttgcgttcttacggcgcccctttttagagtggaaggttaccagtttccgggatcctttttctcccccctggggagggatggcccttttctccaggccacggaagtgggggttccccccaatggggcttttgcccccaaggagccgttttaacccttggagagggttgacaaccaaggtgtcttgaaggaagcaggcacactctcatggttccccccctagggtttcgctttcttctaatatttaggattcccagtgaagggtactccacacacaccctctgcctacccntaatcccaccccattgtgtctgatcccacaattactcccagggtatctatactcacagcttttgcgctcaaagaacattgtcgtctgcagggaacgggtggagcccttctcagaagctcccgggggcgagtccattttaagaatgagttgaagtaggaaagaaaacacagatgctgtctttgcattcgacattctatcaccagcaagagaatatgtaactcctgttctttccttcattattccatgaattaccttttttctctagggatctaccagttggtgatttagggcttttaaatattatgcttgttatgtatttaacaaaatgcaatatgtctactggtggcattgtttccttgggaaattagaaaagtagaagctacatactctagttcctaggtggtctctggaaagttggcctcatgctggttggctaaataataagtgtttaggatttgaaaggaagaaagagaaatgaagtcctggtgacagagtttgtgagaaacagaagatgtaacactctggcatttgttgaggagatgaggaagaacttttgaaaaataagctattctattcagttttgtgcaaatttattgcagttgcttcatagaggaagaataatgttgagaatggaataattgccaatgctagtgatgaaatttaaaggattcctgtactcatagttaactgaaagtatttttgttgttgttgtttaaatacttctctctttggtttctttcctttgcagaattattttcctataatagtttccattaggtgtcagtttgaactggtttttacttaagttaggggtgaaaatgttccatcatccccccttttaagataagaaagtgggaaaaattaaaactttattaagttgaaattactggagttaatttttattgttaaagacagcttttttattcccagaaaaagtaatttttaattatgtcccccctagtcaatgactgcttttgccctgtccctgtccatagccatgattaaagaagttccaaatt

SEQ ID NO: 449407 - DNA, 790 bp, Homo Sapiens
ggataccaattttaagttgtgactagggaatggggatgtttttaagctgaattgtcttgctgcggaactttccttttttaataagaccatattatgactctgaatgctcaagggtaagtctaaggcctcattgctgttaccaggagatttttctagttacagtaataaagatgttaattcacatgcatgcagacaactgaaactcaagtggagaatttgtttgtgaacaagtcatactacttctgttatttgcatgaatggaatctgcaatatctttttccatgggagaccctaaaagaaaaccctggatcagaatgatctgcagtttcagataataaaggcttttaagagacatttttagaattaaaaatatgctaattttattaaatgaaaatatttgtaactgttaactttctcactgacaaagcaagtttctcaataaaatacctattttaacttgcattactgacatcttttctttgagtaatctgaataatgcagaagccatcatagaggtcttttctatacattctcaatgttttcttaaatgggtttcctgagttctgttcttcatgactctgggctctgcaaacagggtttcccaattacgcattctataaacacttttatgaatgagtcaatatgacattgagtccttttcatacatttcatcatttccaatatgtagagtgacagctagaaaaatgataaaattttgattaaaacctatctctttttcttcagcatagtcaattgttttcttaactctcaatgagtaactccatgccta

SEQ ID NO: 449408 - DNA, 1270 bp, Homo Sapiens
  misc_feature (37)..(37): n is a, c, g, or t
aagaattaaattccagcttgattgactttccccggtncagtggtgatggagaacgctcccccagttgtgtccatgaactctttgccactgcctggatctacacataagggcagctcttgggccccttccaggtcctgcccatgctgcatatctgtcagggtgcagaaggatgccaccctctggtcttcaaatgcccgtgcagcatccacgaggtgggtccaatctaaccctgtggctgtgtccgggaggggcatcaggccaggatctgcgcacttggacttatctgataaggacccatcggagaaccagaactcatttctcaggctccccatgctgggtgcggggtgggcccgcggaggcagcgtgctgtggtagggtggggtggtgctgaacagaatgtcgttgggcagggcctggtcaagcacggaactccgggaactgccaaaggaggaccccctcctgttgctgcagatgctctcgtcagacagcgtgcggtaaagcgacctccttggagacaggttcccatagaacgaaaactttcttcgcccctcctccactaaggggctgtcaggaagcatcaatttcagaaaatcttctttagacagaacatgttgagtctctgcaacagcatctcccaccactgtctgatgctgagttgctgtggacatgacatccatctcactatacatcccgggacattcagtcacttcaggctcctcgggcggtgggctgccctccgatttcttccagccgatgacatatttgttcactgccccttgtctgtggtagggcttggacatggacccgggaacctgttgtccgctgctgtgagacacgatgtagactttggatgaatccagagacccactactttttgaacagtgagctgaagggcttcctgatatggtgatgaagccactggtatgagaggatagtctgcactgatgagtcggcccatgctgcgcttccgtcagcactgccggtcggagatggttgactgcgtagccatgcacagaatataacttggctggctcgtcgtcaggcccagagacgtcggcagcatcagcctcatctgttcggcccggctgtggatcagggacctgctgcctgccaggtgcacagggccgaggatggtggcaggcatgcagggggccgtgtcgatgccactgtcggtggaggcccctttgatgtaggtcagccaccagtaattcggggtccatcaggtccgacgcgtgggtcgacgatatcccgaaactccggaccgtacagc

SEQ ID NO: 449409 - DNA, 409 bp, Homo Sapiens
gataacacttgaagcaaagataataggattttacaatattggctttttactgatggactgaaagcacatttttctaaggtacacctattattcttgttctagactgaggacgatgtagacgtcagcttccctgacgagggaagctgcagctttccgatgattcctgaagcctacattctattaatttccccgaagagccctattgcctaatggaacattgtgagaatggccagtctggaaagcaggatcagtggagctggcttctggctcactggctttgaggtgagccttccaaatggctgggaatgaacatccagttagaagcctcggtttggaacagtggttctcagacttcatggtgtgtgacagtcactggggaacttgtccaaacacagattgacagacccca

SEQ ID NO: 449410 - DNA, 548 bp, Homo Sapiens
attgattgctttccctccactgggcccaccgggtcggcttacatagctcatagctcagtgctgctgaaatagacccagggcaagaaaggtatgaacaaccagtgaatgccactggagcataaatgttcacaaaattgtagagaaggggtgacaagaagcaagcagtggggcagggagtgtcactgatgtccgaaaccccgggtcagaccaacacgcagcacaggcactcggccagagagagctgaaccatgccatccttgtcttcgtccagaaggctgaatagtttgaagagggtctccaggcggatcatacaagccacgaagctgtcaaagttgatgccgagcttgctgcacgcataccgcagggcaatggtctgctgcacctggctgttgagggtgaaacctgccttcctgagggctgtcctcatctcgtgggcatcgatggtgcccgagtggttataatcagtttcccaatagatctccagatacttctgaatcttcagccagagcgtcttgaattccaccgcccccaaagtgccccggacgcgt

SEQ ID NO: 449411 - DNA, 502 bp, Homo Sapiens
  misc_feature (11)..(11): n is a, c, g, or t
ttttttttgtnagttaaaccagaaagacatttatttctctcatgtaaaacacatccagaggtaagcagtcaggactagttgggcatcttcccttccaaagtcatcatgccctgggctccttgtatcttgttgctcaatcatcctcagcatgtgtctttaacatgaagtccaggagggctgcttgagttctagccatcacatttgcattccagccagcagagaggaaggacaagaacactgcaaagaagtagcacccaaaccttttggttacatctctttgagtacttggtaagtgtctccacttaactgcaagggaagttggcagatgcagccttttgggtcagatggctgtgtgctcagctaaaaatcaaggacttttacagtaaagaagaaggggagaatgcatactactgggtaagtatccgcctctgctatagtgacctcattgcatcctgcaaagacattcactgtgtctttttcattatattgcaaaatttcaaaa

SEQ ID NO: 449412 - DNA, 517 bp, Homo Sapiens
  misc_feature (94)..(105): n is a, c, g, or t
aaaatgatgaaaatctttaatttttatttagttatacttgtacggacacgtgtatatacaaatacagatcgtatgggtttgtttgtgtgtgggnnnnnnnnnnnnacattttcttttacgtttatataatgtcagcatttcaaaacagcactcgatgagtaagtgcaaaggaactgcaaagcagggcagtacaagcacaggaccacacggagctggacttcacacccagacgcacacacaatgagtggcttcaatggggtgtcaagagtaagcatggagagcggattttgactcatgggtaacctccgacatgccagcatctattaaactgtacagacaatgggagcaagcccattgtagggagatttgtctcacatcctagcagccctggggccaatgcatgggaaaaactcagtgatgccaaaccagagacagacctgcccattcacagctctgaggggaaataaaacgtgggaggaaggcaagagacacacaaaaaataaacatactaagtaaa

SEQ ID NO: 449413 - DNA, 818 bp, Homo Sapiens
  misc_feature (22)..(22): n is a, c, g, or t
  misc_feature (168)..(232): n is a, c, g, or t
  misc_feature (490)..(574): n is a, c, g, or t
agttttgaactggggcacattnaaaacctaagaagggaatacaggttgtctcgtgaggtggttgtgcagttcaaatgagattacaaacgtgaaagcttgtgaagctcaatgatgtacattcatggagtcctcattgtacaaactggcccttcttggtaacctttagannnnnnnnnnnnnnnnnnnnnnnnnnnnnnnnnnnnnnnnnnnnnnnnnnnnnnnnnnnnnnnnnacaatgtttagcagaagggttcatgtgggtgttcaataaagttttgctgagtaggtaaataaatgaattaatgaatcctgttatgctctgaacagttcctattatttgttccttaagcagttccttcaatagtggtcttattgtatggctggctcagtgaaaaacactctaactcaacctcctgtgacttactagtgtgcccaggagactgggagaattctggatggtactgtcagaggcattcaaaccagagaaacnnnnnnnnnnnnnnnnnnnnnnnnnnnnnnnnnnnnnnnnnnnnnnnnnnnnnnnnnnnnnnnnnnnnnnnnnnnnnnnnnnnnngtttacagctaagggaacaaattaatagtgtttactaaacaaacccagacttgggagtgtccagatatcccgatatctggagaacaaaggcattcctaatattgctttaaagataatattgattcttgcaaaatatagtaatttatttatttatcacaaactcttgtagcagagcacatctccctatatatacgagcgatgtacctagcatggaatcgttcctcctcttactttcggcaacatc

SEQ ID NO: 449414 - DNA, 458 bp, Homo Sapiens
  misc_feature (346)..(346): n is a, c, g, or t
  misc_feature (353)..(353): n is a, c, g, or t
  misc_feature (387)..(387): n is a, c, g, or t
  misc_feature (393)..(393): n is a, c, g, or t
  misc_feature (409)..(409): n is a, c, g, or t
  misc_feature (426)..(426): n is a, c, g, or t
  misc_feature (432)..(432): n is a, c, g, or t
cacaaaaatttcttttaatgaataaataatttgatgaaatcaaaaatatttacaatataaacacatggaaaagctctgggtccgtgaatctgatcgttgagttttgcattttgtgaactgagtcctcccccaagcttttcccttggaaacaatacaaatctgacagaaacgacgactcatacaacatatctttgttcattacacatttatctgttagtcctggaaagctacataagcatatattatgcaacatgttaaagtacaaatattacctaaaataatatattaccataatgccagatgggcttctccacaggaacaaaaacatacacttcagctgtaaccnataacgnggggtcacggggcccccaaatttatttaccccanagggtnccattttccttccttnagggttttagttgtggntcttcngtttacccgctgttctacggtggttt

SEQ ID NO: 449415 - DNA, 545 bp, Homo Sapiens
  misc_feature (77)..(153): n is a, c, g, or t
aattacatcaaaagtcacagtccactggtcaataaaagctcagggaatataggtcctatcgctcttttgttcaactnnnnnnnnnnnnnnnnnnnnnnnnnnnnnnnnnnnnnnnnnnnnnnnnnnnnnnnnnnnnnnnnnnnnnnnnnnnnngaataaccctaggccaactgaacacctcattccagaggactggctgggagagaaaaaagaaaggccttagtaacaactttctttgggtccattccaaactgttttcaacatgcaggtaaagagcccgggtgtaggtaaattaaacaacttccaaggggtatggataaagtctcaatcgagtaaaaacaggatataggcttctacttatcatctaggtatcccactggaggaaagcctcttattcacattatcatcatttccctgggatgaagttttggggagccataatcacacatttagctcaacaaatgtctaattatcatctaccacatgcaggcatgcctccactagaaaggtagcaaaccacaacttttctcccttatattttaatg

SEQ ID NO: 449416 - DNA, 499 bp, Homo Sapiens
agattcttcccacagagggaggaccaccatccacttgagaactaaataagagcatcttaactccttctgtaagggatgcctgcactaaaaaaattgtgtaagtcatccctgaggaatttggctaatgtcagaaagccagttcactttggtgcatagatatctatgacattagtactttcatcagaagaagaacaatttattgaagatatacagattttagcttctgatttctgaaaaatagatttatcctagaatgtttgggaaggacatcatgaaacaggtgtttactcacataatatactaataaacgatcttttctcgacaggtacttcgcatccagaatgttttgtctgagaagcccagggtgagcaccgtgtatgccaacaatggctctgtgcttcagggcacctctgtggcttctgtgtaccatgggaaaattctcataggcaccgtatttcacaaaactctgtactgtgagctctagactctagatagtaaa

SEQ ID NO: 449417 - DNA, 1075 bp, Homo Sapiens
ttttattctaggcttaatgtttatgtaacctaaacattcccaatcttgtttctacaggtagactgggtacaatgtgatggtggctgtgatgagtggtttcatcaagtttgtgtgggtgtatctccagaaatggctgaaaatgaagattacatctgtataaactgtgcaaagaagcaggggccagttagcccaggtccagcaccacctccttccttcataatgagctacaaactaccaatggaggatcttaaagagaccagttagcagatgcttgggttagtttgggacatggggggacatggaccacatttgagaccttagtcatcaagtagagtggtttatatccacttgggaattgttgcttccaaagatgaatggccttcagagaaagtccccttagtgctggcttcctctttgcatggactctgtgggttacattctctatcaacatatctatgcagagggtgtcttctttggtacaacagccaatatttcatgtctcctttgagtgtggtttactgcattaaggccagatgcttaattgagctctagggtggctggttagtattaatacattggtgtgctaacagggcatataggatgtggcttttgtccagctgatagtagttagaggcttacaacttaggagcagcaccaactgaaggtgctaattgcttggatctccttcattgggatagttggagagggattggagtaccactttccttccactgttacctggtacttaatgccctaaagatacaactaggagtaacagggccaaagttatttctgttagacgtcaaggaatggtatcacagtctattgacctcagcgatttgtgcttgtttgtgctagaagaacatcccaaataggagaacctctcacaagctggggcaggtcaccttatctttgtaagatgaggatatcatctagatcagaaatctgactagattggattctgaggagaagaacctactacaaggcaaggagccgttttttggctttgaaaagtcttgctgtcttgggtctacattttagggaagagcaggtacatggatccaggcttctgcca

SEQ ID NO: 449418 - DNA, 990 bp, Homo Sapiens
  misc_feature (963)..(963): n is a, c, g, or t
ctttgtttctgttggattgggtcaaattgaagactttgtgttcgagctctgaatttctttcttctacttgtttgattctatggctgagactttccagaccattttgcatttctataagtaaatactaacacagtatttggtgtgtctcctgggtcctgcaggagccatctgcttccttcagggggcctgtgggtcctctcaggttttgtaatttattcctccagtcgttctggagcaaaaattcatgatatgagcctccacatgcttctctgtccatccgagtcggagctgcaatctagtcctgacttccatccaccatgatcctgagttttccttttagcttagtgattttgggagcccaagatattttcctttcccacccacctagcacagttgtattgatgacaacagggttgtcaactctctacttcaaaaatcaggaagtgctgggtccagagctggattcccagagtcttcctgtagcagaaatcaaatgaaggcggtgaacttctgggactcagaggagcagatcccttagaggtggggagcagtattgttctaaggcttgttctttccaaccccttctagtctgtgggattgtggggaagctcagcttgctgacaaaaccatttggagcctcagaagactaggaggcaggttagtaataaccagtccctgccatcttctgtgaagctggggtgagagcagacaggttccttcagctgtgtggaagcttggttctgtagggagcacataaaagggctggagagaattgctgcagttagaggatggtgatgtcaattaggaatggaattccacctgacgctttctgagttggccttcaactgctagcttccaaatttctacctcccgtctccttcctcctgttttctctactgctgcaaggggacagggtcttaaccagtgcctaacgttcttgatataaggtgcaggaaaataaanggttataaggaaagcagcctgaggact

SEQ ID NO: 449419 - DNA, 421 bp, Homo Sapiens
tgcgaggggcgcgggtgggggttgtgattatagtgcctctatgagctgcagaagacaccaaagaactagtcaaaatctaggctaatgcttccacacctacttaaatgacaccttacaaatattagtaaattgtaagtcagatattagcaatgtaaggaagacaggatgagcttagcttcagttaactgaaaggtctctttcttatcatacttgtatctagttaaaataggtagattattacccataaaagatactcactgatgtatcattaaagaaatgttctctaagaggtgtagccactttcactttcttgaatgtagaacaataggcttctagttgaaaaggcaaacaggtaaggaagacaaattactaccttatttgtttgccttttcactttcttgaatgtagaacaataggcttc

SEQ ID NO: 449420 - DNA, 733 bp, Homo Sapiens
tagcattttcaaacaaactacaaatagctaaaaagtccgttttaagatcgagagctccagaagaagaaattccctaacaggctgcctcctccatttttcattccctagaattggtgctttcaatacagttggaacttctacagatcacagacattgtttgcccagactgaccaatctttgaggcaggtttttttcccttcaagatacttcatgttaacagcttgagggcgttcaatcagcactgctttgatctcggctggaactataattatttaacattgttacatggatttctataatccaccccaccattaaatcccttttacaccctcatcttctgaggcctaatctgcatccatacacttagtttgtcttctccgctggtctcatcaggagcctgcattctcccacatcctgactgatggttttctctctctcttttttcccctctaatgaaatcattttcttacaaattgaaaactgtaaaaaatgtcttatgcatttgctctatttttaagagctccctattgaatagcagtatcatccaccattcattgcaaactttttcccccaatcctataaaattcatttactcagcagaggtttttattaaaataatgataagcatatatttgatttttaaagagaatttctgtaaaagcatataaaatagaaagcatcaaatgtggttttttgaaaacacaggaggaaagatttggtaacattttgcact

SEQ ID NO: 449421 - DNA, 1508 bp, Homo Sapiens
  misc_feature (155)..(167): n is a, c, g, or t
  misc_feature (226)..(260): n is a, c, g, or t
  misc_feature (263)..(263): n is a, c, g, or t
  misc_feature (270)..(270): n is a, c, g, or t
  misc_feature (272)..(273): n is a, c, g, or t
  misc_feature (275)..(276): n is a, c, g, or t
  misc_feature (278)..(279): n is a, c, g, or t
  misc_feature (281)..(298): n is a, c, g, or t
  misc_feature (300)..(303): n is a, c, g, or t
  misc_feature (305)..(314): n is a, c, g, or t
  misc_feature (316)..(418): n is a, c, g, or t
  misc_feature (1325)..(1443): n is a, c, g, or t
ccgtcgggggagggcaagtcttttttgatggggggaggggtgttgtgacagatgttccctccccccccaaaaaagggggtgtaagtgtttttaaaggaagacccaagagaagcctcttttttctcctacaggggggcctttgaaaaaaaaaccgnnnnnnnnnnnnnatttttttagattttctccccccaaataatgggcgcggctttcttttttaaaaaaagtnnnnnnnnnnnnnnnnnnnnnnnnnnnnnnnnnnnaanatttaangnngnncnncnnnnnnnnnnnnnnnnnntnnnnannnnnnnnnngnnnnnnnnnnnnnnnnnnnnnnnnnnnnnnnnnnnnnnnnnnnnnnnnnnnnnnnnnnnnnnnnnnnnnnnnnnnnnnnnnnnnnnnnnnnnnnnnnnnnnnngcatatattaattcagtttaatcatatcaattcttaaacaaaaaacttcctccaagagacaatagttcacagtaactgcaaagcttactcacaatttttaaaaatatcgctcatgcttagcattcaaagaagatattatagaataactgtaaaaacttttaccaggaacatcagcttctgacttgaaaaattacaaatactgaagcattttggtatcagacacagtagttttgacattgtctgttcatttgatgagtttctggaagtttggaaaattgtacctctataattggataatgcgcttattctaaactaaacattttcaaatgtagaaaacaaactagcaagctacacatacaaagaaaagccctctaagacaagctttccacatgttgaatgccagcatgtgcaccgtgaatcctggaagactagaattgatacatacgcttggcttgaagtcttacaccccaggctcaacgatggagtttgcattcacctacacattaatgacaaactctgggttagtataagagaagccagcaaattcattttggtccaagttcatgatgaagagtttatcagtgggggtcagttccacaggctgtctggtgaactctttgtcgaagttggaggtgtctctcttgtctctctgccaaatggaaagtaaacacattaacacagcataagaagaaagacacaggaccaagatacgccagtcattgggtggctgataccatctcatgagcagagtcagaaagagccctgtgctgaaaatttttagcagctgcactccacgcactggctttcatttcacattgtatgttggcttggggatagaaatgtggtggaaattttctaagaaaagaagtaagtcattgaatgtcagttaagaattgccataaagtgnnnnnnnnnnnnnnnnnnnnnnnnnnnnnnnnnnnnnnnnnnnnnnnnnnnnnnnnnnnnnnnnnnnnnnnnnnnnnnnnnnnnnnnnnnnnnnnnnnnnnnnnnnnnnnnnnnnnnnnactttgtgcgaatccatgggtgtgtcagtgttcatgtgtggggagggtgagcatagcagtgtagc

SEQ ID NO: 449422 - DNA, 555 bp, Homo Sapiens
ttttacatattagaactcaatgaagaattatttaaaagagaggaaaggcagtgcagggctggaggtcctggagggtggcggcgggtcgtcctaactagcaggctgaaaggtgctggaggggatgccttcactcagaggaagttcacagccacctgccttggaacatgtacctgttcatcttttcgtaatgttagtattcattttgctatcttcctgttgccatttccaaacagtgtcagtatgtttttgttaaatacgaacatttaaaacatatcgtatctgtaagcctatttgggtgtcttcatttcatgcccgcactgcaccataatgagtaccacacaaagccagaggatgacacttcctccagaggtctcactgcacatggagaggttagccctggcattaagggtccttggaatctctcagcagtcatagtcagtcagatgcaccaagggcagctgagtcaatctcctttttgtaacaacaggccgttcctgcggttctcagtgctgccaacctgggcatactgaagagcctcaagcaatactggctctc

SEQ ID NO: 449423 - DNA, 418 bp, Homo Sapiens
  misc_feature (212)..(339): n is a, c, g, or t
gccagatcttattctttgaaactatacaagcaatttttaaaaaattaaaataagatttcctaattacatatttctgagaggtttaaggcaatgattctctgacgaggattaactcttacatctgggttgcactcatagggtaggtaaagaaaagaaaaagtgtactgttgagagttgatccataaagcagatggggaaatatgaaaaggcannnnnnnnnnnnnnnnnnnnnnnnnnnnnnnnnnnnnnnnnnnnnnnnnnnnnnnnnnnnnnnnnnnnnnnnnnnnnnnnnnnnnnnnnnnnnnnnnnnnnnnnnnnnnnnnnnnnnnnnnnnnnnnncgtggtggcgcacgcctacaatcccagccaccttggaggctgcactccagcctgcgcaacaggagcgagacacgatctc

SEQ ID NO: 449424 - DNA, 2909 bp, Homo Sapiens
  misc_feature (288)..(296): n is a, c, g, or t
  misc_feature (349)..(357): n is a, c, g, or t
  misc_feature (390)..(399): n is a, c, g, or t
  misc_feature (443)..(517): n is a, c, g, or t
  misc_feature (564)..(602): n is a, c, g, or t
  misc_feature (619)..(639): n is a, c, g, or t
  misc_feature (644)..(644): n is a, c, g, or t
aaatatattgttctggggggccccacccccggttaagggcccccgtatttatttgccccccgtggcgaagcaagcccccggggtaaccggggtttacccaaggccgaggttttttgaggcgggggttttccaagagttttttgaagggtggtggcccctaaattgccggggtaccctttggaaaggacccacgtttttgggtattttgcggcttttggcggaaagcccaagttccctttggggaaaaaaggaagttgggtaagttttttgattccggccaaaccaaannnnnnnnnttggtagccgttggtttttttggtttgccaaccaggcggaattacttcgccgnnnnnnnnnggatcttccaggaaagatccctttggatccccnnnnnnnnnngcccgctccactagggcgggtttaaattcccgggtactgcaacnnnnnnnnnnnnnnnnnnnnnnnnnnnnnnnnnnnnnnnnnnnnnnnnnnnnnnnnnnnnnnnnnnnnnnnnnnnaccactttgtacagaaagcctgggtcaggaaacagctatgaccatgnnnnnnnnnnnnnnnnnnnnnnnnnnnnnnnnnnnnnnngcctcgagttttttttnnnnnnnnnnnnnnnnnnnnntcacntgagagtaaatgagtttatcagatccttcctgagaacaggtttttcagagaaagggtaagtggttgcacacaaaaaggcacttagctcctggccatggcagccggccagggaagggaggggagaaccaagcagggagacggggcacagggaagacgcacggcagctccttctcccctggccagagcgggcctcagtggctgggagcaggccccagggacaaagatgggtgggtccaggcctcagagaagggggacatcatagacaaagaggcacttgctgggagccgatgagacaggtgactctggagttcttgagggggcgccgtgccctgactgtggatgtgagcaggaaggagcagaggtctctgggcaggacataggccccatagtgctgatgtgcacttgtgctgtgacctgggcagagactgggtcccagcatctgttgtgcctgccgcagggtgagaaagtcccagccccaagaggctgggctgggaaggagctggctgagtcttgcaaatattcctgaccccagggaccctggccaaacagatccacaggcaaaaagggaacagggacaatgagaggaaagggtgctgctgtgagaggcaggggcctggcatgagggaggtcccttgagacgaagacttgcaggtctgtcttggcggggcttgtcacatcctcagcgtccttcgaggagtcagatttctgtcccctttgagtcctctcggttgcagatgtatgctttctgtgcctcctggggttcctgatctccagattcctgggtcctgtgtgatccatcaggttgagccttgatgtcactactccctgagagctctcaagttctccttccgtctggaggctggttctgctcggctctggcccgccagttccttctcaaagaggtggcgcttgctggctacacccacaggatccacgaataactcagtgcaaggcagaccccgagacttgacagattctgatctccgtatggccgtgtggtatctctccagcttctctcccaacttcactgtgttgtctgggagcttcatgctggcactgcgagttagggttttttccgagttttctttcttgggtttcatccgaaaggagaatggtcctggggctggagcgtttgaagggagctgctgtaaggttcgctgtgtgggtgaggacatatctgcctcttcctccttgctggggattttcacctggagtgtgacgggtgggaggtcgggaggccacagtcggagggtctgaagccccctgctttgccaaagagggcaggttcttcccagggagggcccttcctctctgctccttggtggtggctgggcttcccccagaggctggcggctcctgcgccaggggctgcttctgaggctgtggccctctttgggggccggcttagcatctgcagtgggctcttctctgaggccagtgctttctcaaagatggagctttttcagacaccagcctccttcctgagcccagtgccatccctggggccagcgacttctcagagacactggttttttctagaacagacttcttctctgagctgtttcttttctctgacactgctatcttctctgatagagatgtcttctctgaggccagcaccttctcagagatggaggttttatcggagaccaggctcttttcaggtgccgtcttctttggcatggaggacttctccaagactggggacttttctggaacccctttcttcctctcttctggctccctgcccaccaagctctcctcctccagggcccaggggccccgctgttcccgactcagtctccggcgaggtgggatttccagttccttcttggagactaggggtttctgtgtggcctgcacagggctcaagctgttcctcccctcctctgcctccagcctctcctggatgggggcctgtgcagcctccaccacctgccgcctctgcctccgctcctgccgtgttctgaggatgctctggatgtcctcgtcctcatctttggaggctgggggcagtggcttgggcacctctgcttcttccacgctcggtagtctctcagaagcagaggcctgccggtctccattctggctgagcctgggagcctcatcgtccgtggtggagctcaggttgcggtgccgccgcctgcgctcgcgctcctgttcctcctcatcctccagagtcctctgccgggcaaggctggacagcgcggaccagtccttcccctcgtgccgaattcgccacccaggcctcgctacctaggaccg

SEQ ID NO: 449425 - DNA, 467 bp, Homo Sapiens
  misc_feature (358)..(358): n is a, c, g, or t
aaagaaataaatccttttattttataacattccttttctttttaaagatgcatacagtacttgtaagcccatgaattctgaaaaaagctatagaagacctggcactatttttgagaattacaaaactgggcagcagaataacacctttataaaggtcaaaacataaagcaataaaatttagtgtttgcacacaaaaataggggggttacattcaacacgttttttaaacgtgcatttaaaatgtttaatgttttctaaaactttggttgtcatggctttattataacttgttaaatttcacaattatgtagataattgaacccaaaaggtaaggcaaatatatgacattaacacagcnggcaaaagcaagctaatactgcacaatcatattagcggactgattcagaaatacatgtttttcacaaataatatacaaacttagtttctgataacatagttcaatgact

SEQ ID NO: 449426 - DNA, 648 bp, Homo Sapiens
  misc_feature (432)..(432): n is a, c, g, or t
  misc_feature (507)..(507): n is a, c, g, or t
ggctccactggctttaatctgccccacctcttccacaccaacctccaccctctggttccgatgtgcttggttacaaagcacctgattatttaagagaacgaaaaaccaccaccagttcctgtaaagaataagtcacaggtgcacaggtgaagggctgagttgtggtccagccccagggagtgtgggctgtgaggcaggagcgagctaaacctgtaggagcagcgccacggctgccaggatccacttcgctgccttctctttggtcttcaagttaaaggtccagacataggtggggccgcggatgcgtgttttgtacacgggacactcatagatgttcttggtctccatgcggtccacaggaatggccttgatgaagatgacaggcatggccggggtcagctctttcagccgcgcttcagcgatgactccagntctgggtgtcccagcgagccccttccatgaagagtccgtacacgtaggagccctctcgcggaggagcggcatgtncctctcgttttttttgtcacctcgacagacagacacatcttgtccagggggccactcgttcttcctggccatggactgcatgaatggccgtgaggaacgaacttggggtttgaagagcccggccagccaccacggtgtggg

SEQ ID NO: 449427 - DNA, 488 bp, Homo Sapiens
tggtattttgttttgttttaattttacaagaaatatatgagtattctctcatttaaaaaggagaataagggagatactaatgtgatatcttcaattttttactctaggcatttccataaaccagataatatggaaatccctagagtaaaaattgaagttatcaccttagtatcatatcacccttactgtctccttgatatcattccccactgcagaagtaactaccgtcaacttttggtgtatatgcttccaggcttttatctatgtatttttatatacgtgtgtgggtgtgtcagatacatacaaaggtatgtgtatacaaaaagatatgtatgtgcatgcgtgcatgtatacatatttgtgaatgtatgtacatatttatgaacacatataaacacataactggactatcagcctacctctggtccctaactagtctttccacatctcttcttatccatttgcagttcattctttattctgtagcc

SEQ ID NO: 449428 - DNA, 820 bp, Homo Sapiens
tctcagccccatggggtatatccaccctcaagtgtgcagggaatacagcagacagcccctcctcacagacagtgcagtattcactttcacagacatcaacctccagtgaggccactactgcacagccagtgagtcaacctcaagctccacaagtcttgcctcaagtatcagctggaaaacagcttccagtttcccagccagtaccaactatccaaggcgaacctcagatcccagttgcgacacaaccctcggttgttccagtccactctggtgctcatttccttccagtgggacagccgctccctactcccttgctccctcagtaccctgtctctcagattcccatatcaactcctcatgtgtctacggctcagacaggtttctcatcccttcccatcacaatggcagctggcattactcagcctctgctcacgttggcttcatctgctacaacagctgcgatcccgggggtatcaactgtggttcctagtcagcttccaacccttctgcagcctgtgactcagctgccaagtcaggttcacccacagctcctacaaccagcagttcagtccatgggaataccagctaaccttggacaagctgctgaggttccactttcctctggagatgttctgtaccagggcttcccacctcgactgccaccacagtacccaggagattcaaatattgctccctcttccaacgtggcttctgtttgcatccattctacagtcctatcccctcccatgccgacagaagtactggctacacctgggtactttcccacagtggtgcagccttatgtggaatcaaatctttt

SEQ ID NO: 449429 - DNA, 685 bp, Homo Sapiens
taaaggagcaaaaataaatcacatttatttatacatttaacaagttgcttttagtatttatattatcactagacattgcactgtgtaggaatcccatgctgaatttaactcatctatactcttcttgacaatgggtttatcaggctccccacatgccgcaatgagttcagaacctaggttaataactatatccagctcctcctgtagtccatctatttcttcccttatggtctctgctgcttcttgctgttgttttactactgaaggatcaattccaggatcttccaggtcccggatgaaatcttgagtatctttaatggtaactatcaatgacatgtgatcgcaccagaacttttctgctagctccatcacatccagtagtttggcttccctctcttccaccagtgtgtgtatgttctcccaaatgaaaaccatttggtcaagcttatcctgaacagctttggcagatatgtctttatcagtccccccagatctagcaatcatttcctctcccctctgtttaagagtttcatacaacggctgtagcttttccatgtctactgacacattcttattttcactgatctgttccttgatcttctcaacctctgcagagatagagggtggctgcctcagacgttccacgatgcgttccagctctcaaggatctgatctatcttgtcat

SEQ ID NO: 449430 - DNA, 155 bp, Homo Sapiens
gactattgcatgagtaattaattccagatcttttgtattcacttctgtattttatgtttggttgaggggtgcttttagttgtgtggcatttgtattcattgatctttcagtcatgtaagttaaaataaaaattatttttgaattactaaaaaaaa

SEQ ID NO: 449431 - DNA, 421 bp, Homo Sapiens
gataccacttgaccattttaggaaattttggatgtggatttatcaaaacctttacttgatggttagagttcctgcatttatgaaatcaaatctgtaataacagaaatcctggaatactcttaatatatacttctattttgtgtttgttactgtgattaatatttgcagttgtatattttacatttaaattattttaaggtttgcatttgtatgcttaagacattgatttcctgttggtagatgtattttatcctcacaatttagatgtagctgctttaaatttattgatgtatttcgacagagtcgtctggaatgctttatcttctgaagcttaaaaatgtactgtttgtgcaaatcatgatctgtttcacattccttggagtaccttgttagtgatgaagtaataaagcctctaagatgt

SEQ ID NO: 449432 - DNA, 532 bp, Homo Sapiens
ttccagttaaattcagttttattgttttccgttacatgttcactccctgttccttctcgccgcctggtctggtgggggcataggagagggagggaggactgaaggtcatacatttctgataatgtcgctttctaaagggctgtgacatttttgtacatcttttccatcttttagtagcaagtggttgctgcagaccagaagtgaaccaaataaagactcctgctctgtgcagctctcagactcctgctctgtgcagctctcacaaagatcacagctgcttttgtacattccagtaactgcatgacacaaaacggtacctgtgagcaggaaacacattcacaccatgagacatgcacagaggcaggtgtccctgagcgaagttgtgcagagatctaggcctaggggcagtcagctcctgccgcaacacaacctagaaaaccaaggcgagaacggccccttgccttccagcagcgagggcagagggcaaagccacttccctgtgaattccaggaggattcaaccaaggctaaaa

SEQ ID NO: 449433 - DNA, 887 bp, Homo Sapiens
atggatcactgctgtacaagtgttggtcccagacagcagctaaattagagtgcaaatgtaaactatgaggaaactgggagggcctggctgtccagtactgatggaccacatgatgttccagccagcttcggtcatctttccaactgatacaaggatccagttttctgttttgatcttgttcttctaacggtgtcctgtctacctgaattccagagtcctctctgcttaagggctgttgatcattttcctcttcactttcttcagaccaatttggtgtgtccatgtacggaccaatgtccatttcttcatcttccatcaagtattttccccagtcgaaatcatctttcttttccacttctttatttcttggtgtctccacataactgctgtttgaaggagagtctgacagacacagaagaagtgacagtatggaataatgtgcatctgtctttatttcctttatactgggaagtggtgcatttagaaattcctccgttaatctcttccaactagcagctttgcttagatcagaatgaatgacaaatttttcataaattccttcgattgttttttctattttgtggctgttgacatccaagaaacgatgaaatctgaagttggaccaggcgaagtttagggcgagctggaagttggggtctgcctcgtcctggaggccggcgacaccccggacgagctcccgcacgtcgcgctcctgctgcgcgtccaaccgactccacggtggcccgtgccgcgccatgttccgcgctcctgcagcgcgcgtctaacgaattggtgcctgtcgcgcgagagctcgggctcctgccgcagtcgcctccggagctggcggcattctcgcgagagttcgcgctcccgcgccgggcgacttc

SEQ ID NO: 449434 - DNA, 309 bp, Homo Sapiens
tttttcaaaaatatgaaaatttatgaaaagacgaccaggagtggttattttccatttctactaagatgcaaacaagaagaaatgtttaaactgcaatgagtcaacatcagacataataattatttgctgcagaatgaactagcaacagagtttcggaaatctcctctcactacagagcatgaaatattgtcaatcacaaaaccaggatcagttaagaacagctcagactgcaggtaacttataagctaaaaaacttgctaaataaatggcttttcccccaatttttaaaattctgaattcataattatg

SEQ ID NO: 449435 - DNA, 426 bp, Homo Sapiens
aatgtttaactttttattaagaaactaaggcaaaacaacagaattccaaaaaataaagatacagaattctaatttaaattctaaacaaatataaaaatcagagtttaccagtatttttgagtagaggggagtggctaaatgcattcacagtaattatttcttccttaccagcctcaagtttgcaaccctttccttcctgcttcactgggactagaacagaatttctcattcatcttttgctactataatttttgcttctatagtctaaaacttcagaggagcttttgtctttctccgcagttctttctctgttccttcagcaaatatgtgagcacctgcctattgggcttacatgttgtgggcacaaagatgagtccgttagagatcctggtcccagtttagggggcgatatgacaccaataaata

SEQ ID NO: 449436 - DNA, 584 bp, Homo Sapiens
tcctgtccgagagagctcggcggagacggctgtcgagtacccttcacctcggtgttgggagcctgggagcgaactgcggcgcgggttaccgctcccggggacgcagcaaggggcatcgagtccctggcgggagctgcgccatggcattgctctcgaccgtccggggcgcgacctggggtcgcctcgtcacccgtcatttctcccatgcagcgcggcatggggagcggcctggtggggaggagctaagccgcttgctgctggatgacctggtgccgacctctcggctggagcttctgtttggcatgaccccgtgtctcctggctctgcaggccgcccgccgctctgtggcccggctcctgctccaggcgggtaaagctgggctgcaggggaagcgggccgagctgctccggatggccgaggcgcgggacattccagttctgcggcccagacggcagaaactggacacaatgtgccgctaccaggtccaccagggtgtctgcatggaggtgagcccgctgcggccccggccttggagagaggccggggaggcgagcccaggcgacgacccccagcagttgtggctc

SEQ ID NO: 449437 - DNA, 1030 bp, Homo Sapiens
ggggctgacacagacaggtgggaacccatctgggccaacctcacgctcggaaagaagaagaagagtccggacagagccctgcctggtccccgtacgccgagcaagcctcatccccttccacctggccccacgcaaagcccagctcgacctcctgtgcccaccttccccctgccggctccaggccttccgcagagggggtggaaggttacagaggcctcaggccgtcttggtgccggggtccacctccttgtgggcccagagctccttgtgctgcttgcggccaaacccctcgtcgtagttgcctttgctcttaaacagctgctggaagtgggttttgcagtagaactccccgtgcagcgcggcgtagctgcccaggctgagcttggtgtgacagtgcttgcagcagaagcaagagttgtggaaaatgagcttgtcggccaccagccgctccatggggtacacggtcttctggcaggcggcgcaggtctccttcacctgggcccgcaggctgaaggacttggagcgctgcaccgtgctgctgccgccgcctttggcgtcatgagagggggtggcctgggcggctcctgcagcctggaacatggctcgttggaggtggaagcctcgggtggagaagcggcacccgctgggttctgcaaggggaagtcagtcgggagggccccgccagcccggccccagccggccgcgccgtctgcccatcccgacggcggcccggcgtggggaagcaacggtggcagggacaggatggaagggccgcgctccgcatcctactgggaggggacgagttcaggctgcggcggctgcggtcgcgggacactgggcgctcccggcctggctccgggataaccgggcggggcctgggccattcactgcctcggtttcccccggttggcctcgcgcgtaggcgccggcgcccccatccccgcccagagctgtggggccgcagagacccagccggggcgaccccggagcctggcccggggtccctcgggcggccgagatcgcaggaatt

SEQ ID NO: 449438 - DNA, 605 bp, Homo Sapiens
aggttgcagaggcgccgagggctggggggcttccggggctgccggggctgccgggccctcgtgcaggctcctccccgcagcctcgcggccgggcctggagaccgcgtgcccggacgccgccgccagcctcgtgggccgcaaaggggcgggggcggcccctggcggcgggaggactcggccgcccgagggagccccgggccaggctccggggtcgccccggctgggtctctgcggccccacagctctgggcggggatgggggcgccggcgcctacgcgcgaggccaaccgggggaaaccgaggcagtgaatggcccaggccccgcccggttatcccggagccaggccgggagcgcccagtgtcccgcgaccgcagccgccgcagcctgaactcgtcccctcccagtaggatgcggagcgcggcccttccatcctgtccctgccaccgttgcttccccacgccgggccgccgtcgggatgggcagacggcgcggccggtacccgaggcctgcgagcgcgaggcccgcggggcgctgcggagccgggagcgcggagccggggcgggggacagacaaaggcggggacggcggcgaggggaagacccgct

SEQ ID NO: 449439 - DNA, 859 bp, Homo Sapiens
gtttctctggaggtaaattttataaatgatgtgtccatcataatagccattttacgttgcagaacaaacaaccccaaactctcggtggcttaaaacaataaagatttctacatctatacacatctgtcataatcaccagggaggctcttttagccactcagaaccaggctgatgaagcagctgcagcacctcctcaaacagctggtctgaggtgctgagctgatgggcaaggagaatcagaggatctcttagtggtgtttaaatgccctgtcacttctgctcctgacagattggccaagaactctgtaaaatagtgccacccaaccataagggggccaggaagcacagttctcccctgtgccaagaaggagagaaacagaaatgtttggtgagcggcatggtgtaaccaccacatataccatgccatatatatcctggcttccttctttttttctgcctagcttggcaaatctgacttcacgtaaactttatagaacatgtatagcctcttttaattccatttctctttcgcctttgtcttccaaaagtttttcaggtactgcaaaacagtgtctctccttcgtgtaagccaaaaggaaagatctcaagccttgaagtgaaatatacataattcatccctcagtatcttcagggattgatcccaggactcccgcccctgccccctcaaaagccctgccaaggataccaaaatctgaagatgcttaaatctcttatatgaaacggtatagtatttgcatataaccggcatacaccctcacatataccttaaatcatctctaaattacttaataatacctgatacatgtaaatactatgtaaatagttgttatactatatt

SEQ ID NO: 449440 - DNA, 1440 bp, Homo Sapiens
  misc_feature (1140)..(1140): n is a, c, g, or t
  misc_feature (1250)..(1250): n is a, c, g, or t
  misc_feature (1265)..(1265): n is a, c, g, or t
  misc_feature (1269)..(1269): n is a, c, g, or t
  misc_feature (1309)..(1309): n is a, c, g, or t
  misc_feature (1332)..(1332): n is a, c, g, or t
  misc_feature (1362)..(1362): n is a, c, g, or t
  misc_feature (1369)..(1369): n is a, c, g, or t
ggcgcacgcacaggagcctgcactctgcgtcccgcaccccagcagccgcgccatgagccggagtctcttgctccgcgttcttgctgttcctgctcctgctcccgccgctccccgtcctgctcgcggacccagtggcgcccacgccagtgaatccctgttgttcctatccatgccagccccagggcatctgtgtccgcttcggccttgaccgctaccagtgtgactgcacccgcacgggctattccggccccaactgcaccatccctggcctgtggacctggctccggaattcactgcggcccagcccctctttcacccacttcctgctcactcacgggcgctggttctgggagtttgtcaatgccaccttcatccgagagatgctcatgcgcctggtactcacagtgcgctccaaccttatccccagtccccccacctacaactcagcacatgactacatcagctgggagtctttctccaacgtgagctattacactcgtattctgccctctgtgcctaaagattgccccagacccatgggaaccaaagggaagaagcagttgccagatgcccagctcctggcccgccgcttcctgctcaggaggaagttcatacctgagccccaagggcaccaacctcatgtttgccttctttggacaagacttcagccaccagttcttcaaaacttctggcaagatgggtcctggcttcaccaagggcttgggccatggggtagactcggcacatttatggagacaatctggagcgtcagtatcaactgcggctctttaaggatgggaaactcaagtaccaggtgctggatgggagaaatgtacccgccctcggtagaagaggcgcctgtgttgatgcactacccccgaggcatcccgccccagagccagatggctgtgggccaggaggtgtttgggctgcttcctgggctcatgctgtatgccacgctctggctacgtgagcacaaccgtgtgtgtgacctgctgaaggctgagcaccccacctggggcgatgagcagcttttccagacgacccgcctcatcctcataggggagaccatcaagattgtcatcgaggagtacgtgcagcagctgagtggctatttcctgcagctgaaatttgacccanagctgctgttcggtgtccagttccaataccgcaaccgcattgccatggagttcaaccatctctaccactggcaccccctcatgcctgactccttcaaaggtggctcccangaatacaactaccancagntcttgttcaacacctccatgttggtggactatgaggtgangcccatagtgatgccttctctcnccaaattacttgcccgatccgtgggggcangaacatngaccaccacatccttcattgtgctttagatgtcatcaaggaatctcgggaaatacagcttcacccccttca

SEQ ID NO: 449441 - DNA, 985 bp, Homo Sapiens
atgctggtgcagaaggccactttggcttttgatgcctgccttggcttcgaagcaaccttgggggccgtggacagcatgcccatggcctgctgggtggccagagtccttttgtcctgcggtccatataagagggtctggatctggagacacttcttcagtttcttgcgggccccactgtggttcccctgcgccagttctgctcttcccaggagcccgttatgtctctgccacctcgggactgaaatcgccaaaatgcttccactttggcttccagggactctctcaggatcgaggttgctctctctttttgtccagtcatttgtagaaaatggcaaaattcatcttgaattgaaagaaatttggttcttcccatcccttcagaatccttaagatgagccatgctctcttgaaaatactgctcagctacatcatggtgctcgtgtctccctgaagcgacagcagcatgggcgacgatgtgtgccgagtctgctgcctccgcttgagaggggcttctactcaggatgatgagatgtgcctggaggaagtggttgatggatacatcgtggagtcccagggcttgctctacacctgctaattctctcaatatgggtacacactcacgacttgtttcacctttactgatctcaacatattccaaagctgcttgatagtgggacaaagcttcttttgacttcttctgaccttgatacacctgtgcaaatgataatctgatccgtgcttcaatttctatccattcttcctttataattcttccacattgtagcagctcctttgaaagtctctctgcttttgtcaaattctctgcacattccttaaatttttgaagggagagtaaagctctgcccatggtatggaaaagctcaatggaaaacttgaaaacatctgtattctcactatagggaggcacaatggagttggcgaggatttgtctggctttttctgcatgttgttttgcttgcagtga

SEQ ID NO: 449442 - DNA, 439 bp, Homo Sapiens
aagaaaatgtttatgtaatgcacacaaaagataacttgatttttgtccgaaatgtagacaaacatttttttgtatatgtagcatttttttggatgcggagactcgcagagcgatgggagaacgagctgtagctcttgccagagcagtaaaatattcctctgctgggaccgtggagttccttgtggactctaagaagaatttttatttctatggaaatgaatacaagactccaggtaacaacaactgttatttattcctctccatgcctctgtactttacccttccttctccacccttttttgttttataaatgttaaaaaattaactccataaagtgttaaataaagatttagtttttatgcttgtgctaagacatctgttaggaatgacggatagtatccctctaaagttcaatgtctagacctctgctttgtcactg

SEQ ID NO: 449443 - DNA, 571 bp, Homo Sapiens
  misc_feature (146)..(146): n is a, c, g, or t
gatccctggggcacttcgatgctgggcggggctggcagtgcgatggccagatgccacgtgcgcattcccacgagggccggcagagtcttgtcacagacttaggcaccagactggaggccccgggcgctggctccgacattcgtctngcttctcacagctttcctgagtccgcttgtccacagctccttggtggtttcatctcctctgtgggaggacacatctctgcagcctcaagagttaggcagagactcaagttacaccttcctctcctggggttggaagaaatgttgatgccagaggggtgaggattgctgcgtcatatggagcctcctgggacaagtctcaggatgaaaagggcacagaagggcagatgagaaaggtctcctctctcctggcataacacccagcttggtttgggtggcagctgggagaacttctctcccagccctgcaactcttaccctctggttcagctgcctctgcaccccctcccacccccagcacacacacaagttggcccccagctgcgcctgacattgagccagtggactctgtgtctgaagggggcgtgg

SEQ ID NO: 449444 - DNA, 1593 bp, Homo Sapiens
ccttccttcaacagtctgggattgaaaggatctcctgcccacctttcccttgcccttccctcctatgtgaggaatgtgcgtcgcttgggtacatgtggacacttgaaagatatttgatagaattctgggaaaacggaagcagtcagttcctctgagtcaaataagaaacgacacacgtggctctcatcatgtttctattggacagcgctgccctggagcctcggcaagtcatttggcttcttcgcgtctttcatgtgtcttctccagactgtaagcttcctgtggacaaggcctgctccgttcaaggctcaatctccagctcctgacacaccatgcgctaggtgctcagtcactaatggtctcgcgaaggagtgatcagtgagtgaagcaggggctgctgcatgggaaaggtgagcgggctggaaatgggtagtccccgcggcgtctcccagtcgggctcctcccgaggaggaacggaaggagagaccccaggtgtacgtcgagggggccgggagggaggaggggagggtcgctccaccctggagcgggaatgctgcatggcagctccgggtcgccaggcggcggtttccaggcaacgaccgaacacagacgcgggctagacgctggcgctgagcaacctgaggcctgcagactccgactgggcccctgggcgggcgggacggaccgcggccaaggcgggggcgctggacggtggcggcatggaggacgacgaggaggagaccaccgcgtccacgctgcggggcaagcccaggccgccgcccgtctcggcgcagtccgccttcagctacatcccgccgcggcgcctggaccccaaagagcacagctactactaccgcccggcgcggacaggaattatttccctctatgattgtatttttaagaggcgcctagattatgatcagaagttgcaccgagatgacagagaacatgcaaaaagcctgggacttcatgttaacgaagaggaacaggagaggccggttggagtgctgacgtcttctgtctatgggaagcgcatcaatcagcccattgagcccctaaaccgggactttggccgtgccaaccatgtgcaggctgacttctacaggaagaacgacatccccagcctcaaggaacccggctttgggcacattgctccatcctgaagcatccccgtggcccacagggcatgtccgataccctgtggcctggcaagtttgcacagcgagaaggtggcatctggagcctcctttccccttctcatgacgcctaggagcttggctatgcctgtgttgcatctctacagtgggacacatgaacacgttagcagcccccctcaggttgctgggttaggagcctgaccaacaacacctttagtacatgtgaagaagtctctgatgtgatgattttcagctggaattatttttgatcaaatgaatctggagaccgattcattgtgagcacctgaataaaatgaaaactttgtttccccttggtaactgttgggttggtttctgttcactggctctctacatttgccaggattctttggggaggcagtcacaggagtgaggtgcagttgcttttcccacgagt

SEQ ID NO: 449445 - DNA, 512 bp, Homo Sapiens
  misc_feature (455)..(455): n is a, c, g, or t
acgcgtccgcaatgttcagctcccacttataagtgagcccatgtggtatttggttttctgttcctgcgttagttcgcttaagacaatgatctctagctccatccatgttgctacaaagaacatgatctcatttttttttggctgcatagtatttcatggtgtatatgtaccaccttttctttatccagtctaccactgatgggcatttaggttgattccatgtctttgctgttgtgaatagtgctgcagtgaacttatgcctgcatgtgtctttatgacggaatgatttatatccctttgggtatatacctagtaatgcgattgctgggtcaatggtaattctattttaagttctttgagaaatcaccacactgctttctacaatggctgaactaatttcattcccaccagaagcatataagcttcccttttctccttgccagcatctgttattntttgactttttgataatagccattctgactagtgtgagatgttatctcattgtggtt

SEQ ID NO: 449446 - DNA, 693 bp, Homo Sapiens
  misc_feature (36)..(36): n is a, c, g, or t
  misc_feature (129)..(129): n is a, c, g, or t
cggagacccagcccagagctcatggcaggggctggncagggtgaggggcggaagtgctcagcaggcgcccctccctggaccctgggaccctatttgccccttgggtccgtcacagcatccgcagtcatnagaatcaggttgggcagggctgaatcaccgctgcctggggctcggagaagaaacaagagattctttggcccagagcagtcagaggtccctgaggaggaagaggccatcacccagaggatccctccccttagtcatcttcctcctgactgatctgaggggagcagggcgcccccttcaaacagagcacagcccaggagctgctccaggagggggcagtcaccacaactggcttcatcagtgctgttagcatcattgtctcatgggggacattgctcattggcatcacagtttgtttcctagcagtttcaaacatcattcatggtcttgaacttccccttcttcattgccctcaggttcagcctcccatctggaactctttcttcttgatcatggcattcacaacatcttgtcttcctcttcctccctctgccggtcactcatccaggcagttgatgatagcgttgcgctgctcaatgagggtcacaagctcctgcatcagcaccttctcccgggcccggtcctcctccgtcccctcgtgccgattaaccacccggcctcgtactt

SEQ ID NO: 449447 - DNA, 312 bp, Homo Sapiens
  misc_feature (207)..(245): n is a, c, g, or t
atatgtgggcataacaaaaaattaaaggaagaatggtcatttttagaaaaaactttatttacaaaaccacaactcagtctgctttggtattgacaaaatccctacaactgagatattaaagagatacatttattttagagttacataaaaccagaatccaacactaccctactttcctattcctttgtggctctgaatgcagctttnnnnnnnnnnnnnnnnnnnnnnnnnnnnnnnnnnnnnnngctctttataatgtacaatggcttaagcaaatcgctttagttttttttctatttaagatttaggacc

SEQ ID NO: 449448 - DNA, 540 bp, Homo Sapiens
ggaatataaagatgaaactgaagttcacctttttaataggactatatcctccaagatcctagaaagcgttgtgtggccctgattcagatgtctgctttcctatggcaccaaaacaatttttacttggaaaggacactaacatttattgaataaacctcatcccagccaagagcttcttaatctttgtctcattccctcaccaaccttgggagatagactgattgggaactgaagttcaaagaggttgaatggggttacctacctgctaaattctagtcccctcactagtaaatgatgaggttgggccatgaggtctgcctgactccaaagaccttgccctttccaatacttcatgctgcctccataattgagggtggtagaatgcagaacagggagtcatttgtcactgtggtggagaaagagttggtttttgactttggggatttagggatacatatgtcctccttcctccttcccctcctagagcaagagctagaagtgaaagaatagaaggtgatgacaacactgcatatatttcag

SEQ ID NO: 449449 - DNA, 447 bp, Homo Sapiens
  misc_feature (20)..(20): n is a, c, g, or t
gttttccctggttttaaccngtttaatattccggatttttaggcagctttccaaaaccaagtgtgggtggaaaaaaagaaatagtagtaggaagatgtttagggcaagcagaactctgggtcttaaataagtaccatgttcccacttgttgccgatttttgagagtacttagggccatctttctcaattttgtattatttgtgtgcatgtttatatcaaagatgcccattttgttaaaatgctatttcctttattaccttggaaactgactcagcctcatgttgctcctaattagtgtttaaggctcccatgagttgcagataaaatgatttattttaacaagtagaaggaggtgattcaccttttggattgtaaatatatgaaaatgtctacaaggtctttatctgctttctgtcagcatttatattcaatgataaattaatgagg

SEQ ID NO: 449450 - DNA, 759 bp, Homo Sapiens
ttggggccccctgacatcacaggacaggtcgctcggtgcagaattcaacagatggtgctatagatgaggttgatccgattgaagaagtccaccacatgtactggccacccagtcatttgtggtcctcctcactgggcaacttgccactatcccgccttcaaggttcacaccccgagttgaggggatgcctgagccccgtttgtgcagctcaaacctctggtgtgccaggttcaaagtgtcctcttggggtcggaaggtcttgtccttgttgaatacctgcttcagggctatggacatggtcttctctttcgcttcctttcttttgcaggaagggaaaaggcacctggaacttttcagggagagatcacagcccaacagtgttttccactgccagcactcaggccccagtcttacagcctgtagctttgtaagctcttctaaacagccccttccatcgttcctcgttgaatgatttccaagggaacctcatgttctttccgtggggttttacctccagcccagggcccggtcggctcccttcgccgggtcagctgcagccagcgcgaaagaaaatggtgagctcggggcaggtggggcgtcgcttgccaatccacgcaagggactctgccgccggtgcgcgaggtcccggcgagccaaccggcggacgggcgagcgcctggctccagctgcagccgccgtcgctccggagcagccccctcatgcacccagcgcgccgcgcagccggccggggctcccgct

SEQ ID NO: 449451 - DNA, 527 bp, Homo Sapiens
  misc_feature (488)..(488): n is a, c, g, or t
ttttctcatcaacccatagagtggtcttttgaactggtatctaaacatacctggttatgaattctcaaaagagaaagcaggtctggggcggggtggtcaggagacagattctagggaaagtgctgaagagattttcttctgaagatgatctaggaaatgcatctttatacatgattgttagctgctgtagctttctgaagaagattgtagaaaagagactaagatatatgcaagggtcaccagtttagagatcagtcaaattggaaaaagtgccaagactggatgtgcagattgttctatgtattatcagtatttttttccctctttaggaaaaaaatttactctctctcctttgtgagtaaatgcctccttaatgccttttaagtaaggtggcaacttttaactgtcatcttgtgagaggcaacctcaaactctaagcagactccctctctccctttctggtgtcttaaatcaagaactagtttganaccaaggcaaagcaaggtttgttcatcttcctttccgcc

SEQ ID NO: 449452 - DNA, 730 bp, Homo Sapiens
cgacagaataagactcccatctcgaacactttttactacctataagggaaataaagaatatgcaaagtacaatccctcaattttttattagacccacagaaataaaattagtctgttaaactgctataagtttctaaattcttactttctgtaaatgccttgacatggatgtgtaacaaagggcttacagactggcactgccttgtggaccacacttttggtgagactgctctagagcgctgacaaaaatcagactttgaatccacagggctgaagtcaaagcaactgaagggtgtcctgactcaccagctggccacctagtggcctccttctagtcataagcacaaccttgtgtcactccttagttcaaaaaccatccattattctgcctgactcaagggtaaaatctcagtcctttaatctgacatccaaggccttccagagctggttctaaacaactttttaagtctgactttccactatcctctacttcactagactgcattgtccaatatggtaataacttgtcccacttgaaatgcagaagtgaaatgaggctaatttaggaactgaattcataatcctaactttaatttaaaataaaatttaaaaatatacacaattcgattaccgtaaaacttttaagtatgcttggaacgacttgggtacgtgaatctattttttcagctggagaattttatgaaatccggacgcgtgggtcgacgatatg

SEQ ID NO: 449453 - DNA, 165 bp, Homo Sapiens
ctgggggcctaagtgaggcagagataaaacaaattgaccttctattgtcctagtgcataattgtgtctatctgaccactagtgtggaggttccttgaaggataaataaggcagagtctttatccttcaaggaacctccacactagtggtcagatagacacaatta

SEQ ID NO: 449454 - DNA, 1028 bp, Homo Sapiens
cgagttagcttaagagctctgacttactcacaagggatccccaggagtcactcgatataccactgatcagcaaggcttggtgctgatgactacctgtggagtaataacatattggctcccagcgtccttctaagggcttcatacctaatacttaaattcactgactggcaccccgtgcctactgcacagcatgcactgcacgctgaaccacgttaacccatgtcaacatctgggcagacaatgttgtcatccgagatggccctgtagctctgcccaggcatgatgaactgttcctagcgtcccgggagtcagcaaccagctcctgcccagcaggctgatcctgaggacggccagcctgctcgtgtgtctgcgggacagcatcagggcgaactgggtgtatgtcgctgtccaccacccgggtctcctctgctgtccgccccgggctccacaccgtggtcacacagtgaactgcccaggctgggctgccggtatcagcacataagaccatgtgtcacagtgctggcctcgagtcatcgcattccacacctcaaagcggccatcatcacttagctcataaagttgtcggtgaaagcgttcagcagcgccctgtgctccggcctgaagctgttgcccgccaggcccaggacgaaccattccccctggaactggtttccttggaagctctgcatcgggggcgggagtggcaggggggttggggtctgggcctgcaggactttcagcaaggagagccacagccacaggccacacagcagcctcatcctggcagctgtggtcccagctacttgagaggctgaggtgggaggattgctttagcccaggagtttgagcctgcagtaagctatgattgtgccactggactgccagcctgggcaagactgagatctcatctcctccactgctcttcctccgttcccggaaaactcccggcctgtcctctgctcaccctcccctctctcttcccactctccgggcaaagaccttttcccagacacggtcctgggcgctgg

SEQ ID NO: 449455 - DNA, 660 bp, Homo Sapiens
cccaggacaggggacccggggcggcaggaggtggctcagagcctggtttgagcacagggacccaggagcctggagacccctgagcgcaggctggggctgagctccctgggtagacactgggtccagctcctctagggtcaaccaaactcattcctgcgggccccgtgcctactgcccagcatgcctgcaggtgaaccatgttaccagtcacatctgggaagacaatgttgtcatccgagaggccctgagctctgcccaggcagatgaactggtccagcgtcccgggaggcagcaaccagctcctgcccacaccgtggtccacagtgaactgcccaggctgggctgccggtatcagcacataagaccatgtgtcacagtgctggcctcgagtcatcgcattccacacctcaaagcggccatcatcacttagctcaaaagttgcggtgaaagcgttcagcagcgccctgtgctccggcctgaagctgttgcccgccaggcccaggacgaaccattcccctggaactggtttccttggaagctctgcatcgggggcgggagtggcaggggggttggggtctgggcctgcagactttcagcaaggagagccacagccacaggccacacagcagcctcatcctggcagctgctggccgcaaggac

SEQ ID NO: 449456 - DNA, 660 bp, Homo Sapiens
ggcagtgcttttaaatgagatttgaggattcaccaagacccatggggaaccggggcagcagggaagccctcgcgtggtcttggatgaggggtgttaaatgtgtatcgtgctgtggaacatgggacaattccacgcacatcccaccgaatcatcacgcatcccattgactggcaagtactccccgccccctctgaaagcatgtcacatcatgtaaatttgcttctaacatctgcttcaaactgtctctggactccaaatttggatgggtcagcctctgcagaaagtttgtgttgagatgctggaagaacagcagagcctcctgcaccctcagcaagggaccagctcccaaaggaaaggtccttgtgtgacatttggagaatcttccttcatccagacaactctactcgaagcaagacgaaagcaggatgtggcagttgcagtgagaaaggaaaggaaagatgggcagactctgctttctggaaatttcttcacaaagtagagctcatgaactctgtgctgtcttctggtaacatatcatcagtgtttgtattcatggtgtggcacatggatccatggcattgggtaaatctggtggtctttacacatggtcagaatgtgttcaaatacatctcatgatggagacagtaaccaaggtaatgt

SEQ ID NO: 449457 - DNA, 1103 bp, Homo Sapiens
tgaataatatagtgttatccggggggaggtgccgaatatattccacgggcccagagaggcctcgtggatggtgggaggtgggcccccctgtgttttccccaatatgtgggggccaccaccgacccgggtttcccttggggccacgggaaagccgctggatgtcccggaggggtctggccaaggggaccagaagggggcaggagaaagccgggggtttaacaggtgcctcgtggtggcaagctcagggggagggcaggcagaaaaccatctgatgcacagaacagaacatgcccagggcccaagagtgggaaaacagcacccagaactccaccttctgactcctagtccagtgctcccttccaaagatgctaagctgcaacaagttccaaggaagctgcccagggcgaagtccaggtcaggaggttctgaccctgtgcaggagggcaggtaggaggcggctgactgagtgcacagtgtcgtccaggagtggaaagagatggtcttgtccccagaccccagagcaaggaacaccattgtaagaggagggagcagcttccactgtgacggtgggtgaccagggggctggcacaggatggccaaataagcccagcactggggggccagtgcttcaggggaacaagccagagagagaagggagttcaagggacctcatgtccacctggttcaaggtcacacgcctgccctggcctctacacaaaggagcctcctgtaggtcccagcccttccatgtttatggctaaatgtgctgtgtcttggagcagctggaaccccaggtggaccctgagagagctacctgccagcatgttccttcagctcgagtttggagtccagccctggaggctgcgcacctcctcccaaatgcaggcttgtggctctggaagctgccactggggtcaaaatggcatcttaggttctggcagattgggccaatctcagggttgaccctggggtacagatacctgagaatcagcaaaatccagctcaatcttttctcctttgttatttcttaaaataatcttgtactaaatcccaaagcaagcgaacccatgaattgattattccggacgcgtgggcggacgcgt

SEQ ID NO: 449458 - DNA, 715 bp, Homo Sapiens
taagaggggcacacccagaagggccccaggcggccgctcacaggtggcccgcgcaacgcaggtcagggccaccgacaggggccacccagagcactgagctggattcaagtgaggctcctttcagggctctccactgacttggaaagggctcacaggccagtgtttgaggtataaatatctcgcatggggcaagagtcacatcagcttgctggccttgacatgactgcaaggctggacagacacacaggagtgttacgaggtacaagctaagggactctgggctagcccagaggccagtgaggagggccaaaggggaagactccacatccagggtcccttccgtgcccagaacagtctgggaattaggaaaacaggatgcaatcagagtcaactgagcaacaggcaaaacagctgatctggatgtctttcctcctctcattttcatggttccctttatccacatgtttcctaaaccacactagaacacttccttctccggtgagaacgagagccagtgctaacccccataccacctttttgccccacagagagccccaccaaccctcatcattagcccttattcacaggtcctggaagtgggcggctcctctccagcatgagtcccacagtatctgaaggagagactgctgcttcccaaacaggctgctggagcgcctcgtgccgattcaccacccagcctcgctacctagcctag

SEQ ID NO: 449459 - DNA, 577 bp, Homo Sapiens
aacacctttttgagggaggaagaaaattatccttttctgaatctgggtaattcacttagagtaaactgacaaaatatgagtgtacccagaagagaaggacccagggagcacagtcacacacatgaagagcagcggggaggggcagggaagaaatgctgagactctcagtacgaactcggctgcatgagctcagcattctccccttttcctcctggaaccatccaaacaaaacaagaagagaaaacaaaaacctcattttcagcaaaaccgggagacaaactccaaaagagttgcaaggacttccaaagaagatccagttcacacaagagacaaggaggaggcagagaagcaaaggagggcgataccagcagcagcagttatcagagagcaccaagggagatggagggtgggagtgtacatatttcttaaagatgaaggacctatgaagggcaaaagcaccctccctcacctgcaaaaagggtgcagagacaggagtgtgtggatggcaggagaaatccccaaccccagtgggcctggttttgtggcatctgcactgtgtttgcccacagcctttact

SEQ ID NO: 449460 - DNA, 544 bp, Homo Sapiens
ataatataaacagacagtatccacatagtttatttctcacagttctcctgacaaatgaacatcattcaagaacatactgtatacacagataagaagaaacatacaaaatgttttaaatgatgcacaacaaaatccagcagtataaaagaatgcatgtgaacccttgctcactgtgcagactaaatttaatcacttgtttaaatagtaataaaaatacaatcttttatggatcttgtgcagactacaaaagagggaaattattaccatatatatgatttttatattaggcagttttctttgatgagttgtactgacaactccaaatacagaggcagaaggctgtgtattttaaaggaattaatgttgtgaattagaaactttacacagttactaccactggcacttttcaccatagtttggtacacatcacatgatcatcttatataacattacatttaaaaaatatatctgagtgacaattttataacattcacacaccatgagctggttaaggaagcaatgccacagttgcctcctgtagtgc

SEQ ID NO: 449461 - DNA, 1308 bp, Homo Sapiens
  misc_feature (22)..(22): n is a, c, g, or t
aaggccctgggcaggaatggcnagccctgaccctgaacagctgtgcaggccacacctggcttgagaaagctgaccgtgaggctgagaaggcagcggcctccccacagcctgcccaggcttatgtcatctgtgacagctctaagggcaaagggtccccaaaagaacaggttggagggaggagcccacatttggggtttctgtatgggaaaggactgtggttccaattccaaggtcaacagccacagtttcatggccaagatagattctttcgtgagtgtgtgtgcacaccacaccacacctacatgtgaaggggaaagaggatacttggggagaagacactgagcctggtatagcctagaggagcactctatttcccagtgtaaaactgccagggacccatatctgacagcctttggcaaattctccaagtaccccaaactggggatgtttccatggggatgctggtccctagttcaaggcaattcagcaaagctttatgaagcaagttctctacaaaaggcacaactgagggcccccagtggactgagagcactgctgggacagggggaggcctagcagcagaaacccacggccctggggcagggggcacccccgctgctcccgctcactgctccaagaccttgaaggacagcggggtgccactcttggcaaaaggccttcatcagactgctgggatagatgcaccccagcttctctggggttgggaagccccatatcctatagagtgacaggctcagccggtccccgatatagaagggacccacccatttggcactgctgccattcctggggagggacagcaaaaggacctggtcacccacattccactccttctcctggctctcccgcttgaaacgcctgttctcggccttttcactcgccttgtcagccaccctccagtggagctccagcagctcccccaccagctgtagcaggaagacgtccatcttgagcccttcaatgtttgcgctgctcatctcccaccacaggggctccgtgagccttgactcacccccggtcaggaccttgaacggtgtggcatcagtggaggaggccctgaaggccaggtgcagcaaaggcagggaggccgcccacttcttcccatgcaggaagatgaactccttgagggccctcttgaattcccagtaggcccctgagctcgtcaggcaggggaactggaggtcccgactcagggaggccacctgggctcccagggccagcccacagctcacaaggacgtgccgggcaaactggggccctgggctgcctccagcctcacaggaacac

SEQ ID NO: 449462 - DNA, 602 bp, Homo Sapiens
  misc_feature (19)..(19): n is a, c, g, or t
  misc_feature (35)..(35): n is a, c, g, or t
  misc_feature (49)..(49): n is a, c, g, or t
aatggaaagtgaccttaancagtagaggcaaggancactttaaagggtncctctgcctagaggaaaagcgaatgcaccaattgaaatccaacaccctgggctggagtaaatgaaccgtcagccaccatggggcttcatttcttggtgatggataaatagctgggattccttgaaagctagaagcccatggggaaattctgttctgcttaagctttgtcaacagtacagtctgccttaactgacttggaggtaaatagattcggagagtgtgagctaaaacccattaaatcaggtgaagacacaaaggcaagcacagccaatgtggtttaaggcaaagctaatgtcccttcggccttaactgacggactttcctagcagtcctcaccctctgcaacccagggctcctaggaggagctcatggcagagaaagccttctggcttctgccactgcctcctcaactacatgtatacatcagtgtatatgcatgggtatgaaatgaacattttatgtcaccattagcagaggaaagctggaactctttcaaaccccacccaaaattcactctgactactgagcagtcctgttgtttattttggaggcc

SEQ ID NO: 449463 - DNA, 679 bp, Homo Sapiens
  misc_feature (185)..(185): n is a, c, g, or t
  misc_feature (201)..(201): n is a, c, g, or t
  misc_feature (210)..(210): n is a, c, g, or t
  misc_feature (218)..(218): n is a, c, g, or t
  misc_feature (231)..(231): n is a, c, g, or t
  misc_feature (244)..(244): n is a, c, g, or t
  misc_feature (501)..(501): n is a, c, g, or t
atgagaacctgccccctgagagtccctatctgtatggcctgcaccccaacgcagagattggctttctgacggtcacctcagagaagctgttccgcactgtcctggaaatgcagccaaaagagacggactcgggggcaggcacgggagtgtcccgcgaggagaaggtgaaggccagtgctggacgnacatcctggagaaganttccggagnactttcanacatggctgagantcatggcaaaggncagcggaaaagacacccactatgtggtagtcgccctttcaagagatgtgaaagaatgaacatcctgaccaacgaaatgcgccgttcgctcaaggagctgaacctggggctgaagggagaactgaccatcacgaccgacgtggaagatctgtccacggctctcttctatgacaccgtgcctgatacgtgggtggcccgggcctacccctccatgatgggcctggcggcctggtacgcagacctgctgctccgcatcanggaactcaaggcctggacgacagactttgccctgctcaccaccgtgtggctggccggcttcttcaacccacaatcgttcctcacgtccatcatgcagtccatggccaggaagaacgagttgtccctggacaagatgtgtctggttggtgaggtgactcaagaagaccgagaggacctg

SEQ ID NO: 449464 - DNA, 558 bp, Homo Sapiens
acggtggtgctatgtttgatccttttctcgaacttcttgtaatcgtttttctaggcgatccaatttggcaagattttccttcagcagtttgctgtctggaaccagctgtaaggctctctcataataagctcttgcagacacatattttcccttgatgtgttggatgccacccatgttcatccaggcctgtgcttggtctgggtttagttgcacagccactctatagctctcaaaagctttgtcgagaaggttctgctctcttaattggtttccttttgtgaaaaaaagttcagaaatgacttttgggtcctttggtttcagctggagagccttgtctatagcatcaagtgccttgtcgtggttctcctgcttgctatagatggctgacaagaggcgatagcattcaaggcatccggtctcctctgacacaatgtgattggtcatcttttcagcttcttttgtctgacccatcacggccaaaacctgagccagtgccaagcggagctccctctgagaaggctgaagtgctgcagcttcctggtaaatctgcccacgcgt

SEQ ID NO: 449465 - DNA, 1341 bp, Homo Sapiens
  misc_feature (641)..(641): n is a, c, g, or t
  misc_feature (666)..(666): n is a, c, g, or t
ggcaaggtgttgtgtttgaatcccctgaggaaagtgctgatcaatctcaagctgacagagactcaaagaaggccaagaaagagaaactttctccctggcctgcggaccttgaaaagcagccttcccaccatcctttgcggatcaagaagcagttgttcccagatctctatagcaaagaatggaacaaggcagtgcctttctgtgagtctcaaaagagggtgactatgttgacggccccactgggattttcagtgcacttaaggtctacagatgaggagtttatttctcaaaaaaccagggaggaaattggtttagggtcccccttggtacccatgggagatgatgatggaggtccagaagccacagggaatcagagtgcctggatgggccatggttctcccctgtcccacagcagcaagggcacccctcttctagctactgaattcaggggtctagcactcaaatatcttctgactccagtgaactttttccaggcagggtattcttccaggagatttgaccagcaagtggaaaaaataccataaaccctgctgaagacaggagagtacagaatgacaacattgagcccacactgcagttttgaagatagtaactgatggctgggtgggaaaagagtttgntttttgggggcctacttttctatcntttaccagactcttatggggccaccggtggagcagcacttcccaaaacttggttcactgggggtcctcgtgcctatgggatccttcttttttataaactaagtttaagaaaatactttttttataaaaatctttggagtatgcgtgagcaaattaaaagttctttgaagtcctacagtaacttaatctgtttaaccttgtttaacccagtatttctcaaacttttgtgaacatgcaatcatcttatgtgggtacagaaagaggtaaagagtctgaatcaaaaaggaccaggttattgctgttgctgttttgtggtgtcatgagccattctccatgtccccttctccctcttctcagatcaaaatccctagggagttctatttttaaaattatgaactatggcgctgcatgcttcaatcctgaacgtcactgacttgctgtgaccatccaaataattttcctgtctctgcctctgggagggaacaggaagcgatgaagaggtcttggaacagtagtgaaaattctacctctatgtccttcatgaggatgtgcagttatcccagtatcactgggatccatgtggaacagagccaggttggggggttgggcagtctctccaagggcagtacttaagagcccagtgaaacacaagggtttgggtgtgaagggatcccag

SEQ ID NO: 449466 - DNA, 1120 bp, Homo Sapiens
  misc_feature (265)..(265): n is a, c, g, or t
ttttaaagggtcttgggaatcccaaaccccaggtcccggggggttatacccggacaggctctgggaattgccatggatggtgggatttttggccaaccggttaccattttcaaaggggacaaatccgaaggcttccttaccccagggaatttctgctgggtcagctcgtggaagtgtcagcaggaaaaggccaccccaggatgcctgtctggtttttcagtttttcatccagggtgtactttctcttggtgaagaggaaacacanctgggtccccgggcctctgcatatagcatcaggcagggtctgagggccccctgggattctcagaatagaaggctctgtcccttggacaaggccagctggtgttacttggctccacaagtgttgatgtttttcccatccacggcatcttccacgagggaaatgtggtaatcggtggacagggtgaagtgagagatacagcccacgagccctctcatatattgcctgttagtgtgcagagcaatttccttcattccacccacatacagagctccattgatgttaagctgccgcatcatgcctggggatttgcctgttctggctccatagtcatccacggttatctttcctgactggccatccctaacggccttaactcggtgccaccgaccatcgttgaaggagccattcaccatgatggatgccacaccactgcccaggttatagctgaacacgagggctccatcccgaaggcccaaggaaatgaagtcgctgttgggtctcatggggctgtctcccctccacagcaaaaggccatccttggcagttgttttaaacctcatgaacacatttgatcttgatcctgacaccctcttcaagatatctgggttgtcatacgtcaggtaactgcggccgataaactgcgggatctcaatggcttctatgatcgtattgaggcagtagttcccacactctgcccggtgccagcatgaaagagaacagggagagtcagcctttcacagtccttgtcaaatcccaattactctggttgcagatcacttgaagccagccttgtttctctcacaaagctctgcccgagagtccagaacgtcctcttaatcccgggaattccggacc

SEQ ID NO: 449467 - DNA, 1116 bp, Homo Sapiens
  misc_feature (728)..(871): n is a, c, g, or t
  misc_feature (1032)..(1034): n is a, c, g, or t
  misc_feature (1041)..(1041): n is a, c, g, or t
  misc_feature (1046)..(1049): n is a, c, g, or t
  misc_feature (1061)..(1066): n is a, c, g, or t
ccaaaaaaacccaggccggaaaagggttctaattgccttttgggggaagcttttctttccccaggaggcccattgcaagaagctttgttgcccatttgaaagaaggtccaaaatggggggttttcatggcttggttctggaagtttccagggttcaggtgtgcccttgccctggaggagggttaacccagaggccaagggcatgaagtcccctctgctccctcaggaacccatgaattgtagcccactaacttttggcatgcagagaactttggcgttcttgttggtgaagcctatggcaactagcactggggtgcttaggggtctaagacccctgggacttctcatgtgcctgatctggagctctgcccagattctatgcagctctccttgttagtctgaaggccccagggggagggactcagggtggatcacctgtgcctatgattacaaaggtccgtgacagaagtatggggccatggggctctctctcagtcactatttctttgtggtaaggatcctcccctgactccacccaatcctgggtggttggctgttgtgtcttgctgtttttgttctccatggcttctgttgcttccttgctgaatcccaacatgtcctcttggaagatccagttgaagtgtctagtgtttactggccagtctatttccttttcacgagagtggagcatactagctgcttctagtaagtcatcttggcacttgatcnnnnnnnnnnnnnnnnnnnnnnnnnnnnnnnnnnnnnnnnnnnnnnnnnnnnnnnnnnnnnnnnnnnnnnnnnnnnnnnnnnnnnnnnnnnnnnnnnnnnnnnnnnnnnnnnnnnnnnnnnnnnnnnnnnnnnnnnnnnnnnnntctagtgtctcttaattggataaatttttaaaaccaaaattattgaaggtgattctaatacacctttctcagtaactcatataaatataccggatgcattattaagattattagtgtatttaaaatgcccgagaattccggaccggtaccagcgggttttnnnggaaggnggttnnnngggggggtttgnnnnnnggccccaacgaatgcccggtgctgccggggccccagctcctctctctact

SEQ ID NO: 449468 - DNA, 1056 bp, Homo Sapiens
  misc_feature (749)..(749): n is a, c, g, or t
ggggggaattcccacccgggtttataaccccctgtctaagggggctccagtgagtaccggcccacataagggcccgccggttcccgtgtttttgcgccaatcgtggctgaagtccgccacccggtgccccgtaatttaaactcgacgtcaagaacgtttctgaaagccctttttaaattagggagcccttccccaggcgacttgctgtaacagggctggtaatgccagcctaatacccggcgtctttacatttgggtccggcaagaaggcatgcccttttgctttgaacagcatggaaacctggtaactgagtacaaattcatgccggcaattcgtcatcccaaactcttgcccagtcaaaaagggggctcacttgcattagtagcccacgaggtattcttatagaacgtattgagagtatgaagagtcgggctccaactttctctcacaagtcgacccgaggattcaagctcgtatcacacgccgtgctataccatcacatgcttttcttgttgccgttactgtcctcttagtttacgacatctcgcttcatcacagactggccccgaatgtcccttcagctgaccaaacggagttctaacggctcagaagccttcattgctcgtaagttgttcccataaggtcaccagagaatgctggcttgagggcctttgtaccaatgccagagccaaggttcagttgagaacgaccttcagccaaattcgtgcataatccgttgtctgaatgangttacgatccactggcgtgattctaacgaagcttatagtagagctccacgctcatctctcagtttctccagctggacccgcattccatacagcacagacacagaatactgagtcgacactcgaaatcattccgtgtcactgacctcgtcctctctcgaagcatgagcgtagtccggccccttggtgcaggttgcatcgctacttttctcgcatcgccgccggccaccgcctcttcagtgccaagatccaagcgaggaaacgcaggaggctgcgcagaccgactcggcggccgcggccaccccccgct

SEQ ID NO: 449469 - DNA, 935 bp, Homo Sapiens
  misc_feature (245)..(447): n is a, c, g, or t
agatgatcggtccgtccctctgattagggggatcctattttgtgtatcgcataaacaaggtagtggggaacagcgatataggctgggggccccccccgaatgtctatcttgctgaggagagtaaccgagcattttattttttgggtaatcctaagagtggaggtcttagttcggttcaccccggggtgatagttccagtgggggcaaattggtgagttcagttgcaacctttggcttcccagaannnnnnnnnnnnnnnnnnnnnnnnnnnnnnnnnnnnnnnnnnnnnnnnnnnnnnnnnnnnnnnnnnnnnnnnnnnnnnnnnnnnnnnnnnnnnnnnnnnnnnnnnnnnnnnnnnnnnnnnnnnnnnnnnnnnnnnnnnnnnnnnnnnnnnnnnnnnnnnnnnnnnnnnnnnnnnnnnnnnnnnnnnnnnnnnnnnnnnnnnnntttcattcctcttctaacttaaacagaaaatagtctttcattcctcttctaacttaaattccttctcttagcaggaatgctatgttttcctatgtgcacaggtcactggtagacatgcaaaaaagtaccttgcccaattttaaattgagcttattttattatatctgcatatatatgccggtttcagtgatattaaagtgtcaagggtgcataggaggctgcagatgtcagcggcatgaatgggcaaggcaatttctgtggttgcaggctggaggttccagcaggaatagaaaggcaatctctgtgctagatggcccagggtcactgcaagtctagctcctaaatgaaaatcagggacaagatgtggcctgtaaccacagtcactgctcttcgtaaggctggtggaaaggtgaactggaaaggtttttagggttagggagatacaggaactcccaaacatcaggcacctgatagcactctccacctaa

SEQ ID NO: 449470 - DNA, 1061 bp, Homo Sapiens
  misc_feature (951)..(951): n is a, c, g, or t
atggacacttcggggcctctacggttggtttgttcagggagagaaaacggctttcccagctctactcacctcacttcaccctcagagagtcggggcggagtgagggtgaggagcctggtccagggtccccacctcggaagcatttagagatgtaaactttgatcctttgatcatttaacctgctcagcacagcaggaagtgggaacttggtccctaccccagtccccagggcctttggagggaagggttggacagtttggaggccagcagaccccttggggacagcttaatgtatctgaagattcctgagtgggaatgttgctggagggcaagctgcttctcttttttaaaaattcattttctctagcagctgttttggcccctttggtgtccctgagctccccatggcactgtttcctgccgtgactttctcctcctggacactggagcccaggtggtgcccgcgcacctctcacacactgggggatagggtcaaggcctcatccaagtctgttaacagcttcccactcaaccagtctccccaaaatacactgtgagttcaatgattctgcttataaaggagtgctatgaaactgacctattttcctaattggttaactgacttcatctcacataaccttgagtaaccaaagccttcatcagagcggacgatccaacccaacatgctgtttcccatcctcaaaaggcacggggaccaatggccacccaactccttcccaaccctcccctccagggacgagagatggccccctctttccctttccccactctgcaagcactcccccaccaacgggtgcatcacagcccctcactgggaccagggggcctccctctccggtggaaccagtgtcacatgcctgtgcatctctgtgattctcagagggtctgaggtccgagcaccctgctgtggcctgtgggaagacgctacanagtcccactggatctaaaccagaggcctgttctggcgagcagggaaactgtgtccctggccagagatcgtgggtccctgggcacacagggaccccctccaccaccactga

SEQ ID NO: 449471 - DNA, 503 bp, Homo Sapiens
gagacttcaaagacattttacttaggaaaagttcagtaatagagaaataattctgcagatagaaaatgtaaacagttaacatacacttgtcaggagcagcaccattcttaacactactcgacatccacattgcgtgttatgttgaaaatcaggtataaagaaatgaaagaccttagactaaataagccaccattatatgcctgctctgctcaatgtgaagaaacagtccttagcaaaagtgatatcctatatatggctgtgtgctactattttcagatgagacggtatattgctcaatttgatacatcacctacacaaatctaggtagggtttggaacctcccaatagctcgtataaatgattatgctacaagtagaatcaaatgacacaccagaacaactggtgctcaagctgacagacactcccaagtgaataggatacaggaaaggtccaaggacccgaagctgcaggaaagggaaagaccagactctagaacattgctg

SEQ ID NO: 449472 - DNA, 512 bp, Homo Sapiens
atctgggcaagcaaagagagttcaaagataaaagagggggacgcagtagtgcacaagggaaacattaaagcaaatattttcttttccacagaatcttttagaattcttgagggttacagttccagatatcattgctttaagtgtataaagtgtatttttaaaaagtgaaacccatacccatttaaaaattgaaaaatatgtaatcaagttgtatcagaacaaaaatgtgctttttgtgtaaaaagctaattaaatggagtcatcctatttagtgatttaaaaggatttgattaaaataatatccacttcaactactctcaaagggctgaggagagaggtttggtttccgtgcatcctggatggcctttgtctggtgtgattaaaggtatttcagtgcctgccatgagagaggcccctgccatttctgcagtttcagtgagaccgagaattcctgcagtgtcattccaactgtttgcagggtttagacagctgcgttcaagccacaaatatgg

SEQ ID NO: 449473 - DNA, 470 bp, Homo Sapiens
tacattgcatggcaatacaattgccatgcagatacatgcaatacaattgcatagcagatacaatacatgatcaatataaagtaatgtggcagaatggagacccaatatatcagttgtatcagtaaatatgagaggactcataaaaagaaaacatttttaatttgactcatcctcatcagccttcttggctagaactccccattctctcttgaacccatccagtcaggctccagttctcaccacccccacagaaacaactcttatcaagataaccaatggctttcaaagtttctattgctctcttcccagtccttatttttccaagtctcgcagcagcagttgacaaaggtgatcctgttctccccatcaaaaactgtttctttactaatttctgggatagcacctctcctggtacagggggaaggaaggaagacttccttcccagagacttctcagagttttttactgga

SEQ ID NO: 449474 - DNA, 480 bp, Homo Sapiens
  misc_feature (42)..(63): n is a, c, g, or t
  misc_feature (69)..(69): n is a, c, g, or t
cgctactgcactcctgggcgacagagcgagaccctgtctccnnnnnnnnnnnnnnnnnnnnnngagganagttgtatccaattcagaaacgcggtccttcgggacctgctagttttataccccggaggatcctccccggcgggctggcacgggaggtggagaaagaggcttgggcggccccgctgtagccgcgtgtgggaggacgcacgggcctgcttcaaagctttgggataacagcgcctccgggggataatgaatgcggagcctccgttttcagtcgacttcagatgtgtctccacttttttccgctgtagccgcaaggcaaggaaacatttctcttcccgtactgaggaggctgaggagtgcactgggtgttcttttctcctctaacccagaactgcgagacagaggctgagtccctgtaaagaacagctccagaaaagccaggagagcgcaggagggcatccgggaggccaggag

SEQ ID NO: 449475 - DNA, 1144 bp, Homo Sapiens
ggggaccatatttttttcgtaaaactcccaaggtagtttgggaaaaccacttgcctaattggttcattccttctgggcacagcctttcaggagcatttatcccacctgtactgaaaaatctgttttcccaggtggtggtgggcccactggatagaagggatcacagagaaatgaggagtgagcgagctttgtaaactacttctaattctcttcattagtatgctatgatccaccccagcttctgcaaggtcagacatgcaagacaagtacttggccaaaacagcaggattctaactagtgtaaaaatagattttaaataaaatagaatctctataggaaagagaattaggttatgctttacattcccactcttaagatatctgtatatataagtccaagagagactcaaagagttggtctgccctaagtaaaaattaagaatgtctgagtacattcattttgcaacatacacgtaaagtttttttgggaaatgctgcagcacatcccacaaaaacagatggtgattagtgatacagttgatgtgctaacaagtaacatgtaagacatttaggtcaaaggggatgaggcctaattacaggctaaaaacctattctgaaatgtgatcatttgaaaacctgtggctaattataaagcaaaaactaaaacctgttgtttaacaatacatcttactaacctatccctctacctcttcaagaaactaaattccaacacaggtcttattttaagtttgctcaattactgcaggttataaattatttgacatttatggttccagagagagtacacagcccctctgttggcccacacaagcgttatatgactgttctaaagggggctctgttgaaattctaattttaggatttagaaacagcttttggttatatcttgaaagcgtaattgaaaatctgcccaagctccctctagctgcaacctgaacatgcagcccaatattttgtaaacatttagaaaatactaaacccaacaaaatacacaattagctagtcagaggcctcactctacattttcacacggatgagaaatctccccactcagtcttgctagatgctaggatacccactctgagatttgagtttgggaacagccattaagcctcctccttaat

SEQ ID NO: 449476 - DNA, 647 bp, Homo Sapiens
ctctctccacactggaacaaatcatcatggtgaggtctgacctggggccctaactgcctgtgggggaccagggccactgttgtgcagtgacaagatgctgctgcaccagattgaggggctggggacaggctggggccgaggcggcaccaggagctcccatggagaaagagccctctgaatgtacaacctggggcgttccgtagccaatctgttcccggctcccaggaaccccaggagctggcctcctgtcgcttctggttttatccgtgggtgagagcaaggaaaggaagagagaccaggaaaggaagagagaccaggagggccaggccagcagcttcccgagcagcggaggtaggcggagagcgcggttgggcagcgcgcgccccttcccgtgtgattgggtgaaccgtctcacctgcctctcactttactcggtcaccaggaaaatcctacccccacctatctgagagggataggccaagggtgaaatggataacggatagaaaacacttaaaaaagtataaagcgctattgaaacgcgaggcagtgttgtcatcatgaaggtgttacccttagcacatccctcggccttcgctttttttcagggcgtctcctaaccttgggacctgatttcctgatctcagaag

SEQ ID NO: 449477 - DNA, 159 bp, Homo Sapiens
ccaaaaacaaagaaggcaattttatttaatcacatatttaacgttcagataaagttcattgaactccaaaaataaaagagaaacaaaagggtaatcctctccaacaaaagtaagattatacaaagggatcaccaaaagaaggaaacataatttaaaggg

SEQ ID NO: 449478 - DNA, 247 bp, Homo Sapiens
ggggttctactaagttttaatttaaactgctttaggtacaatagaaaagaaacctgaaaacacatgctgttttagtaacaaataccaggttgccagattcgttggcatacctttgcaaactagaaactagaaacaggagaaaccctttacaggagtaggctacagatatgaaagctttgagggcatgagtaatggcattcaggagaagtgttttttcacattggtacatttttagagtttgtcattt

SEQ ID NO: 449479 - DNA, 1241 bp, Homo Sapiens
  misc_feature (764)..(774): n is a, c, g, or t
  misc_feature (1209)..(1209): n is a, c, g, or t
tttgtgggagtctcgcatctcatagttactataagccccgcgcaccctaaaaggcatagggcggggcggcaagcaattctctacccgggggtttgatctgccccacccccgattttcccttttgaattggcgcccgcttcaacactcgcgggacttcggtggggggtttgtaaatggcggggcgtccccgttatagggcggggcattcgggcccagatttatatggccagtttggttccagagaaatagccctggggtccgcgcgcaaaccgctcttttggccgacaagttggccaggtttgcttttcgcattgtgttccctcactcccccagaatatttgataacccccggagccctttccttctcggcggtctgggaatttcgtcttccgtggcgttagtcggaggtcccttcccctattaagggggcaagggtcaaaagcaccgtccgccattgttgccgaaaaagtccccttaggttcgcagaggggcttcattttgccttcccaaaccagggtatccctgcaccgttactttcgccatgccgaaccttgtttcatgtatctgggtcctttgctccggtaggtccttctgcccagcaacttctggtcaaatgcctccatggtactcagtaattagccacagatctactctggcactctgcattcattccacagcccagggaagccatcaattccaggtgtgaagacttcccccccctcccaggcatttgtcattcatttctttctccgtacatttcttcnnnnnnnnnnngttgtccacattccttttaaagcatttatcacacaccagtttgcttgagttcaagtttatcctagttctctggggatagtttgaacacttattcatctttatgtcacctatacccagcatagcactggacttcagaacagtggaaagaatatagcctggctgtctaattgaggagctttggttgagcatctcaatccaagtctcaaactcggatatgctttaactctgagttggcccgcatgctctgagttaaaatttgaactgattcaatttttttaaatgggaaaatccacataaagtgtggatttctgacaactcttgcccaaaattctggcaacactagatctttattttcatatggcagccatcagctggaggtgattagatggcatctaccctcgttctttgaatcgccacccaggctcgtcttggggntttacggcttttaaaccaccggcggtatgctg

SEQ ID NO: 449480 - DNA, 936 bp, Homo Sapiens
  misc_feature (616)..(639): n is a, c, g, or t
  misc_feature (653)..(701): n is a, c, g, or t
  misc_feature (734)..(734): n is a, c, g, or t
  misc_feature (851)..(861): n is a, c, g, or t
gggatgaatgagaagggggagctgtatggatcagtaagtactggagggatttcatccagctttatctccatgtttgatttgaacagctgtcttttctctggattaaaaagggccagaaatgcaactgagtctgtttggaaggaaaaactaacccaagagtgtgtattcagagaacagttcgaagaaaactggtataatacgtactcgtcaaacctatataagcacgtggacactggaaggcgatactatgttgcattaaataaagatgggaccccgagagaagggactaggactaaacggcaccagaaattcacacattttttacctagaccagtggaccccgacaaagtacctgaactgtataaggatattctaagccaaagttgacaaagacaatttcttcacttgagcccttaaaaaagtaaccactataaaggtttcacgcggtgggttcttattgattcgctgtgtcatcacatcagctccactgttgccaaactttgtcgcatgcataatgtatgatggaggcttggatgggaatatgctgattttgttttgcccttaaaggcttctcctcctggagggctgcctagggccccttgcttgatttttcttnnnnnnnnnnnnnnnnnnnnnnnncttagccctaggannnnnnnnnnnnnnnnnnnnnnnnnnnnnnnnnnnnnnnnnnnnnnnnnccgggaaatgtgggcggagcgagagcaaaaggnctgcggcctgatgcctggtggaaaaagacccgcttttcctttttggtccgttgggcttcctcctatatcagccccgcggccctacttcgccttttcaggattttgggtgggggcctnnnnnnnnnnnccgtttttcttaaaagcctttccgttaattttcccggggttcctccccggggacttaaagcaaagccctttttgt

SEQ ID NO: 449481 - DNA, 921 bp, Homo Sapiens
  misc_feature (798)..(798): n is a, c, g, or t
ttaaaattaaattttattattttgctctaacaaagtaacctcctactttttcaaggctcagaggtggtcaacaatttgcccaactcacatggcagatagtggcggagtcaaacagggcactcaggtagggctattccagcccagagccgtttgcttggcctgcagtaccgcctttggccataagagccactcatggctggtcctggaggaggcaggacatccccaaagatgcttattgacgccagcatggacgtggctggcgggaaagactggcacatgatctcaggggaccgttgcttcccaggaccgtcttttggcttccaagaaaagatcccgctccagggcatccgccgcagacagcctgctttgccttgctccttcttcgtgcaagggcgtagaagctgccacccatgaagagggcagctgagatgaggaagaagctggacatgtagaaaacatagctaaaagttgttggtggcgtcccaggagcaacccggcccagttggtggggagatgaggaaaagcaaggccgtcccaggacagtgaagaagtcccagggctcttgggaactgatccatgggggacgatgtccatgagaaccttgaagatgagggcgccgatgccactcatggacacgctgtacgcccagcagtagcccacgagcaccccagaagtcacctgatgccgcacacaccaggttagtgagcccattgagcaggagtgccaggctgaacaggtacttgcggtggctagcaaaggccggccgtcctgccatcagcccggctaggggcctcaggnagatgttgctgaagccgatgatggagatgaggagggctgcctgctgctcgtccacgctgtccacatggcatatggcaccaggaagacttgtggcagtgggaagcctaggacggaccacatcac

SEQ ID NO: 449482 - DNA, 455 bp, Homo Sapiens
  misc_feature (397)..(397): n is a, c, g, or t
  misc_feature (425)..(425): n is a, c, g, or t
  misc_feature (440)..(440): n is a, c, g, or t
gaaatagttacacatgaagttttaatgagctatttcatattaagatacatattgagaattcaaaccagagagaccagttaattgatattttcccaactctgttttagggtgatcatagaaatgatacccacaagttagtcacagtggcctgcatccattttgatatatcagtgacgtattctgattggccagtaatcacccatactgactgttaaatatttttgttatcactcctatgcatggtgaatttgagttctggttttctttagccttgtgttatttatgtgtaaagttgggatcatgggaagggcaaaggaatctctcgtgtgtcattcacgctcaagtaaatgggcagtggggataggggatgtaaatggaaactgcatgataaggcctncaagtccattctggatgtatcgattttnccttactggggtttnaattggaggcatgtc

SEQ ID NO: 449483 - DNA, 1843 bp, Homo Sapiens
  misc_feature (43)..(43): n is a, c, g, or t
  misc_feature (82)..(82): n is a, c, g, or t
  misc_feature (289)..(289): n is a, c, g, or t
  misc_feature (319)..(319): n is a, c, g, or t
  misc_feature (360)..(360): n is a, c, g, or t
  misc_feature (371)..(371): n is a, c, g, or t
  misc_feature (390)..(390): n is a, c, g, or t
  misc_feature (397)..(397): n is a, c, g, or t
  misc_feature (481)..(481): n is a, c, g, or t
  misc_feature (505)..(514): n is a, c, g, or t
  misc_feature (702)..(702): n is a, c, g, or t
  misc_feature (779)..(788): n is a, c, g, or t
  misc_feature (967)..(1121): n is a, c, g, or t
  misc_feature (1674)..(1674): n is a, c, g, or t
  misc_feature (1745)..(1745): n is a, c, g, or t
  misc_feature (1758)..(1759): n is a, c, g, or t
  misc_feature (1779)..(1779): n is a, c, g, or t
acagtgagtgatgtgtatatgcctctagatgtgttgtgttgtntatactctgaatgatcaaagagaagttcatatcatattnttgtctcgctcgggttgagactacagtgtatactatatatccttgttgtgtcgcgggctcgttgtgctgtaaagaaaattactttcagtgcggcccgagcgccgccagaccgcggggcgggcgccggccagtaggcggctctatcgccttagtcccacgatagttatagccccccgcgcatcacgtatcgactctcattgttggatncagtttcgtgttatgcaggcgacattcganttttttccatcatgtgcgtctcccagtgacgtacatagtantttcacagagncctcacagcttacacccgngccccgntgcctctggacatgtgtgcacccagtttaatgtgcctgcagtggctattctgtaaacgatccgtatgtttgtcttgatttctcnaattgatcatcgccccgcgctgannnnnnnnnncgccccgcggggagttattcctcccctctttaaattaagaggtagagtgtggtggcaaggtcgtataacctcactccaccccatacccctcctccgacaccacgcgtagcgaggtccagtgtgtgtgtgtctctatccttcattactactttgttctcgtcccttcgcagcgagtctccacacccctntgtcccctcgaccttcacttccccatccctcgccacgttcttgttatatagtagaacaatcagggcgtccctccggnnnnnnnnnntctttttctttttatgttctggctggcgcagaccaaccccaggcgtgttcccccggcccctttctttcgtcaaagaatactgaacttaatcccctttctctacgagggcaggcgcgccggcggggctagtatgcggtgagttcaaattatgtgcgcggggtcgggggccgaaaaaaagnnnnnnnnnnnnnnnnnnnnnnnnnnnnnnnnnnnnnnnnnnnnnnnnnnnnnnnnnnnnnnnnnnnnnnnnnnnnnnnnnnnnnnnnnnnnnnnnnnnnnnnnnnnnnnnnnnnnnnnnnnnnnnnnnnnnnnnnnnnnnnnnnnnnnnnnnnncaaggtttctgtaaacttttattttacacttatgggccactgccaactcagggccttggcttctggctcatttctacaaagttacttgttgaaaagatgtagtaaaggtagaaattggaaatattcctgctagtaaaccacagttacttcccagtccattaattaaatggccgttgacgccttcagaaatctatgactttctgaatttataaaatgcatttttttcatatgaaagaaaccaagccttttggaaaaaaggacaattgtctaaacaaaatggtgtgaacctatggcttatattataggcatatatcactgcatatgatgcgccagtggaatattagatttgactggtaacacacaaaagggcagtacttcttagccttgcaattcaagcaactggaacctgatgttattttacctgtcctaaaatatggcccaacaaattatcttacctaatttattatcagcaatctgtctggcgaagtctgaaagaaatatcagacaacctggcaatttcatcaccacattgaattgaggataagaacaatantatactttcaaagtgtaatgacttttgctccagcacaggaaacaatatgacccccaatacctgcttatcanaccaaccaaccannacaaaccctattttgtagtncacagctcatctgctttcacgctgcctctaaatccccatttggatgtaacatgattaccagatt

SEQ ID NO: 449484 - DNA, 815 bp, Homo Sapiens
  misc_feature (486)..(486): n is a, c, g, or t
ttttttttgggatacacattcgcttttaataaaaaagaaatttcctcctacaattgatcctgcacacgggggggccatgagccacgcctgctgactcattcctccaattctcaaacacaagcaacgattcaggtcctggtgagaaccattcacgactcctccgggacctgttccaccctccccgtcatgcacagatgatcttagtaaccagagtaagagtctgcctgagacacgagtcttttttcctggctccaagggctagtgccaaagttcctccctccaccggggagggaggcgagacttgagtccctgagtgggtgtctgggtgttcacgtgtcctgctgagcagcgcggggcggctgcctccaggtcaccacacctggcacacccggatcacctccctcagcgccttcagcccctccatgcttttgtccttcacggccacggcgaggaggactgctctgtttccagcttcttgagacacanacgctaccaggttctttgcaaagacattgattagaggctcattctgccccagtaaggacttttgttggtgagcacaggcttgctgacgtcactggctacgctgctgggctccagggagaccagggtgcctatcttcccaaactgggtcaccaccaccaggatgtgactgctgaaggccgtacacaccacctgggtggggaccccgcacaccacctccgtcttctgcttcgatatcaccaacggcgtgtcttccatgcggggctctgcagtgccctcgtgccgaattcaccaccccggcctcgtacctagcctaagttgccctgtccctc

SEQ ID NO: 449485 - DNA, 740 bp, Homo Sapiens
ttttggtttctaaaccaaacaggggtccaatattaagggaacaatatttaaattatccaattgggaaatttggaaaattaaaaattttacaggggatgaggaaaaaggtcaggaaaaaggggataggaaatagtaataccggtataatccagaatatcttattatcttaccagttttaatgaccagggtttttcctttattggttgaaatacaaagaaggcataggggatcccaggaaaataacactatatatcagaaaattcaacgtgctccaccatcaggatttccatcacacacatttaatttcttctgtacaatgtttataaacttgtttttcttttcaaaatcatcagattttcagattaaattcagcactacacagtatgcccttgaagtaaaatgaggttacctgctttatttggataccaagttcccttcagacagcattaaaataaagacaagtaagactacacagataaaatccagtataattcaaatccaacaatgaaaaatttcccccatattgttgcaaaattctttctactgaaatgctttgctacaataataaaaagcatacattacatataaaagataccagtgtcctaaaaagtgacagaagtggactagcaaatccttcaaagcacattatataaatgactagcatttaaaaacattttttcctataaaatgtaggtcatatacatttataaattggcggttttatttctaaagcagtgatg

SEQ ID NO: 449486 - DNA, 746 bp, Homo Sapiens
  misc_feature (512)..(550): n is a, c, g, or t
ttttttggagctaattcacatgtgaagctttattaaatctggttatatgtgggacttcaacagctcaatttttccacaatttccacttttcaaatcccatgccaaactgtcactttttcccttaaaaagtggataaacccatcttttgaaagacaggtcttctcagtttttctgttcatcctcctactgtaagtactggctgatattcacacacatgtactacagaattaaaatactgacaagcaagtagtttcttggcgtgcacgaattgcatccagaacccaaaaattaagaaattcaaaaagacattttgtgggcacctgctagcacagaagcgcagaagcaaagcccaggcagaaccatgctaaccttacagctcagcctgcacagaagcgcagaagcaaagcccaggcagaaccatgctaaccttacagcttagcctctgtcctttaaaaaaagagagagacagacagacacatggggtctcgctgttgaccaggcgggactcaaannnnnnnnnnnnnnnnnnnnnnnnnnnnnnnnnnnnnnnccacaggtgcactctactgcacctggctgccatgttttttattattaaagtacattatgggtaatcacaggtttaatgtttgccgtttccattattcaaggtatgacatgcaataatttataattttactgaggcacaaatttgaatcatgcaggcaaagctggtgtgcagcagcttagtgaggaagtcatgcatc

SEQ ID NO: 449487 - DNA, 441 bp, Homo Sapiens
gagatgacaatagtgtatttatgctgtaccttttctatgtttagatgtgtgtagatgcacaaatacttgccgtggtgttaagattgcctgcagtattcacaccataacatgcactgcaggcttgtagcctaggagcagtcgactctagcgtccatcctgggtgtgtattgggctgtaccatctgggttggtgtaagtgcacgctacaatgttcctatggtcataaaaatcacctaccgacacatttctaacgacacgtccctgtcgttaagcaatgcatgactgtactaacctctcctgcagttgctcagatggggcgagcctcctgtttgtgctagggccctggctgctaggctggaagcctcatacgtctcagtgcatcttcccctcccaggtcatggtgatgcccaaatacgtttggctggagcaccctgaagtctct

SEQ ID NO: 449488 - DNA, 1196 bp, Homo Sapiens
  misc_feature (64)..(72): n is a, c, g, or t
tcaacgacatggcgtacagaaccttgtatgaaacacagacaaacagaaatctagtaagttaacnnnnnnnnnaattaaaataatgccagatacaaagttaactattttctgatgagtaacgcaggatggagtctttgcaataaacagctggaccacaagtcgtggtgacgtgatgctgctcaatttcactgaggcttacacgcctggcattttaacttccactgtttgaaagtattacacctttcttttttcgcactccctcacagttctaaaaagctctgaactcatttcattcttcttttcttcccttgtcttttctctcttcaaagatatttcatgatgattctgcttttcagaactttagctgagagtaatgaaatatcaatcttttgcacaatggcaactacatcccttttctgctctcttgggatagtcagaatagcaactgcccagcgtgaacaataggacttcttctcagttctgagagattggctgttgctgaacagcagtgcatagaaataagtccttggcaatcccatgggtgacattgtctctttccttatcacccagtgctgcacacagccggaacttgataagacacccagaaagaagataatggctgctatcaagctgtctatggtagaaactacataataataatctgtttatggaagagcagctgtcctattgttttgcaatttcatgaaatctcagagtcagaacccatctcttccatgccatccccataccccattcctcatagccaatcacaatccacctttagggcgttgtaagtgactcgaggacattattagtgcccccagaatctataagataacagatagaccagaagtactaccgtgttaaaatcttgcccataaatcatatcaccgttcaccaggaatggctgcgtaagagaagaaagcttgcaggaaagaagggcagttggtatttgggcagcactttgtgaaaatcctgtcgcgaggaacgttgatacatgaagcatatcggtcaagaccccgggtctatcccattagattaaagatatttgtcccacaaaaaccgggagatttcgtgccaaatgaaaataggtacaagagatactcaagtccaggtctgtggaaagggcttatgtccccccagggaattaagggacaggtgaaggctatcagtcgctgaaatgtgagcccaaagaa

SEQ ID NO: 449489 - DNA, 948 bp, Homo Sapiens
ggggattcctggtattgtcacctaagtgctcattttcaggaaaatcagattctacaataaacacttactgcttaaagttcagtaaacttgtgataacctcataacctctgtagtctaaaagttaaggaattataagatgtcacatgtcaagttaacatccagttctacttcttaaccttttttccctttgtaaacagcactttaattagacatgatttaattagataacaattattccatggctggatatgtactggattttcacttacagtacattgatttggtgttgatacacatttgaaaagagtgaggaatacaatacatttttaatacaataggtttacaaattttcctactggtgtgaatatggagtcaaataaaaatccagtttacatctctgcagagagaaaaattgttatccatatgtcttttatattatacatctttactagagataacttattgttaattttgtcaagttatgtgtaagtcccatttatttttaaatactaagcaaaaagttccaagtttgccttaaaatacaagtgaagttaaagaactggatgataatgcctatatttttgccttatgaattgtgctgtgtattataaaccagcaacggttttgattttaacaggattctgaaattttgtagctgtagagtactaatatttgtactctcttgcaaagaatgtgatctagtttgtggattatgttagtttaaaatgttttttgtataatgtattttaccctctgaacatgtacctttttagcatcagggttttattttatttatgtttacacactaaagtgtcatttaactagttaagaattgtattcttttttattttaaaggttatttgtgtgtatcattgtggtaatgttctgtaattattatggttaaatttcatttaatgtaaaatgtttaaaataaaaatgaaaaatcta

SEQ ID NO: 449490 - DNA, 306 bp, Homo Sapiens
  misc_feature (23)..(23): n is a, c, g, or t
  misc_feature (33)..(33): n is a, c, g, or t
  misc_feature (40)..(40): n is a, c, g, or t
  misc_feature (48)..(48): n is a, c, g, or t
aaggggggtttttccgaaacctnttttttaagnaaggggnttttcccnccaaatggcattcccaaggataaggctgttggtgcttaaactcatttcttttctttggtattgggttatgtatgtgtgtgcatttttttaacttgagagctgactgttgcttaagaagttttcttatggcaaaaataatgtaaataagttactatgatctgcattttgccagaaactcatttataattaaggctatcatttattaatgatttttttctcctttatgatattacattaaagttgataactgttattggt

SEQ ID NO: 449491 - DNA, 563 bp, Homo Sapiens
aaaagtgtaatttcctttttatttgcatctgtttatgactgaaaaaatgactagttattatgaagacactactgttgaagatggatattttaacatggagtttcaacaaaattacttcttgagacagagctgatgtgttttttaaataacgtgattttaagcatatatttgaacaaaactaaaacatttagtattatgaatatgaaaaaagatcagtaaatcaatgtactcttctaggctgaattaaggtagactatttaaggtttcaaaaaagtttggctggggcagaataagttttacaaaacccatgccatccaaaattaagatgacatgtagcagcaagaagtattccaatgtctcataaccagttctcgcaagcaatgtgtattccttactttaaggaagtgtcaaacaaatagaaaaatctggaagaatttactaagtgtaataaattagaggtaaatcgtaataaaagaatttatgtctcacaaaaatattcacaagtgggagttttcttctaccaacttctcagagtccttctagccccctcttcacttctgacc

SEQ ID NO: 449492 - DNA, 558 bp, Homo Sapiens
aaacagtaaagagcacctgttatttttcacctttcgtgtacaatacatctagattgcattcagtatattttaaactgcattcttcacaatgtgaatcaaatgttctacacagagatagatgcaatatgctttctataaactcagtcttgaatgactttctgtaactcaattaacaataaatgcctagtagtagctgacagattatcttaatatgatcccataccttctaacaggcagtctgtatgctgatgtataattttaaactgttttccctggcaccttattcatgccaaggattaatgtaactctaaaagccatatctacctttacataatgtcttaattttccagtcttctacatttcatgactgggaatgtctttgggaatgtgccctcttcgaactctcaggtcttacatgtaaactgaattcacacatacctcatgatgtaattcatgggtgctatcttgtctcaagaagacacacgtcagatgcagtaaggagaaaaggcctttagtttggtcaaaatcctcccagtcttaatctagttgctgctactt

SEQ ID NO: 449493 - DNA, 1028 bp, Homo Sapiens
  misc_feature (142)..(142): n is a, c, g, or t
  misc_feature (946)..(946): n is a, c, g, or t
  misc_feature (1012)..(1012): n is a, c, g, or t
caggcccacactttaattaatgggagaattgaggctactaaacacatactttcaaggtatgaaaggaaatttgaaccactgttaagaattattctggagaataaaaggatctgaaggtggcatcaagagaatcacccatctnccatatatgggagctactctagaaagaaatgcaaaaggtatatttcagtaatcttttcccaacttctctgttcccctgacaatactgagatcaacagaagcattggaaggtttcttttagataatagtgagagatacaggcagattgctagccaaatacagctctgggttactgtgataacacaggttccttcgaatgtatttattttcccaaattaaaaataagcagggatggaagtagttattatgcatttttcaaattctcctttcaacagtctatataaatgttgcagaatgctagactaggatgaaaagtaggagtcatgagaactgcagaagcctgagatcctaaaggaagtccgtaccatctgacttggcaatgtaagacacacacgttagtgtggggcacaaacgtggaatattaggagagagctggttccagcaccaaatccagagtcactcggggaaggaggtatggtggcaacactttatgcttaatattcaattctgctccagtagaacatggtacccaggagaacccaaaaagtccagcagagaatggcaaatccaaaccaggcaaccccccaggcgtgtcggttcattggaccagagatcagttcatagcagccctgattgtgataaaaaccaggcacgcctagtttacaagcctccaggttgagaggttctttaagattgttcataacacagcattgacgaggccagggatagtcagcatcattattctcagtccggaaggcagatgtgtatttttgccagtctgatggaccatttacgccacagcaanttgtcctggagcatgagccctgtccagggtttggtgacttcattgttttccactggtcatcattgnttggtagggctgtgtt

SEQ ID NO: 449494 - DNA, 202 bp, Homo Sapiens
gggaagagtgattaagaaactttattacagaaaatgaatgcatccaacgtccccaaatacatttgtgacaagaacagacacacacaggagacacagacaatagtcactacatcacagccttgttctttccgaaggataaaatgtcattcaagaatggggtgaggtggttagagggagtaggtactatccttttaaatggggg

SEQ ID NO: 449495 - DNA, 692 bp, Homo Sapiens
taagacaaacataacctttattctctctcaaaaacccagagaacagggcctggaaccatattcgttaatttaaccagaatcagaatactttaactttcatagtctcatttaaaattttatagcaatatactgaccattctaaaaataacaaaatacatgttgctctcaactacatagttaaaaaaggtagtaaattctcttacccaaaatagaggaggggtgggctagtgagctgctcaaacatttgtaacaaataaaaatgtatctatatacatataatgatcatgttttcatagcctaaaatcaccatacaaaatctaataataaaattgtgtcgtgttcaggagttgggaagccaacacattaaattaacaaagtatttttggtatatgtaaataatgggatagaatctctcgaatcaggattgtcccagaagttctaaggcagatgtcaatgacatgcacattgtccatgttcagtaattttcaaagactagaataaactatgtaaactattcaatacaattcaatattacttaactgctaaaaagtacttcaagatcttgcactgccttgagtgagtataatcaaattagtaattggaaaatagctgtaatagcaggcactgaagaattctgacaaataccaaataactgtttgtttttaccaaataaactggtaagatgatatccc

SEQ ID NO: 449496 - DNA, 691 bp, Homo Sapiens
tctgaagttcatcaacatcttaagatgcacttacttgaaagtttgagattctgtttatcatttgaaaacacattttgctttaattctttctttgacatgttgttttttcatatcaagaaatatatgaacaaaataataaccttttgaccctgaccttgctgggtgaattagctctgaaacactctctacaaccagtaatgcatttgtcccacatttcattctgatagaaaatgaacaccatagcaccaaacaaaaatccgaggcgttagataatgtctgggattaaataatttaagactctctagggttttgggttgtcattttttatttataacaggactttaaggtcactttctgttgcctcatagggtcacattttagacaggtttgtgtctgttccttgcatctgaattcctgattgtaaagacacctatgagggtctcttagttttggtcattcattttctgggtttatcacccctcccttctttttgttgtttttccctgactgttaagcagtttcatctttgcttttgttaaatatttgacagcagttagtttgtgttaagctcttgaaacttgtgattgtactttctgtgtagatatacatgtaattattttttatttttcaatcatagattcaagcttccttcttttttaccacaaatcattaaagttatttgtgtttccat

SEQ ID NO: 449497 - DNA, 704 bp, Homo Sapiens
  misc_feature (654)..(654): n is a, c, g, or t
  misc_feature (661)..(661): n is a, c, g, or t
tttttgagtgtctacaaatttttattttgtttcataccaatttaaaaataaatacatattttattgatactaatacatattattagtttaataaatattctagttttacatattggttcacaaaagaattatataaacttcttaaaaataaaatctatactatagcttttattgaactgcaagagatgaattttaatatttaactatacatgtaaaatccgtaaaaacaatacaataatttaaaaatttttagttccaacttcctgttttttgaaattattctgatgtttcttctacactcaagtcccaaccttctctacttctagaagttgaataagacagacatggaagatacagcaggcaggcaacacaggttctaggggaaacctgatcaagcccttagcttctctagttactgttgatttctctacagggtagggatcactacagtcccatttaattaaaagaaactggatttaaaacacctgattctaaggccggtggtacactcttgagaacagagttaaagtcttttatttgtatgaccggcaattactcagccctaaaagctcaacagacaattaagggcttaaattatacaatgttttcccatcttctccagatacaacctcaattacatagttttttagcttnagatatnaattgaattcagctgattgttgataaaatgccctttggttaga

SEQ ID NO: 449498 - DNA, 655 bp, Homo Sapiens
  misc_feature (295)..(309): n is a, c, g, or t
  misc_feature (567)..(567): n is a, c, g, or t
attttttgcatttattgtggtaaaatatacataacataaaaccttttaaccatttatttttaaacattttaagcttcttattgaaatataacaatataggaaacacatacacagtacaacttgtaagtacactgctcaatcagatttcatctggatcaagaacagaatattccaatattccggaaaagaaaagaaacatgttaaaaggaaaagatttttatttaaaaaccctagacatagtatttaaaatgggggttaagagaggtaatctctctatccctttgtgtgtgtgtgnnnnnnnnnnnnnnncatacataatcccatatctatgcatctatacccaccctataatgtaccattttcagaaatgggtttgcagaagactttctaaggggtatttgttttattgtttaaaagattatgtggtaataactttgggatacactaaatagagtaatcaaacaagtttgtcacccaaggaaattttcacaaattcagacttcagggcctattgactgatcattctcaagtcaagagaggaatgaggagaatccttcttgcccattnctagatatattttttaaattatgataaaatatacataacaaaatttaccattttaaccatttttatgggtaccaattagtggcattaa

SEQ ID NO: 449499 - DNA, 931 bp, Homo Sapiens
  misc_feature (80)..(91): n is a, c, g, or t
  misc_feature (887)..(887): n is a, c, g, or t
  misc_feature (893)..(893): n is a, c, g, or t
aatatttacattttaccaaaattttcctgaactcagtaatcattactaacactttttatagtattatttactgcatcttnnnnnnnnnnnnctaagcagaaagtgtacagttgaagaaaactggatgtcagtctatacaatgatttacttttggcatgacagactttattttggcactttcacaaatattttgctttacagcagtgacaaaatatttgccagaaatttttctttttctgggacgggatattcccagaagtggttattctatgaattgaatttcactctgctttgcacagttagaggtatacccattcctaccctctgtaattgagggacacagcgtggctttagaaagctaggctatcgtttccttttagtcactctaaagtgaattggttctgtaagtgatggggcaggaatctgagaattaattaaggccattaaggatttaaagtaaacactgttccaagtgttgcttaaaaaaatgtttttaatgaattatgtggcaattccagggaatgttctcaaaatgaaatattcatactttattaaaagtaaattgtatgttggaaaagttgctttttttgctgtcttcttctgacttggacggctcacagtttataacacaattagtggtataatagaaaacggaaatgtttagtacagaaagtaccagccacagtaccctcataactccatctccttccccagggcatcactctttccagccacttcaatcctaaagcagtgaggaccctcattttaacacacagagcctccctggcctaccctccttccctgtaacgtgagctactgtagtccatttattagttcttcgggttaagcttcagtagacatttgggaggcacaattccaaaggtaantcattntttgggcctaagctttaggttacccaacatcagggaag

SEQ ID NO: 449500 - DNA, 654 bp, Homo Sapiens
  misc_feature (25)..(25): n is a, c, g, or t
atgtctgccaacttcacattctggngtttatttcatttctttttgaagaccattttcttccattattgtagttgagcagcaccaagtggactgtcaggctaacaggaataagtggtagccttgctttctgagcaccatctaaagaattttaaacctctgcattatgtttagtgttctctgtgtgggcatgaaaacaaagaaatgcccctactgaagactgggctcaaaggaccaatgcagggctggttcttttaccccttggtttactcctgcacttgtcttactcattctgaatctctaccagctgctcccagaatcacagatactcaggaccatctcaggcatccaggcatggcaaagtggaaataattcattttggcctgcaaaccttcaactcccatctttccccaagaagtcagagatgctgttacttgaatgatttaggaaatgagtgtgtgcaacaaaagacaaaaagatattgtctattgtttgtgtgcttgttttgcgctatggaacattttttaatttattttaagataaattattaagttgaaaatgtgtgtccctattcagaagtgaaagattcatcttgtaatagttaaacctccatcttgaagcttctatggttcatagtctttgcacaggaacctgtgg

SEQ ID NO: 449501 - DNA, 521 bp, Homo Sapiens
aaagtttacaataatttattattgttgcatgacatttgccagtaaaataaattatagaaactatagagtctttataaactattttgtatatcatattcacttcctaatgcttactgcagtaactgtatgaaatttaattagattacgttttagcattagtcagaagatttaaaaaatatgtaaaatgttttcacagtactttggatttataaaagaccccattattttaacttttgtgcaacctgtttgaaatgtataaaaaacctcttacaaaccaaaaggtggcgtaaggttttactgagttgctgaagacatcttactttcttgaatttctacttaacatccatgtggtgcactttttcaggcattgtaataagtgcaaataaataatcaattattgatttctaaaaatctataccaatagacaatactcaggcttggaaatattttgaacactcagatataaaaattcagtaaacaatttatgcatggtattttctctccctgtcctccctctccct

SEQ ID NO: 449502 - DNA, 848 bp, Homo Sapiens
cctgattacaaaagcaaaacctcattttttggtctttgaagaccatggagtatgacttctaagagcaaacattaacatcagatttgtatgtctcactacaaaaagaacccatcactgatgtaagacctactcatgatactgaagtagattttttaaattaaaaaataaaagtagtcatttaaaatggaggaattgtagatgagtatggaaaaatccattcacaaagttcactatttgcattttctaaaagaattttatgtaataaaatagaaaactaatgatttatagagatgtgcataaactccagagaggaatatggaagggaaaactgtgttatattcccatttaaatttaaaacagaaaaagataaaacacttgaaatctgtgtttcacatattagacacaaacaataaattcaaatgattctaattaccattagcttgttaatgtctccatctctaagatgctgccaagatagcacacaactttacctctgaatatgcaactaacttcagggtaaaaagacacacagtcctcactcgggaccgaacacgttccacagagaaatcagaaggaaattattgcaaatgcataaccccatctgtccagccaaggaaatgttctgagacaaatgcagacagacaggggaatggagtgaatacaaagaatgattacaggagcgtcgactgtgagacctcatgaagacagaatgtcacaaactgtcaccacaggacaagcatacaagccatgccactgacacagtgcctttcagattaattcactagtgtaggcggagagcacattgtctttgcagctggggaagagcacacggtatttaaacttagtag

SEQ ID NO: 449503 - DNA, 391 bp, Homo Sapiens
  misc_feature (18)..(18): n is a, c, g, or t
taaggttcattaatggtnttttttcctgattacaaaagcaaaacctcattttttggtctttgaagaccatggagtatgacttctaagagcaaacattaacatcagatttgtatgtctcactacaaaaagaacccatcactgatgtaagacctactcatgatactgaagtagattttttaaattaaaaaataaaagtagtcatttaaaatggaggaattgtagatgagtatggaaaaatccattcacaaagttcactatttgcattttctaaaagaattttatgtaataaaataggaaaactaatgatttatagaggatgtgccataaactcaagagagggattatggggaggggggaaaactgtggtttattattccccattttaaaattt

SEQ ID NO: 449504 - DNA, 481 bp, Homo Sapiens
catgctttttatttttcggtttatttaatcttctttaacacagccattgttggttcaacaatccaatatttgaggttacattattgcaaaaataaggacatagctgaataggttatgccatcaatatgtttgttaatcctatcccttttattaaagacaaagcacagtttgttaatattgtcttggattaactctatttgtaaggttacttatagtggttcatactaaaggcaggggatttgcttcctgggccaattgtctttaaactataatttaagaaatcattaggcattttgtaattaaaaacagataaagcaatattttagtacaatgttaggcagcagataaaattaccctgtctgaatatatgtgtacatatacataaaacgctagcatgctttaagaagttaagaaatattaatattctgtgaaattaatatgtaaataaaatataatctggaatgaaattcccattatgtac

SEQ ID NO: 449505 - DNA, 646 bp, Homo Sapiens
  misc_feature (137)..(145): n is a, c, g, or t
atttcaataatggtaaacatttattgagttctttgtaaagcctggtactatgttaaacattctatatacatggtctcatatagtccttacgagtcaatgtggtaggtaatcctatattcctattttagagatgaacnnnnnnnnnggctttgagaatttatcaaggacccataataatccacagaacctaaattcaaatccttttgtcccactccgaagacttatctcttaaccacttcataagattaaaacgctgaaggggcacatactgttatgaattttaatggctcctacacatgcatcctttatatatacccttcatgatttttcaaaccatgtcagattctcatttttcaattctcaagatacagcatcttcttatagcatcttcaccacctttcccgtttactgtcttaaatgtgcccaatctcggaaatatcaataacaaaacaagcttgttgacattttgtgaaacatttaaggagacttccaaggaatgtaacatatgtagactttgtgacacatatattggcatgtggtcacagctctgttctgagatcagatgttactattttggctttgagacatgaaagatatgacatttaagtctaaacatgcaccagccaaccgtggagtagtggggtca

SEQ ID NO: 449506 - DNA, 532 bp, Homo Sapiens
taaaagttaacatttattcaaatcatcaaaatattttgtgcatcatataacaacaactctgtatactgtagtgtcatattcccttcattgcatcaagagaaagtgagagaaagaatttccagtgtttttatttatttttagccaccctacttaatctaatttaagtgggacagttttccctttggcatatcaaagcactgttcataaatcaacttaatactggcatattcattacatcttcctcctgttgcaaatgcatggtaggacagctggggaaaagagctccaagggttattatctgggaaggtcttattaaaagcataacaacatttagagtactgagttgttgaacaggacataaatctggtattgttaacctgtactacatgtttagcatgatgcattaatacaatcaaataagatggatgatcatcacatgatccacatgaccatttgtacacatatgcacaggatgagtaaagggagtgattcagttcaacatccttaagcagataaggcttagtttagctta

SEQ ID NO: 449507 - DNA, 1419 bp, Homo Sapiens
  misc_feature (1373)..(1373): n is a, c, g, or t
  misc_feature (1379)..(1379): n is a, c, g, or t
ttttttttgactcatcaaagtttattatggcaattaattacacaaacatacaggcggtcggtcatccagctcagaagcactcaaaccagtagagtccattagtgatttctctttataaataacttaggagaagcaagcacatttggtaaagaaccggcagcgctgacctagcgtcacgcggatggcacataggccggggaggggcaggcaccagaaggtcaaggtccctccttggccccagcagccccgggcccaccagatgctgcgtcctcaggtagtggacatttcaaggcacgtacaacttcctaagcaatagcagctccaggctcttccctgagacctggtttacctctggaacaaccaagttaacactcatcacaccccctttgtctattgtattcattcttattactgaacatgccccaaaccccacagtgcagggggctgcatattaaacagagacataatccccaccctttacattctgaagacagggaggtgtgaaaaaattgcccctaatgtagtgatggtgttttttaaaaagcaccatttgggaagtaaagttagggcctcttttgatgcctgtcttaggatggacactgggggtgggaggattacatcaacagagtgagaaggggaggggaagggagggggctgcttgtgaatgagattcaaggcactaaaggagtggatggatgcgtgggcctcgggcaaagtcgccctaaagtggggaccccagaggagagaagggagggtggctggggaggtgacctggccctccaatcctaaacaagccccaatgtgaccacaatctccagggctagagctgcccgcttccctctggccagagggcccaaggcagccccctgggttctccaaccactgcaagcaaggtctggggacaaccttgacaacccccagccttcttgctgggctggcgctgctgccactcaaataggacataggacaagcttgtctgacatcagctactggagttaaattatggctttataggactcaaacctgttgtttttcccaactctgttctctccctccaatccaacccctgccacagtgcatgggcaggctagccttgaatggactggacagacaccaacagctgcatcccttggcatggggctccatgtcaaatatgccaaaccccaggggagatggagggggctggagacccggggcctcctcatagagataactctgcactgggttcaaatggccctgagtgcagccgcaagtagatgctcataaatgcgcacatgcgctcactcacacagacaccggcgagaggtgctggactccagcctggctagcaccgctgcagccaggcactgaaaggaggggcttccaggaggacnctttgnagaaggccagcaagtgccatgaccagtcacaccgcccagt

SEQ ID NO: 449508 - DNA, 941 bp, Homo Sapiens
agttatgtagaagtataataaaatccctacatttctgaggcctgaataagtatttttaaagttttctaatatttattttttgagcatgtttcctgtctgcctgcaaacacatgcagacatttagttttgatttacatatagttaaatatatgttagtctaaagataaaccttaagtgtaagaaaattatagagtgagtttgtgtgtatgaatttgtacctgtttccgaagaaaaaaccattcttaaccaaaccaaatcattttaacaaggtgactactagaaaactaaaagcctcaaaaatgctaaaagcaaacatgtattctctgctttgtattgaatttattactgtatattctgtggcttatagttctgaatctccccatgcaaattctgtttatatttgcctggtactcatgatagacccctactttttggtattttgtatatttattttatagtttatgaaatattcattatgtgagctggaatgtgagtataagaataatttttatgaaatgtgcatacaaaataattttatatgtaattccacaattagtatattaagttaccattttattttggctagaccactcccattttgttttcaattggggaaccctatataggcttactattctttagttattgttctttttacctttttataattgacaaagtaaatttatttatggagtcaaattgttcaggtaaatacaagggaagcttagtaagtcatggaagatgtttttacatgtaaatgtggaaagcatatatagcagttcttggtgtgtaacatgctccagaaaaagccataaacatttctgctaaagttagtttgtaacttcaagtcagagatagaaaattagtagtgaagaaatacagctgatgttttatgtggagaggacacttttccaggctgcaaagctgagtgttgctgaatt

SEQ ID NO: 449509 - DNA, 480 bp, Homo Sapiens
  misc_feature (23)..(23): n is a, c, g, or t
  misc_feature (50)..(50): n is a, c, g, or t
  misc_feature (68)..(68): n is a, c, g, or t
  misc_feature (84)..(84): n is a, c, g, or t
  misc_feature (350)..(350): n is a, c, g, or t
  misc_feature (410)..(410): n is a, c, g, or t
  misc_feature (443)..(443): n is a, c, g, or t
  misc_feature (448)..(448): n is a, c, g, or t
aaccttcttttttcttgccccangcccctcaaaacaaatcaattgaaagnaacatcggggctgaactntgccgcatggcccccnaccccggccacccaaaaccgcctgctttgccccccacgccgccggaagccctgcacacgatgcaggaagtgggagatgctctgggtgtcgggggcctggtgcaccgactccggctcactgggtgtccagcagcggggcggtgagcaccgtccagcgcactggctctggcggttcaggaagccagcttggccaggacgtctgagtactcggccttgctgtcgttggcgtctgctgcataggatggctggggagatgccagcttgctnttccgccgccgtcgtttttttaccttctggcattggccactggtggccgctgccatcaanggctgcctcgggcgccaccacagctggctcctnatatntatcacgggacccagccagtcaggttcttagg

SEQ ID NO: 449510 - DNA, 464 bp, Homo Sapiens
ttttttttgaaagagaacatgtttatttacatcactatttcctttttacaatgcctccaccttttgaataataaaattttccaggaaatcaggtcattttaaattattaaggtattttaacaaatacaattttcaccctatgatttttatttacatgagttttcaagagttttaaatagttcttttgaaactgcacaatataaccagaaggcctgactcaggaccctggcatcttttccaaaaactttcagtctaggaaattatgtttataatcaaatccttgcactttgggatcttttccgatgaggattttattaacacctctaaaatatgaacctgcttcataaatggatccatattttgggcagcaagctgaacctatttgacacttcttgatagtaaggcaaaggtttttttggataccttaattaaactgctttgattaaaacttccgggaggtttcc

SEQ ID NO: 449511 - DNA, 485 bp, Homo Sapiens
taaaatatgaaaagataggtttttattcatcaaaagttaacagcaacaggcacatattaaaatgagtatggcaaagccttttacaaatggctttacactcaagctttctcccaagaaaatggctgttgcaacaaactgtaaacaattaataaacagtcttttacagtaacaagggaaatacaaatgaactaaaaggaaagcaccggtttctcttaaaactagattacagttgtgcttactatacataaaacaatttaaaacaaattacaaaagtggaatgtttgaagtttaaaattagtccttatagtttgtcctagaaaacatctgttcacatcaaaaggcccgtcaaagggtaacgtttcatcaaagggagggacaagaaaacaatgcacttttttcaaatcaaaacaagaagtttggtcacttagctatgtgcatagtttaaggcaactggagcaatctgttacagcttacctaccaacctt

SEQ ID NO: 449512 - DNA, 236 bp, Homo Sapiens
gcagacttttatcagcttgagtttatgtcatttgatggacttggttcaacaacaagaacttacttaaaacaatgtactgtggtgatgagtcccaggggcactggtcagcctgtggagccctggatgctatccacacccacctatccctgcagctaatttagctgatctctaatttaactgagctctaatttagctgatcagattttgcttgggcgtacgggggagatactctagag

SEQ ID NO: 449513 - DNA, 138 bp, Homo Sapiens
ttaccttgtactttacaaactttattaaataatggacgttactaactttcattatcttatatacagtatttaaactatgtttttctagatgcattttttccccacaaagaatagagcaggtgaaaagtaaacttatat

SEQ ID NO: 449514 - DNA, 1047 bp, Homo Sapiens
  misc_feature (600)..(631): n is a, c, g, or t
aaataagtgacagataacactgtcaagtacactgatttatcgaatatatatctgcaaactgtcaacaacatacaaaactcaaaggacttatggaagagtctgtctgcaaaaataaatctcttgtccatgaggggatgtgtataaagatagttctgtttccctgttggtttccaaggcacttctcatggctcctggtgtgctgctcctgtacggtctgctcactggttattcttccatgcacactggactgacagccagccgggtaagaagcctggcgcatcttttatagtatgcaggaatggtgcagtctctggtgttgtgataaagtctatggaagtgtttgctgcactttggactaaaataaagagggcctgtaaggtgttttagaaacttgtccttcatcctcagatctcgaggaacaatttccactcgctgctccggcgaaggccccagccccgccgcctccgcgcggcccagggcgcagtcccgcccgaggagctgcaggcccttgtgctccgccgagtggtgcttccgcagctcctggacgagttccaccaccagccgcagcagcgcctgtccgtccgccggctcccggggctnnnnnnnnnnnnnnnnnnnnnnnnnnnnnnnnagcaccagcagcagccccaggaggagggggtgcccgggtccgcgcatcgtgcgctcggggccgcggggctgggagactccgacacgcgccgagagctgggctcgctccgcggaccccgaggaacaagccggcaggtgagggagccgcggtctcctcgacgatcacgcccgaggtcccgcccacggggagcgaccgccgctggtgcggaaaggagcccccggaacccgcccgcccgccagcccggcccctcctaactttcgcccgaaaggccgcgtccgccgagcgcgctgcgcctggcgcgggcgcaactttctttcccctttggaagccgcgggtgccaggcagctccccggccgcgggcggaggtaggaggggccgcgctcccgcgatcccgtatattccggaccggtaccagc

SEQ ID NO: 449515 - DNA, 1164 bp, Homo Sapiens
ttaacttaaatgcaaaccttgcaatgtgctgagctatgtagtaaaaagtgctatgtttatatatgcatacatatatgggctctggcaagggatgcatgagtacatgcgtgttatgtaaacatagcaattggtcagaaagagagtttctcatcattaggacatttaaggagtggcaagcatattggaagcaagaatgacctagggccatattggcttagttgtcagccaggagtgttgctgttcctatacctggaggtgcccaggtctctccccaagcaggccagtgctcacctgatatgacaggtgatcgtgtatctgaggcctatgagtttgagattcccccaaggtgaggtgggtctgcactcacttgctaccaggtagctcccctagttcttgaacacgtgtatggcccagttctgctcctcatgtaaaaagcagaacacgatctccctgtctctaggaggagggtgcagattgcagatttatggaggcccaaggccccttattcctactccccacccccagaggttatagggaatcttcatttccttcccccctaagggttccattaggacttgtgttttcctgaccacagattcacacctgaagaggcttggaagatgcaaaatcatcacctccaaaacagctgagacacacatgacttggctttaaccgtgactgcccaatgccagagcactggactcaggtttaacatgggcagcccccatgtcaccctccacatcagctctcctcctacattgatggtcggcctggaagccagtcatgtttgaccttgcactcacgccctggaggttctgaagtaggcaactttctagttacacaggtcctgcacccaagcttttagctcaggccaagtaaagacaataagttcaggtgggcacacggtctcagtcattttgtcttcttacttgcagtctaggtgaatggaccagttaagtgctacctggaggtaaggctgtatccagactgacatgccctggaccaatgcagctaagtggatacatgaatttggcacccaagatactatttagcgtgccatggtagtcattcaatgttagtttcattcccttctccaaatctagctggattcctgcaggtgacttgcatttccctcttgcccctacagctggcttctcctctacc

SEQ ID NO: 449516 - DNA, 512 bp, Homo Sapiens
aaaaatcatgattgtggaagatatttttaaaatctgattttgcagcgatcacttttaaaccctgtagtgatgtaagactaaaatataattgctaagattttgttggttaatgtaaagatatgacttttctgcactgtactctcttcataggattgtaaaggtgttctaatccaattgcatgatgtagtaagcctcttaaatatgtgtgttaaatatattgagtttggattaaaatgttgacatgatttcacatttgaaaataaactcatctcttattttgaagttacctatctgtagtatgatggaggatgaattaatcgcaaatgccagttgtagaaactatgtaaagtttgttgtgtgctaacattatgatttgtagtgtataaactgaagtattccaatagaagtatctctggttacatcctattgcttacaaaatgaaatgaaccctgaaaaactctgacgtcatattgttgtctgtttacccagatacatttattgctggggattgc

SEQ ID NO: 449517 - DNA, 427 bp, Homo Sapiens
atttctaagtataatttaactaaaaacactacttcaacttcagatttattttaatgatatatacaggagttaacaacttacaattaaaacaaaatcagttatgttaattccacataacttaaaatcatgcaatactgcatggtaaaaacaacagctttgttcatacacaaaaattattattttgaaactcatgagaccatctagaaatttttcaaataaactttttgcaagagtattttataaaaatttaaacacctgattaatcagttaatgcattattaggaaagataataaacattattagtaaagtgaggttacaagcaattaattttaaaattacaccaggtacagggttgaacataatctcatgaaataaatgtttaagaaaatagttttgaaaaagatctcatactgaagccatgttaaa

SEQ ID NO: 449518 - DNA, 626 bp, Homo Sapiens
aacatgatatttctatatttaaaaagagcataagaaaccattaacgtttaatttatgattcccacttgtcattctaatttatatttttaaagatttacattattttgagtaagttctaatcctatgaaatgatgcagatgtcaccaacaacttagaattcaattctgatcttatactaatacataattctaaatatattactttgagtaatacatgtttacttagatttactatattcaagctataggttgttgtgaagtcgtaagtgtataccgtatatagtttcttgctattcttgcattttcataatttaatgaaggtcaaagtgcccttctgctccttcttgttctagggctctcatagagcattgtcaggatcatcgtgatcttcactttcatcatacatcatactggaaatctcctgagaaacttggtgtctcttagtaagtattgtatgaccattacgtgcttcgtctgttcaccatcaataaagtagtgtgtatatgagggacagcagatagaagatgtcatgagccttattgggttctatttagtttcatcattaggtccacacgaaatgtatgttcaaaatggtggtctaatgtagtgggttcaatagcagggacc

SEQ ID NO: 449519 - DNA, 1095 bp, Homo Sapiens
  misc_feature (186)..(213): n is a, c, g, or t
  misc_feature (577)..(577): n is a, c, g, or t
gagtctctgtcactaccatcatctttctcactttgggaatctctattggtttcttcttcttcagaatcactgcccttatctgaaacttcttcttcatcttcctttactgcagcttcattcccaacgactccatttgcctgcttttgtttctgttgctttgactgtggtaatagcacaggtgtaggnnnnnnnnnnnnnnnnnnnnnnnnnnnngatttagcagttttcttgggtcctttactcttctgttgccatcctccttttgtcctgttcttgttagtttcaccctgcccatcttctgctggctgttcctctgcagcacagatggactgctccttttcaaatacttcagccattgtttgccttgtcaacttaaccaacactgtaactaaggatcctactgtgatgttgttgctatcttcatcatctaacacctgtgattttatatccatggtcacatatggaaaactcccaaggccagccataacctcttcatatttttcatcttcaaggaagtgcagtagagtgtgaccgatctgattcttttaaactcaccaaatcctggatagttttaatntttatactttcttatgattagaaacccgtctaagattgtcctcttcaatatgagggagctgcagaaggggagacttaaattgctgaagtccctgaacggccatctgagaaagcttcatgcagtgttctagggatgccaaagttggagcacgaaactccctttcttcacggttccgggccattactattagttggcagattacattaaccatttcttgaagtagggcaggacacttttttagcatgaattgctgatcttcttcaagggtctcaggaattttcattctagcaagatgagacagtaaaagaactctggccttcaggctatatgggcaggtaagtggaggctcattcttctttaaattaatgctgccaatttctctgattagctgtggtattagaatattatccgttggcctgcttgtggcatctttattatactgaggatcaaattcagaagctccagccaaaaccatgataagacgtttcatatccatatttcgggttttataaacaaag

SEQ ID NO: 449520 - DNA, 1153 bp, Homo Sapiens
  misc_feature (463)..(500): n is a, c, g, or t
  misc_feature (503)..(543): n is a, c, g, or t
ttttttgaccatagcgtcccgcggggtaataaaaaaatttttgtcaccaagaattcactaaatgctccgcgtgggaggccccaagacttcttccaaaaggcacgtgccagggcaatctattgtcgcgggtcatatggtgtaaaacccaccccgttagaaaaccacccctcttcaagaaagttgtatatatgattgtttcctcccttctaagggggccttccaaaaataacttctcgtgaggggagggttttcggtgcccacaaatatggtgacacccgccccggagggtaaaggggtccctccccaaaaggtggccgccggctagacaccgttttgtccccagcgtcacgcagaacgtggtgttaaaaacgaccgcggcacggggctcatggcttaataaaaagcgagctcccctaataagggggcccaccttggacacaaaaaacggggaaggcggaaactnnnnnnnnnnnnnnnnnnnnnnnnnnnnnnnnnnnnnntcnnnnnnnnnnnnnnnnnnnnnnnnnnnnnnnnnnnnnnnnncagtatcaaatctagttttaatcttctataacaagtcaccttttcttcccacctatatccaactgcgcctagtggtacagtgagaatgatggcctcctctctttccctggagtctgaggtattggcaacagcagtcacccactgctgagaggacttaggacccagcagaagtcaagggtcattagtgccctgcagctgcagggatagcctcacttcaggtggggatggggtaggatgcgggcaggacagggcctaggaaaagaagaagggtacaggagccttcctgactgcagaagtttcctgtttgtctgaaggcaggaaataggagctaacggagtctaaggccaaaggttatcttttaaatagagcataggatcagggagctgggacctcactagccactgataacttccagcgccacccgggtgagagaaaaggcgcagaaactgcgaaacgctgaaacggttcagggctacgaccacggcaagccccctccttttctccccgcagagcgtgcaggtgggaacggccaccgtggcgatggtgtctccgcgaacctggactctcttcactcaggccttcttggacactcggcccatcttggtgcggc

SEQ ID NO: 449521 - DNA, 500 bp, Homo Sapiens
acctttcttgaagacaagacaggattcgatagggaaaaaaagcttgggatactggtgccttttgacttcaaaggcaaataataaaaagccaacagtaaatcaattagccctgagagagtgagttttcagtggacatgaaagagggagcaatgcatgtaaatgcaacctcgtgtttccagaagaaaataagagggaccacgagcctgagaacacattcgtattttttgacccagaccaaaaacttttggtcctttttaacggtgcattcctacattaagaaaataattagtgataaatatattctctttttgtgcaaattcaaattccaggttttaacaccctaattcacaaaattcatgccaatgtatgcgctgataggctgaagccaagctgtgaaacttcagaacacagttaagggcagcaatcaagcccgttccaggctgacgcgcagggcgttcttacatcacatcccggggtgccagctcaaccccggcacgtca

SEQ ID NO: 449522 - DNA, 1531 bp, Homo Sapiens
gcattgtttttcagctttatttcaaatgctgtgtagcataagaacctagccgtcagacatcattttttagctatgaaaaatatgaaacaaggcatattctaaagtgctgaaggaattaattgccctattagataacgaatacctggaggaatgaacagagtgatttatggcttaaagtgcttgggtctgatcatcatcttagcctctttgaaggaggacttgtagccaccagggtgtgcctcacttacaccaggccaggtaccccagaaaatcccattacggacacctctgtatttttggtgataatatttgccatttaagtttgcagaaagacatgcatcaaaccaccagcctgaactgtagtacagcccacagttcccagaaggatatcgatcattgtctttatctggagtggtgaaaaacttcagatcgtggttgtaatgtttgttgaaacgtaatgcatctccagctgtgccattatagttaccaacgtgtataacgatatttgagaaactcattagccacatgaaacgtgatcatacgatgcatatagttcgacaccattaaagtcttcaagatctattctcagaatcattttcccttacttttgggtcaggaagatgaattttatcgttccccagcccaaaattcccttctgaggtttcccaaagcctgctttgtagtcttgccatgttctggtgaagttggtgctcccatcgagacgtgcctgcagcactgtccagcctccccccatggtctccatgtcacagtaaacttcaaagctactatttttgggatcaggtgtaactctgtaggtctcactgcttcttttgcctattgcgtagtagtcagagcaatctttatatattagatgttgaactggacgtgactgtatttgttcttggctgggacactttgaacatttgccatccaaactattgacaacaaatgttagatttgccactttgctgtcaacataattttctatgttgttcatatttacaagattcagcttctccaggcgaccatgaagtacattgatctcctctttggcattctttagctcagaggacagcttgttaacctcactctctaattctctaactctgttatcaccaacctctcccggggctcctgtactgggtaacaacagtccgtttctgcctgggtctccgttgtcatcagcctgcagcttgcagtcttggcaagatttctttagactatttacgatttccttgaggttttggacttctttgaacacctcctcgatcctgctgaattgcttcgggagctgaatagtcaaggggggcaggcttacctggtaggggcactcctctgcctcttcgcatttccctctgctttctagtctcactgggcagacatcctttgctctttcatctttaatttcctctgtttcattgtttgccacaaccaaaaaaccgtaagtggcaagaacagctgagctcagccagtaccagttagccagcttcatctttacagtgctgatcccgagaattccggaccggtccag

SEQ ID NO: 449523 - DNA, 396 bp, Homo Sapiens
  misc_feature (50)..(50): n is a, c, g, or t
  misc_feature (64)..(64): n is a, c, g, or t
  misc_feature (162)..(162): n is a, c, g, or t
gatagagccttgagagatgattttgtgttgggtcaaagggtgtgaaattntatgccctacacanactttacctggtggaaaaggagcatctcacagtttttggctgaagcaaaagccacctaccaggttactatgcttcgaatcaaggcattgatgacgggngagccttcctggctttgtcgacgtcatcaggaacctcaattctcctgcactgctggaagacagtgtgataagacaagcaaaagcagctggaaaaagaatagtcttttatggagatgaaacctgggttaaattattcccaaagcattttgtggaatatgatggaacaacctcatttttcgtgtcagattacacagaggtggataataatgtcacgaggcatttggataaagtatt

SEQ ID NO: 449524 - DNA, 1084 bp, Homo Sapiens
  misc_feature (520)..(533): n is a, c, g, or t
atgagacactgcacccaacctataaagtgcagattatatagtgtttattctcagatttgaaactatttctaacttaaagtagaaaacatttggaaaagtgtttagaaatatttttgcattttcttaacagtgcttatcaatatacatagttatctactagttccttttatcagcattcaacttatgtagaggtagaagttaaacatacagtgttatttagccaacttcaggtaaactcagtaaattgttagattaaagccattttgcctcaaatacttattagcctgactagtttggggctgtcagggatcatccaaattaaaaattccaactaaaatttttgcagcttctacacaactatgcagacatagattgaaaactgttgtgttcttccccgccactactgagagatgggaaaaattaaagtaaattaattaatgttttactaattaaatgtttttctccagtttaagggggttgaaaaatagcaataattttaagaaaccatttactgttttgnnnnnnnnnnnnnnaaataacacatatctggattatgtttctaatgtgaatttttggcatttgaaagaaagtaggtatccctattaggctaataggcagtgaagtatcttgatctcttaatcctctgtattgctcaaatattagcattatccatactcatttattaatgtaggggttacttagtgaaaccctgaactaaaataaggcagaggtgtagtattagaagaaagactcatagaaggcaaggtaggatgttaggcacgctaaatggaaaatatgtgttataatttttatttcataagtgaacttgataatagaaaatgcatttttttataaataaaaagtaggtgtctgaataaaaatacctctacttgggtagaggtatttaaaattctataattttgttctgctatggctaattcttacagaaccctctttctggttccactgtatattattttaatgacacttctgcagtgggtattaagaatacagcttcacatttattcatcattgtccattcactcattagttcatgcaaccacaaaaaggtattataagaata

SEQ ID NO: 449525 - DNA, 359 bp, Homo Sapiens
ggcatccttctaaacatttaattcagcaattcctacattgtcatgacaaaaatgaaacttgctgagggttacagagttctaatcagaaataacaacttaaaaatctcacaaaagctttacgtaagcctgtcgtaagggctgcactgtattccgaacatttattttgaaaacaattgtcaaaatgtaaaatctccagcaccctcaacatgatgtagccttttggctcattctatacgtttgtgatcatctttgtaactccaagttttggaatatgaaaaagcatgatggcaaagaataataacaagacatttgtttctccatgccctgcccaagacttgatgcaccgtgcgtgccccatt

SEQ ID NO: 449526 - DNA, 515 bp, Homo Sapiens
  misc_feature (498)..(498): n is a, c, g, or t
ttttttgaagtaaatatctgtttaatttacaaacatcagcagtgtaaccgatattaatctggagaaagacaaagcacactgaattatacatgtacatctaattttctttgtaaaaaaagaagttttcaggaagaaacatctgcatctttacagggcaccctgggattttaatgagggaagagcacagttcactataaaccattatcaattctacattgtaatttagcagcaaacatgttaacatgggagcattaagataataaaggagttttattgtttgagggaaagaaaagtcacagttcttgatatgacagtctttttatccccacctcacccccagaaaagggcaaaaaaggtcaaggacatattaatttgcaaaaggtctactttctagtgttgattgctacacaccatttcgtttctgtgaggacatgttgcagaggggccacttctttctgtacaatgaccatctcacatacagatttctgttttcctttnctcggactttgcatact

SEQ ID NO: 449527 - DNA, 1389 bp, Homo Sapiens
  misc_feature (1278)..(1278): n is a, c, g, or t
ggattttattttgcaatatttattatatattcaattcaaatgtactcactattgtgctaggcaattgaaagtaaaaagtataaagctgcattttgcgctctcagtgaggtttaagtcagggaaatgaggcatgcacacaaaataacgagaaagtagtataatagctgtgatcattagttatcaaaataagtgaatgagctaataatcattgttagaataataattgtgttcttagatctcagatgctttaatgaaaaatgttatcttgaggtcaactttgacaaatggggagataactgaaaaacatctgacattctaggtagggaaaacagaagcaaatgcttaaaaatgggaataagtatgtattctgtacacagagacaacttgatttcaatacatactttatggtggaaataatgtttgtacttttacttacacagtccggactcatgtttctaaaacactgataattttgtgtttaacttcaatgtaatgtgtagactaatacttttagtggggtacaagtgagaggaatgttattttagaaactttactctggcaccactgagtcatcataaattattactctcagatagaagatttaattcttgcagttagccatgtcagtttatcatgagtaatcagaaagtgttactcagaagctttattgtgaatattcagtttgttacagtgaacatggatgtgtatgggtgggaaggtagtgtgcactggcaccacagaatattctgttttcatcttatgcttgaactaatttattgatgagattctcatttctgtagtataaaaggaaaatattttgcagttatctcgtatttgaaagactttgccatagagaactttatcagaaatggatgaacttttcattatttcttataagcatattggttttggcctgcttgagtttaaaactttttttggtagacttagaatgttaatatttagataaagaaaatattttactgaagacattaccagaaagtaaaataacttgaacatttctgtattagctctttattcagagaataacatttattttatttggaaagttttcctaaatatgagactatctgctatttctcagactaagtgaaaaatttaataaaatagctgccttgataggaggaaaacaaagttcttactttataaggaataacgtatgaatcataaaagaagaatgagcgatcatgggaaacatttagcttttcaaagtattttggaacatgtaccttaaattcccggaaaattccggacccggtnccacccacccgatagcagcggggcagcggaagaaagcagagaggggggtgtgggcgcgtgtgggggtggtttgttggtgtggcgtggggccgtttatttgttggtctgttc

SEQ ID NO: 449528 - DNA, 1562 bp, Homo Sapiens
  misc_feature (434)..(434): n is a, c, g, or t
  misc_feature (632)..(645): n is a, c, g, or t
caagaatatagggctttaccatttacaaatctttcacatacattctcatttgaccctcacaacaaccctgtgaggtaggcatcacggacattctactcattaaacagatgaagacagtaaatctcagagtagttcactgataatgcccaaggctctacagttagtgagtgatttgtattaatatcagtctttggcctaaaaattcagcacccctcttccccttatacttgtcccacctacttcacagggataatgaagataaaatgaattcaaggctagaaaaatactttgagggagaaaagcactatataattatacctacaaactatgattttccccaatatatggctcattcctcttctcatctcagcttgtgtgtgaacccagagttgtatattgcctctgtcctgtgctcagtaagcaaataaggcagncagggggtacagtgtgatcctgtttaaagttacataaattacaatcagggtaactgctattattaggcaaattgaaaaacagcacagaaaggccagtgtgcaactaggacccactaaagctcagaggaaagcaatgcaagattatcagacaggcatgattgcatagaaggaaaatgtggtgtcagagttcaaaacggnnnnnnnnnnnnnngttatctaaggcaaagtggtggcaaagaagttattttgttccatgtcacacaaacaagagcagaagattcatgggaccccgtacaaaagcatcttgtgtcacccagatctctccagctgcctatagggaatatacagaacagtgtcacccttcaaagaatgactgtacctgtggttcatatcctgaactgcaaccaaggaatagctccatgctaaactgtcttggctaaaatacaaccagtgccatcattcctaatcagactaataaacagaatgtcttttaaggtaatgagttagatggctgtgtttaggttttgttcaggatttactttggattctcctgctttaagacccaaagaaagttatattgagtttttattgatgattctatgtgtttttaacagagtgtgataggtgaattaaacatattaaaagagttctatagcatctgttcagaaaagattatatactatacaaactattcaagtcatacaaaaccatttttcattgtctttcaaactgagaagaatcctattcagcacgcttctcctcctgaggtggttcatactgagcaagctttgctttcagttttttattttcttctacaatagcttcatacttctctttcatttcggccagttctaggcgaagcagctctatttctggattttctggagtagcagctcctaagtgatgctttaaaaaatccaaagcactgttaggtttctctggttcttcatataaggctaccaacaccttggtcagcgtgtccagcacccccgacttctccaagtacctccggaactgctcacgcttcgagtcggcggctttgtaatgggccatagtgacagcggcagcggcgtagctggcgccggagaccgcgactggcgggttgggagcagcactgctcatgcgccc

SEQ ID NO: 449529 - DNA, 510 bp, Homo Sapiens
cactttccagagtagcactttccagagtagcactttccaggtcaatgaggcagcaacattaacaaaaagtgagacatacttttttcttgcaagataattcaataattcttcccaaactgatgctccacagataatcctaagaggttttcattacatttagcctaatctggaagatctggcattctacatatcaaaaataactcccaggctgatatgaggccaacccatgagcactcaattccacacaggggcaatacctcaagcagagagagggcttcaggccaccccacttctggctctttccagtcctagcaggtaaaagaggagatccaggctaaattttctggcccttcaggaaggctggcacctctggctctccctacctggggaacctccagggctactggatcagcagggactttgggggttgtttatggacccagaatttgtgcaagaagctccatgcttgctgcccaacaaactcctgaatgatctcagcctctctctcct

SEQ ID NO: 449530 - DNA, 489 bp, Homo Sapiens; identical to SEQ ID NO: 145780

SEQ ID NO: 449531 - DNA, 1404 bp, Homo Sapiens
  misc_feature (135)..(135): n is a, c, g, or t
  misc_feature (179)..(179): n is a, c, g, or t
  misc_feature (227)..(227): n is a, c, g, or t
  misc_feature (448)..(511): n is a, c, g, or t
  misc_feature (646)..(697): n is a, c, g, or t
  misc_feature (868)..(877): n is a, c, g, or t
ttggtgggtcgcgcggcatgtggggaaaattgaggggagtgcgtgaggtgtagcgagtgaaagaggtggcagcgcagagtacgaaatcagggtgatgtgtggaagtgtgtatcagacgaatatagtgcacgatanatggggtggaaacaagaagcagaatgcactgttgtagccagtgngagatgaattgagaggtggggggagtactaatcgcgagcgttgtgagnatgttataagtgcgtagggtagtggaatagacgggtgggataaaggcgggagagatgcacacatgtgcccgtatctaatgagaagcggtaaagggcaaggtaattgggagggaagattcgtggtgaggggtgaaatagagtagaaaagggagtggaagggaaggaaatagatagggcggaggagggtgtgcataggtaggcgaaagtgtgagaagaggtgnnnnnnnnnnnnnnnnnnnnnnnnnnnnnnnnnnnnnnnnnnnnnnnnnnnnnnnnnnnnnnnncggagaagtgtagacatagcagggcgatatagcgagagaaggcgcgaggggcggatcgaaaatgatgggataaggaggtaggtagggaaaggagtgtacagagcggcagcggaggatgtggcgaataagtggaannnnnnnnnnnnnnnnnnnnnnnnnnnnnnnnnnnnnnnnnnnnnnnnnnnntggagcgattgtcaacgggcgtcggatacggtggtgtcgggagatgttgacagttatggtcgggggatgggaggtaagaagtgtggtgtagagttaggagcagggtcggttcggggcggtttggttctgaaatagtaggggtgggttctggtaggcactttttattttccnnnnnnnnnnttgtcgttaatatataaacatctcattctctcaaaaaattctacaactatacagctgtttgctccattatttgcataggaaatgaccacaatacaaaaataagagggaaaaagaagcaaaacagcaaccgatttctgcttttcatgtaggtgtgtttccacgtataaacattttgaagcctcttacaaaattatttacatcgtttgtcatctatttacatcttttaagagcaacttttctaacaaacaaaactataatttatcaagttatgaaaattgtcttctaaaaaaacttactatattaccacaaaataaataaagataaacaatattttaaaaacaaaattaaattttcatttcaattaagaccccttttggcattttgcttatttattctgccctttggttaacagcatcagcatcacattactattttatattgcatatatgtagcatttgcttccttaagttttcaacatatcatttatatttaaaggcagacactgagtcagtattaatagattaact

SEQ ID NO: 449532 - DNA, 449 bp, Homo Sapiens
  misc_feature (42)..(42): n is a, c, g, or t
aaagtttaaacaccttttatttgaagaaatattgcttctagnactttcctgaagccagaattgttctataaaagtatcatggaatattatacatgattaaaaaacagagtatgcttcctaataacttgaaatctttttacaaagcacattattcatgatcataaatatgtttgttctgtcatcccaccgatgatacacacatcaggcaagcagctaatttgaacatatgtacagagtctatgataaagatttaaagttaccaaaaagattcagctataacatattaaattttctttaaaagagtttaccataaacacttaaagaaaacataatttatctaagcacttgaattatctaaaaataagaagaaaacctctcttagggtaagcaaaaacacatcatcttggggagctgaataggagggtactgatgactcagtgaggtaatcc

SEQ ID NO: 449533 - DNA, 514 bp, Homo Sapiens
ttttaaggaataaggtgaatttttattaagtgaaaaaaatcaataacaatataggaatgatcacatctatacaaatacattgctacatttctacatataaaatgtataggaaaaagtctgaaagaatgcacaccaaattattctgtttttaggaaaagcagtaggattggtcagggcatggaatgtcggctaagtgaagtgagatttaaaatttttattctacatgattttctagtgttgggaatttttgacagtgagcatacatgcacttattacttgcataattctgaaaactattttaaaaacaacagaaaatatatgaaagtctattggtgtatacagcattaatagtagtgaaagtttaacagaaaagatctgaaaatctcccaaagttatatagaaacagatctagctgacacactgtgtacctagaaatgattttggatctcttcacagagacccctatcccaccaacctccaatcctcccaccatacattgatccctttctatctg

SEQ ID NO: 449534 - DNA, 801 bp, Homo Sapiens
gccacaaacattttatgaactggacacaaccgttagttttccaggatttaatatggtgcttttaagaagagagccaccggtctcagcttataattacattttcacaaattaatccaaaattttacgtatgaataaaaaggagtaaaacaatacataaaaaatgaaattgagaactgatttaatactaaagttctgaataaaggtgtgcactttatgattgattctatctttttgcacaagttggatactccagtttcccatcccaacatgttgttcgcaatgtgtgagaacgtgatgaaagacgatatccccgtttacacacaaattcaactgattcacctgttctcgaataaagcttctgtttggctgtccaccttaatgctatgttataattttccataatttctcgggatattacacacggatgtaagcattttggtggttctgaccattgtccatttctacatgttattcgcttgttacccttaagttgatacaagttctggcattgttactcaactgatgaagctggagcatttactgactacgggactgaagtaatgtcctcattgtcaataggtggagggggcccacattttcctgtagaatctttgcattgaggtggttccgtccagtttccatttaaacacatcacttcttcatccccaaacatttcataagggctcctacattgataacgtactctctcaccagatggatatttactcatctgtctcgacactatataagcattttgtactgtgggcggattcacacaggaggtgtctctgcatgttggcc

SEQ ID NO: 449535 - DNA, 1963 bp, Homo Sapiens
ttttgtagaagtggaccaacttcaaagctctggacaggagacacctgctccaggcccctgtgatcccagttctgttctcttgccctctggacctaagcgttcccactcgcagaaagagtaaggtggactgacttttcaatttgtgcacatgcctcttgttcaatggcctggtcaacatcaacaacccctccctctgatcatttccagttgattgtcatatccaggaaaaaaatggaacagtgcactcttctccctgttgacccatgtccacctattggttccccaaaatccacattctccctgggcccagatgactttgtctccctgggcccagattctttgtctctcttcaaccttcatctcaaattgtctctaagcactaccttccccagagcttgccaggttgggttttgagattagggtcaggtcatgggtatgtggagaatggtttggaggttgaggacaaccacaggtgtctcattgctgccatttctcctgaggacataatcacttggtcaccttggaccctgtcacttcctaaaattactcgttctgtcatgccatagaggtcagttttcctctttcttggcttctacccacaaacattcaccaatcatttattcgttcatttagcaaatatgcagcctccgcaagatgagctctcctgcagacaagcatggtctgaaacattctttgagcaatatttattgagtgcctactatgtgttaggtactgtgccaggcactgataagccagtggtaagggaaacacagctctaacctcacctcattctccaggttacaaaggccatgtgcccctttgaatctggcagagaaagtttcctcgttgtaagtatttgcatctacttcaagccagattcttctgcctctttctcctttccagacccctactctgtgcagtgctgaccacagctagagccaccgccccattgctcaaccagtatttatttccctaaacgacccttcctcatattcccttccctccacctctccttaccaagcacccaaaagaggatttagaactagcagggtggacatcatctggttgtttctacttttctctgcctagcacaaaattgggagaaaactggagcctccatccgcagtcacacgtgtacagatctggggatttggatgtaggctttttctaacttctctctcagaagcttctacagaaacccttccatctgtagcctcaagggcccacctccaagggaaggcttaggcaatgatcctgtttctaccaacactgcaccttatcccaggaacctgccctagacctccagagaccatattttctctccctccatttctacccagacctccaggcctccttctggaatcatagaaccgtacaattggaaggaattttagaggttttctagttggagttgtgtccaacagaattcattaacaccagcctgggcttgtttttcctcctccctctggacttttttcatcttttcctccacctcaaaaaatacttacacacagattcttcttgtacaggcatcaaaaccaactcctctgcccctaaggctgtgtccctgtggtctccagccacccctaccccagtcactcgccccttcctcatctctggaatttggccaggcagtcccagaagactctggagtgacctcctttgcctaaaaagcagacagataggcatgccccaggccctgagtgagcagaggaggactgtagggtgagagggaaagaaaatgaaggtgactttcatggaagtttcatttcttttccccgattgtaccaactgcatgtacttttggcctggctgcaaggagcaatattggtttactctcgtatccttaaaaagttacagaactgtgtcttaagagaattatttatagttactataactgaattgacaaatgtcaacttaactgataaattatatttggtaaaataaagaggacgtttattta

SEQ ID NO: 449536 - DNA, 518 bp, Homo Sapiens
  misc_feature (463)..(463): n is a, c, g, or t
cactgaagtatctaatttataaaatgtcacaatttgtgtcattgtaaagaggttgatctcaaccaggttgtaacaaaatttccacagcttattccaaaagaaaattttaatacaagagatcttaaaaaattaaacacatttgtttaaaaatcctattatgtaaaccttaacataagagggtagttaagataatactacaggtttcagggcgtttccacagacttctagaccttatgtacacacagactatcagactctagatatgtggcctgcttacccttaagggggtgcactgggagccgatcatggggcgccccctagtggggttaccatcgctcctccatttcaaaaaagactcgcttctctaaagaagtcggtgtcaggttgagttaagcgttctacctgacgggctaagccaggggattgaagagaaggccaacattctttcttagggatgagtccntggataataaaaattcccattaggctctacccccatccccttcactccgggaaat

SEQ ID NO: 449537 - DNA, 510 bp, Homo Sapiens
  misc_feature (476)..(476): n is a, c, g, or t
  misc_feature (493)..(493): n is a, c, g, or t
ttttttttcactgaagtatctaatttataaaatgtcacaatttgtgtcattgtaaagaggttgatctcaaccaggttgtaacaaaatttccacagcttattccaaaagaaaattttaatacaagagatcttaaaaaattaaacacatttgtttaaaaatcctattatgtaaaccttaacataagagggtagttaaggataatactacaagtttcaggggcgtttccacagacttctaggaccttatgtacacacaggactatcagactctaggatatgcgggcctgcttacccttaaggggggtgcactggggagccgttcatggggcgccccctaggtgggggtttaccatcggctcctccatttcaaaaaaggactcggtttcttctaaggaggtcgggtgttcagggtgaggtaaggcgtttcttacctggacgggctaaggccgggggtttgaaggaggagggccaactttnttcttaggggttgagtnccgggggtaattaaaat

SEQ ID NO: 449538 - DNA, 607 bp, Homo Sapiens
gcttataaatataatttattacctgtttaaaaattctttcttacattttgtacatgttggctgacagaataaatgcaggcaatttacaaaccaaggggactgcagggaaaatcaggattggcagccagggagagaaaagaggcacacccggagctggtatccctcacctccaccactcagcaaggcgccggacagatatccggagggcactctgcctctgccggggggtttttttagaaaaggaattgcatagaagatacagcaagagggaactccacaacaacaaaagtgttccatatcggaaaagccaaggttgtcatgttttgtttaaaaaagaaaagacgacaaagcacaaaacctcaatccgacctttctgcagttgaactgttccaaaggggacaagtaggtggatgacactgcctcttcaacacgactgctggggatttttctctgacaaacattggtgtcttctttacaaagagcaaagaggaaggtcaccaacttgcttcagctcaacattaaactcaacacatataacaccatgacatcacacacacacagtgatgttccctgcaactgggctcgatgcattatgtctggagggcga

SEQ ID NO: 449539 - DNA, 585 bp, Homo Sapiens
  misc_feature (51)..(51): n is a, c, g, or t
tgaaattgtaaaagtattattttgagaactgataaatatccgtattaagantgtaatcttcacaatttacgttcctctgctgtggctccagctggtccctctcttcggggtccctgacttcccataacaccacttcagtttgtaactcagtgttaattttattctgaagtagccatgcttggttggctgtgtgtgtccagttttccatgtactgagctgtttgaatagaattatgcaaagctacagaggacatcacaacagaagttattagtgcgaccaaggaaacaatagctaaaattattatgtctaaggctctacagacatgatgagtaagctcagttagaagaagtttcacaaaatgcaaagcaggtgtggcagcccaagcctcggacagattaacaggaatccatagcccagggatgcgacccaaaattatcaaagtagagacattatgtgtttgcaatgtgctatgattaatgcagtgacataactggcaagatttacaggtcaattggatattgtttacctggagctggtccttcttagttgccaaaaaagacataaggattaaaaagacaaaccata

SEQ ID NO: 449540 - DNA, 453 bp, Homo Sapiens
  misc_feature (59)..(96): n is a, c, g, or t
tactctcatgaaaaaggcctgaagggaccctttccccttataagtaatttaatccaatnnnnnnnnnnnnnnnnnnnnnnnnnnnnnnnnnnnnnntcagatgagaactcacttaaatccactcaatgtgtagatggtagagctgggactagcaacattgctgcagcccattgttggcctctctcttcactttatcattgcccaagaatgaggatatgcagtaaacagaattcaggcaagatacctctaagctgttttgaaccctctgatattttgtatttatgtgtttgtctgtctccccctactagaatgtaagctccatggggcagggacttcactgtattttgttcatagtgtatccccagagcctggaccagtgcttggcacataggagatggcaataaatgcttgtagaattaataaacaaggtgaaggagagagctaatgaaatga

SEQ ID NO: 449541 - DNA, 107 bp, Homo Sapiens
ttttttgtaaaaaataatttgtttgcattactagaaaatgattcttataaagtgatagttccatttatttattttttgccaggcgaaattttaaaggaataaaaggc

SEQ ID NO: 449542 - DNA, 469 bp, Homo Sapiens
  misc_feature (366)..(366): n is a, c, g, or t
atctttaacaaaggtgtgtttatttccatatattgctcattacatttttcttgccacagttttatctaaagccaggtcaaaatctttctctaaggtatttattaatagtgtatgttcttcagatataaaatccctctggtcaacatgcaacatttgaatatctattggcactgtacctctatgagatatttatgacatttgttaatagtgaacctcaacctcctgaccccacatccgaagttgggggcgatgtgggggaacatacacaaaattacaaccacattactggtcaagcactttataggctaaaatctattggactttaaaataggcattgtatgtgaattcagagttttaatgtatttngtgggatcaaagggaaaggggtcaaagggcttaaggctggaacacgggggggcactaaattaggctaataagggcagctagtggcccccgtttcttggcccca

SEQ ID NO: 449543 - DNA, 204 bp, Homo Sapiens
aacagtacaatgatacagagaatttattcaattcatacaagtaatttaccagatctaaacagtgaatagactgacctaaggggaaaaaaatccttacattgatagctaaatatcttctagcccccataaataatctgcaatcatttagtctaggaaaaaaacttcataaccatatgggtcatgcagacatttttatttatttac

SEQ ID NO: 449544 - DNA, 880 bp, Homo Sapiens
taattttttatattttgtttttattcaagagttactcacaggcagcactttaaaattaggctttttaaattaaaggccaaaactaaaaaagtttgcaaatatgacattactaaaagaatgatagccttaataatttaaactctaaaatgtccgtcctgtggagttaaggtctttatacacagaatgtgtaagatcgatatcatttaaaataaacaactgaaaaaccacagatggtgggtaaatttgtcaatgaagataaacatcagtttcagccttctagagtatgaaaaccggcaattaattaatcctgtgacagaatataaactgtacttcagaattttgactttaaagtctctttctccagcagcaaatcagcatatctatgttgaagttccttttctctttcttgttgtcgctgaacgtcttcttttagacactctagcctccggggaatagcagaatcttcatgtttcttgagttcttcaaaagtgcgtaactccaagtgagcctgttcaactttggtcccataagtcattcaactgtttcatgagccccatagcacgagactggtaacccccaagcaaaattttcatcttcttttccatctttgcagccctcttggcttctgtcgtcatgtgacccctgtttatctcgagcctcttttcaagtgattcaattctgtcctttttactagccagattggcccgtgtgtagcggctctgcccaggaagatataaaacttgactgtagcattcttcccacacctggttataagcttcacttgagagctctccatggctcattccttgtttaaccacttccatctcctgcaccaaaacatcctgggcctttttcagctcttctttggagaacttttccc

SEQ ID NO: 449545 - DNA, 374 bp, Homo Sapiens
  misc_feature (182)..(182): n is a, c, g, or t
aattttaaaaattctttatttaaaataaagtttaaaaataatgtgggtagtgtaaaatattaatacagaaatgtataaagttgaaagtttcatgtgatctacactgttcaaagaaagctgtgaatagacctttctatgcatttataaacataagcacacacattttaaaatgggttcccacngtgtacacttttctattaataacttgtttcacctaatgtatcatggccatttttccatacacaatgaatgtactttattcattttaacagatacgagatattcctatatggctgaaccacaccttaacctatcctttaatgacagacatttaggttttctattactttctaccatgtcatttttacgcttct

SEQ ID NO: 449546 - DNA, 294 bp, Homo Sapiens
tcaaattgacacattttattaaatataatgtgcaaaatataatgaagtaacttctatttaaaaaatggtacaaggcaggtattatttaaaatgctttagtaactcattttccataaaaagaaatctggcattataaaaatacataaaataatcatgatttatatcattaatttacgtaagatacttttttgcataaaacaaagttaaaaaatagtttaaaaaggtattcttatatgagcatcattcccagtataaaaattttcataactttttgtaattttggttcatctgtat

SEQ ID NO: 449547 - DNA, 847 bp, Homo Sapiens
cccttaagatctatatcaggacagattcaatagtaaagattattagcctaaagtttagtctccccttgaaattgtacatagaatgtttgtatataagccatatagtcatcatctattcactgtgtctatgatattgagaagcagcaaaattatgcaataatatagactttgtattttaagtgctagaaaatgagataaatgttatcagtttgggtgaaaaagtagagagttggggtaaaagctgggcattgcaaaaggattggtttaagaaatactgtctaagggttagctgtcaatggttggagaagaaggagatcctccttcctctcacccatacattttttcttctttcctctttttcaatgatcacagaccattgggtctctgcaaatccacattttcacagggaggaagtctgaagtaattggagcgacggagtctcctatggggcagaccagccatctgacggcaaagctcatctttcatagcttcgtgttccttacagacaagacgagagcagatctccttgttgacgatgtacatacgtcgtaaactggtgaagcataactgatgaatgcattgtttaaccggccgatgcacatagtagagccttgtgcaggtaaatttctcatcccagcactccaagtcatctgtggaaggtgcaatatcagccaaaacagccaaaactgtttcatctgtagcgggatcattcaccagattaggatcttctgtgaatgtttctggagtcgcttgagtcacatcgtcagaggtgatgatgaatgcagcaagaaacagcagcaccttgggtcccaagagcgacatatgtctatggtgttctgctcttcca

SEQ ID NO: 449548 - DNA, 756 bp, Homo Sapiens
  misc_feature (525)..(622): n is a, c, g, or t
tgatgaaattcaactctcaaattactttatttcattcctattgtattcacatgtgaaagcatgtgataaattgttgctgtgtcagatataggagagattcttttttattagatgggcattatttatggttttttctgtggaagagtatgggcattaaaatgtaaaggtttatgatgaaaatctaaagtggagagggccctgttagtttacttttcatattgagtgatgcatgaggtaggtgtttggagtaatattctgcatcatagagaaaagcatttttaattttactttaaattaaatgtaattaaattactagtgaatcattttactaattgtacttttatgctataaatgcagtacatttgaaaatttttagattatgtataagcttaattttataattaaacatttctttaacatgttaagactattgtgcattcaatgaagcgctattatgccactaactttaacctttttcaccttactcaaggagggaggtaaaagagagtaacaatatgttatttnnnnnnnnnnnnnnnnnnnnnnnnnnnnnnnnnnnnnnnnnnnnnnnnnnnnnnnnnnnnnnnnnnnnnnnnnnnnnnnnnnnnnnnnnnnnnnnnnnagattccacatagcaaaagcaagagtaagagaaaagaacaaatctggaggcatcacattacctgactttaaactatactataaagctttagtcatcgaaacagcatggtgctggtatacaaataggcacataga

SEQ ID NO: 449549 - DNA, 106 bp, Homo Sapiens
ttcctttcaaatcagcttaatcaaagtttattttcacaatgctacagaggtaagtccccaaactttacaatcctcatttgtttctctcaaaaagatctcttttttt

SEQ ID NO: 449550 - DNA, 2107 bp, Homo Sapiens
  misc_feature (20)..(20): n is a, c, g, or t
  misc_feature (33)..(33): n is a, c, g, or t
acccggcaactctagcccanaacgctcagaccngaaggtgttgaactctcttttcctcccttaacagggtgcccagaattcttaactgcctttgtttatcccagtaaaagtgagtcccttccacaatgagaagagctaacatttattcaatcaacaaatgctgagtgtccgccatggccagatactctttgacagtcgtcacagcacacagaacatgtgattagtaaacataatggtgcaggacatcagcctgctaatgttattcccaggtgtcatcaaatgagtgacaatttgtacaatgtttcattaaatgcctatttagaggataaccatagttgatgacacagaaaaaagccaaacccagaatgcaagaatcgtagccagcagagcacgtggaaacaacgtccaagttgcaggtagcagcttgcaggataaccacagttggcgacgctttcaggcagctgggagaattctcagttgtccattttatggttaaatggttttactaaggtctaaaaaattcatttctaactcctagacttatgtttccattactatataaagaatgagccaaacaaataaataacaaaatattcactatggaccccaaaatttcaaggcatgaagagagccccaaattctctgtgaactgcaaagagaaaccattagtacaggaatagatgaagaaattgtttttgagtataatataaacataaacaaatctcttaacagcacgagtgtcaacaaatgcttttgttgttgcaaaaacagtctcaaaaagagtggtgacaaggagactgacaaggagaaatgagctattttttcatctccaaaattgcacttcctggtccacggttcttagcactgcagatgttgcagaactgtgcagcagagttcatgctgggcatgggcaggcactccttgtggaacatgtgccggcaatggaagaccaccacgctgaagggcttagctgcatctgatggaagaataggggaaaggcacgactcacagatgttctcctcatcaacaagaacacctttcatttgagttcggtgcattttcttcagtaaggacaaagagtcagctacgagaatcttcttgcagccttcacgaagcagaatttgcaaattgtagtcttgcagaattttaaccaaggaatctctcaaattggggatctccattccttccttaatacggtgaatcagtagaattgggtcaacatgtgtgccaatgttgtttaacaagccagtaataaatggtggtttgtcaatggaatataaaatcaaatcttccccacagctctccatcatcttgctccttggcaaattcgattgctttatcaacatcatgtaattcctccataatcatcttcagggcacttcggctattacccattcggctcagaagataaactgtctcttctacaaagtttctctgttgacagatctcaagagccttttcaagtgggcaatgggtactgtctcggagaaagggaagtaagtttggtcgatcatattcagcataaagactgatctgtttttcatggtaacgctgccccttatggtggtctctcttgaaaagcttatgcaaatacacatgctgtagctctggtctgtcttccaattcttccactacctttttaattgaaattttatcttcattgtccaaaagcatgtcaacagctttctctgaatcaaaatccattaataaaacaattttatccttgatagaactgaaaagattatgcttgtggatcaactgaaaaacgtctttatgtcttaatgttaagtatatttccagagcattgccatagttcttatcataggtgtacaattctgccagggttttaagtaaagtcttgttctgactatctttcttcaaatgatcccgaactgcttgaactatgactgaattattatacagatctccaggccattctcggatcaatgtggcaaaaccctcataatcactctccgaaaattcatgtaagatcatttcatagatgagtggtttcagaactggatcacctcttggcaaataaggactaatagccttaagctgtccaatttctttaaatttataaacttcatattcccagagtgctccc

SEQ ID NO: 449551 - DNA, 510 bp, Homo Sapiens
  misc_feature (75)..(75): n is a, c, g, or t
  misc_feature (114)..(178): n is a, c, g, or t
  misc_feature (191)..(220): n is a, c, g, or t
tgaggtacagctacgggaggtacagcttttaaaaagagtaatccggccaggcaccatggctcacgcctgtaatcncagtacttgggagcctgaggcaggagaatggtgtgaacnnnnnnnnnnnnnnnnnnnnnnnnnnnnnnnnnnnnnnnnnnnnnnnnnnnnnnnnnnnnnnnnnagactctgtctcnnnnnnnnnnnnnnnnnnnnnnnnnnnnnngtcatagaggtttgttgaagggccctacagaagggaaattggagacttcttacaaaagagtagtggaagatttgtcttggggcttatactgtatagggaagaaagaaacctggtggagattggagattacaaggtcatggtttagtatatttctaaccttttcgtctgtagccaccttagtaagaaacacattttacattgtgacccagtaataaatgtatgtataactgagatagaaggttcataacacctttcttgtttgcagtccatgctgggattcctatttctta

SEQ ID NO: 449552 - DNA, 521 bp, Homo Sapiens
ttttttttcagttaaaatagtttaataaaagcaacaaaactgtgctaacgatgagaatcaaaaatgagatattaggtagacttataaaacaaagtatagttattttttgatttcaaataaaccatgtgcaaaattgtaaaatgccaatgtgtctgagaaaagcattaacagtccttttagcaatttatatataaagatgtttttaaagtgccacagcttaaggcattatattttaaagtttaataaacatctaatttcaacatctctccaagaacagacttcttctcaataagctataaactatttggttagggaatattgaaaatgcatgtataatttaaggagtaatatacttgttaatgctgagttattaggtgcaattcaaaagcatatgatttccatatcagggaccaactctcccgccccagggtacagtgtaatccacactgtatcatctcatctaaaaatctatacagcagctaccccatccactcagttcctctgcagttaggctattagct

SEQ ID NO: 449553 - DNA, 115 bp, Homo Sapiens
ctagctgttttccaaaatatatttgcaaatggacaaagtgggtgtggagaaggaccccccacacttgcctccccatacaacacccattctccccctgggtctttatttcatcttt

SEQ ID NO: 449554 - DNA, 865 bp, Homo Sapiens
  misc_feature (730)..(750): n is a, c, g, or t
ttttgcttatcttcatttcctcagcaaaaaagggaaataaaaatattgatctataaaataagccgatgataacacaatgccaaaaatagcttatgttaagtgcaaggggtgaagcttgaaagcaagctaaattgcaacaacatattgatttaacatttaaatacaaggacttggcaataaaataattcttggaaatatggcttctcatttttaggtttacttttggaaaaactactctatatacacatatccagttggtaacacttgacagtagcattatggggcatgatataactttggtacacattgcagatatggatgtttaatgtctgtaaatgatattccttcaccagttagacttctgtacatccaggtgaccagccacctggttctcaagtcatatacccaccagaatccctggagatcctctgccagagccatcacgagacagcaggcgaaagcaggctcactgaatccatattgtgtttcctctctcgggttctcctgggtgtccactgtcagttctccaaacgtggaaaaaaactgctccatttctttctgtagcatgtcatttctttatctcggcatcttcttttgctcgctcggcatttcgcattttgtatttctatcattgtgaactttttcctctcctgatccagttcatcatggaggctcatcatttctgtttccaaagtccagtttctgctgttctaagctacaaaggatgttnnnnnnnnnnnnnnnnnnnnnacgcaagagtaagagataaagtgattttattcacttgaaatgcaagagacatacaaatattttctaaactctttatgatgcttaggaaattggaataaagccctttcaatgattt

SEQ ID NO: 449555 - DNA, 939 bp, Homo Sapiens
ttttttttatatttgaaatgttttatttaatgctgaaaattttaccctaagggacagtaggatgtgtaaaaagaaaggaaaaggcacagtaattaagtcatccttagaaatgatgaggttttctttctttcaaataacttcactttaatgtaacttcaagcccaaacattctgggaggtaaacagtctcttggtacctacggggcccgagaggcaagtcaacctccttgaagaacggagcgctggagtctgagcacgccaaagactctctttaaagcagggtcttggaccagagaaccctgagcagctggaagacaaaagacttcctcaagtttcaggaggaaggtaccgtggacatccttgaaagaggaccccagagaaaaacttgtaggcagggctgggaagaagccatttctgagtctgattcaagacagtgacagagagcagctcgaggctcagggcaccacccgggctccctcgtgctccaccagaaccaccgccagccaactggtcagacggctcttgcctggctagtctgaggcctcagctggcgcgggcctggcgacactcttacagatgcctactagccaggcgggcatgctcatattttcagtggaaaggtacttgcaactgaagaaaatcctgaggaagctgacgccagaattcagaactcttagccttgaactttgtacaatgggttcttccaagtgaaatgcactcacgtcttaacagcagcaccgagcagccccggaaaatggactgagagggcctggcggtccacacgtgtcctacgtccctcccactaacgtgctttcccattcgtggggacgtggtcactatgggagcctgcccaagaggcacggctctacccaaagtgaaccagcaggctctggccgtattcaaatggggcgcagggtcagctttggggtttgggaactgc

SEQ ID NO: 449556 - DNA, 440 bp, Homo Sapiens
  misc_feature (423)..(423): n is a, c, g, or t
tacttagaaatgatgaggttttctttactttcataacttcactttaatgtaactatcaagcccaaacattctgggaggtaaacagtctcattggtacctacggggcccgagaggcaagtcaacctccttgaagaacggagcgctggagtctgagcacgccaaagactctctttaaagcagggtcttggaccagagaaccctgagcagctggaagacaaaagacttcctcaagtttcaggaggaaggtaccgtggacatccttgaaagaggaccccagagaaaaacttgtaggcagggctgggaagaagccatttctgagtctgattcaattttatcatcattatatctgcatccttgttttgtgacagtatatatagactttgagctctgacttttatcctccagagatgacttaagaatatnaaagactcgaccgcata

SEQ ID NO: 449557 - DNA, 1346 bp, Homo Sapiens
ggtccggattcttcgatgaggtggactcctcacactttcctatctttaactttgaaaaatcttcttgtaaacttaaagcctagaagtattccaaagcaagggttacagcagtctttattctcaggctcactgaattaaacccaggactaattccacagcacaggcacaagaagcctgttgtgtagtgtactctgccagtaccttggatttaggagctccatggggaactgactaaaccaggagagagaggatttggagctagtcagtcctggtaatctatgaaatgctcatttatacccaggtttcataagcttccaattctatagcaaacccaggctctgagtgttttagaatttcctaattcatgaagtgtttcttgtcttgatcccgtgaccaacagttgaaggttggtaaggacttttctacagtctgaacacaacctaaagccctctttcattgttcacacactaactcctactgccgacgaaccgaaaaataattaatgcagaggagattttatgtcttagccataactccagttgtacaactcaatcgccccattctcttttacggttcaaaaatgtactgctgaccttggggtttggtttttgtttgttttgctttttcctggttaggatttattttggggacttttgggtagtttaaactctttaacctttttccttggcgtgtatgaggaaagctaaaagctgttatcaacttcttattctacgatactaacacgggttttcagtgtttgttgtttttattattattattaatttgcgtgatgtgaataccctctcccatcaatattgtattatggtgctatatatggtaatgatcctttaatattgggaagggattttaaaaatactgtgattaaactgggtttcttcctttgattttcatattttaaataaagccacagtcatttatacaaaagaaaagcatctgtccctgggcaaatcttttgaggacagaggtcaaagtaaactgcataaggtttttacatcatttctgtatgtatttgatatatagatcaatatctgtacaaatttaatcttttattttctggtaactcgtgatcatgagaaagtgtttgaaactttctcatgaagtgtatatataatggcgtgaaaaaattcctttggaaaaaattatgtgtctttcatttttaccaaattgcaaatttcagcatggtgtgaacaagcttaaattatacttgtgtccaagatgaaaattatcactaatttgccctttctcccaaactaatgttcacgtcaacacacaacaaaaaaagggggggcgctaagaacccgggggccagttaacgcgtccacgtg

SEQ ID NO: 449558 - DNA, 642 bp, Homo Sapiens
  misc_feature (80)..(80): n is a, c, g, or t
  misc_feature (160)..(169): n is a, c, g, or t
  misc_feature (174)..(174): n is a, c, g, or t
  misc_feature (185)..(185): n is a, c, g, or t
  misc_feature (209)..(260): n is a, c, g, or t
  misc_feature (296)..(296): n is a, c, g, or t
  misc_feature (298)..(299): n is a, c, g, or t
  misc_feature (301)..(301): n is a, c, g, or t
  misc_feature (304)..(307): n is a, c, g, or t
  misc_feature (310)..(314): n is a, c, g, or t
  misc_feature (455)..(463): n is a, c, g, or t
accaaccccccttttttcttgtccccggggtttcttcttgggaacaaccactttttggccccggttgccctcctccccgnggggggccgcgggcccccccacaaagaagggttttagaaagaatttttttaaagggcccgaggggcgggccccccaaaannnnnnnnnngtgtntggggggtgtnttggggtcgccgggtgttttggtnnnnnnnnnnnnnnnnnnnnnnnnnnnnnnnnnnnnnnnnnnnnnnnnnnnntgtgtttttggggtgttgtgtgtttttggtggtttntnntntgnnnngtnnnnnttttttgcttgtaaattgtgctttaatttctgcaatcagatatgatgcagtgagatacaagtataaactttcattgtgcatccagaaaataaaaagcacaagtatacaggtttagctcaacagcttattcccttataaagnnnnnnnnngttttgaattaaagctagtttatcttcagtgtaaaaacttggaggtataaacaaactcaagatattatatacagtaaattaatttacatttccaaacttgcacagtacagcattttaaacaaagtaaatggtctcatttcagctctcactgttaagcataatccacatcccaatctccc

SEQ ID NO: 449559 - DNA, 419 bp, Homo Sapiens
ctaatttttgtatctaacagcagtctcagacatttgtcttttcaactcagttgagttgtagatatcaaatagaaatgtccagttttgcctcttttaagtactgtccagttgaaacctcctgactcatgtactactacacaaactagaaaatgcccatttatttttgttgattcaacactccagatacagattgatacatatatactaatcattttatttcatgtaaaagttttacatctagggtgcctatttatttttatagatgctttcatccagttataagcttattataactttgtaaatatttcagccaacagttgtaatgtttaaaatacttaccttcagaatgttatattttcatgtgaaatcaatttcttctaattcaaaaaaattttaagataaactgatttttaagttta

SEQ ID NO: 449560 - DNA, 942 bp, Homo Sapiens
  misc_feature (850)..(850): n is a, c, g, or t
  misc_feature (906)..(906): n is a, c, g, or t
  misc_feature (911)..(911): n is a, c, g, or t
  misc_feature (928)..(928): n is a, c, g, or t
ctgtttcttgaaaagttttatttggtgactatatacaatcataaatacacattcctctgaagactataaaagtcttctcctctaaacaattaacttttcattgaaaaaaaactttaagctgcacttgcaacctattttttaaatcatttgtgtaaagtgtaaattcaagtaatgtatagctacctctacacatgttattaatatgaatacatataatgtagttggcttggtaaatagtttttaaaactttgtagcctttgaattaagttttacttgaaaaacaaaacgctattctcactcacatttaccaaggacagaatcatctcttttaagcttttccattgcttcccaaagctccctgctttaggagaaaacaagaaactactttgggtccattcagcacaatcttcctcattctgctcaggacccagataggtgcccatgaaatgaaacaaatatagacataattagagcaaggaaatctcttcctggccttgtcaccagattcatatgagatcctttctagtcttttattctttagtcagatcaggtggtgttttgtttgatggcaaatctatgtcagtattaacgctcttggtttcacaatcacacaattttaagagtactcattcattgagcaaacataaaaatttaaaccttcttatgttgggattagttatataagtgtccatttccaacatcctcaaatgtctttaacccagctgcatatttatgggaataatgggattatgggtcctgggggaccaaatattgtttaaatttggatttgttgaggaacactaaataagggggaatcctcaccaggacacaaggcactttcatctcctcnggggggagatccccacaccctccctcctagggcagggggctggggtcggactgccnttttnccggggggttttcagtnccttcagcccgggg

SEQ ID NO: 449561 - DNA, 1009 bp, Homo Sapiens
  misc_feature (136)..(176): n is a, c, g, or t
  misc_feature (509)..(523): n is a, c, g, or t
gggtgatctagaggatctcccagctactcaggaggctatgtatgttgtttagcaggagtagttgaaaggtaatgagtatattgattagctgtcttggaaggagaggattggctttctaaacaatcactgatacagnnnnnnnnnnnnnnnnnnnnnnnnnnnnnnnnnnnnnnnnnatcatccatactgaattgagagatatgctccatgtttaaaaatatttgtaataagttcatctacttgacactgaatcttttttattcttactctaaaattattctggctttacattcagtttaagtggttaagtgaaacagtttttagggtgcaaaaattattttcccactgtttttctcatgataatttgagtctcctgagctataatttctgaaggatttttactactttggcattatgtaatctgatctctgtcacaatgatattaaataagaactatctcactttcatatgtttgcttcataaaaggatatggaatgtacacatcagcnnnnnnnnnnnnnnnaaactagcatcaacctataacttggtataaacttcccaagtatttagagaatagtgctggtgaaaatttaaataggataggcatatagaaattatgacttgtattgagtgatgtcctttcaacctaggactagtgacaaccttcattttttcagagctgaagaaaaaaccgtgaatttaagatcatatttattggtgcatgtaagccattatcctgtcttaatgaaccgattaatgctgttgattgttgaaatgtgaaatgtagtcactgttgaccttgtaaatatctgccagagatgaaaaaatattttaagttattgtaaataaagatgtataaaattcagtatcagtctgcaatgcagaaacatatcttagatgttaaaatactgtgtttgagagatgtgtaatttacccttagatgtatctagttacattaagagtgtcaatttttttgtacagtataaaaatacagctctatttggctttt

SEQ ID NO: 449562 - DNA, 681 bp, Homo Sapiens
ggcattcagagagcacgtttatttacaaagcgctttacaaacatcagcttatgcctccccacagccccctgcgaggtaggtcagtagtcatatctacagtttacagatggggaaattgaggcacggaatgggggtgtggcctgccccattttaaagagaccttcccacccacccaaccaaaaataacaatagatgaaacaaaaaggcactggtcctacctcttcctctgaactccagagggtatgaccagccctgctctaacactgcccctccccacaacgggcagcctgaccaggagccacaggggcctcaatcctccaggggctgttgttcagccttgtcagattgtcactgtgcccaagctgtagcatggactacggcctagtgaggcctgcaaagattataagcgaagaggggaggcgaggtgacttcattctgcaacagtgggtcaggcagggaaggagccccccatggggcacagcatgtaattaggcagatcctggttcagggatagctcagagacacagtatcagggaacgcaagtggggagggatatgtgacgccaacacatatctcaggggcttgcagggggcacatggggaggagggcgctgcagttcccctggggaggacagtcagtgtgccccgactggctcattcagaattgagacctgcttgccca

SEQ ID NO: 449563 - DNA, 1572 bp, Homo Sapiens
  misc_feature (1296)..(1296): n is a, c, g, or t
  misc_feature (1435)..(1435): n is a, c, g, or t
  misc_feature (1448)..(1448): n is a, c, g, or t
  misc_feature (1526)..(1526): n is a, c, g, or t
  misc_feature (1544)..(1544): n is a, c, g, or t
  misc_feature (1550)..(1550): n is a, c, g, or t
cgtgaccctgcacccgctgcagagaccacgcccgacttctggcggctggtctacgattacgggtgtacctccatcgtcatgctcaaccagctgaaccagtccaactccgcctggccctgcctgcagtactggccagaagccaggccggcagcaatatggcctcatggaggtggagtttatgtcgggcacagctgatgaagacttagtggctcgagtcttccgggtgcagaacatctctcggttgcaggaggggcacctgctggtgcggcacttccagttcctgcgctggtctgcataccgggacacacctgactccaagaaggccttcttgcacctgctggctgaggtggacaagtggcaggccgagagtggggatgggcgcaccatcgtgcactgcctaaacgggggaggacgcagcggcaccttctgcgcctgcgccacggtcctggagatgatccgctgccacaacttggtggacgttttctttgctgccaaaaccctacggaactacaaacccaacatggtggagaccatggatcagtaccacttttgctacgatgtggccctggagtacttggaggggctggagtcaagatagcggggccctggcctggggcacccactgcacactcagggccagacccaccatcctggactggcgaggaagatcagtgcctcctgctctgcccaaacacactcccatggggcaagcactggagtggatgctgggctatcttgctcccccttccactgtgggcagggcctttcgcttgtcccatgggcgggtggtgggccaaggaggagcttagcaagtctgcagcccagccccacctccatagggtcctgcaggcctgtgctgagaggcctggtgctgcctggcagagtgacaaaggctcaggacggctggctcttgggggactcaggccaagcccctggcaccatcctggcttttggcaggatgagtgaggccctgcagagagcatcccaaggcaaggttcccactcagcctgccccctctgcatgtgggtagaggatgtactgggacttggcatttaggattccatctggcccagcccctgaaggtcctggggaagcaggtctcaattctgaatagccagtggggcacactgactgtcctccccaggggaactgcagcgccctcctccccactgccccctgcagcccctgagatattttgctcactatccctccccacttgcttcccctgatatgtgctctgagcttccctgaaccaggatctgcctattactgctgtgcccccatgggggggctccnttccctgcctgacccactgttgcagaatgaagtcacctcgcccccctcttccttttaatcttcaggccctcactggcctgtcctgctcagcctgggcccagtgacaatctgccaggctgaaacacagccccctgggggnttgagccccctgntggctccctggtcaggctgcccgtttgtgggggaggggccattgttaaaaacaagggctggtcatacccctctggganttccaaaggaaaaggtangaccangggccttttttgcttcctttgg

SEQ ID NO: 449564 - DNA, 697 bp, Homo Sapiens
  misc_feature (22)..(22): n is a, c, g, or t
  misc_feature (45)..(45): n is a, c, g, or t
gaatgtcataaaatattaaggntactttctttacaaaagctgtgntgacacatatgaagtttctaaacttttaacaggactggaaaaccaatgcagaaatctgctcagtagacaacttaaaatctaaacccaaacatattttgatagatacaatatgcaaaatctaactttacaacaggaatagtactaattccttgtcattaacaccttactagtacattaatacctttacaaacagcatcatataatagcataatatttcatcttactcctccatccaggatcttttgtgagaggcactaataaagaacactagttttggcgacgctgtatcaaacatacacatagtataatggtctattttactatgttcacaaaacatcatttataaagaaatttttatgaattcaaaaataggttgttagtaacatgattacctttaaagtatggattttgattttcattcacaatattaattcattaatcttaaacagtagtttcatctacaaaatgttctacagctttttcctttttgaaaaggaataaaggcagttaagatactcataacttctagttaaacaacatcaattttgtttcacagtattaattagtagagaacattttcaattaaagtgatatacaatttacaaaaatagaatgatttatatattgcaaaacattgtcctccattatgaag

SEQ ID NO: 449565 - DNA, 793 bp, Homo Sapiens
aacactaagggagcatttgccgttatgtcaaacaggaatcatactcttgtgtgaacagtaatagccattcgcaagccctctgtgtcttgtttatagaacatagttcagtgattaacgtttccttccacttaaggcgggcatatggcaaagctagggactatcagaaagtggtttcttttctcttcttttcttaaaccatagactattgatccaaaagtattcgtgatggattttcatggccgatgttcactcaacttaaactccatgaaactgtttccagtgctcatatttacgctgaagtacaatgaggagccacttttgaagaagtattagaatggtacttttaaacaaatcttcacgtgtttcaataaaaacaacaacaacaaaaaactcagaagctattggtggcacagagagcaaatgaagggttgctatttttaagaggtcttcttgtgagtcagcttggtttcgcagtgtctagcaacttaacaccaatcagcaatgtagtcaaaatctctgaacatttcctgctcctcttccgaaagtatccttggttctcgaggtggagtcagaataggtgcttctgaggtaaattcatcatcaaaattactaacatcttctcgtcctcttatggtaggtataaatggtggctttacttttttgtccatcagagcgctccaatcaattagccggaaaaatgggtgctttttacatcctctgcatctttctcgctagccccaaggcgccgttcaggatttcttcttaacagccttctcattatagaaatggcctc

SEQ ID NO: 449566 - DNA, 367 bp, Homo Sapiens
  misc_feature (195)..(195): n is a, c, g, or t
  misc_feature (323)..(323): n is a, c, g, or t
  misc_feature (349)..(349): n is a, c, g, or t
atgcttaagaaatatttttactttgaaacactttaagcaaacagttaaaaagtacccaccacactaccctgttaaaatcttaacattgtgatgcctctgcatcaatttttagaaaaacaaagaaaacacaactgaaggccccatgtaccctccccaaatccatcaggtctcctgccttaggaaggcaggaatggngacttgcacacatcgttccaatacatgattttatactcatttcatattatttgaatccacaggaaaataggattactgtggcaaaacaatgacactttctatatgtccacaagggttacatgctaggncactattctagggcttttacatggcnttactttcattggaccca

SEQ ID NO: 449567 - DNA, 813 bp, Homo Sapiens
  misc_feature (572)..(572): n is a, c, g, or t
  misc_feature (616)..(616): n is a, c, g, or t
  misc_feature (639)..(639): n is a, c, g, or t
  misc_feature (664)..(664): n is a, c, g, or t
atgaaaatgttaatattttgaatactttatttcatctttcataatgggcagaaacatactagcatttaataatatttcagcttttcttttcaaaaagaaacaccacaaaataggtcactgagaactttttgctgccaagatgaaaatgattatttgtcacacgaatttaataagttttagaagaaaatatatatatttccttgatctatttccttctgaatttaaaccagcatgtaaagattataaaaaatagtctatttacatggcatagtatacctcagtgatatataaacaaggccataataaagcacagacacatccgactcctacggacacagctgagcagagtccacagacacaagagctaccgccgccctactgcacgttgtaggaactggcgaaatcctagaggaaatccaacacagaaaattcaatgataatattggccaaatttgcctgaaatgtcaacaattttataaaactattaaggtatgtataactaaatccatgaaattataaaaataacattggtacgtctgtgagagggtgtgttccgggtagaggtggaagantacgctgaagaggacgcctcctgcctgctgcggctatgtcatcnctgaggcctcgtcccatcttccngtgaggtcataccactgggtcgcanctttggcaagttcttcagatgccagagcaaccaatactttgccaaggagccctttgtctttggacaggaagccgccactgttcttcacggcaacgtcgagcgttctcctctgcacttctggtaacgaaacactgaaatcaaagctttga

SEQ ID NO: 449568 - DNA, 251 bp, Homo Sapiens
ggcccgtccccttaggtgcactaagggaagctaaaagcagactgaggggtgcctgtaaccccaagaagatgtctgggagcagacccagagaccctcgcagaaaagtgtcacagagcagcacagactgagtctgatagaaactctctatacaaatagcacaccttgtcccagctaaaaccctgggccctgggaggacaagacatccctcctctaacccctcgtcactagcccatttgtaaaaaccttgacag

SEQ ID NO: 449569 - DNA, 844 bp, Homo Sapiens
aaattattatagagattatattttaatgttttaaatgtatttgatacattacaaaattattttagttacaagcatatcattaaagctattctttattattacaaaatgcttattacactgctattcttgacaacaggcaaaatacttaccctcactgaagtatgtggagtaccatttttttggaaaccatgtcaagcataatggcaatatatcaggttcaatcttcctatagatctgctcaatatttatctaaaccttagcttctattcttttcacatgttattagttatattttcacttaaaaaattggaggctgaaggggtaagcaaacaaacttttgaagtagacaaagctcatctttaatcaacagaatttagagtccagtctttccaaatctgtttttaacgacagaaacttctccctcccctgccccattttgtcctccccattaaatggtactgtgtcaataaaattcccaagcgacctctttaaatcagcgttctttccgatgctggctaccacagtcatggaaaagggagatgtgttggacaggcctgtcattacaggtagtagttggtggtacatccagtctgtatttcttacacaaaattacatctaaatatttgacatgaggccatttgctatcataagccatcactaggaacttctaggtctgtctcactcgatggaggctacaatgttgttaggtgctatgaccacaatgaatacaacagacagcctctcagctgtgctgcaaagtatttataaccaaaagaccatatctcaaattaaatcatagtagcgaatgacataccatttacatattacaatctgagcctctgaa

SEQ ID NO: 449570 - DNA, 661 bp, Homo Sapiens
cagaatgtggtgcatcattgccatcatgagtaatcacttgctgctcctacttctgagaccaagactcttttgtcatattctttagcaataggacgggtaaagactggatttaattgctgttcagagtataaaaactcaattgattccaacatatctgaatgtgcagtaaagtcttaaaagtcaaccgttaatcattaagtcttttgcctctaaagtcttttgcctctgaagaggtttattacatgagttgattttcatattttcattttggtggggttttcctgttgttgggcaaggtggggtcacaggacatgggactagtaagcattttactgtttactatatttgtctttttataaacagtatctcccaaaatgtgattagaaggctaccaagcctgtatttggacatttaattgtgtgctttatataatgtaactactaacagtatttggactgcctgttcattcctggagacaaaaatgaaaatctgtcagttcaagttcttgggtaacatcaagtcattagaatttatttaaagcttatcatgatttgataagacatccattgcatgcagctgttttagctcagtgcaaaacactgaaattgtgatttttagactgtttttgagacatttggatggaaataaatgtataaatgtt

SEQ ID NO: 449571 - DNA, 1385 bp, Homo Sapiens
atttggaggaaaaagacatttaattttatatttgctctagcccttaatcaatgcataacaacaaaaacatttttaagcacatggaaatgagcctactaacctgatttttggagcccaaattctccactctattttgatctatgtgcaaaaagtattggtacttttcaatttatacatttgttagtatcttgtggctggcttcatagtataagactcactcttaagcctactatagagcctacagcactatcagaagttttcaattaatagctatggatcagaaaatcctgcgatcagtttctcataccataaaatcctaggcttcttttaccattgatttcacctttcgagcacagtcactgcatggcaaatgtatgaaacagacgtttacagcaaataagtaccagtatgtacaggaagctgccagttaagacagacccggaaaacaaactcacctagctgctatagaaacctttgcatagttgttactccgttttaataggagttatgttcttgtaaaatgtgcctcacttttactccactttttaaaaagtgtttttaaactgtacttcagaagcactctgaaaactcagatctaggggtggttaggtgaagtagagtagaatctgagtgccatattgcccctgaatgggcacaaatctgagtgttacaaatgcaccatagcacactgtaaccaaatttgtaaacagctgtggagtttctatgcccacatttagtgatgttaccatagagactggggtgtattaacggcttcagggtatacatgaatcacttaaaatatgaatggtttttaactatactgaggtaaagagaagttgccacttaattacatacagttaccaatgaagatttttattcaagcttaaagtaaaaagtaattttagttaagaaaaatgaagtaccagataaactgtaacatatattttaacttagaagtatcaaaacaggaattttttgattctctaagtggtggtctctgcaaaatggagcttgaagaaatcttttacataccaatttgataagagtctgctgaccacgatctgtcattttctttactatgggcttctgggagaatgcatgctattttaaggccaaatgtgtttttctttcttctcccctttccctgacttttccctttctcccatccccgaccacctaccccacaatggaagaatttttgacatccaagccctcttctctttgtggattctggagtctattcatgatcataattatattatagacttggctacacctaaaggggaacttagtacaagactttttcttcaccagaatcttattttgggggtatccccattctcattccaacagctccctgtgtgaaagtagggtacgagctcgat

SEQ ID NO: 449572 - DNA, 1477 bp, Homo Sapiens
  misc_feature (120)..(150): n is a, c, g, or t
  misc_feature (168)..(256): n is a, c, g, or t
  misc_feature (654)..(674): n is a, c, g, or t
caaatgtctctagaaagaaattttaagaaagcttaattaatagtaaaaatgcctttcctgaaataatcttggaaaattttttaaatgtcaaaatgatgagtcatgctaatacattgaggnnnnnnnnnnnnnnnnnnnnnnnnnnnnnnnagacagagtttcgctctnnnnnnnnnnnnnnnnnnnnnnnnnnnnnnnnnnnnnnnnnnnnnnnnnnnnnnnnnnnnnnnnnnnnnnnnnnnnnnnnnnnnnnnnnattaagggttttgtcagacaattgtcacacgaagaatagtgtcacttatctgctcttgacacacagaactggcctggcatatagctttccagattttactcaaacttggtactccagtttgaaaatttaaattttgactgctgattagctggaaagcctagttttaatggaaagaaagtttgcttttaaaactgaaagtagtttctttttgctaacaaatctaacttcatacataattggccatattagtaaaacacctcatgatagcagtgtatatatagtcttgtttgtagttggaagtcatcttttaggagttattctcaaatatatataatagctacccatgcatcattattaaaatccccaaattcaaaaaacctctgatatatatatataannnnnnnnnnnnnnnnnnnnnggccaactgagattgaaatccaagtgctggtttctagttctgaacatcaactaaagagttttggaaatgacagcaatttataacaagttcatattgacttcctctctatggcaggaagacattctgtgctgttttgaacagattaaagatttgtgtagtttgtgggaaattgacgtttttgtttaaattccacccgcgtttgtcttttcctaccacctgtggccaggtgctcgctggccatcacagttgcgattccatgagtagctgctttatgactgctttttgtactatctggatgtgcccagagttacttctgtacaagctctgtatctatgtccgttgagaacattattttaacaagaagaacaccaacagtagcatgaaatataatactgttttataattctaaagctgctgttaatttatgaagtacataataatctaatgtaaactgcagaagtcagagcaagtgcctacattttgttatttttggcattactacagagccatgtacaatagaaagcaatgcaagacttgtaaactctcaccacttcttgtaatatcaaatgttccccctcaggttattttgcttatggtacccatgagttgcctctctctgtacatagataaattgttccaatattttcctttgatgtttggaactacagatagtcaagggctggaaattttagttttcaatataagcttccagcttagcaattacctctagtccaagacaatatttgattcctagttctgtttggggcaaattttcatttatctaaataaaatgcaatctaatt

SEQ ID NO: 449573 - DNA, 590 bp, Homo Sapiens
ttttttttgcttcttcacatccactgcggagttgtaactggagacatatttccacccacaaaggctccagatgttaaaacgtttcccaacatcgacttaatacagtgacggcaacacctccctcccgcccctcccagtagggttgggattgtactgtattccctactggtttacccttcccccctgtaaagggtaacattttccctgggtgcagaggctcccttatagtctccaagactgaaggacccctaattttgggactgcagcttaagtgtattagattaaacaccataaaaagctgcaagacgctcttttaagggaagaggaaactggtcagagaaacgcctccaattttcatcgccaacttgatttttaaatccatgaaggatcttacagaacatgtctctgagatcatcttttgggttaatccatgatgcaacggcatcacaaaaaaatataaaatcttggattacgccactgggattcacactgatcatggtacatattccacggaatgctgaatcctttttctcattgtctctgatgtatctcagagaagtgcaccaggggtctataacctgctgtatcaa

SEQ ID NO: 449574 - DNA, 828 bp, Homo Sapiens
gtctttttcatcttccaaaagaggtccacattccctggttcatggccccttctatcttcaaagccagtgatggcagccaaacttttccatagcatattgctctgacactcttctgtttctcccttcaacatttaaagggaccttgtgattacacaggacccacctagataacccaggaaaatctccctattttaaatttagctaattagccactttaatatcatctacaaccttaatctctctttgctatgtaacctaacatattcacaagttccatggaatagaatatggacatctgaagaggggaggggagcagatttttctgtctaccacatggctacaacatattctaatgaaaaagcacagatccaggaagcagttctagtttgagtcctacaactagccaaaaatagtaaattggacaagtcccctaaaatttcaattatttctggtgaaatgaggaggtggttctagctgatctctagggccctttccaactcaaattcccttgattctgtgaatatagtacatctaattataccttagagttaaaagagattaaagcctaattcattaccctaaaaacaaaaattcaggagaaagcctagcagtgttatggaaacacggaggagggtcattattaatcctctctgggtgtctataggggcttcatggaggaggtgagatctgagcttatacaacccctgcagtaaggacactgatattctgagcatgggaaccagaggttgagggcacaggacatgaagggcaaaaccttataggggcacaagcatgtagagaatagtgagaaatcactgtgggacgagc

SEQ ID NO: 449575 - DNA, 1157 bp, Homo Sapiens
tacgttttttgaaattttagaaaatgagatattcaataaaattctctattttaaagtatacagttcattggcttgtagtatattcacaaggttgtgcaactgtcatcactatctaattctagaacacgtccatcacttccaaaaagaaagcctgtatcctgttagcaggcactccccattcgtctcttcctgccctgataaccaccagtctactttctgtgtctatggactggcctattctgggtatttcacagataccttagcattcaattttacaccaatctgatatattttaattaaatataggaacaattcacacttacatcttcagatttgagcatttcagctctttccacatacactagctggcaaacgtcatcttctattgagttgaactggcggccattgcatgtcatataaaaactatccgcatcagcctgtgcacgaaactttatcagcaccatatattggttgggagtagagtctctgataattttcatttgttcaattacttcgttaaatggggcaacaaacttcataaggtcatgactggtcattgcagcagggactgtgagaatacacagcatggcactgcgccgcacatcttcttttaaggaggtcatcttatttgtcttatataggtgcataataccatgaactatttcaactgatggatttccactgaagaatgaaatctggtctggaagctgtttggacggagaatctggggcagcgtttatgcattccttactgtgatctttacttctttgcgcagtgggggaggcttctgaagacttcctttcttccactgtagtttttagttcatctgggttggacttcatggtctcaatgatcacatctgtcatttctcgacggccgagatgctgatggataatcgctactttctctcctggtgacttgccttctaaacaggctacagctgaggctagtgtcgtcttttttatctcctcatcagacatttccccggctctccgtgtcttcctgggcaacagccctcgccgcgggcttttcccgggccagtgctttgggaagggaagccctccgggcccagacccggctacagggaatgcggcgaggccgcgggactcacccgcggcgctgaagccgaaatcccgggaattccggaccggtaccag

SEQ ID NO: 449576 - DNA, 908 bp, Homo Sapiens
gcgtttcacatacactagctgggcaaacgtcatcttctatgagttgaactgcgcccattgcatgtcatagtaaacctatcggcatcagccggtgcacgaaactttatcagcaccatatattggttgggagtagagtcttctgataatgtttcatttgttcaattaccttcgttaaatggggcaacaaacttcataaggtcatgactggtcattgcagcagggactgtgagaatacacagcatggcactgcgccgcacatcttcttttaaggaggtcatcttatttgtcttatataggtgcataataccatgaactatttcaactgatggatttccactgaagaatgaaatctggtctggaagctgtttggacggagaatctggggcagcgtttatgcattccttactgtgatctttacttctttgcgcagtgggggaggcttctgaagacttcctttcttccactgtagtttttagttcatctgggttggacttcatggtctcaatgatcacatctgtcatttctcgacggccgagatgctgatggataatcgctactttctctcctggtgacttgccttctaaacaggctacagctgaggctagtgtcgtcttttttatctcctcatcagacatttccccggccgcggcgctgaagccgaagccggcggggacaggcgagtgttccgcgagctccaatcggataacaaccagtgacacactcatagggcaggcgctggccggcgcgggccccggcgggctcaggcgaggctggaaggcgagccgagaggccgagcggcccggggccggcagcgccgccaccacctcaatgcagttgccgccgcctcagcagcagcagctcctcgaacagccctcggagccacaacaacctccacttccccctccgct

SEQ ID NO: 449577 - DNA, 534 bp, Homo Sapiens
  misc_feature (120)..(144): n is a, c, g, or t
ttttttgtacatcatattttttatagaagtgattatatcacaaagaaaaatcctgccaaacaactacaaatcaagaatctgtgggcaaaaagctcaattcatacaatgtaaacacattgnnnnnnnnnnnnnnnnnnnnnnnnnggctgttgatacatcaccttgaaaaattaacacaactaaattaagggctatagaaaatatgttcagcttatatatcatacacgtcatttaacttgaattttacaatttttaaactaatagaattcagatttattacttgaaataatggtatacccagctgttcttcataatggcaagcatattccatatacaatacaatttatttagcatagttttatactcttaagtaaaatatgttagtgattaaaagcataaaggaataaatatgccaagcgcaaaatataataatggaatagacttatgtaggtattaaaatactgcataatgacaaatactgaattaatacaactttcctattattcataatcataatatatgaagagaaaactg

SEQ ID NO: 449578 - DNA, 588 bp, Homo Sapiens
  misc_feature (378)..(378): n is a, c, g, or t
atctgctaaattccagagagatttttattccacaattagattttaacatcaataaaatcttagatataacaatacagatgaaggaacaatttaatttgcattgaaataaatattagacatacaaagcatatacagtgaaaaagggtcacaataaattacaagtagagacattatttccctcaatcaccaaagaaagcccttgatactttccaatttcacaccatcaaatttatcattcttgctgatttaagcagaacacaaaacaaatatggatcccagggcttactttcacaggtaccagcatggataatttactatccgtgatccaatttggaaatcagtagggaccagtaaatcactggcataaaagaaagagtngaatgaggtcctttttccttagtggtcagcaggctatggattatttatgtttattagattttcttgaaaggacttcacattttctcaaatatgcaggagaactgtatttcccctctgagccctacattagcatttatgtgctttggtcttgaatacaggggaatgaatttttcaatttattttataaatttatatagtctggatagtatt

SEQ ID NO: 449579 - DNA, 392 bp, Homo Sapiens
aagtaaatgattaggcgaggattttgaagtgacacacagacctacttggaatggacaatgacagtgaacacctatgtgacagctagtatcttgatataaagaacctattttagcatggcccatgggtctgtcggaagaaaaaaatgaatactaaccagtgaccattcaaccttaagaaatggggagagggagaagaggttgaaaatggtcacataaagcataatgaaatgaaaagaatgctttaggtggggacaacgggagtagaagtgttctgatgctactctatgtcatttgtttttacagaaatatcttgtgaagtcagggagtattcctttatcagcaaaaacttcacaattggtgttccagctgtggctgaccagctaaatagtttg

SEQ ID NO: 449580 - DNA, 2089 bp, Homo Sapiens
  misc_feature (796)..(865): n is a, c, g, or t
ttctatgtgttctcaggtgtgtcctacagccgcgctgcgcactgtaaccctgtcggcccgcgcgtgccaccaccgtgctcattgcttccgaccgcgacgctctcaacacgatggtgcgccatctcccccctctcgcggcgcgcaacccaaatttctgtctgtgagacataagaccatgcccgcccctcgcgcgccgcgccactcacatgaccacacaccgcggtgcgcgtcgcccaaccccgcctgtcctaaatatacctggctgcgtgggccgggcccgcggcagcattcacacgcctcctcaggtggcggccggcgctcattatcagtggggccttcggagacgcggcgaagccccgacattcagagtgtgttctgctggcgcacgccgcgcatatgtgcgtggtgtttgtttctcctgccgcgggcgacgcgcgcctctttttgttcgtgggcggcggcggagagagcacgaggcgccgttgtctgtgtttgggagctccggcgccacgtgctgtctcctcctctggcgcacacgcgcttcaccgtcccccgcttcctctctcctcaccgcccgcacgagggcggggccgcgcccgccgcgaaccagaaggcggtggcggggaagaactttcctgggcgggcgccggggggggccgcgcacccagaaccactctccttccgcggcgagcggccgcgcgtactccgggggtgcgccccggcgccactgatcggtaccctctgcgccgtgtttgcgtcctcgttctcctttctttctccgtatgtgttagtgccnnnnnnnnnnnnnnnnnnnnnnnnnnnnnnnnnnnnnnnnnnnnnnnnnnnnnnnnnnnnnnnnnnnnnncaacaaacttctatttttattgacaggagtccaaaatgaatacaaaaaaagcttcctttgcatgttatacttactttccttaaaaagctcctgatagagtcaagtagactgaaaactaaggatgtagttcagcttttagagtgaaccttttttaaaaaaggtttaataacataagccaccagtatcagaaaacatacagtcccactatcacttttagagctagaacttatcaaaagaattagatcctgcattgatctgctaagatagaggtttagaaatggtttaagccattaaaagccatttttataatctgtctgataactctgggcaattaagaaaagggaaaattccaaaacgtagccctctatatcatgtggaatgtgagagaatgccaacttatgaccaagataagtaaaaataaaagtttaaatctatgagtggagctgttgtatcactgcaaaatgtcaacaacagagcttatcaagagattatcaacttgagcgatgttacttaaacttgagcgatgttacttaaaacatatttgtggtgtttgctaaaactaaagctgaacaaagaaaagtcgctcatttacagactgtgtttcctgcatctttacttttactgggaccatagactgatcagataatacatagcccacacttctggacagttataataacaaaggatttattatcatttgcagatgaaataaatgtaccatcccctacttgaaaggtttcaataagccttaacatttttcaggttgtaccaaggcaccgccactgcctagttatattatgcacccatttctagagtaaaaaaactacacctccctcaacatcagttctgtactgtttctggtttatgatacacttccaaaacagcaaaaaattgcaaatatgtgcaaacactgtggtccattcagagtactgcttagtcatcatcttcttcttcctcctcttcttcctcaaagctatcttcaaagccctcactgtcctcctggtcttcatccccctctattgctgtatcccactgtgggtgattttctggcacaggcttagcctcatgaacttccaacttcaatatggcatggatattaatgtctgctccttcctatctgcaatgtaaagccaccaccattcttgtttttcctcaggaaagtaaaggctatacacaggatgtgttatttttgatttggtttccaatagagctctctcttttcgc

SEQ ID NO: 449581 - DNA, 497 bp, Homo Sapiens
gggaccatcctttttacttttgctaagccttatttaaattttgtataccgtggaatatgtagaatttgtcaaatcattttagtgctgaaggtttttgatttcttgtttttgtttctgttgttgcagtttctttggtggcttgttttgtattgtaagatggcacttgctgatataaatactaaggcactaagagaaaatacagataagtatttataagttgcttgggaaccatagcagaattttttgtttggttttgtaagagaaaaaaaattaccaataaataactgatctagcacccaaactctcttgggggatgtcttagtatcttcacgctataaaattgttcatctaagcacagcatcatcttatggccttatggattgtaaatcttctagtgaggctataaactccactctgaaaacaaaggcataacttaaccgactgctcagttgtccttcgttgtaaaatgaattggctttgggaaaaaggaaaaaaac

SEQ ID NO: 449582 - DNA, 741 bp, Homo Sapiens
  misc_feature (31)..(31): n is a, c, g, or t
  misc_feature (267)..(310): n is a, c, g, or t
tatgatacattatttaaggaatactgcatancagatctcagtaaatataaagaaaataagtttggatttaggtggcgagtagaaaaagaagtaatttcaggaaaaggtccattcttctgtggaaataaatattgtgataaaaaagaaggcttaaagagttgggaagttaattttggttatattgagcatggtgagaagagaaatgcacttgttaaattaaggttatgcccagaatgttccattaaattaaatttccatcacaggagnnnnnnnnnnnnnnnnnnnnnnnnnnnnnnnnnnnnnnnnnnnnctgtgaagagtcatcacataaaaaatccagattaccttctgcagaagaggcctcccagaaaaaagataaaggacattcatcttcaaagaaatctgaagattctctacttaactaataatcattattggagaggagttgtctgctaatgtaactactttgaaactctgatgaggaagaaagtgcttcagaatctgaactttggaagggtccactaccagagacagatgaaaaatcacaggaagaagaatttgatgagtattttcaggatttgtttctatgagacgagagagagaagcctccgctccttaatgtgaaacttcatgaagttttaaacttcatgcaatttgaaattccatataagtttttatctgcaagttacagcttgtgtggtttgtctttggaaataaaaatccaggttctctcagaaaaaa

SEQ ID NO: 449583 - DNA, 386 bp, Homo Sapiens
aaaaataagaattttttattcttgccttatttcgtagcaaacataaaaccatcctgattttaaaagccaacactgttctttctcctttttccttggatcacaagttcatacagagtcaagcaagtgccccaaagaaaaaccccaaaattgaaaacaagtgtattcccttcagaaaaatcaaagctaggaatgtttagctattgaagtgttttcccccagactgagatcaagtgacttcactgcagtggctcaagagtggatgactccctccttccaaataaagcacttattgctaattaggcaggccagaggtttaggactgggatctctcataattgggagacttcaaagtgttcaggaacttcaagcctgggcctatggaaggt

SEQ ID NO: 449584 - DNA, 523 bp, Homo Sapiens
caagtttttaagcaatcatgttttattatacaactctatgaacagaaaatgaacagaaatacacaatatacttacctgtacatgtgaacctactttttaagctacagatatttattatagttcatactgactttaattttacagttcataactatgtataaccttattgcattaagggcaaattctacatggggagattcacaggcagaccacattaggcattaccagtacattcaaaaactgtacctcatatatgtatgtatcttccctgaacctgtaaatttggacttctttacagcttaagctcatttggctatttttgatggcaatgttcttaaagggcaataggatgtcccaggatattcgcttgaagcggaaccccattaagtgacagtcgtggcaacttgcagacttccatctcccactgcacgaggctatcctgtctagcgtctccatggacacagaaaagcaaaaatctctctttttgctcataatcacagttatttgcatctaacacttttcg

SEQ ID NO: 449585 - DNA, 571 bp, Homo Sapiens
tgtgcttagggtatgtgggcaaatataacctgatgaggttatttgctcagtgtcacttttattgaatttaaagcagaaagagagaaacagaggacagcaagacaagaggaggctagagttggggtcctcacccttagactggttttctggaggaattatcatttgaaaggcctattgaaaggtcttgtgcagacatgaaaactggctaaagggacagactattatttttaggctgaaacgatgaacgcattgactataagagtaggtgaacaaacatacgtatttgatgcttccttgggcaatggaaaaactatgggatttgtagtattttctagctgtatctttcactttgtaattgtgttactcacctaaactctagaatgacagctgtaaagacttgtgcatgtttcacaaaggtgaaacgagaattaaatgatgtgcaaacactccacacctggaaagcgatattcaaatgttaatattttcactttattattacatctaccaagcttagtggaaggacagggctaggggaaatagaggttaaacctcaataagaaatagtatttta

SEQ ID NO: 449586 - DNA, 469 bp, Homo Sapiens
aataactgatatatatctttttattatgcacagataaaagatttaaaactgtggttatcaaaactatacatctaagcatcttcacaaaatagctgacacactgaacagagaaaagaatacaacaggggtgttcaaactggccacagggattttaagggtactcgttttaccctcatagatgatgaaaaccagcaacaaaatcaggctcattcaggaaaaaccagaagagagaagtattgtatttggaaactgataatagtcctttttagaaaaacatctgtcagtttcatgaacaacccccagataaaacaaacatggaaaaaaatcacctagtgacttcacccaacaaaatgtggctctgttaacacaaccagcagtacaatcatcattcaaaccatgaggtagttacagtacaaaaagactggcacgcgtgtgagcaccccacacacactcacaatcatgcccacta

SEQ ID NO: 449587 - DNA, 465 bp, Homo Sapiens
tttttacagtggtaaagcagcagtttttatttattacaaattctaaaaaagaatccaactttataagtaaaaaggaacactgatgatcacttaaaacatttaaatttaaaattactactaaaaaaaccctgtacattcacacaagtccaatgcctttgttggtttttacagacatagaatttctgtagggttttgggccctatcaacaatttttattaagtactgcaataacaaaatacagcaataaaacaactggacactcctaggggacaccaaagataaagggcccattaatcaggtgtaggccagagaaacccaacctgttggcaatatgacgctctttcccaactgggtcttggtgagacacgtggcacagcaaggctgtccagtgcatgtgcataaattgtagaccaggtcccactatgctacttcaggattcagccagcccttctatgagtcacagag

SEQ ID NO: 449588 - DNA, 606 bp, Homo Sapiens
agtttcaatagcatattttattttaatctaagaacaatgattaaattcaaaggtcagaaatataaaagattatccaaaaagtttaggatcataactgtttcttaaacaacattggcatgtacttgagctggttctgtggctccaaaggcttgatttttaccttgcacagtttaaataagcaagaagccttacgcgatgctccacaagcatcacaacatcacaaaatcattctacaaggcatgtctcaggggatttggggccatgaagatctttttccaaccaaaagtctgagccgagatagaatcacagcttgaagttcctgctctcagactgtcctccaaatggttccttaagacactgggtgccctgagctctgggggccaggcctgagggtggcagctggttatgcacgcagaccagttctgttggtcactgtgtgggcattccactcctatccttctctgccagtgccactcggatgaatttcccattgggaagttctcgtcaccttgatgcattcagaaaagcagaaaggaaccgtggggaccctcaggcacctccccccggctgacaacaccagccccggggggataacacgttcgcgaa

SEQ ID NO: 449589 - DNA, 464 bp, Homo Sapiens
tagaatttaattttatctttatgaagtattctgaaataaaagacgataatacatgcatcaggcacattcgacagaagacttttacaatggtttacatttcctttttatttattccttgaaactgctcgtattgcaagtttttcacggatgaaatatggaactgagcagattctttttttctacaaaattatggtataaacttgctcaattttctatcttattgctaataaaccttacaggcgcacagtttgtaaaataaaccccttaaggactgaatgcgtagagcatgctgcaaggtacaagaaataagctaaaaatgagcatataaacctacatctggaccaacacagtactgaatgctggcaaacatttatcacaacacaggggaaaattaacaaaaggagatacagttcagtcctgaaagggttaaacagaaaccctaatatattattgtttctaacccc

SEQ ID NO: 449590 - DNA, 616 bp, Homo Sapiens
attgtattttcaaaattgtattaggtatcactacataaagtaaaaactcttaagttagagtgcaaaatgaaagcgccttattgttttaaaggtgcaaaagcaaaatatcacaaacattttcaatagaaaactgatttataaatccatttacagaagatcaaaaaaatcaatgtttagtaccaactttaactataaataactaagaaggaaaaaactgtccttcatccttctgtttctgtttcaacgtctatgtcttctgctccttgccttttggagaaaatattgcgttgtaaggctgacgtctttttggacgaggacaaggatcaagatcttccttaatataacctctttccatacaagtctgagtggaaggaaaaccaacttcccaaaaattctctggtgtgttgggtggaatgtagcggaatcggtgtcttgagcaagaagccaattggttgtctgtttcttctgctggcgtatctgcataataaatgtgacatgccttacacgtgtgcccgagcagtgatctggtctcctgtggtatgcggaccagctcaatatgaggaaaattgtgcgagctagtctctctgggggaaaaatgaatatagtcaacgaagct

SEQ ID NO: 449591 - DNA, 470 bp, Homo Sapiens
  misc_feature (306)..(319): n is a, c, g, or t
gggtggaaagggatatttaatctttgggaaactattttagaaaatatgtttgtagaacaattatttttgaaaaagatttaaagcaataacaagaaggaaggcgagaggagcagaacattttggtctagggtggtttctttttaaaccattttttcttgttaatttacagttaaacctaggggacaatccggattggccctcccccttttgtaaataacccaggaaatgtaataaattcattatcttagggtgatctgccctgccaatcggactttggggagatggcgatttgattacagacgttcnnnnnnnnnnnnnncttgcagtttgttttggagataatacagtttcctgctatctgccgctcctatctagaggcaacacttaagcagtaattgctgttgcttgttgtcaaaatttgatcattgttaaaggattgctgcaaataaatacactttaatttcagtcaa

SEQ ID NO: 449592 - DNA, 764 bp, Homo Sapiens
ctgagaacacagcaaaatttttattttgtcaaaaatctcatattcagcttacaccattcatttcaggtgaacatacaacagtgcatttcagtttagggaaatgtttacagtcatctggttctctttattcctgggaacaaggttacctcacttggaacacataaccagtgccaagttgtccatccctaagcaatattgcttccttctactttctagaagttcttcagattgtggaagagaaacttttcagagttctttgccctcattccctcctccagaaattcatgcctttgtataatctcttccccctgagagccagtaggctaacctaatgagttatttttaaccagtagaatacagcaaaaatgatagattacaagagattgtggcttctatcttgctagcggactctctctgtcttctctgcttgcacactttgttgaagcaagctaccatcccagaggcaaggaacacaggccatcagtttagcagccttgaggaactaaattcttccaactaccacataagtttggaagtagattcttctccagtccagccttcagatgagaccccagccatgccaacatcttgattgcagccctgtgagagaccttgaaatagaaccatttctgatctcctgacccacagaaactgtgaaataaatatgtgttaaggtactaagtttgtagtaatttgttacacagcagattgtaaataacacgtagataaaaccacgacagaacagaaaaataaaatggctttcc

SEQ ID NO: 449593 - DNA, 842 bp, Homo Sapiens
  misc_feature (235)..(248): n is a, c, g, or t
aggcaggtgaatatggttttattcagcaacagctctcatcaacagcttacactagctctctcacactgtccgccctgccttggctgcttgagcccgtggcttccacacacagctgtgcagcctgctctcccttgccttcagggtcagcagcttaactttttctctctctgggcgtgagcaagctgagctgtgtcctggctccttcctgtccatctgcaaaacggacagctttggnnnnnnnnnnnnnntactgggcgccagtgtgcccaccatgtcaagccatgttgagctgagccgaaccccaagagcccctgtacagcattagcaggacaattaccttttacagacaacagtggctcagaccaagtatgaacttacacaaacaggttatataacaagtggaggtgtgtgcctgtgcaccaaacccactgagtcatgcaggcatggatctctgccttggcctattccttgaccaaagcacatccatgtaccttacacctgggtctgaagtagggttgccagatgaaatacaggacacccagctaaatttgaatttcaggtgaacaacaaatcattgtttagattaagcatgttccatgcagttctggggacatacttaaccttatagatttatttcatttatctaaaattcaatgaactggggcagtctgtatttgctaaatctgctggccttagtctagaggcagtggtatgttccagctgactccaatccgctcatgagagtcaactgtaaaatatttaggagaatttatgagctggttattaaaaccactggggggcttgaaaatcaaaccatggggggggagttatttacacccact

SEQ ID NO: 449594 - DNA, 434 bp, Homo Sapiens
aaacaacttctgtcactatttatttaaaatgttaaattgtacatttttcataatttctttaagagaatcttctttggtgagtttaaagtgagagtagacaaataacttagtggctaaatgatttaatgtcagatgacttaatgaccagtttttgcccttgatccagccccactctggatattctacctcctggtgtgcttgtcttcattgtccccatattaaaatggtgactgatacggaattctggaaaaatctgatcgattaattaatgtgaatatgcatgttttccttagattctaatatggtctttcttgtgtaagaatgtggatttctaatagccatataactcaatgtttctcagtttgagccctattggcatttggggctggataattccttgtttgggggctgtcctgtacactgcgggatgctca

SEQ ID NO: 449595 - DNA, 590 bp, Homo Sapiens
  misc_feature (138)..(146): n is a, c, g, or t
ctttggcaaatttggaagggtatttttcagttgccattttgttggggttttagtattttggtaatgactattagttatagtttccttacattctggcatctttctttgtagccagttgtcttttcagtttacctttannnnnnnnnaagacctgatgatatatgttcattaacactgccatagctcctggagttggattttcagtgacttcattgaaaattaaaacgtttctatggcctttcatagttggaaagtactcttctgttttcataagtgttgttatctttctcagattgctgatttgtttccacatgtctcttatggtatagttcttgagcaatttcctgaaaaatacgccgagcactcttcttcttttgtgagtcttcttttatttctttgtttcttagagggttggattttgatttggagaggagtatgaaggccacgcacacaccggtcacatagacagagagcagtgatacaagagctgtcaggaagcttcgcagttccttgctgagcagcttaatttttcttaccaccagtgtggtcccttccttctgctgtttagcttctcgctcccgcacacttgg

SEQ ID NO: 449596 - DNA, 790 bp, Homo Sapiens
cttcagcgccaggatctcctcctccacctgccgccgctgcctcagcgtgtcctccaccagccccttctgccgctccagctcgctgtccgatgccttgcgcagctgggccaggcgctcctcgatgtcagccttgtgttgcgcggcctgctcctccagccgccgccgctggaaggcctcgtcctccgccagccgccgcaggcgctcgttctccgcctccttctccttgagcgcgatctccgcctccgtcttgagccgcgtggcctcgccgatggcggccagcttctccgcaagcacccgctccgcctcggcccgctgccgcgccgcgtcttcctcggccagctgccgctgccgcttggcctcttccgccagggcacgcaggcgggcggcctcctcggccagctcgcggaaccggccggcctcggcctccagcctctgcttggacttctcgctggtggagcgcgactcctcctcagccctcgccttgctggccagcagcacctccatctcggccccgcaccttggccagctcggcttccagctcctgccgtttctgcgtgcctgcagccgcctcacgctgcagccgggccagctcctccgtccagcagctgccgctgctgctccccctgctccgtctcggcccgcagccggatcaacgcctgctccgcggccaggcgctgctgcgcggtgccttccgccagctgccgctgcttctccagctcttgttcagccagctcccgctgccggacggcctgctcctccgccttgccgcgccgccgcgcctcgcgctccg

SEQ ID NO: 449597 - DNA, 114 bp, Homo Sapiens
ctagtggctactttgccttaaagaggctttataagttcattcacacagctggcttctctggttttaagattctggagaggatgataacctagtaactaccgcagtgcttaaaaa

SEQ ID NO: 449598 - DNA, 1301 bp, Homo Sapiens
  misc_feature (810)..(810): n is a, c, g, or t
ggatgtgtaaaatataaactgacatttatttttgttttagcttgagaccaatcgcatactgagagatttgttagaggaagatgtggcttgaaaaagataaatgtgaacagaaaataccccctaatgtctcgatgattgaggtttaagaggaagacactgagggaatctgcctctcctactttttccacagttcccagggtggaatctggtgccacagaagtgggctcctgcccttaaggcagaaagatggtcccagggcttgtagcctgtggaagtgcaaggctgtcaacatgatggccagagtccgccccacagaccacacacttttcctagtccctctcatacaagcgcccatagagagccgccgtcaccagcccagaggacagcctacttttcctcaggaaatagtggtcattctcccagccaagctggtcagggacttctagggtcatccctgaggtcagaaacaaaggaaagatataggaagtactgaagttgccccacaggtgaaactcaaatatccccgtggcctctgtgatttcctgtccacaggtgtcgaagccaagacccccacacctgaccagggcacacacttggatgtagtaagtgccatgtactgtgtgaagcccatgaaagacccccagggcatacagctctttggataaggtgggcctctcgtaaagtaaataacagcagaggccattggaacagacgtggagatagccttcctttccccagacagggaccagggtgaaaatgtcaatacatcaatctcagagtgaaaatgtgggaggaaccattcacgttccnacttggtggcctccatcacagtggacttcctgagcatccttctcacagtacggatcgcctgacaaaatttttaaaaacttactatgggatgggtccgtttcacctgttgcattctctgcaccaatgagacccactggatttttggccacctgggcaattataaggtgacttttgggattttccatgtcatggtaccaaaaggactccagaggggtgtgtatgccacttcctgtcatccccagaactgggtggtggacattagctgccagaacgttgaatccaaaggcaacagcaaaagctttctgaatctcaattgctgccaagagtgggagctggttcatccaggcagttgggtacacaacatgcttcaccttgtagtctctgaggactctgatggcagggtcaaagaacaatatatcaaagcatgtgaagatgccaaacctgccagcaaagggggtattaaaggtgatgagatccactttaagaggaac

SEQ ID NO: 449599 - DNA, 756 bp, Homo Sapiens
gctcataatacatcagagaacgcacacgggagagaaaccctatgcatgcactgagtgtggcaaagccttccgagaaaagtcaacattcactgtacatcaaagaactcatactggagagaaaccctataaatgtacagaatgtgggaaagcctttacccaaaaatcaaaccttatgtacatcagcgaacccatgcaggaaagaaagcccatggaagaggccacactcggaagtcaaagttcatggcacattagagagctaatcagcagtatctattatggacactgaaagaaagttgtgtcaattttactcacattttaaaagtatattttgacttgtggtttaaatatgggagtaaattcagcctttcttcttttcatctcagtcataacccaaaagctacgggagaaaaagcagaagtgtaatctctgtatctgacaaaattaggagacagctgcaaccctaatgagagggctgccacaggcagaggaaatgaagcactggtgcaggagatttcagagtgagagtgctcaaggctgcaggtgcaagacagcactggtaaggactcttagctgaggttcgggatataccccgaggcgcggaaccatagatataacagtggtaacagtgcgtgggcaggtaggaggtaggatgtttcctagaccatttggggtctgaggagaaacaggctggggcctcgagaaaggagtcactcagacaagccatatttttagaaagtagtctactgatgggagcaa

SEQ ID NO: 449600 - DNA, 1254 bp, Homo Sapiens
cttggttggtctttcctgggccccctaaaacgtttcggtttgggctgccttgggggttttttgggcaggcccctcgtggagaaagggaattccctcttggggccacagtagtttggtccctggagtttgcccctgggaggatggtgatcatgggactgcaggcctaggaagcggccaatgatgccagcgtgagcatcctcctcgtcctcctgattgggctggaactccatctcctctttgttcaggctgatgttgaaggtggagcccataaaggaggctcgacggaactgggcggaagcagctgtgtaggggggctgtggctcgggcttattccagtacatgtccggctccatccgaggcaggtcctggtgcatctcatccacagccaacagggacacctgcaaattcctgtcgacaatccagttggtctcaaaatcatcatcatcctctccaaaggggttgatgagctgctctgccaccttcagccagccaacatagaagaagaactgcaggaacgtgaagacgggcacaacgaggtccagctcatggccagggtaggccttggctgggcttcagaaactgccgcccaagctagacaagtcagggagaagctgtacaccgccacagtcaccacctgtgtatacaccagtgggatactaatccagtcgtaggcatacaggtgtccacactgagtacgcaaggtgttcatctcgttcagcaggctctggagcaggatagggtcccggattcgacctccaagccacgccttcattgacaggttggcaaaccacacccagggcacccagaacatgttgtgtggtaggctcagtttctccaactgcttgtgttctgccggagtcataaagcctgcttgcaccaggtgctgggcgctggggaagcgcttgtagactgcggtgctgacgctgcgcaggatgagcacgttgcccaggttggcgtagcggatgagcgtgcgccgcagcagccggccttgctcgtccttgccttcgacgaagcccgacaccaggctcatgaggcggtcgggccacggcaggttctcgtactggttccaccagcgggtcacgaccagcgtcacgtagaagcccagcacgaaggaaatggggatgagctggatgtagctgtcgcaatacagagtcagtttctcaaacatcagctgttgttcttccgtgagggccagcaggtggggttccaggtgggtccgatgatcccacagaaggtctggcgactaggctggtg

SEQ ID NO: 449601 - DNA, 483 bp, Homo Sapiens
cgacccgtgagaccgtcctttccctgacacttgcatcctcgtctcaggcagctgctggccatgacccctctggccatgcctccagcccagcagggccctggagaggcccaccttcagccagccaacatagaagaagaactgcaggaacgtgaagacgggcacaacgaggtccagctcatggccaggttaggccttggctggtttcagtaactgccgcccaactagacaagtcagggagaagctgtacagccgccacagtcaccacctgtgtatacaccattgggatactaatccagtcgtaggcatacaggtgtccacactgagttacgcaaggtgttcatctcgttcagcaggctctggagcaggatagggtcccaggattcgacctccaagccacgccttcattgacaggttgcaaaccacacccagggcacccagaacatgttgtgtggtaggctcagtgctctctccctgcaggatccg

SEQ ID NO: 449602 - DNA, 538 bp, Homo Sapiens
  misc_feature (264)..(293): n is a, c, g, or t
gagaaactgactctgtattgcgacagctagcatccagctcatccccatttccttcgtgctgggtgagttcccccttctggctgttccgggtccctgtggccgcccaggttccagacaggccaggggaggatcacgaggagctgcggcaaggggctggggagggggcgggggaacgccagcggcaggttcggcgcctctctgtagggaaaggtgcggactgcagccagagaaactgaagttagacgttaggtaagacgtcctgcnnnnnnnnnnnnnnnnnnnnnnnnnnnnnngaagcgctgacatcatggtccctggagcccctgcgcgggaggggagggggtctggcggatttctgggaccagcagggggacccccgggtgacagaacccttggggctctcgcgcctccatgcgaggctctgcctgcctctcgctcccgagcgccttccaggagggctgggggctaggcccgctcgcagcagaaagctggaggagccgaggcatcgccgggcgctgggccctgggctctggccgca

SEQ ID NO: 449603 - DNA, 460 bp, Homo Sapiens
  misc_feature (386)..(386): n is a, c, g, or t
  misc_feature (419)..(419): n is a, c, g, or t
  misc_feature (436)..(436): n is a, c, g, or t
cacggatgcatgtctgtttattggcacagggtcctataagggccaagtaccacaccctcccaccctcttttctgtaaaaataaactctgttcttccttttccctgctctatctgctttcctgctttgtccagggagaatcaatcatttgctaaggcttgtgccctaagacacaggaaccagtacccgctacacatatgcacttcccctctcagcccagggaaacagtgggcagcaggaggctttcagaggcccttgggcttccactaggagctgtcagtgaaggtcagcagcagcactgggagcagtggcacaaggagcacagggtgaggtgggggtagcccgtgagggtgagccagacagagctgagtccaccccctaagtgcgncactgagtgaagcctgggggagaagtcccaggnaggtacaccacccaggncctgtgggtcacagtggggtcagg

SEQ ID NO: 449604 - DNA, 1041 bp, Homo Sapiens
tttttttaaagaaacaattattgatttaaacataaaactgatattgggtaccttggttttacaaacactcctcacaatacttccccttggtgaagcctttcaggaactcttctgcaagaattattttcagagccagcttgtcaacgacatgattggtctttttacttcataagtcttattttgtttcaccaaaagcttcacagtgtaacaaaccaaactcagcacagaaaacatatgacaatatattttagattctctaagacaaggtctcataagtttagatgacaagtgacaacatcaatggactaagtatatcaccgtcccagtaacttaaaaggctaatactcataaacatgaaagttctggagtatgaaatttaaaacacaaattttggatataaattatctgagtacaaagctgtaggtaattcttatctttcacttcccctcataactccaaacataacgccattgtaggtgggttgctgctagactacatccaagattgttcagctgaggacttgcccactctcccagttacttggaattttcaaacaactaagaggaaaatctttggaagcagaagtggaaacacaggaaaagtggcagcaaaaccctcagcctcaggatagtagcttattcaaaagtatatttaaatgtcacagggtaaaatagaccagctgagtccgtatcttagaaaggaagcctactgctttctcctggtaggcaacaaagagaaccccacctaggactttaacccactcttttcccaatgtattccaatactattagccagctgaactaaaagagaatgggtgctggtaggcaactccattgatctccctttctttagcaataagtactggccagctgagggctaaagataatgaggattgaaagaaaagcagacataccaaaggtactgtgtcaagtaatacatgagatgtgttcataaacgaatgagttattccagagccatacaaacaaatcaatctctttactggacaggcatacctctcatatgtatattattcgaatatcc

SEQ ID NO: 449605 - DNA, 840 bp, Homo Sapiens
agcggacgtacgtttggcaatcgtcgggactgggatacaaagctgcttgtcctctaaaatcagtaggatctgaaaacagcttcaacacaagcatacacacacacaaacacttagacatagaggttccatatcgtaaccttgttcttctctagtgagaattgtaagctcagtgatatcacatgaactaaaaaatggtctatcaatttctgtatgaacaatatcctaatcattgtttggaacagcagagaaaggtgttctgaaatgtgcagaaattatatgatctgtataaaaaccataaatagcacttccatgttataataaatttgcaagttgaatttcatacacggtcatgttacacaggtcatattaaaaataattccaaggaaagaattaagagaaatttggttaaagatataattttactccatataagctttctaaagttttatataaagctaattatagtggttcagtattacaagaataggatgtgttacacagtacgacagtaatactgctgtgttccctcagatggcataaatcacttggctaatttggctactaataaatagttagtataaaatcttatttaccaaggccaataaaaaaattctcagcagttgggtatatttgaatcacatgtcactgtaaagataagacaaaaaaacttctgtaatacatactgttatactctaatgtatccataatgaaagattccataatgaaaaataatataaaaaatagattatgtatcaagactctttgtcaaaagctatagttcacatcagaagttaatagcactagggagttaaatgataaatacaaaaacaaattcttact

SEQ ID NO: 449606 - DNA, 1247 bp, Homo Sapiens
  misc_feature (113)..(131): n is a, c, g, or t
  misc_feature (143)..(312): n is a, c, g, or t
  misc_feature (350)..(363): n is a, c, g, or t
  misc_feature (372)..(505): n is a, c, g, or t
ccaaagggggccaaagggggggaaacccccgggggaattcgggttttacaacccctttggggggggttccccctcgggccaaaagtttaaaaaatttcccccatttttcggannnnnnnnnnnnnnnnnnnaaattaaatttnnnnnnnnnnnnnnnnnnnnnnnnnnnnnnnnnnnnnnnnnnnnnnnnnnnnnnnnnnnnnnnnnnnnnnnnnnnnnnnnnnnnnnnnnnnnnnnnnnnnnnnnnnnnnnnnnnnnnnnnnnnnnnnnnnnnnnnnnnnnnnnnnnnnnnnnnnnnnnnnnnnnnnnnnngggccccgcccccaaaaaaaggttttaaaaattttttnnnnnnnnnnnnnncccccaaannnnnnnnnnnnnnnnnnnnnnnnnnnnnnnnnnnnnnnnnnnnnnnnnnnnnnnnnnnnnnnnnnnnnnnnnnnnnnnnnnnnnnnnnnnnnnnnnnnnnnnnnnnnnnnnnnnnnnnnnnnnnnnnnnnnnncatctatatataaaatctttattacaggcagtattggtccatacactaacacaataccaacagtacaggtttaatctttcaaaatcatcatttaaacagcaaaagaccaagaaataaaatttgagtcaattatttttcaaaatattctcaatgcacattatccttaattcccttattatagtgaaacatacaaatacagaaaaataccccatttaacaaatactagtgttaaatggttatttggcttaaaatctgagttaagaaaatcctttttagcaacctacatacagataagtagcaaactttattatattaaacaaattcattctgctaaaacatgtaaagaatttcatccatcatgtattctgatcccagtacaagtgtttattctcttaccgtcacgattcttatatgaaggaccaactcaaagagttgtcctagatataaccttatcctcttccccaacacacttcatccaaaagtctgttcaacagatggcaaccgggtagcagtcacttcaccatctgatgccagtggttccgtgagagcgtggccaggcctgtgaaacagcccattttcctacctactgtgggttgctgctcaggaggaacgatatacgccaatacaagcaggaaatctgcagctcctctgctatgtgcctcagaacactttcaatttttctggtcaatgctctgattaggtatcatacataaaagccagcatattagtttaaatctttaaa

SEQ ID NO: 449607 - DNA, 387 bp, Homo Sapiens
ttttcactgaaacaaggaatctttgcctttattgtagatatttcaatgaaaatgtcaacacgttgcaaattggcatactttgggtttgccaatatgtgataaagaactttttcaatggaaactttccctcttttcagggccgaaaagacgctctgcaactatacttaagtatcctaggcaactttattcattcaaaaacatcagagcggagtcaaaagcacaaatccatgaattgggcggcgaagtctgactccagagattacggctgaactgggtttggaaagactgaacccgcgccggtgctcctcctgtttgcttggacttaagtttgagtaccacaactctaacctgccacttcagctgcacgggcaggcttgtggggaccca

SEQ ID NO: 449608 - DNA, 936 bp, Homo Sapiens
tagagttcttatcgctgtttattgaaacctcccatcaaagaaaagtgtgggaggcaagaaggggaggacttctcatcttgttaagactcagtcttgttaggactgagccaggggatatcaggggacctcaggggaagaggaccgggacagtgggggaaggtggccagtggggaagggctagacagaagaatggcagggcctgggttgcagggagaacaagggcagggatggctgaacctttgaactggccagggctgggcaggaggctctggtggtggtgatggagacaccttcaccaagctctcagaaggcttcatcctaggaggatggacctatatggggcctccctatactcctaaggtgcctggctaggatcagtctctggagggcagggaaagggggttccgttgtcctcagctggagcccaggcctggtccgtgaggctgtagagggatcctctgtgaggccttttccacctctggctcctgctttggcttctttgcccgcagggaccagttttccaggtcttcgatagtctctggcaagggctgattcagggtctcaggcaggaagagggcagcactgcccccgaaggagggcggtgatcccgtagatgatattggggatgaagggctgtacctcacccgtgattttcaccagcggggacaccatgcttcccacgcgggtccacaggttacttacgcccatacctgtttgcctgatgactgtggggtataattcacttgtgtagaggaagaggcagctgaaggagctggataggcatcccttcccaaacacagccaatactgtctcacggtctgcaagtccaagggcacaaaggtgagagccaagatggcccctcctgccaggagcagggcagcggcctgagtggtatgccggcccaggtagcttaaggagaggatggtgatgaacttt

SEQ ID NO: 449609 - DNA, 1442 bp, Homo Sapiens
  misc_feature (1080)..(1090): n is a, c, g, or t
  misc_feature (1186)..(1194): n is a, c, g, or t
  misc_feature (1337)..(1337): n is a, c, g, or t
  misc_feature (1347)..(1347): n is a, c, g, or t
gtttgttgcaagaccatttatttcaaacacaggattctgtgatttgagttagtgctccttttcataaacttccatttacaaagaaactgggaaaaaagttgctgatgtgacacactgtgtctgctcattcgtctttcatttttgagaacagcctttgatgctactcgtggggacatgtgggcaatgagccctgggcccttggtggggaagttaaatacaacaccaaaattcccacagtctggtcaaatatatatttgagggggcagaagtatgtcgtttctcagtcaaataaaaatatcaagcttgtcactctgaaagcaccttttctgggcagccaaagggagacagagttgaggaggtcttttaacttctttggcatcacttgcgatgaaaaatcctaaagtaccttcttggatcttaagatggtttccaggattaattaatatacggctctctcggttggcagacttgtactcaatggctatcattaggagcttgagcttcacaaaacacagctcacaaacagtagggaaggacagacccacgaaggcactggagagatattctgtgtacatttcatttgagactccttccaagtagtatttctgccatgtgtcttcctcaatctttatgaatgacctcatggagaagaggttggcaagcatggtggagaggccttgagccaggcagctctgggctatgaagcccaacttcaactctgcgaggcagattgcgtcatcaccttctttccaattccagctcgggatgtttagcagatgggccttgttgtgatactgcagcatttgagtgatgattcttatcttccggatggccagttccttatgggagaatacctccccatgatattccgaaggaatcccctccagcattcgggtgtactcgcccgtccacaggttgggcaagggtaccccggaatcccctccaggtctgacctccctattttttacctcttgaacagtactcatgagggatacagagaattgcaaaaatactggcacagtttatttcttatttaccacacttttgcgtcctttctttccaccacacccctacaccgcnnnnnnnnnnnccgccgccccgcctattttttactaacaccccccactttattttgccctaccgcaaacctccggcaccagcgtttgggttctttcccctatcccgnnnnnnnnngcttttatcccatcccgcccgcgttaggaccctcaacgcacaaataagacgatatgtgccacgtccaccaccacaccgcctactgcttcgttattatccgcctatccaccatctcttctgctagcaccatattttgccgcgcngcctagatgntcaccccgcccgcagacgagacacttcatctttcttgacaaaatacagttatacacacggttcgcttttggccactccacatcaattgccgcggc

SEQ ID NO: 449610 - DNA, 520 bp, Homo Sapiens
ttttttttaaagtttaacagtatttattcaatttgttcattcttcctcactgaagtttcttgggccttacatttttaattgataaaatagtcttaaattaacattcaaataatagctcgttccctgaaataatctagagaagccctgttccctctctttttgagctacctataataacattctgctgagccaacatgggagcagttctcctgggcacatcctgcctggggaaaccgtggcagtgactgtcattaatgggagtcacagagcccctccagcctctagactatgctgtcaagtctgtatggtgaaggccctgagtcaccacaacactgaaattgtttgaggtgctctggacccagggaaacactgcctgggccatgggaacactctaggcggaggagagggtgaggattacccctggccatggagcactctggtggaggggaggtgacggattatccctggccatggagcactctggtggaggggaggtgaccggattatccctggccatgga

SEQ ID NO: 449611 - DNA, 508 bp, Homo Sapiens
aacttcagactttgttgttcagcctaatcgtatgcttctgtaacttctacacattttataagaactcattcaaagttgtagtcctaccatagtgtttcagggttccttgttgtgtacacttttactataatggcaaaatgtttcaaaatcattcagctttttaaagaaacttattatgcaaaagacactcttgaaatgctgtgcatttgagctgaagtgaaagaatttgtttcatgttgtactttgcattattttaagttttcacatctttaatatgcttttctatgctaattatattagaaatctataaatataagtggtttctttgtttaaactagtcattaaaaattaggttgaaaatgaaagtggattattttagcaaatcgtcccttctagatggatttcatttcagtttgctattctgtgcctctcctgtgagcatcatccactgtaacagtgttgtttgtgaaaccttccgagtatagtgtaacaaactaggttttttccc

SEQ ID NO: 449612 - DNA, 283 bp, Homo Sapiens
ggctaccacagaagcaatttttcatgtttttctcctatgagacagatatgaaagaacaatttaaatttgaacatcaacaaaagattggtccttggtgaaataaacttttcaaaaatgaatgttcttttcaaaaaataaagtagaaaaatgcacttactaagaacatgaaaacaaatgaagtaggaaaataagatgaagactttgtattttggctgtaaagttttattgtgtgatcatcttaaattatctcacttcattaaactcataattatatatagaagta

SEQ ID NO: 449613 - DNA, 946 bp, Homo Sapiens
  misc_feature (30)..(30): n is a, c, g, or t
  misc_feature (52)..(52): n is a, c, g, or t
  misc_feature (57)..(57): n is a, c, g, or t
  misc_feature (87)..(87): n is a, c, g, or t
  misc_feature (801)..(801): n is a, c, g, or t
taaccggcaaacccaaatggttcctaaaanggggccttccagaaactggcanggaanggcatccatccaaaaatccctgaaatatancccttaaaagaggacaaaaaacgtcgtggattaaaacttatcttttcccttttctgtcttcctaatgatagaaaagtaattaactgctcaacaaatttaggatcagaaaaatgatcaaatataatctgttctgcctctgtcatatcctccctgcttctgccaagcttaggctgctcttccacaccagcataaacaaccatattctttggccaggtgtagtatccccagtgagttttttccacaaagcaacttgactcccattcttttttagttcttggtatagttttgctgtcataatgcaaccaatgattatcaggcctatcaccagcaataatttgggtgggtttagggcatccactgatttcacaggggttaatggtcagctttttgtgggttctttttagctgtttaaggataccagcaacagctgagatagccatctttcgaactacaattgcatcatggttgagattctcaacaaaaaaccgtatggcacgaagaggcaacactcggtcatctctcagcagtagagacagaagcccaatgcctatatgttcaaatttccagggcaggtttctttgctccacaccatctagcaaggtgtctaccaaattttcatagttccttagggcatcggcattcttttcctgttggcgtttaattccttccttaattttttctgggctaagcaatatctggttgatagaggggttntttgactgttgaagtaattccgctatttcaacacatgactttggaattgtgaaagtcagccaattgtttcatactggctatgaatcttttctgcaagatcatcaaacaatctcactatggatggctttttccaggacattgcttg

SEQ ID NO: 449614 - DNA, 787 bp, Homo Sapiens
caccgatgagaatttttatgccataaaaatacgactctgaagctacatggaaaaggagatcccacctccttgcactacattgaaacaagcagcctttccctccctctccttttgatgttttcttgtcccaagacaaagttttgcatcttggaacttattcatgctctctggctgcctttgtagacttttggagtcctttgcaagctttgctgtctcgtcgttaatctggagaaattccccagaatctgtctcaaagcgctcaaccatggctcagaggacacccagcccctatgccccacatcacaagagagttgggcaagcccccagggataggaggaagtaagcaggatcctcccatgtcctgtttcccagaaccagagcaaggaatggggaatcctaagggtttctgtggcatcactgaatgtcacccactccacatcaacctgcctctcacctgccaccctttttcagggaggtgagtacctgccatggtcactgttaccagatccttaaaatcctgggctctgagctaggtgcattgctctgttacccatttcctacatttgtttgtttgttcttgatttcctgggggaatgggactgatggagacagacaaacccactgtgggcagcatctaagccatgtccaaggttggtcgaattaagggaacctggcctctcagcaggacagaaagctgagctgtggttccaggttggtcgcaattaagggaacctggcctctcagcaggacagaaagctgagctgtggttccaggcccagagaggagc

SEQ ID NO: 449615 - DNA, 982 bp, Homo Sapiens
gttgtacctgtattttgatcttattgcctcatggtcttgtaagtcattcttaatgagcaatgatgtagaccttgcgtggagctattatggtgtaactaaaacaaagcaaatcacatttagcttcaaattgtaacaattcaattgaattttaatatgacacctgaaaacgatacagtctgcatattttctatatagagcagcagtaaataagttttttcattgtgtagaaatacttagatgtcaaaagccagatttcgtgatccttgattaacttctgagtactcaatcaatcataatccttttgctgcttatctgatgttggtttgatactgttaacacaccaaaaagaatatggaattgaaatgagctagctttataacttgtatgtatacatatatacacataacatccaattatgactgggtaataagtgtgaaaattttaatttgtggtatttcatttattaatgtctgcccatctgtattgttgctcctaccttcaaatatgacacctgaaataataagtctgttgtccagaatttatgtattgttcagcatcaagcaaactacagctcacaagcatacccatttatatgttgtctatgcctgctttctcctgcagtggcagaattgagtggtgagaccttaggtcctgcaagccccccaatttttactacaggttggcaatcccctaatcccacaaaatctgacatataaaatgctccaaagttcaaaactttctgaattgctgaccatcatgcttgcaagtggaacattccacgcctgacctcatgtgactggtcatagtcaaaacaataaggacttttgttttcatgcccaaaattattaacactgctgtataaaattacccttcaagtctatgtgtatcggtgttggcagatttcaatcgacctttgtttagtctgggataccattctgcgtctcaatagtaaaggagatctccaaaaatttgaaaattcaac

SEQ ID NO: 449616 - DNA, 834 bp, Homo Sapiens
  misc_feature (26)..(26): n is a, c, g, or t
  misc_feature (36)..(36): n is a, c, g, or t
  misc_feature (168)..(181): n is a, c, g, or t
  misc_feature (563)..(676): n is a, c, g, or t
  misc_feature (722)..(730): n is a, c, g, or t
gctatttggttttactaccaggctcnggaatatttngcagtcattttcactggcacaggagccttttgtatgttattcaatttaaacttttaaaccaaaaattttatggtccagtgtctttggcaaaaagatgctggagggaatgtaacatacaattaatatgtggtnnnnnnnnnnnnnnaaaagacacaaattgccatgttatggttctgccttgaaacagcacaatgaagtgtatcagtatattctgtgattatgaaacttatatgttgtgttgttttgtgtcttctgttgcctgtcctttgggccagatgtgggccagttaaatgcagttatcatctcattaaatacagatgcagataaaatatctttagtgctgcaacattttacctaactttttgtatgttttcatgactgtgtgttattttccaaagctgttcctacctcaccatgaggctttatggattgttatgtattataaatgttctatatgagacagactactgtgtttcttctcatttattaaaagttaagtagaaaaataaactaattttaatatctannnnnnnnnnnnnnnnnnnnnnnnnnnnnnnnnnnnnnnnnnnnnnnnnnnnnnnnnnnnnnnnnnnnnnnnnnnnnnnnnnnnnnnnnnnnnnnnnnnnnnnnnnnnnnnnnnttgggggggcccccctcgccccccaaaaaaattttttataaacccnnnnnnnnngggcggggggccgcccctgggggaaagggaaactggggccaaaggctgtttcccccagagaaaaccccggggacataaaaaagggggctgggattcccccccac

SEQ ID NO: 449617 - DNA, 474 bp, Homo Sapiens
tttttgcactcacagagtgaacttttatttacaatacacaatttataatctattgtatttgattagttcaagtgaagaacattatactttttgctttaataacagtgggacacaaagcaatttctcaggtagtcgatatgtgaaatgtgccccagcatttaggttttctattaaaggcagtattgtatgccaatttacaatacattctttcaactatatcaaagggaaaaagcagcaaataaaaatgtttcaaatgttcacacatatttttggcatcctggatccttgaatgtggtgaactaaaatcaaattcaaggtgtttatgctttatatactgtacaggttctgactctggaacatgcaaatgccatttctcttataacaagttaccttctgagaaaagctgtaaggctatggtgaattccatcaggaacacacaaagaaagttaacagacctacctttatagccaattg

SEQ ID NO: 449618 - DNA, 493 bp, Homo Sapiens
ttagtgtggaattgttttttttaaaactgtgtgtaatacaaatccagccaaaacaatagtgcaaaaagttacaaagcaacaatctcttgggctaatgcagtataggctatacagaaacagccacgatgaaatgtgcagatcaggcacggtgaataccaaggaaccaaggagacggttaatatttcaacccacagtttgtgttttggattttttcccccaaaatttccatacaacaaacagacatctagatcaacccagcaagctatggtggaagtgtgcagtccagaagagcccatggagaaacaagtctcctgaggccatgaagatccgcaacaggctgagtgagagtagcacttggaacatagccacgttctgtggtggaggaggtggggcctccgttagactgctcagattactggaacctcgttatcacatcccattctacaagtttttcactgaatggtttcctgacatctataaatgagggtgcctg

SEQ ID NO: 449619 - DNA, 462 bp, Homo Sapiens
  misc_feature (71)..(117): n is a, c, g, or t
  misc_feature (155)..(163): n is a, c, g, or t
cttcttcttgttttctctttgcttccatctcaagtttcatccgcctttcctcctcttcctttcttcgacgnnnnnnnnnnnnnnnnnnnnnnnnnnnnnnnnnnnnnnnnnnnnnnngaatacgcctcagcctttctgcttcctcttcctgctgnnnnnnnnnctgtaatgcactggggagttcctctgagcttttaaccagtgcatcatattctttctggatttgttcctgcgtcatcatagtggacttaattttggccatcaaagtatcaatagaaatttccagattcttgatctgtttattcatctcgggttttccgtttttcaacacactgactacctcattaaatttatcaagtcgttttttcagtgtgcccaccttaaccagaccatcaatgcgaggtttgtgtctcctcttgcaaagccacattcgaatagtttttttgcattttaatgcaggct

SEQ ID NO: 449620 - DNA, 897 bp, Homo Sapiens
  misc_feature (354)..(421): n is a, c, g, or t
  misc_feature (568)..(628): n is a, c, g, or t
  misc_feature (633)..(633): n is a, c, g, or t
  misc_feature (862)..(862): n is a, c, g, or t
  misc_feature (870)..(870): n is a, c, g, or t
aattactgtaaaaaaattgacagctagtgttttttaccatccggtcattacccaaggacttgggaactaaaatgttccccagggtgatatgctgattttcattgtgcacatggactgaatcacatagattctcctccgtcagtaaccgtgcgattatacaaattatgtcttccaaagtatggaacactccaatcagaaaaaggttatcattggtcgttgagttatgggaagaacttaagcatatactgtgtaaacagtgccatacatttctaaaatcccaagtgtaggaaaaatatgcagacatacagatatataggccaactattagtaataatatgaaatatacttaaagannnnnnnnnnnnnnnnnnnnnnnnnnnnnnnnnnnnnnnnnnnnnnnnnnnnnnnnnnnnnnnnnnnngtcattttaccgacataatacatggagccaaagaaaacaataatggtactaataaaaactcctagggtttcctgtcagatttaattctacccagtggcaaagaattttttcaattgtggctttaaaaaaataattaaatatacatgnnnnnnnnnnnnnnnnnnnnnnnnnnnnnnnnnnnnnnnnnnnnnnnnnnnnnnnnnnnnnaatgnttcatttcctcagaggaaccaatcacttggaatgtctagaaatatccttgcagattttgccagtgtcaatcaagcctgcacacatgcacagtgaagcgggctgtgcctgccttgagcccatcaccagccaacattcttgatgtgtgcctgaccagacacagaagaaatgggcaactcaagacgtgcttccacttcattttggtggagtcgggaggtgtgggggatgganaggcatcntgttgggaagggcactgaatctggcct

SEQ ID NO: 449621 - DNA, 515 bp, Homo Sapiens
ggtaccccgattctttgcctagaagaggaaaaaaatggcaatttttgagtgccatgtcagaaagtgtgtattaccttgtaaagaaaaaaattacaaagcaggggtttagagttatttatataaatgttgagattttgcactattttttaatataaatatgtcagtgcttgcttgatggaaacttctcttgtgtctgttgagactttaagggagaaatgtcggaatttcagagtcgcctgacggcagagggtgagcccccgtggagtctgcagagaggccttggccaggagcggcgggctttcccgaggggccactgtccctgcagagtggatgcttctgcctagtgacaggttatcaccacgttatatattccctaccgaaggagacaccttttcccccctgacccagaacagcctttaaatcacaagcaaaataggaaagttaaccacggaggcaccgagttccaggtagtggttttgcctttcccaaaaatgaaaataaactgttaccgaagg

SEQ ID NO: 449622 - DNA, 1044 bp, Homo Sapiens
  misc_feature (137)..(146): n is a, c, g, or t
  misc_feature (306)..(315): n is a, c, g, or t
  misc_feature (375)..(598): n is a, c, g, or t
ggccctcccgcgtctggggcgtttggctttttttgggcgccgccggggcggtggggcccggtgtttctcttgttgggggttctcctgggtgggtggtgctttgctgctttgtttgtcgggtgggtgtctgccgggtnnnnnnnnnncgtctcgttttgggtgttgtggggccgggcccctcgtgctgggtgcggcgtcgggcgggcgtctcttgttgtgggtcgtgtttcgggcccggttgtgtcggtggctcgggggtttttgttctcttggctcggcgcgttggcggttcgttcctggggcggnnnnnnnnnnggggggccggtttccgccggggtcctttgtgggtgttgtgtggctcgggggcccttcccnnnnnnnnnnnnnnnnnnnnnnnnnnnnnnnnnnnnnnnnnnnnnnnnnnnnnnnnnnnnnnnnnnnnnnnnnnnnnnnnnnnnnnnnnnnnnnnnnnnnnnnnnnnnnnnnnnnnnnnnnnnnnnnnnnnnnnnnnnnnnnnnnnnnnnnnnnnnnnnnnnnnnnnnnnnnnnnnnnnnnnnnnnnnnnnnnnnnnnnnnnnnnnnnnnnnnnnnnnnnnnnnagttttattcattttatttgtatatgtcaaaatacatttttatttccaaaatagtgggttttgcaactagtttcatgcagaaacaaggtctgctcaatactaccaataaaatcaatatagcacagtagctgttcagttttagatacaaagaataaataacctaaatacaaaacactaaaatattagaaacatgtatttaatcattcttcacaggcatccaaacttcacaaatataaaccatagcatgcctaactgttgtgcaaccagaacatgttgcagtcactcaaactgatcagttatctgtatattttaccttcacataagaccatggaaattctcaatattcagacctaccattcatacagttcaaatataaccaaaaataaaactcccacaactatccttgtacctttaaaatcaagaatcctgagcttggtagtaagagc

SEQ ID NO: 449623 - DNA, 1242 bp, Homo Sapiens
  misc_feature (804)..(826): n is a, c, g, or t
accgcccccaggccaaaaagttatatttttacatccatttctggataacaccagaaagaaggggtaacctttggtttattttcataccttcaaagtggtagacacaaggaggttcaaaatgtgctagactaagatgtgtgcagagattggtagctatcttaatatggccataccagaaagacaagtgtttctgaagttaggactctgtacatgccagggcaaattaaccatatccccatttagcataagattcatgtgagccacagtcactctgagaaattttctagcgtgtacatactatgcaaacatagaaatgaatattcacaattttcaacatgtagtttatagagacttataatcagaacccacatgtatatataaaaataaagtaagacttatggtagaatcctattacatgaattttttaaaaatctaaaataaaattttagccccactcatccaaaatttatccaatatacacagagaaaaaccaccaaaaatgttggacaatatctctcatagttcagtgctacaggaggccaaactaggcgcctgtttttctaatcaggaagtttctctgtttcagagattaaagctttagggaatagttagaggttttgaatactttaaaaaaccttgaatctttcaggtactaaattcgagacaaaaatgacccattagtaatagacatcaaacatattaaaacagagagatggcttccgaatatgtatcagccatccaaactgtaacaaaggcaatccatggctagtggtaagtagattgttagaaaaaacagttttgccnnnnnnnnnnnnnnnnnnnnnnnatgaattttcctcccatacagaattaaaaggcagaccatccctcttcttttaaaatcatccttgcacaaatgcattccctggcttctttctcaattatataaatgaacctaattaaagacccaaccatttgcacatcaaggtagctattccatcagttgccaactttatctgtcctgatttgaagaactattcaggagtattacaagaagttatgcacctttgccctagagtaaaaacaagcaaacccttctttaagaaataattggtttcactgtctacggggatgtaagccagtctaattagtttactgttatatttgtttggctcaaacaaagttaaatggacatttgcatgactgtaaaccttatttccatgtgttgacaggttcattgctgctaaatgatgtttactagtt

SEQ ID NO: 449624 - DNA, 409 bp, Homo Sapiens
caggtttggacgttgatcttgtttattttaaaatacccacgatgctgtgtgtgtggaaaggaggcccagggtgggaaaccgttctgtttggttgtcatctgagcccttttgccgacattgcttccttccttcctggcttcttgttcaccatggtgaccgctggatgcacaagatggctcacagtgctcagcgggcgcccgccagcttctcttgttggcccaggacaggctgttcggagcttgtcttgctgccccaaggaggatgtcagtgggaatatggttgcgccctcgtttggagttgtgcgagcgttgagctcagtgcccgggtaggaacttggcgttgtggaccatccgcctcgtgtagatcggctgtgatttagacttcttggccagaagtgctgtatttcatg

SEQ ID NO: 449625 - DNA, 479 bp, Homo Sapiens
tactaaggcacatgacgtagaaatattgaggtacaaaatgcaaatttctgcataagatttttaagatattcattttggaaaatgaaggtgaacatcatctcccagaatattcagcttttagcttgttttttcttttggaccagttcaaccagcaacttgtacctagcgatacagtcttccttgctcttggacgggacacatctggctattttgtcccagcggtcagaggatccccttgggtactgctgcaacgccagttccagaagtttctgttgattttgagtccacggctcctctgcagaccgagctctctcttttctcaggctctcctcgtcgctggactcgttttgttctgctatgtcaaagtccttctgccgcttggctctggacttctcctctggctccggcttcgctgtagcctccagcagcctggctggcttccgcctccgaggccgggcatcagtggcccccgtctcctg

SEQ ID NO: 449626 - DNA, 1365 bp, Homo Sapiens
  misc_feature (590)..(672): n is a, c, g, or t
ccccggtgtagatgataaagtggttggtggtcctaggatatacagataacgcaccgcgggtgtcgtgggcgaagtatattcatattctgctagttcacgctagctcgcaatcgcgtataatagtattcaaggggttgggtttgtgtgtctgtcattcacctcatagattatgactcatcctattatgctagataggatttgttattgtttgatgtctccagctctccagaggtgggaggcggctttaattaatatctctccttgtgtgttagtagggggttgttttgttctcccaacgattcgtgatttgcacctcccccgcccataaagaagtagggttgtggttctattgaacaaaaagggagtccacctgagatcggcgcatagttgtgctctacctgtcacacgacagcagttattgttgtataacatcacgccggcgccgctgcggcgctgtgtgatataatatattacccgctcctccttgtggggccccctctttctatctaaactaacggggtggtgctgcgataatagtgcggccccccgcaggggaaagattttttccgctgcgccgcctcctcttctcnnnnnnnnnnnnnnnnnnnnnnnnnnnnnnnnnnnnnnnnnnnnnnnnnnnnnnnnnnnnnnnnnnnnnnnnnnnnnnnnnnnggaagaaaagtttaagagtttaattaaaaattaaatatattgtattaggtatattttttaaaagggcaaagtaaaaaatattaatacaatctggttgtagaaaatacactgcaagaaaaggagcaggtgcttcaaaaatgtaaccctggcaactctgccaacaggtcctgggctcgggcttcctggaaaagccccgggacacgtgggaactccaggcaccctcgcaggggcccccccgagggcaggtggcccagaagcccaggaagggtggcctgggaggtggaacgggcgcaaggccgagcatcactggctcctagggggctgtgacatggaaccaaacatacacgcgtatgagagagcagagcggcagcgacgcggtcggatcggtcgcgggggctgcgggaggaagcgctgcagggacccgggcggcgccggcggcctagccggagatgcacgcgctgtaatagaccgcgctgctggcgtccgacagcgcggagatcaggctgctctcctctgggcaggacatggcgcgcgggcccagtttggccagtgccacgtggtacgggagcccgggggcgtcgggccgagtccggctgcagttgaggtactggtcgaactcggtgaggtccacgtccggcccacagatcggcggcgggccccagcggctcggcgctctccagcggcgggcctcgg

SEQ ID NO: 449627 - DNA, 329 bp, Homo Sapiens
aaaggaagagattataaaaagacatttcacattaaagatttgcagtcctgggacacagtttggaaaacactatttataaggttgcacatattacaaacagctcccaaatggtgaaactggtattctaagatgaaagcttaatgaacataatgaagtgaataaacgcgtgtgaactaatgtttaaaaagttagagcttgtctcaagtcagtacagctcttaagataataaatacagtaacactactttttatttctttgctcttttatccctttcaggttcgatttgctgctttgattacctgtgttagcactggctgaaaaactaaagg

SEQ ID NO: 449628 - DNA, 580 bp, Homo Sapiens
atccacatccggttgctgattattttcacaattttcctgagatgtcgttatcattctttgactctcctttctatagtcagacatttggctctcagaggtgactttctggctgaagaatgtggattcgtcactgtcttgtgctcaatgtagagggggctcttaattccagaaatgtccatatcttcatctagctctcaaacacctgcagcatcaaacttgaatgctgcaggattttctcaagccgctcaatttggtcatcctgttttttaataatttttctcatcatcacatgttctacttcaagcctaaaatgtgcattttaaaataattactctcacacgtaattttttttaaatcatgtaaattctaaacaaacttctgaaggtataattacacaaattcttagcaatcacaaaagtagacgattggggctactgtgtcattttctacctgtgttttggtgataatatgcaaaatttaggaataatgtagaaaaatgatgtatttcgatatagcttacaaatgaaacttttttggcttcacaaagacatactaattatcataactgatacaattttca

SEQ ID NO: 449629 - DNA, 487 bp, Homo Sapiens
  misc_feature (233)..(241): n is a, c, g, or t
  misc_feature (294)..(315): n is a, c, g, or t
  misc_feature (375)..(384): n is a, c, g, or t
  misc_feature (441)..(441): n is a, c, g, or t
ttttgttttgacaaacaggtgtatgcatttattcctttttaggaacaatatctaaaaaaagaaccgccctctgccctcccccaaaaaagacaaagattcacacagacacatcgggatatatgtacaacgtaataaaccccatcctaaagaagcaactcgggataacccccaggggatacagaatcagaattgtaaaaatcatagtgaagtttgcttgctgtaaagctgagaannnnnnnnncagttggttcttctgcaaggctgtgatacctgcaaagatatgtaaaatctaannnnnnnnnnnnnnnnnnnnnngctacagtctttagactaagcatgcaagacatacgactaagtgcaactggagtgaaatgnnnnnnnnnntaaattttaatcattccctaaaggtttgaactgagggtatgcgtactaacagtttcncatgcggttaaccttactcatgtctaggctacacatggctgaggaa

SEQ ID NO: 449630 - DNA, 1199 bp, Homo Sapiens
  misc_feature (30)..(30): n is a, c, g, or t
  misc_feature (59)..(59): n is a, c, g, or t
  misc_feature (309)..(309): n is a, c, g, or t
  misc_feature (339)..(339): n is a, c, g, or t
  misc_feature (590)..(646): n is a, c, g, or t
  misc_feature (1171)..(1171): n is a, c, g, or t
  misc_feature (1178)..(1178): n is a, c, g, or t
ttttggcggtccttttaaaggttttccttncggaccaaatccccttaccgccaaggttnggtttgttctggccctccccaaggagttcccttgctccatattacttcccctacttcctctcccagaataagttcagaacccttgaagtcgttcatcattcttagagaaaaaagaaaaatctagtggtctctttctcaagtaatgatgcttctccaggactggagtttctgtgatctgtttctcagtaaacatcttcctcttctgaactgctgtcttgtaaacgagggtcttcctgccagacaatctttnccaggtttcactgtttcaactctgtaggtnctcttcctttatgtctttagtgtctgaatcaaaaaaagagaacgtgaacccgctgggctgctcagcgtcactggtcagagctgcagggtcctggatttcctcaggtttctctttaccacagtcctcattccagggtgtgccctcttccttttcactggtatattttgtagtttggaatatttctttcagatccatagcaatattataatacatttctttagacacctcaggtagtttctcagcttcctccnnnnnnnnnnnnnnnnnnnnnnnnnnnnnnnnnnnnnnnnnnnnnnnnnnnnnnnnntaagtggcatggtcttgcttcgttggatcataatgtatgatgtccttaaatttcttagcagctactgatcctctgtttgtagaattgcttaagttgatttgcaaaacactttgtacaacattcagggctttctttttttcttcagcaagctcttcttcctcagcagttttcttttcatttacctcttcctgttcctcttcactgtcagtttctagaaatcgagagtccatgcggaatctgtcatcggtgccaaagtgcgactgttaatccatgagcttctgtccagctctgccctcaaactgaggtttaattttgaacctattactgtcatcttcagaatcagattcgtcatcatcactgctatcaaacagcttccctgatgttttacccataggactcctgtgaaggaaacacaacatttattaataggcagagggcaaacaagcagtatttcccttcataacggtaatcttctccctcacattggaaaggccaggtaacccggactcatctaccgggggatgnggtaatngggcggttagggtggggaaat

SEQ ID NO: 449631 - DNA, 263 bp, Homo Sapiens
  misc_feature (29)..(29): n is a, c, g, or t
cactttaaaatatgctatttacttttttnacagttataaaaataatacattatcaaaatagacaacttacaaaacacaaaaatccaccaagggaaacacagcaaaggcccctgatcccaccatctagaaagaacgagagtctttctggcccgaaggcaccagctctgatgaaggcacaatgaggagatgccagcacagacttccccagacctgaggtgacgctacaaacgagcggtgcacagccacacacgcaggtttagagt

SEQ ID NO: 449632 - DNA, 503 bp, Homo Sapiens
  misc_feature (422)..(422): n is a, c, g, or t
  misc_feature (432)..(432): n is a, c, g, or t
  misc_feature (493)..(493): n is a, c, g, or t
actatgaaatatttttaatcctaaaaaggatgtgattactagtaactaaagaggggaaaagtcaacaataatgaaattcaggttttttaattcagtgaacacatatcaaaatgctcaatgttgttaaatgacataatataatttatccacagaagacatgttctcatccattggaaaattgatttaaatacgttttgacgagtgctaagagatgttataggcaacagttgacttaatgaagtagttaaggcttcaaaattgtgccttttagaaaaataacaaataacttcttctaccacttaggggggaaaaggaacaagtgtcaatcaaaagtcacagaaacatgattaatttattcctttcaacatttcactgagctttgcaaaggccaggcttaaaactaaagggaattttattagccnggattgggcntaaatattttcccccataatattcctttcccgggcatacttccttccagtggctggaaatnaaatgaccaa

SEQ ID NO: 449633 - DNA, 1003 bp, Homo Sapiens
taaatgtcacgaagacgttttttgttggtaataattagcagaatcaagagtagattaatatataaggtaacatgatatattaataatacaaactaaaatatcaattttatgctagctttatccattagtttttcatattccaattttaaacaaatctagaaataagacagtatatatgaaacaaatttgctaaatatttttaaattatgccacctcagatattacctcaattttaaaaccatctgtaaattaaatgaccttcccattataatttctaaatataaagaagcaccagctggaactcaaaatgcataaaagatattgttatatattttaagaaaatattatattagcaatatcataaatcaacaaagaatccaaagaatattgcatgaggtaaggtacattaaatgttttatgcctagaatattatctacctgcattcttatccatatagtttaaaacactaaagcactcactgaataagaaatgaccatttaaaaatgaataatcaagatggcagcacatgccattttgcaataaaagtactatgcgcattaatttgcaaataatgttttttatccaaatagtcctgtggttccaatatccttgaatgataaagaatttttactgtgtgaaaaaaagacaaacatccttttactgatggccagcttctaatcttattcgggttgagaatctgctgggatggtcctcgaaggccaagttcccaattaccgcaagcagcaagctcaacaataaggtgggccaagaaacgaaatcagctaattttggacccattggaatcctgtggaacatcaaataattcatgtataaggaatgtctaacgttgcaggcagtgttatcaggtttcagaatgagtctgaagtgtttccgtatatataaactatatagggcgagacatgggtctgaatcgcctatgtctgtcgcgttttccgtcactgaaaatagcagtaagacagagcaaagacatagtgacatgtcg

SEQ ID NO: 449634 - DNA, 436 bp, Homo Sapiens
gggctgacacctggaatgggagcttgtaacttttaccaaaataatagatgtttatccatcttttgcaatttttacttttaaatctatactaaaatgagcccaaagaagtcttaacaatgatgtatggcacaattggttggttgaggctatcattccatgattacaaataggtggttatgtggggtggttttgcacttgtggcaattggactgcaatttggccttaaaatgacacaattcctcgttctcagatggagaggaattgccttgaaatttgcatgtaccagactaagtgccagtatatatatgactgatattttcgtgactcatagaaggtgtccatggtatagagtttatgcctacatctctatctttattttgggcacacatgagcttttgttaattatttctttgtacttgttagaatctgtttttga

SEQ ID NO: 449635 - DNA, 441 bp, Homo Sapiens
  misc_feature (285)..(313): n is a, c, g, or t
  misc_feature (352)..(352): n is a, c, g, or t
  misc_feature (373)..(373): n is a, c, g, or t
  misc_feature (390)..(390): n is a, c, g, or t
  misc_feature (401)..(401): n is a, c, g, or t
  misc_feature (413)..(413): n is a, c, g, or t
aactgttctttaaactgttaaactttattataaattaaaatttctttacaaaaaaattgcacataatatttgaccactcttaggttctgatgcactggcatttgcaatagtttctttaatcttcaagttaaacagtctcggcaaggagtccagaacgtagaaagggtaataaacaaccctgatagagcattcaagtgcaactagcagacttgtgggccatggcagtttacactttccttaagatggactgctatagttttaaatcctggaaatgaaggaatctcnnnnnnnnnnnnnnnnnnnnnnnnnnnnnggggactgcctggctttttttactggtaaacacagcccnggggtattaaatccccaaacnggggttctcttcgggcntcaggggggtntccagtgagtcnggggtttaaccccaaattaaggggttgg

SEQ ID NO: 449636 - DNA, 778 bp, Homo Sapiens
  misc_feature (229)..(251): n is a, c, g, or t
  misc_feature (323)..(341): n is a, c, g, or t
  misc_feature (732)..(732): n is a, c, g, or t
aatacccacatgacctccgtgaatatctaccctgccttaacactgtttatctttaggaagcaggatgcctgaggtccaaacttctccctggtgatcaaaccagctaagactgatggaatccaagatggcagctcatttgacctctaacttcattataatctaatttccatgttaaatgacagtcccactaacaccgtaacagtcaacaaccaacatgacaatgatgggnnnnnnnnnnnnnnnnnnnnnnntaggaaggtggcactctggttttgaaaatttctccacccagacccagaaaacacatgattcctccccttgcnnnnnnnnnnnnnnnnnnngtagagatgggggtgtatcactatgttgaccaggatggtctcgaactcctggtctcagcaatcctctcattttggcctcccaaagttctgggtttatgggagtgagccattgcacccggccactcctccccttgcttttaatgctcagccccttcactaaagatgccctgtatctgtgacttcctgggtctcacgagcagaaaagttgatttgtgagccaagctctcacttctcaattccatggccaccaaataaagcctgcactgcttgaggctcactttcggttttgcatattggcttcatggcaccaaacagggaaagaccccattttagggaaagtggctttgtcagtaacaaggacacagaaggaaagaaatggaggatgatttanggcagaagtcagcaaactatggtctatgggccaaatctggccactg

SEQ ID NO: 449637 - DNA, 1089 bp, Homo Sapiens; identical to SEQ ID NO: 151691

SEQ ID NO: 449638 - DNA, 1493 bp, Homo Sapiens
tacttttcacagggccagtaatcacacagcaacaatcatctgtaacttgcagaaattcaatgtatgaataagtgtttaaagcctagatagagggcaattatctggttatctgtttttcatatttctatcagagataaaaacctctttagggaaatttatgaagggccatttgaaagaaggtttccctcttttgtagaaaagaattctcttaaaaattaaaacaaatttgggaggctgggggatttttgagagtttaaaagagtgaggaagatggggggcgggaagcaactatttccagctgcgagaaaccgatcaacctcacagcaaggtgtggtggctctgatgcaagcaacattcccatagatacagggctgtctggttttctattgctcattctaacttgagcttttccacagggaaagaccccattttagggaaagtggctttgtcagtaacaaggacacacgaaggaaagaaatggaggatgatttagggcagaagtcagcaaactatggtctatgggccaaatctggccactggctgtttttgtgcaactcataggctaagaatgttttctacatttttagatggtaggagaagaacaaaagaggaagaatgttttgtccacaaaaggtatatgagattcgaaatttccagtgtccacaggacggcaatcctgggctcctacccctaaaacaatcattgcagtggagctctgccctagctacggtccctttcttcttttggttccctgactttggggcctggagggcacaaaggctaggagcaggctgccatccaccccttcttagagaacctgcagggagctcaccatgctctgcatccagtctaggtggctcctagcggggcttggtgggttctccatcctcagcaccatctgcagcaccatcttggtcatgtgagaagttgagagaaacacaaggtaaatgttcctgtcctcatttctgtctcccaacccccctgctgctgctcaatgtccccagtatctctctgcagactcctgtgtgccctcaaaagtctacacggtaccagtcaagagacatccatactgcaagatgatagaaaggtaagtggaacccaaccacctcactctctaccctcatgtctaccacggacagctgaacctctccctgtggaacctggaaaagtagctcagagaggagtagcaggtggcaaggaacatcagggaaacaaagctagaaggagcatgtaggcacctttgacctgaaatagacaagatgcaagatctcaggattgtcagggaccttaggaaccatctaggccacatcccggctttggcctgaagtgcaggcaaagggtttgcctctgccagccatagcatccagctttgctgtcggtggaatcgggcctgtatgtgagttaccagggttgcagaggacactgtggtctgggtggcagtctggtgccacatggcaggatacatcacagtagcaacttccccatctggagaa

SEQ ID NO: 449639 - DNA, 544 bp, Homo Sapiens
gaaatagacagagccagtaatcacacagcaacaattatctgtaacttgcagaaattcaatgtatgaataagtgtttaaagcctagatagagggcaattatctggttatctgtttttcatatttctatcagagatgaaaacctctttagggaaatttatgaagggccatttgaaagaaggtttccctcttttgtagaaaagaattctcttaaaaattaaaacaaatttgggaggctgggggatttttgagagtttaaaagagtgaggaagatggggggcgggaagcaactatttccagctgcgagaaaccgatcaacctcacagcaaggtgtggtggctctgatgcaagcaacattcccatagatacagggctgtctggttttctattgctcattctaacttgaggagacgctcaagtgtgatttgtggctttgacactgaaaataggtgtgaacttggatccatttaacctagccccttcccccacctcatcccttctcctgtccagtttgctttcaatgggtcaacaatccctgtggaaagta

SEQ ID NO: 449640 - DNA, 450 bp, Homo Sapiens
gcttaattacatgtaattgtttatttaaaataattttccaagtcttccaatgatttaacaggctttgcttcacttttatcatctcaaacagctataaatcaacacactttttgtattttattttactactatgtatgctattttaataacatttttctttattaatactagaaccaaatatattgaccaataagcagtatagatttaaattatcttcttgggttggtctgaggttgctgatggattcttggggattgatctgatgctaggaagctatcttagggccctgtctctaactcactggcatgtttcagggcaaaacatgccacgggttctagggtctgttttctcatctggcaaaataaacacccaaattaggatggataccttattggtttttaacctgggctataaaattccccatacctttattccccccttcctttttcc

SEQ ID NO: 449641 - DNA, 574 bp, Homo Sapiens
aagaaaaaacatgattttgatcattgtaccacatgcctttataaacttttggtgttatgatgcaagatctaattattatcaaatgtagtgacgcttgttccaaattctaaaattgtttcaattatgccttggttaggggtgacaggaaggctctggtctttagcttatggtacatgcctttcgtcgtctcattttcgtctggagatcctgtatctcatttttcattattctgctttctttttgaaatccctcttttagtagttgctcctgttcctgaagtttaagagcgagggtcctctcttgctctttcagcaactggaccctgtcgttctccatcttctcagtcagttgtttcaagtgttcctgataactcctctccttctgttccatcatctgctcattctttctttgcatttcctgcaacatttttgctgaagcctgtgcagactcagctttcacacgttccacttcaatcatccttttctttttctgtgagagttttgtctgtcttgagaattgcatcagtcatagactccttggatttcaagtatgtctgcagaatctcttcagcctg

SEQ ID NO: 449642 - DNA, 313 bp, Homo Sapiens
aacttatcactatatttatttttttataaaatgcatttgcaaaaatgtttcatcagacactggtgttacaaaaataaatataaaacaaatatacatgtttacatatgttacttataacataaatacacattatttacatcttcaaaaattccaaaattccagcaggttttgtccatgattctcaacatgtctgagacgcagggaaaacaataaaagcacaaataaactacacatcatttacatttttgcttttaaaagattgttcaatacaaatatatgaacatagtaagttcgggggttatggtctaagagc

SEQ ID NO: 449643 - DNA, 774 bp, Homo Sapiens
  misc_feature (581)..(581): n is a, c, g, or t
tttaacgtcaaggaaacaaaatgtttatttaaaaaaatgagatcaatatcattttaatgtagaagatgccatctttatttacaggctaataaaaaaatattaaactcaactagatataatacattatcataaatgcaatagatttgaggccaaccataagtgtaagactggatagatggaatagggattacataatcaggatgtcaaatactgtgcatcttacacatgaatcacatgaaacctttttgtttctaaacatgaaaacagcataagtccactgcagtggggaaaaaaacagcaccacagacaagctgtgctaactttcgatagctgttgacttgtaattatcaagactcacaaaattttcgtctttctcaaatttattttaacaatagtctcaccaccaaaatgttgcttttccatcatattcataacagagatactgtagaagagaattttagaggttaagtgtaaatatatacacgcacacatacaaccctcacattttattaaaacgttttctcaaccattctgtttgtgtatacatgtgtgtatttctccttctgtccccttctcgatgnaaatgggctttgcaacagttccctccttacttgtttgggttttgtcctaggaagtttcaggggacatatggaatttctttcctataaatgtgaaaatattaaaattggttctcagtcctttggaactaataactaattcttagttcatccccaaaaaccatacattctaaaatgaacttttaactagttactt

SEQ ID NO: 449644 - DNA, 1037 bp, Homo Sapiens
  misc_feature (584)..(593): n is a, c, g, or t
aacaatcccagagggctctttaatctctcgagggtgtcgtgttttcggcctattcagcttgtcgctctccacgtgtgaaactgaccttcgttttaatgctctccataagctctgattacaagcgtaaaaatacctatctcggagtattgcgtaagcgcccgttgtaacccgttttctagtattaaccaggatgatgtacgtgctgttataccggaaggttacactcataagagccataatcttggacagttacggatacgcgaaatagtcgggtgattaatcttaggtgatagtccctggtttggagaaaaagttggtttgacactttagtaattaagccttattgcatgatacttcccttgactcagcaagccacatatatataaatcaagtgtagaggactttggtttttaaatgttaaaaatataattggagcagataggtacctaaaatatgctcttataataggaattaaaagccatttagtaagtccacagtcatttcctatttgattgctaaatatttaagagtttttcagttatggcctgtctcacagaggaagtatgattatctaaatacgtacnnnnnnnnnnaaataaaggaattgcttgctcaactcagtgctttctgtaaaacattgcaaaattgtgcgcatctgcaagttaaaaccatgacatatagcaggctaaaattgaacagaatttgattgcagacctgaagctgattttctcagttttgctaccaaaaacatatcttgctggagtatgctcaagattttttgaacagtccatgaaaggtgacagggatgttaatctccacttcagcccgggcaacttcacttaagtccttggcattcagaatcaggagataagcaggcttttgtcctgctcctgggctcaccaccacactcagaactacaccatcatcttcttccaaggcatctgggtgagaaacaaagatgggttctgatgggtatgaatcaggcttcttgcccggacgcgtggtcgacgatatcccgtaattccggaccgtaccag

SEQ ID NO: 449645 - DNA, 548 bp, Homo Sapiens
ggctgtacggcccggaatttcgggatatcgtcgaccacgcgtccggcggggcggaacagatcgcagacctgggggttcgcagagccgccagtggggagatgttgaagttcaaatatggagcgcggaatcctttggatgctggtgctgctgaacccattgccagccgggcctccaggctgaatctgttcttccaggggaaaccaccctttatgactcaacagcagatgtctcctctttcccgagaagggatattagatgccctctttgttctctttgaagaatgcagtcagcctgctctgatgaagattaagcacgtgagcaactttgtccggaagtattccgacaccatagctgagttacaggagctccagccttcggcaaaggacttcgaagtcagaagtcttgtaggttgtggtcactttgctgaagtgcaggtggtaagagagaaagcaaccggggacatctatgctatgaaagtgatgaagaagaaggctttattggcccaggagcaggtttcattttttgaggaagagcggaacatattatct

SEQ ID NO: 449646 - DNA, 903 bp, Homo Sapiens
  misc_feature (50)..(50): n is a, c, g, or t
acgcaacaagaaagaacctctccctggaaacggcttccccaacaaacgangtggctcctcacgaacaccgcaaacagccccacccgtgggctctcacgtcggaatacctgtgaagaaggcaagccagcttgggcccagggggacttttttcaagagcagggaggctgagcagggctctgggagctggcaccattgtaaagcctgctctaagacctttgtccttgggatgcagtggacgctccagctccccatgctcgcgaatctcaaaagtcacccacaagtccatcccagctgctgtcccccgcatctccagtacctggttagtcagctcctcagcagtcagggttggggacaccttcagggtgacacagttgtctgggagctgctgctctatataaacttccatgatgaggtctccagcctgagacagctgcacgtccttccaggtggtgataagactgacctccaagtcaatctgagctacctggtcagaatcgatatcaaagacagagatgtagccatcaatgagctcttgaagcactcgcacctcgtgctcccctcgcccatccgtctggaacacgctgggtgcaaacagcagagccaagttccgcgtgcacatctggtttagagccgcacatttctgcacccgatagagatgcccaatgagggtgaccagtgtgcggcggttgacccgcggcaggcagccaatcacatctttatatttctccaggcgctgattcttctggggcagctgaaagaagcgtttgagtgtgtcagtgacatcctccacaaagtgctcccctggtcggagcttcaccgactgggcatcccgacggaactcagccaggagtctcaggctgcgggcacgagcgccccctttccggtatacaccttccagccgct

SEQ ID NO: 449647 - DNA, 411 bp, Homo Sapiens
  misc_feature (200)..(200): n is a, c, g, or t
gcaagatatcccttggttttattttaacttaacctttgtgaatacttcacaaaaatacacatacagaagtaaataaaactatacagttgaactaaatatccagcagatacaacaagtagtcagaagttcaaagatggataagttaggcagctgatgaggttgtctgcataatcaaaggggtagcaccaataatgaacaantaacttttaacaaaagcattctagttaacataaaagaatttgggtagtctataaaatggttgaatgggtaacatgcattgatcatacacaccataatatttactgaattcaactatttacttgtacaccttaacaagcattatgagatctaaatacgttcttgcggacgcgtggtcgacgatatcccgtaattccgggccgtaccgcctgc

SEQ ID NO: 449648 - DNA, 1713 bp, Homo Sapiens
  misc_feature (316)..(409): n is a, c, g, or t
agcggggtttaccagatgctccaaaagtgggtgatgagggaaggcataaagggagccacggtggggaagctggcccaggcgctccaccagtgttccaggatcgaccttctgagcagcttgatttacgtcagccagaactaaccctggatgggctacggcagctgaagtggacgcctcacttagtggataaccccagaaagttggctgcctcagagcattcagaattctgtcctcactgataggggttctgtgtctgcagaaattttgtttcctgtacttcatagctggagaatggggaaagaaatctgcagcaaannnnnnnnnnnnnnnnnnnnnnnnnnnnnnnnnnnnnnnnnnnnnnnnnnnnnnnnnnnnnnnnnnnnnnnnnnnnnnnnnnnnnnnnnnnnnnagccactgcgcccagccaacaatccgctctgaggaaagcgtaagcaggaagacctcttaatggcatagcaccaataaaaaaatgactcctagttgtgtttggaaagggagagaagagatgtctgaggaaggtcatgttctttcagcttatggcatttcctagagttttgttgaagcaagaagaaaaactcagagaatataaaatcaacttttaaaattgtgtgctctcttcttcacgtaggctcctgttaaaaacaaagtgcagtcagattctaagccctgttcagagacttcgtggatcacagctgcagctcaccgccacatcacaggatccgttaacgttaatacccaatactctgtcagccactgtaggctctaagaaccacgtgcagtcttcagcccattaaattatcgattattttttaatgaattgaatttatattgagtcttcaaattaactgaatggatttaaaggggtaccaaggaggggggaaacatcagaatttcccaggcagttgttgcaaggaattggtactaaccgtgactacaacaaaaattcttgattgacttttaaagttatttcctggcattctggtaccttcacccagcctgagtgccctggaagagggaacaggaaatgctgatctctacccctgggtgagaccagaacctcagggctgatactgttgagtggcttcctcggtttactctgtgtactgtggaagtattttcatattttttctgtgtgccagagtgaaaaaggaccgcttctgagtgtggtaattgtgcctctagcacccagcctttcaaagcccacctgaaacctgggggtggatgaaagaactagaatagaagactgaagctgggtaggccgctcagtgtccactggcattttgctaaaccgacaaggaaggctgtgtgcttagctctccccagtagggagggccgagacgggtgtggtgatggtcaatctggctgtcgggaacagattctggtgtcttgggctggataaacagggtgtggtggattctgaatgtggaattccccctccaactcttagcagacacattacacaaccctgcaaatggggctgccgaccaggcggtctcagccttgccaatggggattctcgggctgagtaattctgtagtgcggggctgtcctgtcctgtaggagttaggagaataccggcccaccacaaaatagccggcagggaccagcgcgccaggtgagaaagcccaaatggaatgtcagaagggaggcaggacgaagggaaaagatgacatggacgagaactggcaagtg

SEQ ID NO: 449649 - DNA, 857 bp, Homo Sapiens
atttctcttatatgcagcctgtttcgggatctccgttgccccgtgttaaacatagcccctctggggtccatttattaaatggccttccaccccctatggggacctaggtgttcaccgccgtcgttcagaggacagagagtaaatagttgtaattgccttaatatgacttctgttccagtagatcacaatgagttcacgaactactgttgttttctctgttaatttaggtgtttgcagataattttcattatacaactatatccgtagctgtatgtgtgtatagttacataatggtaactacacacgatacaggagaatcagtaaattcatggattattttgctgaggttttaaattttaaagcctctgtttcagaattttacacttgatcaaggagaaaaataaatgtgtagtctaacatttgctttctggagttaattaactgatctgtaagaaccactgcatatgtcttaaaatgtaaacatatttacatttgttgtatttgttattgagcctttaaggttaggcccagaatgaacagaccatagcaagtaaacaaataatttttagaatcaaagtattaatagaagaccagttcatggatttgcttattctatcctgctgagacaaaactcatgagtgtgcacacacatgtgaatatatccctacgaaacagtctatcttctcataggcttaaattatagtcatggctattaaagaaattaacagcatccagccacatgcaactttccaaccttcagtactattaggtgattaaaatcaacaaatatgaagtttagttcatttttcccttaaaattccaacaagcggacgcgtgggtcgacgatatcctagggg

SEQ ID NO: 449650 - DNA, 806 bp, Homo Sapiens
atgtgaaaaacggtgtgaagaaggccccagacgagtgtgtggcgcgccacaacactatgtgtttctggagtggttggacggacatctatgattttgggctcggtgttgaagagcgtggttagaatgccctgtttgtggccagtagtgtgtttgacgcgggagaggtggcacgaaagggccgggtgccaaacgttacgttgtgtcgcccttcgtttgtttcgtccatgtatcaagtaagggtgcccttaaagacgaagagccccaaccaattggcagattgatagacagacaattaaaaggtgggataacccttgtcgaaagacgtgcgagttcagacgagtgttggctaaccgttatagtaagtactgtataataaagagtcgcgtggtgattgtgagatttgcgtacagcattatctgtaagcagttattgttattttttcttgaaggaagtgttcattcctttcaaggtcaaaattagtatgtgtttacacacgagtatattttttaatgctattactacctgcaaatacattcttccataataatgcactttcagttttcactggaaagatagcacaagccttttaaaagtcctatgaataaaatttataaagggaggagaacacaagtatggtgaatccttcccactcccacttccatcaaatctcaagaaatcctcctgcttcaaaacataaacatctcacagatttttatttgatcataatgtggaaaagaaaactgtattcctattctttttcggacgcgtggtcgacgatatcccggaattccggaccgtacgcctgc

SEQ ID NO: 449651 - DNA, 1319 bp, Homo Sapiens
  misc_feature (49)..(49): n is a, c, g, or t
  misc_feature (753)..(807): n is a, c, g, or t
  misc_feature (1180)..(1208): n is a, c, g, or t
aataaatgcacaattatgaaaaaataagaattctatgagactgtatacnggcaacagaataaaatctattcttttctttactgtagctatgactcctccctcatctttctgaagctcaaccttgaatgcttacaggaccactgaaaaaagaatctctaggctcccccaagagctcatttccatcaacagttctggaagggtgagtatgggaagatgggagggccctgatacttcccacacctaccatggcatcctgtccaaaccatggcagaagtcaaagccaagccaaagacaactataagtaggaatagctgcttcacagcatgcttcccctagccaaccaaaaagaggtacaagagaatttccttgtgaatacttggtaagctaaggaagcttattttgataatgtttggcagaatttcagttccaaaaagttcaggaagaactatgtaaaatcaattactttctatttaagaattatatataagattattttacatatacacaaattgaattttaatctacctttagcaaccaagagtatggcaatttacaatcaatattattatacaatcatttgtactagctacttactggaaaatgtactggtgttcctacccaaggatgactacactcactgtatgtcatcagtaggtcatacatttgagttgttcttccacaaccagaaactgacctaattgaacactcatacctttccccttcttccttcccatccctgcctccaactctacnnnnnnnnnnnnnnnnnnnnnnnnnnnnnnnnnnnnnnnnnnnnnnnnnnnnnnncacacttcacagaaaagtaacttttctgtgagtattacccaaatgttagctgagaattaaggactagaatctgctatccctggatttcctactcactgtcctatctcattgccttaacatttgtaaaccatgtgaatgacttctttagggcaaaaacagtattgtaactctaccatgaaaatcataactgaactataatatgccagaacttggacagtgcctatgtgattgaaaatcaaatattcaacccagaaaacatttacatgtctctttagaacgagaatacctctttctatgcttgtgttgggaattcatgtctagtggaagctgcagcatgtctatcacagacaatcctaatgtttctctcctaacnnnnnnnnnnnnnnnnnnnnnnnnnnnnnaaaaggaggtagaaaagggtaggaggagcaggcatcgacgcgtggtcgacgatatcccgggataccggccgtaccagcctgctttttataacctgtcatagtgcactatgg

SEQ ID NO: 449652 - DNA, 1412 bp, Homo Sapiens
catgtgattcccttccaggggcttttcctcgaggctcctgggtgacctgtctgaccatggctggagaatcagcacagcactccctagccttcactctttcccccatttggctgtggaaatggagaaacacagtcacctctgaacttctaaacctagaaacagaaggagactgtacacaggggaatacagaaggcagtctgggatgatgtcactatagaatgactgatgaaaaatgcagattgactgttctgacgctggcttagggcctggggctgaagctggggaccttgagcaaggccctttgactcctgtgatctgtttgccatgttgccaatgaggaataggaacctgcttcaaggatcttatgaggaccaggggagggaggggtatggaaagcctttgatgcaaatgctctatgcagaacaggagttataattatagtctccattagacatgaagcttcctgagaaggatccgaaatccacagactatcaggactggacggcctgctgaggttagttactctagccaccccttttcactgatggggaagctgagcaccaggttgtaaaagcctgggcctgggatcaggggcagtgggaggaggagttaaggcagggagcaggaatgaaaaagaaactaagtgggtgagggccagggagaggaagattaagtcacagatctgattttccagagcctgaagagaaaaacagagcaaaggataagacccggatgacagatgagatctagattcgactctgggaactgctccatgccttggtttcctcatctgtgcagggatgaggttccagctctgatagatgaatggactcactaccaccaagcttgcccctgtgcccaggtggcaccaagactgaagggccaggagggctgaggggatgcaccttgcctggtaaaggaagaggagctctggctactgtcccttggtgtacacgactctggcccaggaatgatgcctcagctggggaggctgcctggccctgtcagccccaagggccttcagagaccccctctctaccactcaccttccccactctgatttgcggggtttgtccacactccccccgacccctactctggccttcagacaatcctagaatgggacactgcagtgacataagagtcctttgaccagtccccccaccattttaatgcaggggtaaactgaggctctgagcaggccagggtggagtggaaacacctagaggaagttgataagtcagcaagtcggcagcagagctgacaagctgggaccaggggctgtctcctttatgtcaaatggccagcgtgacacagactgccctgggaagcctcggaacttctcggattgggacagagtgctgcgcacgcgtggtcgacgatatcccggtaattccgggccgtaccaagca

SEQ ID NO: 449653 - DNA, 923 bp, Homo Sapiens
ttgtatgcgtgttttgttgacatcaagttttaaatgttcgtgcccgtcaattcgctttgattattcaacgctttgctattaatttggttgattatacagaaacgtggatgtactgtggccacggcaccagttgagccaaagggtagcaaatccggcaatatgtaaacccgggcatattgaattagtattccaacagttaacagacgtcaccgtattaagaacttcatagtactagaacttctacccctaggataaggaatgtacacagattggtttttaatatgtatccaattataataaagtgacaagagtgtactaattcggtatccacatcttcagagcaggaatacagtataatgagtaatgcttagaggagtcttgctgaagatgagataaatgcatctcactttagtataatggttttcgtaaattctcactgaagctctaattctcttgtgctggtgacaggtggacagggtttttaaatgcaagtattctccctacaccctgagtatggatgcatcagttgtttaaaattctgtggaaagtttccttagaaaaacattaaaatttaaagtgatatactgatgggaaattgaatatattaattgtggaagaatatcagctaactaattaactaagtagacatttaaatctggactctgttgaagaatcacaggttaaactctgcattatgtgcactaatgtcagccatctaatatcaaagtcagataagtaaactatctttcactttatacatagtgcatttagtaaataaattctcggtaccagcaacataaagcccttgttggagcaaacttaagtattaagaattgaattaacttacaacaattatttgaagggtaagtggaacattatcggacgcgtgggtcgacgatatcccggaattccggccgtaccca

SEQ ID NO: 449654 - DNA, 1189 bp, Homo Sapiens
atgtgcttgagagaaagtgtgaagagtccagtataggctcctggtcaaagtgatgctggagcaggactgaagacgatgcaaccggcccatgactgtgttgcatggcccactgtaatgtggaacttggccttggttttgcaggggcccccggatatacggtatcttttccacagagatgagggccgcatggacagtgtgcagggacttcgggggcacacaccaacccgcgctccagcagcttagggtcaaactgggtgtacgcagatgcccatgccggtctccttgcatggctgaagtgatgggcattgtggtacatctgcatggacttcaccttcttcaccaccttgatgggcagggatctccacatctgtcaccgaggctgatggagcctgaaaggatggtccctgtcatcacatgtgccttggcctttgatggatgaaacagtggtcccccagaccatgaggaacggtccccgaggggtctctcgttgggatggaaatctgggacgtcaggagctcaatgagctctggaatgccctgtggagcttcagtttcgggggcctctggtccccccggcttgccgccacgggtataatcggtgcacctcggaacttggtgttctctagggtcttctgcattttcttggtcattttatcaattgctgcctgtctctttccttcaggtaagaggtctattttgttcagcaccacgaccagcttctggcaggcaatctggccgatcacaaggcattccgctgactgggtctgcatccccttggtcacatcgatgaccagcatcatcagatcaatgatctgggccccgccgatgatggtccggatgagggaggcgtgcccggggcagtcgaccagcgtgacctgaagcagtggctcgccgggctcgggctcggcctcgggcgctgcctggaactcgggcaaagacgaccgcaggcgcgcgagagcagcaggcaccgagaagcacgagaagcccagatcgagcgtgatgccgcgctcgcggctctgcggctgcttgtcaaaggcggcggtggaggctgtggtgcttagcgcccgcgccagcgccgtcttgccgctgtcgatgtggcccagcacgcccacgttcacgttcacccgccgccctgcccgacgcgtggcgacgcgtgggtcgacgatatcccgtattccggccgtaccagc

SEQ ID NO: 449655 - DNA, 945 bp, Homo Sapiens
cttccagacctccgggttggggaggaggaggaactgtgattgggacggggccttgcccagggtgaggggacaaaaaccagaggtgtctgttttcagggccgtcttggtagcggctggccctgcgcagtcactgacccagagttttctggaccaggcctgcctcaaggatcagcaggcatgatgtccgcacagccttcatgctaatactgtcctaacacagcctggagctaggcgattcctttgaccacaaagtacctggagtctaactcagcaccacagcctctgcatggctcccaggtgcccaccacctggcgaagctcattcacagatgacagcaaagggggagcttgatcatctggcgactccttcctgctgcttctcccaacacccaaaacagaaagctctgcatccccaggtcacacctgggttggtcagaagaaggaaacagcttgtccgagcacaacatgctgacagagctggctgtggccagtcttgggtgccgggccagcctgaggggtgggcaccgccggagccggccgtcagtgtgtggtctgggtgggggtccaggcagcatttattttcatggaagactggaggccagagttgcatatctaccagtcaggcatttcaagaacgctgacttgcctttctcagaactacaacttccgatttgaggtatcagtaacaaagcctaagaacttgggaatgaaagtctgatgcaggacaggggtttctggcctcggacccctctgcagtctagtgtgacttaaagctacatcaaggtcagccgcagggaggcgaagggcccgcagccgctcggcctccacttcaaggcaactcaaagaacagtctccgctgctgagaaggaaacctaggtgcacaaagtctgaggttttgtctctggactgggcattttgccttcgtgccgaattcgccacccaggcc

SEQ ID NO: 449656 - DNA, 1245 bp, Homo Sapiens
  misc_feature (80)..(80): n is a, c, g, or t
agaagtctaactagcaagcagactctatgacctattcgcgatgctgctaggccgctgtcactgtagcgcgtgattgatgncgtgtagtgtatcattttgtggcgtggtactccatgagtgtctgtgctctgctagctgcgcctgatctcatcagcgttggtggcactgtttatgcgtacatcaagagcatctcctgcccgcactacacgtgcttgtacttggtctgtgtaagattatgtgtgtatggagggcagttattgtccgttatatttgtggtacgtgtcatgattgtgttgtgatattggcattcgctgatattggtcgcagcatggatggacggtgttgacgcgtcgagatgccggaggtttgtgtgcgtgcgacatgtcaaacggtgagtgtccctctcctcgtggtgccgatgcactaccatatttatgacaagcttatctactggggaggtccgacactatggggggacgacacagcgggggcggggagctaatgcgcattgagggcgagggcgggccgcgtgtctcggtttccagaagtgccgtaaaagcggatagtttcgaatgttataggtattgtaagatggtagactatgctatttggggaacgggaggaaacactacctgtttaagttaagcccactaagaacaaaatcagtgccgatgaacgagccctccgacacgttttcagcaaaacgcctgtcgagaagtgcttggagatcaccggccattgccgtagccggggaagagctggttgaggacggtctgcagaggctggttcacctgcatggcatagctgcggcccaggtcgtagcggcaggcagggcagctgaacacctgtgcccgaaaggatctgtccaggcagtccttgcacacgttgtgctggcacacggtcgtgatgggccggaacaccagctcctgacagcagatacactggaacgtctcctccactttactcaggaacaactggaacgggctgccgctcgccggccggtccttgagtgacgccaggacctcattccacagcttggcgttgctcttgtcctctctgatgaggctgctctgctgggccgtgagactgtagggctccaccttggttttcttggatgtccggcgcggggacccggccctgctcgggccacctcctgccgacttccgcttccacttgcccttgcccgtcctgggggacgcgaagcccccctcctgctgctccctcgtgcggaattcgccacccagc

SEQ ID NO: 449657 - DNA, 1011 bp, Homo Sapiens
  misc_feature (16)..(16): n is a, c, g, or t
  misc_feature (86)..(86): n is a, c, g, or t
aggttctgggccaaanaaaaaagcttccttgaaggcctatcccactttccttaaaggctgggaatcttttttaattttctctgccncctaactttccttccaaccttttccctcggcaactgtccttccccagggcctccctcatcgtggggcaaaatcatcatctgaaggaagaggtcccacggtgtgccagggtttccctcccagggatttgttttcatccggaagctcctccttcccttccacggcaccggaaacgggctgtttcacaaacacgctggcagggatctcattttcctcctggaagatgagcactttgaaatggttgcgtcggaggagctgggcgtggttgttctccagccgcttcacctgtgcgcactgcctatccatgcgctctttgatccgcgcgcgtgtgggcgctgaccttgcgggacttctccagcagcttgctcaccgtgtttgctggtggaggcctggtacttggagagcttggtgaggtcattctggatgcccttcacggagccctccaaactgatctgtcgctgctccatcttgtgctggttctcctgcacagcgtctagcatgttcaccagcttgtccaggagcgtgagcaccgtgactgcgttcacctgtgagttgtcccggatggcctcctctgtgttccctaggttcaggctggggcttggtgtggaggaaggcatcgggctggggctcgagggcttttcctgccgcatgtcagacccagggtgctggaacttttcggcctgtgcagcgtcctctcccatggctaggcaggtgggaacgttctttctctctgggagctgcttcttgctcgggtgagaagttgcggtggtgagggtgtaggatgaggcccgctggttggagctcagcgcaccagtctccaggactggcagaggttcagacaggcaaccgacgcgtgggtcgacgatatcccgaaattccggccggtacagcctgctttataaccacggttctatatcataatctccc

SEQ ID NO: 449658 - DNA, 1837 bp, Homo Sapiens
gggagaaagggccaagataagacgttgttttcgtaaccaccgatgaaggctcgcgggaaggaaacccgccctagtcctcagccctttcggactccattggaccaccacttgcctgttgtttggcctcaacgttgttcaccccatcagtgcctctgacgtgccccttcccccgtgttttaagaattcctgttccttaggactcctgagtccagacagaagtcctgggggagatggtttcctggactggggatgggtgcatgtccacccagaggggactgggtctttcccgccaggatgcctgccaggctctgtctgggcctgatgctcaaggcccctttgatggatccaggctctgtaaggcgggcagaggcataggccgaagctccaaggcaggcggcaggttcacagaagcccggcagccccacggggcctggcaggccaggtcgacctgcctctcctggagcccctggggaccctcgatctccatccttgccgttgattgcctggccaggccggccagggagtcctgggatccctgggggcccaggcatcccggggtgcccccgtcccacttctcctggatcacccttctctccacgttttcccttgggccccgtgttgccgatctgacccacggctcccacgatgccaggaacgccccgagggccagggtgcccatgggggccctgcttgcctgggtacccagggggcccaggaggtcctggaggacccatcatgcccaccgcacccagggcttcccgcttggcactcacggcgacctctgccagttgctcttgcagcatcttcagcgccacatccacgatgtgctggtcagtggcatcccggccctccacgccctgtctccctggctgtcctggcacgcctcggttcccggccagtcctcgagggccggggggaccagggtagccctgaacccctggtgcgcccgcatccccgctggggccagggtagccgggttctccacgtactccttgctgtcccttgggccccggctcgccggactcgcccttctcgcctttctctccggggaggccggccacccctgggtcacccactttgccgcggggcccggtcttccctggggagcccttgtctcctgttgacgcctggcaagccttggggccttggaattccgggggggccactgctcccccgttagggccctgccttccctgagggcctggttgccccactggacccctctcgccttggtcacccttctgtcccatgatgccctggggaccaatttcgtcctcgaggccctggctctccctctttcccagggggaccagagaatccaggaaggccctgcagggcccggctcacctggtctccagggcctccttttgtccccaggctgcctggcacacccgctaggccctgctgcctggacttccggccgtcccgcctgtcctgcactgcccttcatgccaggcgtgcctggggtcccatccttgccgttgatgcctggggggcccagttgctcctttcgggcctgtgatccctggggtccacgaatacctgggctgccctcgtcacccttctccccagctcggcctggcggtcccctaggaccttcctcacccggtggcccagtggcaccgatagcgcccaccatgcctttatatccatgagggcccgtctctcccttgggccctgccatgcctgggtagcaccctgatgacctggggacccggtgctccagggatgccttgctctccagagcgacgcgtgggtcggacgacgcgtggtcgacgatatcccaaaattccggaccgtaccacctgcttttaagcaagttttatatccaaatccc

SEQ ID NO: 449659 - DNA, 1675 bp, Homo Sapiens
ccagggggaccagagaatccaggaaggccctgcgggcccggctcaccctggtctccagggcctccttttgtcccaggctggcctggcacacccgctaggccctggtggcctggacttccgggccgtcccgcctgtcctgcactgcccttcatgccaggcgtgcctggggtcccatccttgccgttgatgcctggggggcccgttgctcctttcgggcctgtgatcccctggggtccacgaatacctgggctgccctcgtcacccttctccccagctcggcctggcggtcccctaggaccttcctcacccggtggcccagtggcaccgatagcgcccaccatgcctttatatccatgagggcccgtctctcccttgggccctgccatgcctgggtagcccctgatgccctggggacccggtggtccagggatgccttgctctccagaggcacccacatctcccttgggacccggcttcccctggtggccaggatcacccagaatcccgcgtttgcccgcatgccccttcactccctgcagccctgggggaccttttcattccgggtggacagttggttggacacaggaaatccgcactgccttccagaccctggatggttcccgggcgaccaggtttcccagggggtcctgggggccccgatggtccatctggtccagggtcccccttggggcctcggattccaatctcaccagggaggccaacaggtccaggaggcccaggaggtccagcaaaaccagggcccggaaggccaggaggaccaggaagcccgggctggcccttgactgccagggatccccatggggccaggctcccccttggctccagttaaaccatcaatcccgggcttcccgtctggcccatctggcccagctttgccaggctcgcccttgggtcccggagggccagcttttccagggggcccattgtcaccctgaagaagcgtccagatgtgccagaggcaggggtgaggggttgagtcgcctcttgccccacaaggaggggaaaggagaggaggggggatgagtcctcgctgtgagctgcggccggcggtctgaacagcagctccttgtctgtcggcggctataacgggctccgcatgtcagggctggtttgaggtttttgcagaacaaacgggcgtccttgtggtgcgggccggcgccgcgtcgatgccgtcggatccaggcactcccggcggtcccgggggacccggggggccccgctctccccggtggacctctaatctgcgccagagcgagcactaccacctggaggagaacaaggaggctgcggggggaggccgtagcggcggccatggctggcggcgagaccaagggggacgggtgcgtgtccgcgcacgcaccgacggcagagtctcccggcgctcctccagcgctggctgttcgcgggcagggtgggctggggctccctacgtcctctccagggcccaggccgagagcacctcgggctctgcagatcttgctgcaggctctccccagctcccgcccaccttgctcccctctcctctggctccttcctctccaagcacaaacaaacaggccttttccatattaatatgccacagtccttcctggatcagccgtctcatgaatactccatcggcctcttccagctctttagtggagctgtgtgcccc

SEQ ID NO: 449660 - DNA, 1598 bp, Homo Sapiens
gggacccgaccctcctctgctgagtggaagctgctcgagtcgctgttgtggattttggggactcctgcgaaggagaaaaggccagcagcttggctgaggttcctgttccgtgaccccggcggcctcttggtgcgtagagctcccagcagcacggggccccccggtcaggccccccctcaggccagttccttcaggtccaatgtcttaagtttccagagaagaaaggaagcgccccatggtggagtattgttgccgcctgggaaggggagagggggcacaggggcctgccctcttcctgatacctgaaggcagtggggccgggagagaaacagagcaggtggcgaggagtcccggaggcttcctccgaaggttctcgggcctttccccgagagttctggggagtttccccaggacagctggcattgggggcagccttggaggcatgggtccccaccaaggagtgttcaggatctgctgacagaatcagagcagggacaagatgagggacctcagggagggacagatggagccccccaagtctgaactcataggctggggaggaggagacatctaggtgggttcgagggggtgcgagcccacctccaggccctcagccctcttttcctcataacttggtcagggcacaaggacttgaaaggacttgaaagtcagggggttgagaggactggaggcgcctcgagtcaatgtctgggaaacagaggctaaccaggcaggcctccagcccctgggacccccagccacgatgggctggctccgcgggagcgtcctggccctggaagagtgggccgggaaggaggaccggcttggcccctggagaatctcaggcataccaggagtggggctgcgggcgcggcaccagcatgaattgcggcggtggaggccggggcgggccaggccgcgaccagagagaaaggcagcctgggagggccagcccggccaacccaccgggcctgctgatggccgagcccacgctcgaggggctgaccagagttcaatgcgcctcagaaaactccataaactatcccgtcttatttggcaaaagctcatatttttttcaaagtttgaagacttgaatgaaagagaggaagaggagcctatgggaggaggccgagccccagggcggctgatgcgagtctgtccgcggagactgttggcgctagtctgagtagagcccgagagcagactggtggctcccgggcgccctgaggactcgctgccctttgtagtgttggctgacccccccgggagccccggtaggaggcggcggcatccttggaacggcaaagggagaattcctccatgcgcctggagagggccagctgccgtgcctggctcggcctccagccccacaacaccaccgcagagacatcttaacctacaagccccaccgtacgcaccccccacccaccccacgtgcactgctgccacagaaacgcacatggacactgctcttgaccagacagtgcaccgacgcgtggtcgacgatatccctagattccggaccgtaccagccactgcatcttttttatacgccacaaggggggttgctatagttcaccttaattatttggcccctt

SEQ ID NO: 449661 - DNA, 770 bp, Homo Sapiens
gatctccttttccctccttccccactttcttcctcatctgcaaacccatcagactccccatctcgatcccaggctgcaggatccagtagcagctggggcacctggcccagaggttctgccacctccccaggggaccccaggaagaaaaggtgcctcagtccccaggtcctcaaattcttctgacaggtcagagtcacggccacactcctcttctccctcctccccctcctccttttctgagggtggggcctcaaggccctcggaagccaggacagcaggatcccagccctcctttccagtctccccttgagggggtggcctctgctctccagtggggtcccacctgggggaggtgggggacctgaggtagaagcccaggggagtggagtctggaagggtctccccgagctcatcgtcctcgctctcttgctctgctctcctccccttcctcctgggggccctcggggatctccccagaacccaactgcctcctgctcgctctctacttgtccccagggcttcagccctcccctgcaccccccagctagcctcctgactcccttcagcctgaggctgaggcccaggggcatcttccaggatcggggtgtacgttgggctgggggagaccagcactggtggtacatcctcctcagcttcctctgaccccagaggccaaggtgaaggggcatcacttccagtgtggcccagggtctcagcagggaacgcctcctctgctcccctgggggccctcgtgccgaattcgccaccca

SEQ ID NO: 449662 - DNA, 971 bp, Homo Sapiens
gggaaactgtccctacattccgctggcagggtcaacatcagggggacgcgtttcagattggactattccacccgtcctccaatcccagattgatgaacacgcagacagtgcgaattaggccaggactgaagatccatggagactccgggaggaactcccgactgtacggcatgcgaaagcttgcctctgtcgttaagcctaaggaaggatcccctaaacggaccctccgatccaacacacgtgtgttcagtttgtcacttccagcagggtagttgtcccatcaggctctccacattggacgcagtgtgcgttccaattatagctcctctcccgtgtaccaatgcagtatgctctaacaagaggcatcccacagtggaatcctcataactcgaggtgttgcaatcagataggcggcctccaaaaagacccccctttataaaaacgatggtgccttcccacagggagtggcgtcccaacatggcacgtcccagtggtggtgttatcagcaaaggggaaggagctgctccagctagcacaagagaggagtctggcctccagctgggggtgcctgtggctctccagaggttcccagcaggattgtggcaggagacagaggcagaggctgtccgctgagaatggagggtggccctgacctaggttcccggcttaggagccgcctggcctctggccacaccctacaaatgggtctccttctccccggctatcagtccttcccttgttggggagggcccaaagttccgccagcactgccatccaagcagggatgttgcttgggctgtggcagactggagtcaggggtgatgagctgacgcagacgcttcctgaaaggaccccgagtcttcaggagggtgacgacgaagagtgggacacagaccatggaggacagcgacgcgtggtcgacgatatcccggaattccgaccggaccacctgctttttaaccacgtatatc

SEQ ID NO: 449663 - DNA, 1323 bp, Homo Sapiens
aagggggaatggggcccaccccaaccagggccaagaatggaggtgttccccacccaagggaaacccaaaaaattctccttttcccaacagggcaaggtaagttcggttgggcgcctttccctggcgggggactcgaaggattgatgtaaggcccacgttggccaagggacctgcatggggatcacgatcccaaaagaccttcttctccttatccgacaggacgtacttgatgaaggcccagcctgagccaatcagggcgatggtgatgaagaggagggcgcccttcagcaggtgtgcgatgtagtacatgacggcaaggccttcgatggggtggccctggcttgttgattgaagtagtaagttgatgcttgtggaagaggagagagatgctcttggtgaaaggccaaggccggccatgagccagtggatcttgaagacgctgtacgtgttcctgcagagggatggacacccagaagatgccagcggccaggaagcaggcggacatgaccatgtagagcttgaaaaaggggcatctccgctgccgacaggaagccatcggggttcttctcccggatcatcaccgtgatgtcgaatggatgctcctttcctggcactgaattgttgcagttgtggaagttcaggctgtactggccttcttccgcctgagagccgatcaccacgtggaaactgaagttgtaggagttgttgaggtggctcaggcccaacaccaggtccttgtccttcccactaggaccctgaatcactgcgggtgttgacttgggcttgctggctgcagaggtccctccgccatccaccttgcgggggactgtggcctgtggcttcgggagccctggtttggagggtgcttccgggaggagcccgggaaagataaacaacgtcttctgctctccatacttccgcacctggacctgcagatccttggtgttgatgaggaacaggaccaggaaactgctactgtttttctggagagggcagtcctggaaatcccgggttgaataggagcgaactctgccagaccgaacccggctgagactgaaccccaccagcagggacttctcttctgcctcccggaggcccagccgcaggacgctcaactccacctccagagagccattggtgtagaaaccgaagctgttcagctggatgtccgctcgcttctcccccgtcagcgccagccggtggatgcgcccggagcagccacccaacagcagcaccagaagtagccgctgcccccactccgcggggctcccgcggccgagccccctcctctcgctcactgccatctctggagccacctcctcc

SEQ ID NO: 449664 - DNA, 1022 bp, Homo Sapiens
ctcggcgtggtcctatacttgtttgtttgggccttgtcccttgcgttcgtcttgtcagtcgtggtggcttgagtctcgtgtgttgtctgactcattttttgaaacgttggccacttggcctgtccgtggttcctgcatctgttccccccggtggtagacttcctgttcctgatatgcctatttttgtaggcagccccgccgtttcttggttatgtgtacacggcatttcggaagtcttagcgtcccccatgctttggtgcatgttacacgttgcgtgtgtgtatggctgttagtgctccacacttgtgtacactttgtttgcatgcatttgcaggagcttgcacttttggtgggtacatgtacatatgtgagtgatcctgtgtgcaagccccccatgtggacatggctatgagtgagcgtggagccaaaagccaggtaacacgcatgcagcaggcccactgtgcgtgtctgagacggtctgtggcagggactgggtgtgaatcatgcagcaggcccactgtgcgtgtctgagacggtctgtggcagggactgggtgtgaatcagtgaccgtgtctctgaccaacatgctgaattacacattgataatttattaacctgtgcagccacaaataagatttttcaaaactcaacaaagtgctcaaagttgacattacttgcttcaaagttagtttaaggcaagtaaatactaactactgcgaggtggaaaattgcatgaagaccctgcacgtcattcactgaggatcttctcatccttttcttttttatctcgtgccccttgtctatttcaaatcatcaggcacattcatttaataatttcccaagcatttttaaaaagacgtttgggagtgtgtaaaagtttagtgactttcacactaaaacttgttgtcagaggtacatggtgactatctccacacaggcagagctgggacccacttactaaaccttcacgtgagaatctcggacgcgtggtcgacgatatcccggtaattccgggccgtaca

SEQ ID NO: 449665 - DNA, 1281 bp, Homo Sapiens
accccccttgggggggtacacccccaaaaatttgcccccggttgccagagaggcttcccccgttttttagggagaatgtacgggttccctttgtgtgtgtcacattgggccagttagaagttccatacgtttttttggcggtggcaaaccacggtgtggggagagcaaaccctgtagggaagttgtaaccaggggggtttacccgtacctgccaaggggggtttccccggtccgggggttgggaacttatggcggtcaagattaggggccataagtattgtgtaggagcatccccccgggggtccggtggtatgggtacccgggcatgttctgcaatgtctgtaggttcaccacatgctttgggtgcatgtacacgtgtgtttgtgtatgcgtgtagggagcttcacacttgtgtacacgtttgtgtgcatgcatgtgtgcaggagcttgcacgttgtgtggtggggtacatgtacatatgtgagtgatcctgtgtgcaagccccccatgtggacatggctatgagtgagcgtggagccaaaagccaggtaacacgcatgcagcaggcccactgtgcgtgtctgagacggtctgtggcagggactgggtgtgaatcatgcagcaggcccactgtgcgtgtctgagacggtctgtggcagggactgggtgtgaatcatgcagcaggcccactgtgcgtgtctgagacggtctgtggcagggactgggtgtgaatcagtgaccgtgtctctgaccaacatgctgaattacaaattgataatttattaacctgtgcagcaacaaataagatttttcaaaactcaacaaagtgctcaaagttgacattacttgcttcaaagttagtttaaggcaagtaaatactaactactgcgaggtggaaaattgcatgaagaccctgcaacgtcattcactgaggatcttctcatccttttcttttttatctcgtgccccttgtctatttcaaatcatcaggcacattcatttaataatttcccaagcaatttttaaaaagacgtttgggagtgtgtaaaagtttagtgactttcacactaaaacttgttgtcagaggtacatggtgactatctccacacaggcagagctgggacccaacttactaaaccttcacgtgagaatcttctatttttaaggctgaaggatggcaattaacaatgaaacatagaaagcagatgaaattgcaacaaattgtaaagaaaaagtgtagcaaattatcgtgccttaatgtactgttcaactaatcactcc

SEQ ID NO: 449666 - DNA, 1005 bp, Homo Sapiens
atccacgggggtttggggtttttaaggcaagaggcttgtttccaaaagaagtatttcccaaagggtgggtaattggggaaagacccccaggtaaggacttggccaggactggtctcctccagctcccagagtagaaggttccatggaagaaatgttccaccaatgttacagaaggtgctggtgcccccagaggcagccacgtccctcagtcatcccactcctcgtcctctgccccatccccctgctctcggatctccgctgcagcccccttcgaacacttttgggccatgatgttgtctgtccaggatgcccctgtctttccatcaccagtgaaattacacttggtcactgttccagcctcaagtttggccaatgaatccaggaagggaccatcgccccgagtcttcagccgtaccccggcccccagctcgagttccatcacctccatctctgactcgggcatccagaacgccactgtgtggtcgggggtgaggctctctgtcagcgcgagcagctctggcttgttgaccagccccttcagcgcctcgggcgtgagcctgtcagtgtcccccttggcttccaccttgtaggacgacatgaggaagcccgtgttcaccttcctggtggcgctgaagttgggctcgatttcatttcccttggcgtcgaatttacggcgatggatgtgactgggccggatatacagcacgtagtagcgctccttcctgccatgagtgtccaagatgctgtgccgagatacatcgatcagttctccctccagcaggacaccatttcccccctggtgggcggcggggtcccaggcccctggcagccggacgctctgcaccgccttgttccggagcgcgccgtcgtggtagatgcggctcattctcccgaccgcccgggcaccccggcacagagccggcgcactgggctgggggcgcggcgcgggaagtgctgcaggacgcgcggggacccgcgatatcccgggaattccggaccggtacc

SEQ ID NO: 449667 - DNA, 762 bp, Homo Sapiens
aagccaaagtcagtgaaggtggtgcaggctgagctgttcctcactctttccggggtgctgctgcgggagggccgtgccacggacgatgacatgcagagtctcgcaagcctcatgagtgtgaagcctagtgatgtgggcaacttggatgactttgctgagagtgatgaagatgaggctcatggcccaggagccccggaggcccgggctcgagtcccccagccagatccctctcgagagctgaagacgctttgtgaggaggaggaggaaggccaaggacgaccccagcaggcagttgccagcccttctaatgctgaggataccagcccagcccctgtgagtgctcctgcacccccagccagaacctcccgaggccaggggtcagaacgagctaatgaagcggggggccaggtaggccctgaggccccaatggcccccggaaacctcaccagagatgaggtcttcaaggcagccagcccaggacacggccctcacccaggcctcggctaccaagaaaggtctgatgccctcggcccagtcaccccaggtggaagatgagggcccccaaaaacctcaggggcacatccagccaggaagggactcggccacgggagaccaggatcaggcatggccctcagaaagggacagaagcccacggagctagggcgaaccgagcctagagatgaggtgcgcaacccttaggaggcacagaaatcaccgcgcgaacgaacgacgaggacacagcagggagcaaagggcaagagg

SEQ ID NO: 449668 - DNA, 910 bp, Homo Sapiens
cctttccttggggaaaaaagatccctttcttttttttaaccccaaagtcttgggctggggagaagaaccccttggaagatcccattgttctgcccctggtcattatatcccaggaaataacgcattggttgccataatttttttcagcaacctgcggaagttccaggatccgttctgctgaattgggaaaaaggttcttacgggagggcaaaccacatccatacatccccttaggatatgcaacgccgagtcttgtcccctgcccaccagctagaagaagatactgctactttattctgagaaatctggaaaagtccttcactttcccaggcctggagctgatcttgatcccttgtagcactgcctaatacctctcgaggcacaggttccattcgtgcatccacattcttttggtgagaagactggttaaaaccttcaatggccttttggaaaaagaagttcagctcctcaaagttcatggcctggagctctgcataaagttctacctgttgggcttcttcaagctcattccagaaacgtagtaggtgctcttgcccagctttggacaacgtgagtttgaggtcattaatgttcataatgctctaatagccaagctttgtagaaataggggtgtaatgtatgtacctgtaaacctttctcggcgcgaccgcagctacgaccgtctccagctccttccgcgcggccactcatctggcgtcccgcgctcgctccgaatatataccctcatccgggggccgcgcggcgggcgggctgggagcgggggccaagtggagcgccagccccggccaccccgcccctctcgccacgactagtggctgccgacgcctgaaggagtggaagccgaccgcccgctcttcgacgaattcgagctcggccgatttggcctgat

SEQ ID NO: 449669 - DNA, 1050 bp, Homo Sapiens
  misc_feature (964)..(996): n is a, c, g, or t
tggagctgagatttctcctactggcatgataaaattttgaacatgtgttatgaaagtttcacaccaattttgttttgttccttcttcattagccgttgtgcttcctttttcccattgtcttcctttgttgttcggctgctctcttttctctgtctgctagtttctgctgtctcagaacttcttctgcttgccaggctgcatcttcttcttcttcccatgcattggtatgtttcctgccaggtatctaagtcacctaattcagaagactgatgaataaaaggcagatcttgtgtagctgctaatctactagagaaacctgtgctcccatctgggatgccaaaattcaatggttctctcttcttaataacaattttctgagttttcctaatagttggtgtcatgtccttaaaatagtcaggttccagttgttccaaagaattttgttgtgttgccacattcccattccctccttcgatctttacactggtgggtgcatcttcatcccaggaagtccactcttcaacatctgtctgcttaggaactgatgaataatcaactgtagttggcaaagttatttggtctccacttaatttccgtcctctgccagatctgcatattaatctctttaggaatgagaatactgttgctaggcaggtacaaaatttaaataaccgaaactgggtgatggccatggtgggaatcaaaacctgcccctccccctccccgcccgcccggcggaggctccgagctgccgcgggccgcgcgcgcacacaaggcgcgctcacgcgcgctgcctgtctcttcctcgagctcgcgctccgcccgctcactcccagccccgctcattcaaagccgggcgcgcgctccgtagcagcctgcgttgcctctgcgcagctgccatggccgccccttcatcgggaaacccgctctcgacgaattcgagctcggccgatttggcctgatnnnnnnnnnnnnnnnnnnnnnnnnnnnnnnnnnatgcggccgccaccgcgatgaactccgagttcgccctatagtgatctatacatt

SEQ ID NO: 449670 - DNA, 877 bp, Homo Sapiens
  misc_feature (220)..(220): n is a, c, g, or t
aaaccacgtggatgatatatgtaacaacttgtttactccaatactttttttccttgaaaaaggtgcaaatgatctttaaatgtaaacacaaagttgccaaacatttttgtagttggggaaagggagaaggaggttattccttttaaatgcagttagtcttattcaaagatttttcttgcaaaatatattgaaaaaaatttgtctatgaatacaatgaggnaaaaaaaactttaaccattgaaattattttttccttaaaaatttttaacttttttaccagaaagtgcaatttgagagaagtagtaacaatgaccttatagaatgaagataatgatacattgtttgtataaaagaaccaagatattaataaaatgcctcaattgattttacactctttaatgtgtgctattacattaactgaataattcattcccttggaggctgttattaaaggtaagcctcagcttaaccaggcctgagcatcaagaataaattgcataacagaattcactgctgggagaagacatttctccctgctggtccttggtagcaataaggaaacaggaaggacagttgctttagtcagtaacatttttgagcaaaaactgttgcagagctgcatgtgattctcttggattctcaagacagcatatgagacttatatattgtttttataagaggcactgagcagagctctagatctagcagaaactctatgagaatattatgaaaaaaagactaaataaacaagttcatatagaaagaaacaagacataaaattacactgatgaaaactgtagtgtctgagtcctggtttttattgatttagcggacgcgtgggtcgacgatatcccgtaattccgggccgtaccagcct

SEQ ID NO: 449671 - DNA, 1431 bp, Homo Sapiens
  misc_feature (300)..(382): n is a, c, g, or t
ggaccaaagtttgcctatagtttaggcacttaataggaagaagctctgtacagaaatctgaaagttgttttgctttttgttttcccctttggtaatcaaaattttactatcttttattatttctggcttttcaaccaaacattgttgctaatccctatttttctttaagtgacacacattctcctgtctctggcttcttcaggctgaaatgacatagctcacccttacttcactcttgagaggtagggctcctttataattacatggttgctctcagactttctgtgaaagtttgggagnnnnnnnnnnnnnnnnnnnnnnnnnnnnnnnnnnnnnnnnnnnnnnnnnnnnnnnnnnnnnnnnnnnnnnnnnnnnnnnnnnncactgaaattacctgggagtgaggattacttgtaattaaaatatttataaaagaaacaactttattcacagagtccagctttgggactagtctgtatcttgttttttaagtctaacaacactgataataggaagtaaaaacagaaaggaaaagaaattaccactgggaaaatctttttagttagattgtaggcttcctggggcctcccatgccaggactgcaaagtgatccagccctacctgtcttcccacctgtgtgtcccccgtgtggggaagttgggtgtcacttccccttcccaccctcacatctggcttagccagtagccacacccctaaaacatcagactcaccatccaggtgcagctccagaggctacaaaaggcttcatgggacttgaatccccatcctaggcttctctctccttcccctcaagagcctgatctggttttaaggggcctggagctgggagtctcaagtctgctaagattcacatccatagcccccgtggctttgaggagaatcctctctgccattcttccaatctccccagtgggttttgctattattttctaaattgggttaagtctaagaaggtgggggtgagcagggggtttatctgtgtgtagtgagtgcttcatgtgtggaatattcattttcttactgcagtgggacttggggttgaagccacccctcctactctgttggcttagccctgagatggtgacaggctggcctgcagtcagcatcattgtgcatgtgacagcatcaatgtgattagtaatttgtctgttcctcccttgaactgtctgtttagtctgaggtttttaaacttgcaggcagctgactgtgatgtccacttgttccctgatttttacacatcatgtcaaagataacagctgttcccacccaccagttcctctaagcacatactctgcttttctgtcaacatcccatttggggaaaggaaaagtcatatttattcctgcaccccagttttttaactgttctcccagttgtccccctcttctctgggtgtaagaagggaaatgg

SEQ ID NO: 449672 - DNA, 1266 bp, Homo Sapiens
  misc_feature (130)..(139): n is a, c, g, or t
  misc_feature (461)..(470): n is a, c, g, or t
  misc_feature (563)..(583): n is a, c, g, or t
gattttggatatatacgtgttcagatagcggctggtacggtcggaattccgggatatcgtcgaccacgcgtcgatttatttatgtgtaatttaatgggaattgtaaatatggtgagtctgttttaagacnnnnnnnnnnatttatctgatcttgtttacctctggtttagtgggtttgaatcttccctattagttcttcatgtggttcatggtactgatttagaaatccagtgtttgggggatttttttctctgggattcatgaatttagcccttgttgtagcatgttaaaggtgacaaacagctggacaaatttttaaaaagtaaaataaaattttatctataattagtattattacatttagcttttcattgaaccgaaagaaaaaaagtgatattggacccgtggaaagattttgaaacttgagtggtttgataacccttctatgtattgtagggagnnnnnnnnnngtttattttattccactgccctcccttaaaagcatcctttgagcaataaatgaatattgcctttcaacccatgggttaggagaattttcctannnnnnnnnnnnnnnnnnnnnccctttctggttcaaagaaacttccacacctcttggggaccaccctggggtatttcctgctatcttttaccctggggcccctaatatgggcaaaatcagttctcctcatactttgaccactttgattaacttctaaggtcttggagagccctgggacctaacatacgttttttccacctatggggcccctaggggttccaaaattgcgcacttacccaacaaaacgttccccccctctcttgggatttcggcggcccccctcgccaattgtcaaatgttgcgctatgtctctctttttttggaactactaacgagccatactttccgaaagcggatacggacagacttactctaaccttactcactacccttcaacgatcgcggggaattggggatacacttttctgctacccccacaggtggcacggcaaaattctcgcctggcgatataccacatgggagcgccaaaacttaattctcttcttttcacaatatcttgcgcaaatgtggagcgttctcactacgcatattatatttctcaacaacttttttaaataacttcgctcccctctacagtgttacgcaaaaatatgtgtgacttccccatttgggcacaaataacatacacgatagctatacggaacaaccctcgcatttgggtcgttttatcctcccctataagt

SEQ ID NO: 449673 - DNA, 506 bp, Homo Sapiens
  misc_feature (379)..(401): n is a, c, g, or t
aaaaaaaatagtgttttattaactaccccaactgttataatacactttaaacgtaccataaggtagcctttaaatttgaggtggtcttaagaataaccaatggaccagaattcccaatttttgaaataggtgaactgctgccagttacaggtatacatttaggaaaactgtatagctcttaccagacccagccatgtaactttattttgtaccatttttgaattgaaaatataaaccataatttaaaaattaaaagaaatacagcattattaaaaacatacgcttctcaattaaatgtactggatacatataaattttaagggaagaagccaaaaaggaaaatgattgatatttaagtgcagactgactacctagaccnnnnnnnnnnnnnnnnnnnnnnntatcataaaacctctagttcttctatgactaatatccatatggttggagtatcgcgacgcgtggcggacgcgtggtcgacgatatcccgggaattccgaccgtca

SEQ ID NO: 449674 - DNA, 1116 bp, Homo Sapiens
agacagcttttttgtttgacattggtaagtaccaagaattctaactcacatatagtaggaaacaacaaaaagtctccactgacttctttgaattagatactgagaatccacaatacagtagtgtggataactttcaagaagccattggaaacatctccacattctgggatgacttgtaaatgtctacagagtaatggaaggaaaggcttccttgtctgctcattgctgccacctgggttgggaaaataattgaagatgttttctcaagtccttcaagaatctcttcttaatgttcagaatagtttaagagcgttgttgaggtaaagtgatagctgattattttctgagatttaggatctaaacaaactcagcatgacgagggaagcacacttcacagctccaggggtgccaatactgatgttaaagttgcctcgtgaggatacatttttcgctcatgtatgcaaaattcctatcagttcatttgcacagccagttccaatcatgtatgtgatcaccagattaaaagcttcatccagaaagacaagactcctcagaacgaatagtagacaagtaagactgctacccacagaagccagtacgcttcaggtgtgaggcggggtaactactcatctcttcacagagccaaggaaagaaaaagaacgtctctaacgatgatttaccatttaaacagacttataagtttgtctcttaaaaatcatgctgcaagaaggagggggtaacagtcggtactgccctgtctgtggcattggagtgccccgctaggtagagcaatgcttagatcttgcttcaggcagcagcttgaattcccgaatctatcgcagtgattaaaagcagcggagaaccatcaccgtacgatatcacttcccatcactccgcagagacgcatggaacccgcactgccagctgaagacgctagaaggcgacataaaagggaatacaggcatgcagaaaccggggaccacagggagagaagaaaccagggaggacacgcaacgaacggaaggaggagacagcaaataaggtaaacagtaagacgaacaaaaggcagaggagaccagagaagaagaaagaagaagacaaagcagacacacacga

SEQ ID NO: 449675 - DNA, 332 bp, Homo Sapiens
  misc_feature (314)..(314): n is a, c, g, or t
tgacattggtaagtaccaagaattctaactcacatatagtaggaaacaacaaaaagtctccactgacttctttgaattagatactgagaatccacaatacagtagtgtggataactttcaagaagccattggaaacatctccacattctgggatgacttgtaaatgtctacagagtaatggccaggaaaggcttccttgtctgctcattgctgccacctggggttggggaaaataattgaaggatgttttcttcaagtccttcaaggaatctctttctttaatgtttcaggattagttttaaggagcgttgttngaggggtaaagtggatag

SEQ ID NO: 449676 - DNA, 1036 bp, Homo Sapiens
  misc_feature (1015)..(1015): n is a, c, g, or t
attcttggctctccccgacgtctttttctctcggttttccttcctggtcctctagtccccggttgaaccccgtggcccctcgcttctttcaaggggccccaccggccctggccagtccggggaagaacaagcttgaacctgagtttgtccggctccagccgccaccccatgtaaggagagggtcacaggttaactcaagcacgtaacacaggaagtctaaagcgcactcgtgacatgtagtctgtgcgtggcgttaactgaaaataaatccccacgcaacagacacattaaaagatatgcagaccaatcaacagaagcaaaagacagcaagatgacaccgtgaaaggcagtcagtttggcattttgtgacgagcaaagcagagaattcacctcagtttgtggtgtcccaggctaagggtcaagatgtgattgggaagtaattttgcaaaaattgtggattcaaatttaaagagtatgcataaccgatcagaaccactcaaataaatggtcatgaaaaacacccctgcccccattccaaaatgcactcccgactcacactagtcccttgaccagggcggcaggaaggagtactcccagtcaacccacctaccccattcctggcctccacagagccgtcatgggaagagcgttttctctcccagggaccaaactgactgaagctttctagcaggtccagagaacaggaaagacctgttttccaggcccaggcctggagaacgtatcatggagcccaggccacatgggaaaagcagggagaccagacaccagtgacaagcccccaccccgagggctgtgctggtgtcctttcagcctgcctgcacccaccttcactggccctcagaccctgaactggctacagacccctgtctgcagttgctgagtggtttctccacagcttatttcctagggaatcctggctaccttttctttaacaagatcggacgcgtgggtcgacgatatcccggaattccggaccgtaccagccctgctttcntaatcaggttttatagtacaa

SEQ ID NO: 449677 - DNA, 908 bp, Homo Sapiens
ttctttgggggctcccttattcctggccttcttgggctgtctgaatgaggccggtaagttcccaccttttccctgccccgggctctggttcctttctggctgggggtaaagcccacgggccaccaagcaggtgatcttccggcagtgagataaagggtgggcaggccctccagagggttgtacttcttcaccctcatcctcagctttccagtacccaatcctgggattccccaaagtccatgcggtacctggcttcagggctgtgcttgctggcttgggctgtgacagtctggtgcagggtttgttggggagggtgcaacatcgccaccatcatcaggacgcatcccagcatcaggagcagcaggaggaactggagtctgcatggtctgtgcctgtatcgcttccttaggagcatgttgctagaacttgccaaatgcaacaggtcatgttcaagttagctttctcccgctccaggctccttcaagcttgcagcagaacctgggttgcttgttccacctggaagtttttctgccagtcacttaacctggtcctgacatttgccaacagcgtgtgcaagacctgcttccacttacaatcagaaaaccacaggacccaagtttcaccccaagtcctctctgagtggatttctttaattgccttctgaaagcccattcacagggacttcaaattgaattgcttccctccctttaccccggttttctccttgggaaaaaaataatgattccattctgctcaggtgtttctttccccctttgtataaataggttgctatgaggtgtctgggatgagctggtgggttctcagtcaagcagggctgacagccgtccctctttggacgcttccagtcaggtcagatcaacatcccgggaatccggaccggtccagcc

SEQ ID NO: 449678 - DNA, 982 bp, Homo Sapiens
gagtataagaatacaatgtgtcacgttctttatggtccccccttcggtctgttttacaaggggattccctacttagtttcccaggatctttttagacgtaagagttcacgtgccattatggcttccaggttaccatttaggccaggtcggaagttcaggtctaacatacacctcttcactaccagtttggtgacattaggcaaaattgccttagtccgccttcacccctttgcccattagtatttgctcacgtatgacccggaagagtgtaggctgaaggacatatcacattggctcatactcctgaaacttctgtcctgtgggagttcttaagtgtttcctgagggatgactcttgattgaaagcttttctacaatcagtaaattcaagagttttctctccaatgtgaatgctcacatgactcctaagagttgagggatggttgaagactttgctatactttatatatttatagcatttctctcccttgcaatatcttgtacaaataaagcgagtgttctttctgaatttcccacaatggttacactccagggagtgctcaccaggttgattttctgcctgttgaaaagggagtaagtggtgactagaggctttttcactttcaccttattcacaggaattctcttccatgaggattctgccatatataggaagcacatgatcatgactgacatgtgtaccattttcagtaggtgcgtatgacttttgccctatctagctttttcgagatgaataagctcactcctctgtccaaggctctattccttcccagcaaagggcttctttaatacagtttttctaatactgagtgaagaatgaatgaattatgtactaaatacttaactctaaaatcatatttacatagatgtttacttgtggttattctctgtgagccagcaagtgtttaacctaggtttacagattcggacgcgtgggtcgacgatatcccgtaattccggcc

SEQ ID NO: 449679 - DNA, 1034 bp, Homo Sapiens
gggaagccagaatttctcttgcttaggacacttgctcgatgcctgattttgtgggatgatattttaccaaattccaagtgggttgacagcaatgttcctcaaattataagagaaaatagtatctctctcagtgaaatcgaattgccgtgctcagaggatttgaatttggaaactttgtcccaagcacatgtctacataattgcaggagcctgcttgtctctgggttttcgatttgctggctcagaaaacttatcagcatttaactgtttgcataaatttgccaaagattttatgacttatttgtctgcacctaatgcttctgttacaggtcctcataacctagaaacttgtctgagcgtggtgctgctgtctctcgccatggtcatggctggctcataaaacctaaaggttttgcagctttgtcgcttcttacacatgaaaacgggtggtgaaatgaactatggttttcacttagcccaccacatggcccttggacttctatttttgggaggaggaaggtactctttgagcacatcaaattcttccattgccgctcttctctgtgccctttatccgcacttcccagctcacagcactgacaaccggtatcatctccaggctctccggcacctctatgtgctggccgcggagcccaggcttctagtgcctgtggatgtggacacaaacacgccctgctatgccctcttagaagttacctacaagggcactcagtggtatgaacaaaccaaagaagaattgatggctcctacccttcttccagaactccatcttttaaagcagattacagtaaaaggcccaagatactgggcaacgtgctcatagattttaagcaaatggaacacaaacacttgaagtccatcctttccaaggatggggtttatatgttaaactccgggcgggtcagctctcctacacgaagatccaatgggatggcaaagtatgtggctcagacttgttgctaacaggaactctgaagcccgggctttcaagccagaaacaatctcagcattcag

SEQ ID NO: 449680 - DNA, 618 bp, Homo Sapiens
  misc_feature (22)..(22): n is a, c, g, or t
  misc_feature (37)..(37): n is a, c, g, or t
  misc_feature (52)..(52): n is a, c, g, or t
  misc_feature (66)..(66): n is a, c, g, or t
  misc_feature (96)..(96): n is a, c, g, or t
  misc_feature (102)..(102): n is a, c, g, or t
  misc_feature (134)..(134): n is a, c, g, or t
  misc_feature (142)..(142): n is a, c, g, or t
  misc_feature (191)..(191): n is a, c, g, or t
tatctgggccttttactttaanctgcctttaaaaaanggaattcctggaaanaaggtaggagcccntcaaatccttctttggtttgttcaataccnactgantgccccttgtaaggtaaacttcctaaagaggngcatagcnagggccgtgtttgtgtcccacatcccacaggcactaagaaagccctggntcccgcggcccagcacatagaggtgcccggagagccctggagatgataccggttgtcagtgctgtgagctgggaagtgcggataaagggcacagagaagagcggcaatggaagaatttgatgtgctcaaagagtaccttcctcctcccaaaaatagaagtccaagggccatgtggtgggctaagtgaaaaccatagttcatttcaccacccgttttcatgtgtaagaagcgacaaagctgcaaaacctttaggtttcctgagccagccatgaccatggcgagagacagcagcaccacgctcagacaagtttctaggttatgaggacctgtaacagaagcattaggtgcggacaaataagtcataaaatctttggcaaatttatgcaaacagttaaatgctgataagttttctgagccagcaaatcga

SEQ ID NO: 449681 - DNA, 1167 bp, Homo Sapiens
gctttgaggacggctgagaccccagctgtctgatgatctgtggtgtcctggctcgtctcttggccagcctgagcctcactctcccctatgagggcggccagctgccgggccctctggtccatcaggctgacgtgcttaatggggttgatcagggcctccgcatagtcctggtggtcgtcaggaatgtagtccgaggcttcggtgtagatgagcagggccggcaggcacagcggttggttggcctcgttccgcaggcagacgtagtggtatccggagcggatggcagagacaggcaggatccggtgccctacgaatttacccccctcctcaaaggctgcaatgcgaagtgaagccagcgtgggcagcaccaccttggggaagtcgaagggctcttcgtcccacacggggttgaacgagttcccctgagaggtccgggtgcggtacttgcgccgcgtatcaacagggaggccaaacatgtccacctccacgtagatgcccaccttcctgtcggacaggaactgccctgagatcaccttgacccgcaaggcattggccacgatgccatccacgatgacctcagtgaaggggtcgaaggacttgtccggccgccgcatgaactccggcttgagcaggtacccgctgcgcccgttgtactcaaaaacgcccgcgttgagctgcatcgccacatcgagggtctggaagttgagcgcaacaagctggcaccctacgttccagaagagctggggcatgtagttggaggagtccacgcgggtgcccttggggtagatgcggctgagctgctgcttgttgtattccacaaactccatggggctcttggtcagttgctccatggccttggtctccacaaaggacgacatctcgaagcatttgttcctctttcgagcagcctcaaaggacttgaacttgacaggttcgatgtagttgacaagcgtggacatctcctcagtggcattcacctcgctgctggctgtgccctcatctgtagttggctttttggggtctgtctgttcctcctcttcctcatcttcctcctcatcctcacggtcagcaggtccaagaacataggggcctcggttcaggccctcgtcacccagagacttctgaggctccaggctgggccctcgtgccgaattcgccacccaggcc

SEQ ID NO: 449682 - DNA, 915 bp, Homo Sapiens
gccttactgtggatcagatttccagtggacaagatctaatcatcactggctccaaggatcattacatcaaaatgtttgatgttacagaaggagctcttgggactgtgagtcccacccacaattttgaaccccctcattatgatggcatagaagcactaaccattcaaggggataacctatttagtgggtctagagataatggaatcaagaaatgggacttaactcaaaaagaccttcttcagcaagttccaaatgcacataaggattgggtctgtgccctgggagtggtgccagaccacccagttttgctcagtggctgcagagggggcattttgaaagtctggaacatggatacttttatgccagtgggagagatgaagggtcatgatagtcctatcaatgccatatgtgttaattccacccacatttttactgcagctgatgatcgaactgtgagaatttggaaggctcgcaatttgcaagatggtcagatctctgacacaggagatctgggggaagatattgccagtaattaaacatgaatgaagataggttgtaaactgaatgctgtgataatactctgtattctttatggaaaatgttgtcctgtacttactaggcaaaacgtatgaatcggattaactggaaaatatatctgaattcaactgctgactataaatggtattctaataaaattgtgtactatcctgtgtgcttagttttaagatcaaccaatagatatatatcctacaattgatatattgctttattcgcacttttattgtggcctgaatttttgtgcctatctataaaacacactttcaaattatttgaattacccaagacgtcctggcttttgtgacagtcagaaaacacccctggaatacgatgcagcccacatttaactcatcatgt

SEQ ID NO: 449683 - DNA, 636 bp, Homo Sapiens
  misc_feature (44)..(44): n is a, c, g, or t
  misc_feature (62)..(62): n is a, c, g, or t
  misc_feature (477)..(494): n is a, c, g, or t
ggggcctgcctgcatttttcctgagtgtgtgcacagcccctgancatgtgaatgtcttctanaatcttaagaacatgtaggaccttttcaaagaccttattccctacagcatgtcattccctagactttgcttccaagttttttggctagtctattgtttcccccaattgttatccattgccttagacagtagagaagaatgtttagaccgtgctcccttgggagcagcttagtataaagcaagttctcagtcaggagagataaaaacatgtgtctagtagcatgtcttcaaggcagccaccagatagatcaaattagaattttctgtaaataaggtccattctgctccctcatatgcctgcactgggaatgtgggttgttatttcaaggctgctgctgagctggggattggagtatgggattcagataagttaagacaccacagttttgcttttttcattaagaattgactaaggnnnnnnnnnnnnnnnnnnaaataaatgcttcccagagtacttcaagtatttggttacattccagagttctgaaaaagcacattctgatggttattgccactttttttctagcttttatagaagggtgaacttttgggattccttattccaccattttctc

SEQ ID NO: 449684 - DNA, 1729 bp, Homo Sapiens
caaaatccaaaaggactttattttttggcactgggaggcgccctgaggccacagccttttcccagggctgctggcagggtcccagggctgctggcaggggttgtggtcctgttgagcagaggagcgacgccgctgccctggcccccgctgtccctatgatcctgcactctggggtgggagctacatatcatccttggacaccaggcagtagaagtctgtgcgggcactgtagtttcgcgagccgagatccgagacgtccacttcgctgctccggctctctcccagcgagaccccactggtgtgcggtggagctgatggctctcccaatacaggcccccggacacccaggtcgccctcagggtccgggtccacctttgagtccagggcccggccctcagggactcggcctcgaagaatcagcatggggtccttgtcgtcctgcagctgcgtctgggggtctccttccaccggcctgtaccgcaccttccgcggcagcagccagctgcacttctttccaaaaatcggaggaaggagtcacggagccgggcctccagagcagcaaggtcaccaggtggcggtgctggcgcagcaggcggagcgccgggtgcgcggggtcgcgcctctggccctcgaaggtgatgaagatgggtctgcgggtgagctccagcagccggcacaggccctcccggaagctgtggctgcaccaggcccggctcaggaaggcgtccgaaagcaccacgatgaggcgtcggcagcggctcaggttcaccaagaggtcggcggagggctcagcgcgcggcaggaggtcgcgttcgtccaggaagagctttgtagccccgacgtccgctccagctgcggctttaggatgaagttcacgaacttgcggtcctcggggcagtcgctgtaggagacgtaggcgtcgtagagcttcccgtcgtttatctccacctccccatacgcgtcctggtaccagagcagcacgttgagacggcacttgacatagagcagggcggccagcagcagggccagcaggaccaggagggaggccagcaccgcagccacgtggcttgtagggccagctctctgaagagtgaaggaggagaagctgatgttctggatggagcaggtgaaggccccatagacttcagtgctggtcacgttgacccccaggacactggacacaagcacctctgacaggttggccttgaccacaggagtactcgtggaggctgtagtggcccccaattcccaatggaagcccgtctttcagccactggactgaaggcagggagcagtggggcccagagactacccaagccgtgcagttcagagccactgagctgcccaaggcaggcctcagcacctggtcttcagacggggagaggaagtcaggggccctatcacagacacctggcatggctctgagaccggggcctccatcggggcaggctgggctccagggtcaccctggctccaccgggctcctcggccagcagactgatccaagagctgggcaggactcctctctgtccttgcagtcagctggacagggcacctggacaggtcagaggctggttccagttctttcctccggggggcaaatgttggtcattggtgcgcctttgggagcaaactctccccttcgctgggccccagggagtgtccacagcaccaaggctgctatggatgcatcgccaagcatcccaaagactccgggccagtaccagcc

SEQ ID NO: 449685 - DNA, 543 bp, Homo Sapiens
  misc_feature (386)..(464): n is a, c, g, or t
tttacagtgaatatacccagcaaacatctgtatgtgcaattaaatactgtgtctgttactgcggcacgaacctcaaacaaacaatatacaagtgttctgggggggccagggggaatcccaagttttaactctgtggggtctaggaagacaagatggggaagtgagagaatgggggcaatcaattttgtttatcttaattctgtccatataaatatattcataaagaccaaaaaaggaaaggaagcttgggatgttaaggtaataggaggacagtgtgggactttcccaattctacctgaccaaaaaatgagaaattaattttatgataggagaagagatttacacaaaatgatagaagaggatggaagccaggcaacaggtgtcannnnnnnnnnnnnnnnnnnnnnnnnnnnnnnnnnnnnnnnnnnnnnnnnnnnnnnnnnnnnnnnnnnnnnnnnnnnnnntggtgaaactccgtctctactaaaaatacaaaaattagccgggcatggtggcgcgtgtctgtagtgccagctacttggg

SEQ ID NO: 449686 - DNA, 343 bp, Homo Sapiens
  misc_feature (307)..(307): n is a, c, g, or t
gcgttcacggtgacatcgcaaaaggcgagggggagacgcgcccgcgggaccccttcccggtgtgctcccacgtggcgtcgaccgggaagaaggggccggtagggagcccttcccaggcgcctcccacggggttcccccgcagccgcgacaccaccaacagtcgccgcaaccgccgcgtggaacagacgacccgggtctcaaagaggcggcgcgggcgggacgcagcccctggtccatctcgggcgccgcctgatgcactcctactgcgcccgggtcctcccggcctgtctcactttggggggctcanggtcctcacgggggacgcctgcacgtaagccaggac

SEQ ID NO: 449687 - DNA, 315 bp, Homo Sapiens
cagtgatagcaactttccacacaggacgttgaaaacagtaatgtggctacacagtttttttaactgtaagagcatcagctggctctttaatatatgactaaacaataatttaaaacaaatcatagtagcagcatattaagggtttctagtatgctaatatcaccagcaatgatctttggctttttgatttatttgctagatgtttcccccttggagttttgtcagtttcacactgtttgctggcccaggtgtactgtttgtggcctttgttaatatcgcaaaccattggttgggagtcagattggtttcttaaaa

SEQ ID NO: 449688 - DNA, 416 bp, Homo Sapiens
  misc_feature (165)..(273): n is a, c, g, or t
ttaatgagtaccatatttctccagctggcttgtaagctatgtgaggcagagaacgatcttacatttttttggcctaaaagcggtagaaatttaataaatagatatgaattgattgattcattaatagtataaaaagaaaatttgggggtggtttttccatctttnnnnnnnnnnnnnnnnnnnnnnnnnnnnnnnnnnnnnnnnnnnnnnnnnnnnnnnnnnnnnnnnnnnnnnnnnnnnnnnnnnnnnnnnnnnnnnnnnnnnnnnnnnnnnaatcctccccttttgacctcccaaaaatgctgggataacaggcattagctactgcgtccagcttttgtctttttaaatatccagaatacaataaagattcaaacattgcatttgggtcattgtatcttacaagttctctcccc

SEQ ID NO: 449689 - DNA, 609 bp, Homo Sapiens
agcacagacacaaggccgtcgtggacatgaaggacgcgatgcacttctcgaaggccgtgatcttatcatgcgccacctcctctcggatcgccacgtacatgtagggcacgtagctcaggaagtagatgatgccaccgcaggccgaggccagcttggccttggagtacagcacagacaccaggaagcagaacatgatggtggccaccgcgtagactgccaggaagagccagatgatgaccacgtggctgtgcataagcacctggccgtacttcaggatggcggtgagtgctgtcacggagatggacagctgcacaaagccggtgatgaaccaggccacccagtgcaccgcgttgttcaggcccatggtcttcatcacctccttgagccggtgctccttctccgccacgatgtgctggatggtcatggccacggagtagacccaggagatcaccatgcacagcggcatcatgtgctcaatgacaaacaggaagtcatcgcgtgtgtagcaggggtaggggaacatctgcacgtagctgcctggctccaccacgtcgtgccccacaaaagtgtcgatgatggcgcgctccatcatgtcctggatccagacga

SEQ ID NO: 449690 - DNA, 1037 bp, Homo Sapiens
  misc_feature (675)..(698): n is a, c, g, or t
  misc_feature (700)..(709): n is a, c, g, or t
  misc_feature (944)..(994): n is a, c, g, or t
ggtccggattccgggatggatactgtgcttcctgctctcgattccgccctctcccaagtacacatgtgcctgtcctgacacaatgtggctgggtccagacatgaagaggtgctaccgagatgcaaatgaagacagtaagatgggctcaacagtcactgccgctgttatcgggatcatcgtgcccatagtggtgatagccctcctgtgcatgagtggatacctgatctggagaaactggaagcggaagaacaccaaaagcatgaattttgacaacccagtctacaggaaaacaacagaagaagaagacgaagatgagctccatatagggagaactgctcagattggccatgtctatcctgcagcaatcagcagctttgatcgcccactgtgggcagagccctgtcttggggagaccagagaaccggaagacccagcccctgccctcaaggagctttttgtcttgccgggggaaccaaggtcacagctgcaccaactcccgaagaaccctctttccgagctgcctgtcgtcaaatccaagcgagtggcattaagccttgaagatgatggactaccctgaggatgggatcacccccttcgtgcctcatggaattcagtcccatgcactacactctggatggtgtatgactggatgaatgggtttctatatatgggtcnnnnnnnnnnnnnnnnnnnnnnnnannnnnnnnnnaaatttatgttgcggaaaggtaaccacaaagttatgatgaactgcaaacatccaaagggatgtgagagtttttctatgtataatgttttatacactttttaactggttgcactaccccatgaaggaattcgtggaaatggctactgctgactaacatgatgcacataacccaaatggggggccaaatggcacagtacctttactcatcattttaaaactatatttacagaagatnnnnnnnnnnnnnnnnnnnnnnnnnnnnnnnnnnnnnnnnnnnnnnnnnnnaataagatgattatgctttgtggctatccatcaacataagtaa

SEQ ID NO: 449691 - DNA, 464 bp, Homo Sapiens
  misc_feature (414)..(414): n is a, c, g, or t
  misc_feature (445)..(445): n is a, c, g, or t
gggcgagggccatgttcctgtttatttaccaacttgatgatacctgggggagcctttgggactgtttgcccaagagccccctttacaagagtactgcctgctcgtcaccaccatgtgccctgccctatgccttggggcctggctctgctgttcctggtcaagcccagcccccaccctagggctccatcagcctcagctcctgggtggggttggggttcttctggcacgagtttggggttaggaaccctccatgttcaacaggggccctcaccgctttgaggggtctcgggcctcacattgacttcctggggaggctgcatcccagcagcagtgctttgcagcccgagggtccagcagccccaggtgggcacctgaagggaggggctcctcgacgagacgacagcctgggggcanaactgtgacccccatgttgccaaaagaagtnggcatgttggggttttgcc

SEQ ID NO: 449692 - DNA, 271 bp, Homo Sapiens
atgaaccatctccaggattcccctccttgccgagaaactactgccatctgggacatttccttcacacatctggctctgatggggaagctgtgatttcggcccccaccccctgtccctgcccagccctgcctctccaagtggcctcaggtttgttccagcccttgattggagcaggtgggctaggtggccccaagctcagcccacccaccttgaattcctgcttcttcctttctttcctttccactccatcttatttcttttttgagctaca

SEQ ID NO: 449693 - DNA, 245 bp, Homo Sapiens
accacaccccctcctcaaaacaccagagccggctcccgccctgatggtggcggagacggcggagatcggagtccggggccccaggtctgagagatccaccagtccagttcgcgggccggcgggcttcaccctcggggagccggggctcggaggggttcggagcggccggggacctcaccggcatgtaaacagcagggcatggcccaggaggcagaggcaggggcggaggtgcggggctgcgcgcg

SEQ ID NO: 449694 - DNA, 416 bp, Homo Sapiens
ttgattcagtccttcgttgacagttccagtggcttcaaaactatcttccaggctcaacactgacaaacacaacttctgcaatgcttaccagagtaatttttccagaattttcctaggtgaagagagagcgtagcatctggagcttacgttgccagagtttgaattgagggcaaatcatttttctttttggtgcttcagaattctcagtgggaatgaacatgttagtaccaattttataaggttgatgtagagttaagtgactgagtacatgtaaagctcttgaaacagtttctgggtaaataatgttagctgctattagtttatacgatcattaatgttgtaatacacatctgaacacacctaccaaaagttcttcatttctgtggtaacctaccaaataaaatttaaactgctta

SEQ ID NO: 449695 - DNA, 677 bp, Homo Sapiens
ttgcacaggaagctgctttattcttgctgagagacaggggctgctgcccacacacagaccctgtgtccaccctgcagaaaaggccaggagggcctgcagagctgggaagcgccacccaagggtctcagtcaccaagactgcaggagaggcaaggccatgtcaggcctggcagctgtggctggggccaggagggagggaccaggcccatgtgggaacaggacaaatgcccaaggccacatccgttcgtccacagtcctgaggctcctgtccaggctgacaggaaacagcccagagctgaggtctttgagccggtcattccaacattgcaagcaccacccagtcctcctggctgaagttgagtgaggtaagaagggcccgtggcccagggacagggagggccctcaggaggctcccagggactgctgctgaggccgggcagcgtcctaggcctcaaggacactcctttctccccgctgccccaagccaccatggcagcagcatcagggctgtgccgcctcatccccatccctgtctgggcagatgtgaagggtgaccgtctcccccactgtcccgaagtcgacggtctgggtggaaagctctgtggtgaagctgctctggccactgtccgcagaacgccggatgcgggtgcagaaagactgcgtccagggagcactagc

SEQ ID NO: 449696 - DNA, 549 bp, Homo Sapiens
  misc_feature (127)..(153): n is a, c, g, or t
  misc_feature (432)..(432): n is a, c, g, or t
  misc_feature (498)..(498): n is a, c, g, or t
  misc_feature (511)..(511): n is a, c, g, or t
taatacaaaggtttttaataaaaaagtcaaagtctacattaaatcaggaaattgataaatctgaattatacaagctttctatatacttagaaaaaccaaaaacacacggtttataataaaactcttnnnnnnnnnnnnnnnnnnnnnnnnnnngaaaatgtcattatgcccagttgactagatagggttttgtcatttaaattaaattattcacctgaaatatgggaaatatataatagagaaaattcaatctcaagggtactttgcaaattatctagttaatttgcatcatgaatcaaattcttagcttctaaagggcagacacagtctttaattgcttttagataggcacttaagaaatgcttttgatgaggagaaaaccccaaagattgtgaatcactctattaactccagggaagaatgagactcccnacaaagtagctttccagaactacccttccagtgccaggaaagtaaaactatttgccagctccttcngggaataagatgngggggacccccaaccaaaaatgcccccattatgccatt

SEQ ID NO: 449697 - DNA, 167 bp, Homo Sapiens
acctcagatgatttggggtcacattaaagtttgggaaaaacaacttcaaacttacctttcttccttgtgaacagatgtacatactttatttttagggacaaataaagaaaggtagtattctactacttttttgccagatcaagactggttcttaagatgttcacgct

SEQ ID NO: 449698 - DNA, 987 bp, Homo Sapiens
  misc_feature (780)..(829): n is a, c, g, or t
ttttgttgcccaaagcgtggcgcgccccggaggttagaaccccttcgggaacttatagaggcgggccaagccggaagtcagcgatttttatttgtcgcctggcggttcaccagaatggttcgtggttttagatcgggatgccctactcgggggaatgaaggaaagtccagacctcggaagaagctgaaacatcatatcctttatggtttccagtgggcactccaggctctggaactttatccaagtaagtggtcaagtcttgatcgacatgttcaaacactaaagttagtttggtttctctgtctgttcgtgacactgtgcacacatcaaacaacctgaccacgttggggtgctcgaaggtctccaggtgcctcagcaccgccacctcgcggatggtggagagcggcatgccctcctcgccggtctgcacccgcacgcgcttcaacgccacgaaacggcctccgttcttcaagtcgcgggccttgaacaccttcccataggcgccctccccgatctccgccacgcattcgtactgctggtcagcgcggcacaggccgtccttctccatgccgcctggacgccgcccgccgcggcgccgctggggcgggcggggggtgcgctcaactagctggcggccgccgctcgcctactccggggctccccggagatcggtctagctttacttgctccccgccggctcaggcgctcgggcgctggggctttcgccgctgcagaagctggatggagagacctccccgcggggctggcgtaaccctggtnnnnnnnnnnnnnnnnnnnnnnnnnnnnnnnnnnnnnnnnnnnnnnnnnngaggagcgagccgatccctcctcttccctcctcgaagcgaagtcctcaacacagacacgattacatagcctctgcccaagcgcgtctcagtccagaatcattcacttttctttccctgcagggctgaagcccctcgtgccgaattcgccacccaggcc

SEQ ID NO: 449699 - DNA, 308 bp, Homo Sapiens
aaaaaatgttgaaaaataaatccatgtctgcataagttcccaacccccatttctccaagtttctggaaggtgggcttggtgggcaccctcagctccttagcatttcccagctggcccctgaagacagagcttctcttccagcctctgctgctgtaaggcccctctgcccacctccccccctgcagcctccctccccacctcaccccagacttattgctaaaagaagggaaagaggaatgagaacagccagcacacccaactgccctctccccactccacgctaaggtcactaccccggacacacaaag

SEQ ID NO: 449700 - DNA, 617 bp, Homo Sapiens
gctacatttcaaagagaaaagctttaaaaagatgaaaaaatagcacaatacctatcacattgtctacattgcagaataagatcttcttctctatagtttcgatagcagactggacaggaagataagcttgcacaaggagcgcactgtgtgtaattgttctgccattcacatcttaaacctgcagatgttgctccacagtgtctgcaccaaacacacctgaaatccaaatccccccgaaaagtctcaattttattttcttagttactcagttactgtaattcaggaagctacatacgaacataatgggggaaatgatttaatgtgtatgtgaaaatttttctgattactggtatctatcatagaatatgtgtattattcaattaaataggctgtggctaatttttaaaaaccaaagtggtatgagaaagctctgaacttgaaagactaacaaggcaaacaaaccctagagtaccatttgcacttccagcctcctttgggaactgtctgcaatggagggtctaggcagtaggtgtgataacttatgtcacagtcatcacacagcaggagtcttcctggggtcagttgccttcccacaggcctcacacacagtgcactca

SEQ ID NO: 449701 - DNA, 1205 bp, Homo Sapiens
tggggtgtctactgcagatatttcatcaaataaggatgatgaagaaaactctatgcacaatacagttgtgttgttttctagcagtgacaagttcactttgaatcaggatatgtgtgtagtttgtggcagttttggccaaggagcagaaggaagattacttgcctgttctcagtgtggtcagtgttaccatccatactgtgtcagtattaagatcactaaagtggttcttagcaaaggttggaggtgtcttgagtgcactgtgtgtgaggcctgtgggaaggcaactgacccaggaagactcctgctgtgtgatgactgtgacataagttatcacacctactgcctagaccctccattgcagacagttcccaaaggaggctggaagtgcaaatggtgtgtttggtgcagacactgtggagcaacatctgcaggtctaagatgtgaatggcagaacaattacacacagtgcgctccttgtgcaagcttatcttcctgtccagtctgctatcgaaactatagagaagaagatcttattctgcaatgtagacaatgtgatagatggatgcatgctgtttgtcagaacttaaatgctgaggaagaagtggaaacatgtagcagacattggttttgattgtagcatgtgcagaccctatatgcctgcgtctaatgtgccttcctcagacttgctgtgaatcttcacttgtagcacaaattgtcacaaaagtaaaagagctagacccacccaagacctatacccaggatggtgtgtgtttgactgaatcagggatgactcagttacagagcctcacagttacagttccaagaagaaaacggtcaaaaccaaaattgaaattgaagattataactcagaatagcgtggccgtccttcagacccctccagacatccaatcagagcattcaagggatggtgaaatggatgatagtcgagaaggagaacttatggattgtgatggaaaatcagaatctagtcctgagcgggaagctgtggatgatgaaactaagggagtggaaggaacagatggtgtcaaaaagagaaaaaggaaaccatacagaccaggtattggtggatttatggtgcggcaaagaagtcgaactgggcaagggaaaaccaaaagatctgtgatcagaaaagattcctcaggctctatttccgagcagttaccttgcagagatatgtctatatg

SEQ ID NO: 449702 - DNA, 510 bp, Homo Sapiens
gcaaacctctgccatttattttagaatcatcatcatctccttgtttaagatctctgttttggtcctcctcaaatggagaagccttgcctttttgatctcctttctcaggtccatctgtttcagcatctctagtgccaaaatttcccttcctaaatcgagaatccaatttatcagcaggagaagaacttaatacatattctaccatgctcacaccaaggcctccactttctgatcgcggagacagtattgcatttacttcactgtttccatgaaaaccctgtccagatcttctctgtaccataataggctgggacattgaatggtgagaagctccccatgcagtctctctccattcatcatcccccagaaatatgcctttttgtccatcttttgttgaatcatcaggttcccaaaactttttggtaggcaaaagctctcccattccccgagattctaatgcaagagcttgaaaatcatgattcatttcatccacagatcaaacagggctgc

SEQ ID NO: 449703 - DNA, 481 bp, Homo Sapiens
  misc_feature (52)..(88): n is a, c, g, or t
aacaccgtatagaattacataatagggaactggggttatcgggtggcggcgnnnnnnnnnnnnnnnnnnnnnnnnnnnnnnnnnnnnnatcaggccaaatcggccgagctcgaattcgtcgagagcgggcgcagactcaaagccccgcgggcgagctcagcagcccggagcgaccgcgggcccgccggctcccccgcgagtcccggcgactgcggcccggacctgtgagcggcgcggcgaccctgggacgccccgccgcacaactacctcaacgccgtgccgcccccctcccgcccccagggaatctctggagattggttcaccttttgtggtcctgaccccttctgtcctcactgtaccttgaagtcctagagtccaataaaatcgctgcctcccagctgtttggatcacagagaggtttttgcactgccatagggcgcccccgtgaggcgcttcgccccccaccatgttccagcgcctc

SEQ ID NO: 449704 - DNA, 635 bp, Homo Sapiens
ttgtcattaataggatgtgaatacagggaaatagaatggagtgtaaatatgtttattatttattggtcagcagtctatgttttaacatcataaatataaaatcagatgaacacgttaagcaacaacgaatgacaatgatctataaacaatgcataaatataatttctaaagttaagatggataaaagctaaggctaaattttcgttttcatgttaaaacataaccctaatttcaagtctttttataacaaaaggatgagtgaattgtgaacacaggctatgtttattgatttctttctgtatctaaaatagtgctgtttccatagtcagtgtaaaacatacatttaactaaattttataaaattaaaaaaaattgtatgtgttgcagatgaaattactaattcttttatctagaggaaatctaagggaccttttaaggagatgttaaaagcacattcctttatcaatctatgttaagcacaacacaacgatgttttaaaaaatactacctatgtatggttcttaatgtgttgttccagtccagtagcaccagcatcagctggatacttgttagcgactccgattttctcgagcgccttgttcactgatatcccagacgtcgggccgtacacgcga

SEQ ID NO: 449705 - DNA, 754 bp, Homo Sapiens
tgcttgagaggagtgtgtggtcattacacggctttctggcccaagctgctgtcacaagcccccccagtgcgagtgcccacggggctcggggtgtctacacctctagccccgccacctccgtcagcccaaggtgaaaagggccccgccggccactgggcggctgcaccctaggtctccaggtactggtagagctcctccgctgggggcacgaggctcaggtggaccagagcacgagccaggagggcggtcagccgcatggccaaggtctccagcctgagcgccacttcaaacttgagcatctcccagacgaccttggcgtggcgcatgaggctggtgccgtagacaccccgatacgtggcgcccgccaggcggctccagccccggacagcccttttagccataaggaagtagcggtccacgggggcgccgagggccacgttgatagcgcgcacggtgttgatgttgcgcagcaccagcagcatgggccgcggcaagctccctgagcaccgccatgacggcctcgaagcgctcgcgggccatgtccaccatgtaggccgcctcttcgcggctcagtaggtgcgagccccacagctgccccaggcgcacggggcgctgcatgagcatctcggcgaacaggaggtagtcttgcacccccagtgcggctgcgctgcgccctcatggcggcgtcgtcccgcaggatgatggcccgccacagctggcagaggatcccataatcccggccggaccagctgtt

SEQ ID NO: 449706 - DNA, 435 bp, Homo Sapiens
  misc_feature (403)..(403): n is a, c, g, or t
ttttaccaaagagtcatccattttatttagtagcttatttttaacagacaaaaacaaaacaaatcttacacaccttttttttcctagataaatttgacctggtttagtctttagtgcaatgaatggaaaaaacatccctaaatacttctgcatcagtagagttggccattactgagcctggagacccatgctaactttccaggcaaaggtagtgtgttactgtacaagtgaactaggttaggctaggcaaggaattaaaggaccaggggcaggcagccatgggagagggcacagtgtcctgggacttgtaggcaatagtataactgggctttctttctctggcttcagaaccttataggggaaactactgggatgattttattagggctgacagggggttggngggaataatggggtgaagcacattgcagagat

SEQ ID NO: 449707 - DNA, 462 bp, Homo Sapiens
ttcacaggttggacaggtttttattggagagtcatggagttactttccttccctcgtccctgcctcccccactcaaagaaccccactccagtggggcttgtccttcatctgcccctaggaatccccatccccagctacacaggcactcagggagagcgcacatgctgtgtgggcagacagccccaggccaggtaggcagtgagctccctcaaatcctcccacccccaggactcaggagggaggggcaggagaggtgtgggcccggtgtgcagtcctcaggcggcctcctgagctcgcagccagccaggcctttgtgcttccaggatggatggtgtgatgaggcacatgccccgttagcctttccctttccggagggcctttaaccaagaagtatcttgtttaggggctggggacagggtggggaagatgacaggaggacagctgacctcttcaacctttgag

SEQ ID NO: 449708 - DNA, 438 bp, Homo Sapiens
ttttttttgacatgtaagaagtggttttattccaggtgtgtgtttcataaagacgaggtcctcaaggacagctagtggcacatgctttggtcaagaagaggaaaagcaaaaacagaacagggctgcgttgccacaaaggaccggctgataagtgcagagcctgatctgaccacagcaaaggacagagagaccctcttgaaggccctctggtcagcagtcctcttacattcaacaggcgcagccccggctccccagccccaaaggtccatgcccgagtttggcccgggccttctagtccatcctctggggagaggcctttgccctggggcccagttttgtcctaagctgtggcaggaggcttcccagatgaacaggggatctgaggctgcacctggctgcggaagaaacatcacgacagaggacaggcaaagcatggcc

SEQ ID NO: 449709 - DNA, 549 bp, Homo Sapiens
  misc_feature (62)..(62): n is a, c, g, or t
  misc_feature (71)..(91): n is a, c, g, or t
  misc_feature (95)..(95): n is a, c, g, or t
  misc_feature (118)..(118): n is a, c, g, or t
  misc_feature (236)..(236): n is a, c, g, or t
atggttttaatccaattattgtttcataaaaacaagtcctcaagacaacttatggcaacatnctttgttcnnnnnnnnnnnnnnnnnnnnncaanaacaaggcctccttgcccaaaangaaccggctgaataattgcagaccctgatctgacccacaccaaaggcttccccagatgaacaggggatctgaggctgcacctggctgcggaaagaaacatcacgaacagaggacaggngaaagcatggcccctgggagcgaaggggcctgcgctggcaagtccagaggggtgcgcttgggcacgggagtgctgccgagaggacgctggtgagagtcaggaggcgaaactgctggagagccctccagagcaggtgctgcggaccacagacacttggctcttacattcaaacagcgcagcccctgctccccagccccaaaggtccatgcccgagtgtgcccaggccttctagtccatcctctggggagaggcctttgccctgggcccagttctgtcctaagctgtggcaggaggcttccccctagtgccgaat

SEQ ID NO: 449710 - DNA, 1225 bp, Homo Sapiens
  misc_feature (246)..(255): n is a, c, g, or t
  misc_feature (484)..(499): n is a, c, g, or t
cactttgcaaactctgtatttatttggattaaaaagctttagatgaacaacaaaaaaaagatacatccatgttataagactagttaccacgtaaacctcagatgatatgatacagaaattagaataaaccaagttttaatcaggtatgaaaacattcaagctcaaaatcatcaacaccaatttggggattttacagaaataggtgcccctctcaattcttcctcataggaaggggagagtggcttnnnnnnnnnncaacaaccaaaacagttaaaggccttttaaatcagttggctgacaaacatactgttttaaacctacaggttcccctcagtccccccgtttgcaatataaacaattcttctccacaggaacttacattttgaaaacatttaggccattatactttctaagccacattactacagttcctaaaacttatgaaaaaaaggtgtatagtttacttgtactttcttgagtcaannnnnnnnnnnnnnnngaagatggctgacctcaaatcttatatcctaaatattaacgatatcccccaagttaatatacagaaaaacatgattctaaaataaatacacaggctttttaaaaaaaacttaattagggcctgtctagtgatgccctgggccggtgctgcactgctttagggaagcccctggctggatctatgtttcctatagcacctctaggcactgggaaggagcctggaggagagctctggcttctaatgacccacgtggcccccagtgaaaaatttttttagaggctccccaaagaagtctcatccagaccttaagggaaataaaatgaatgcatgaaataaataaataatttaaccacaactaaatttcatgttctttggtgtaattcaaggatgtctagaaacaaaataatctgattgcattatacagtccatgatgattcaattgcccaaatagccaggaattgaagatttatctgactcactttaacaataaggtactgacacactactgcaatacatttttttaaattcaatattatttaaaatacttgatgcaaattcaaatccagtggttgactaaaggcaattaagttaaagggcctcccatatttaaagtatctagatacaagagacttttttccattctacactcttttgccctcatgatttaataagtacagtaattaaacatctgggtactgattcatagcagattaaaaggaaaaaagc

SEQ ID NO: 449711 - DNA, 268 bp, Homo Sapiens
ttaatacctctttaaaaattgttattaactaaactaaactctacactttgggcagatttcattagtttttcccaatgtcttttttctgttccaggatcccttttacattgagtcctcattcttaggttcctctggatgtgacgtttctcagactgtccttgcttgtgatgacctggacattttgaggagtactggtcaggcattcttgagagtccctcactctgggtttgtgcaatgtctttctgctatttagactggggttacaggt

SEQ ID NO: 449712 - DNA, 323 bp, Homo Sapiens
ctgatccccaaagccacagcaggggactgatggctatagcagaatgaggtcgggtcaggaccctcaaacaccatctgggaacaccaagcaccctgaatcgagactgcaggagccctgcggggtgagactgtgtcagagatacactgctggccacaagtgtcccctctcagtcccaccttttcgggctgtcccatgtctatctcaggggcccgttacctctctgcagcagtcccccatcccagccacaccagggtctgtccggccaaccctcttccccagggaaaggagaaaagagaaaacaggctgggcccggtggctcactc

SEQ ID NO: 449713 - DNA, 403 bp, Homo Sapiens
  misc_feature (336)..(336): n is a, c, g, or t
tgagccaccgtgcccagcaaacaatgattcttaatgaacacttggacatttctgaattatgagaccctggattttaagtatcgttttagctggctttctggataccactccagcagaggaaggagacacttcaccttgccactgccaggtgaaggtggaaatccagcccctgccacatggcctccgttgacacccagaataggcagaggggtccttgtatctattgggcagggtgggagttcttgcttcccaaatagtccgtcctactaacatcatgataggagggctttgttacaactgggtgacagttaaagccctgacgctccactaagcctnctctgacactacccaaggagaaagggttgggggatgcttcagtactgctgggtaggggtggaattcc

SEQ ID NO: 449714 - DNA, 512 bp, Homo Sapiens
  misc_feature (101)..(113): n is a, c, g, or t
gaagaagagtatttcatttataagcttatttccacccagtaactcagagacagagctaaggaagagtgggcccccatctaacaaatggaaaggcagagacnnnnnnnnnnnnnggcagcagcagcaaaggcaagttagaggctttcccggcttggccactgcgctaggagggagcacaggacacaatggtgatgcacaggattatccatccagtcgccagcatgcctcatcagagatgctcccagccagggtgaacttggtttccaccagaaacatacacgttagaaataagggaaggaaacgtggcaccagtatgaatttctgggtcctcgcaatgcagcatcctctttcgcctgtggtttatatgcttacagagagtgaggccaaggaacccaagatgtctcttctggccagcctgagaacgtctgtagtcaccagtgccaggtggcagtaaacagcaggcgttactgggaagaaaagttgggaggggtccccaatgcttccctgtttcc

SEQ ID NO: 449715 - DNA, 237 bp, Homo Sapiens
  misc_feature (18)..(18): n is a, c, g, or t
  misc_feature (33)..(33): n is a, c, g, or t
tttttttgtaagacgggngattaaggtgttttnaattatgaacaaaacaaaagagagcctagccaaacctatcaaacatacagaaacctgctgccctggcctgccctttctctggctgggcccggccttgggtgggggcggtgcctgcaccctggtctccgcttcccctgcccttgtcaggtccccacagatacgaccctgcctttcccatctggacacgcacccaggagctccact

SEQ ID NO: 449716 - DNA, 499 bp, Homo Sapiens
  misc_feature (117)..(117): n is a, c, g, or t
ttttttttattatacaattctgtatttagcgactcgtttacagaacgtgttcctttttttaaaattttaaacaaagttcatcaatctctcatagaaacggttgtgtatgtgtgtgtngtgttttttaaccgttataggacgtgaacctgacaaagttgttcacgggtccgctagctttaagtacaacaggatttccgtgttcaaaagactatactaagtgcttaatcaaatcccgtcacactaaagccaaatttagttctctaggaatcggagtctgcgtataagcctggatttcaacgttgtgttggtttcaacagtaaaaagtggtgtgttcccccacggttgtcttaattgcaacagggtggtggtggctaaaagatgtttcatttgttccagatttgattactctgaaaatggtcactgtttcctattgtcaaaatataaaaataccttcatctggataaaaatgtatacagtggaaaactcttcaatgcatagc

SEQ ID NO: 449717 - DNA, 350 bp, Homo Sapiens
cttacgtttgagaataatgggcatctcaccgggtgggaagaccactaccacgttccgcccattgttcttcatcttcagcagcggggtgggctcagccgacacgcgcaggcccagctccttgccctccacgctcaggctgctgctcaaggaagacactttgtatgtggtcttgttccgccgccccagcgatacggggatcttggccatcttcaccaccatgcgccgcacgccccggcacttgcctttgcgggtagagaccactggggtctgggaagattccggcttcaactctgggactgagaccgggcctgggcctggcagggcagggggtggaggaggcggtggtggtg

SEQ ID NO: 449718 - DNA, 1429 bp, Homo Sapiens
  misc_feature (96)..(97): n is a, c, g, or t
  misc_feature (100)..(102): n is a, c, g, or t
  misc_feature (104)..(104): n is a, c, g, or t
  misc_feature (111)..(111): n is a, c, g, or t
  misc_feature (113)..(113): n is a, c, g, or t
  misc_feature (121)..(121): n is a, c, g, or t
  misc_feature (133)..(133): n is a, c, g, or t
  misc_feature (275)..(275): n is a, c, g, or t
ctccaactccgcagccagagaagctgctctctggcctccgcgggcagagctctgcttatgacttcgtcttccagaggtccacatttcggcacttgnngcnnncngtctacnanctccaccnggaaatttgatntttactgtgctcagtgatcacgaaattggtcaagcctattcatgttccttctcatctagaattctgtgtgattgttttagcataaactgccccgctcccactgtatcatttcacgatctccttttaatgtttttctttcagnttttgcactgacagtctggtgacaggtgctgccaaggggtgcaagttacattgcaaatggttctaaaacccttttgaaagtgttcttagcaaaagcctttctttctgggtgtttttgtcgaatgagtctatgaagactcaatgcatccatcttgggctgatcatgccacagatctcattccagctatagtactgccaagaagtgaagtttatcattgaattttacctgtgttgctctcttttaaagtaatgactttgagatgcatgctttgtatcatattgaaaagtatgttttattttccttaaagttgtaatattgtgtgtgaaactgtacatattttaaatgatgtagctttggcaggttttatttggttgatatgattttatattaaaagagaaggctgctttcatatagcatagcccctgaaggtggggaatactccctgtttgtacaacggctgcttattagtttgtggattgggggtgggccgaatgtcttcctctggaattctttggggaaccccccacccctgtcctcccctgaaactcccctgtgcacacccctctgttctgactgcagagatcaaggccctgaaggagcaggatcttgggcaagtgttttaggggacgctgagaacataccttcccctgggggcgatgtggaggcaggcccacctcctcggggcaactttgcgtttccttggggggaagggaggtgggtaggagaggagcttgggaggatgaggaggagcggtcccgccttacacattgtctaatttttaccattaaccgagcgccacatgttttatgaactttcatgaatagaaaatttagcccccccttttgaaaaacgttttggtttttactgcccctaagaaaaataccccttctcctagggctttgtcctgacccagaaaagcccagccaaaagtcctttttgcattccgggtggtgggcccccttcttggaatttttaatttcccccaatattttaaattaaagccctttcccttaaaacccctagccccccaagtcccctgaaaaaacctttttgaaggggttaccccaaaaacccccctttattcttaattaaagggccctaaagctctttgtgaggaaacccctcttgcacattcaacacaaccaaataacgat

SEQ ID NO: 449719 - DNA, 408 bp, Homo Sapiens
  misc_feature (117)..(298): n is a, c, g, or t
  misc_feature (363)..(363): n is a, c, g, or t
  misc_feature (374)..(374): n is a, c, g, or t
  misc_feature (383)..(383): n is a, c, g, or t
gagtttggagcagaagtttaataagcaaaaaggaagaagagctctccgttgcagagggggcctgagcgggttgctaagttgtagtaaagatgtcaaggtttcttttttttctgtcgnnnnnnnnnnnnnnnnnnnnnnnnnnnnnnnnnnnnnnnnnnnnnnnnnnnnnnnnnnnnnnnnnnnnnnnnnnnnnnnnnnnnnnnnnnnnnnnnnnnnnnnnnnnnnnnnnnnnnnnnnnnnnnnnnnnnnnnnnnnnnnnnnnnnnnnnnnnnnnnnnnnnnnnnnnnnnnnnnnnnnngatctcctgacctcagggtgatgcgcctgcctcagccttcccaaagtgctggggattacaggttntgaggccaccntgccccggncctgtcaaggtttttaaaaatgggg

SEQ ID NO: 449720 - DNA, 468 bp, Homo Sapiens
  misc_feature (228)..(265): n is a, c, g, or t
  misc_feature (369)..(411): n is a, c, g, or t
tttcattatttagagaatactttattagtttctgtaatcaaacccatgtagataagaccttacatatttaatacagtgcgttacccctgtacaaatggaaaaaaattaagtttaacgtttctagaccaatatggctgttaatttctgtacaatgccaactcaacacagtaaaccgggatactttttccaaagttgacagcacagctaaagtttccaaaaattcaaatnnnnnnnnnnnnnnnnnnnnnnnnnnnnnnnnnnnnnnaaaagaccaatagcagtatgttatgcatcaatagcagcaacagcttttccaggttctgcagtcatctgaataaaattatagagacatccagcacactccatttnnnnnnnnnnnnnnnnnnnnnnnnnnnnnnnnnnnnnnnnnnnttgcaaagttctgttactgttgtggtacctggcaccgttttttaaaattagcttctg

SEQ ID NO: 449721 - DNA, 638 bp, Homo Sapiens
ggcgccctggcgctgccagcgctcgtagtcctcggcgtgcccacggacgtagaccatggcattgagggatgaggagccaccccagacgcggccgcgtggccagtacagcacgcggccgtccaggccccgctgcacctctgtgtggtagcaccagttgtacctgtcgtcgcacaggttggccaccaggtccgcgggcatgtggatcttccacgagagccgcttgctccccgcgcgcacgtccttgggcccggcctccagcagcagcacgcgctcggcggggtcctccgtgagcctcccagccagcacgcagcccgccgagcccgcgcccaccaccacatagctgtactcgtcccggctctcagagcctgcgctggccagggcccgggcacccagggattgctgctgccccagggctccccgtgccagggctccaggccggcccaggcctcgtaggagacaccacatgcttctatctagtccaagtcctctgatccacggagtggaatgagatgactcacttctccctcacatccagaagtgacaggatacggtgcactctgtgaccggggctggcctacacactctttgtgattgtctccgcatcctggttgtctcaaagcctgtgtgccgaccccgct

SEQ ID NO: 449722 - DNA, 483 bp, Homo Sapiens
ttttttttcttgacaaagcactttatatacgtcagcgcatttgactcccaaaacagctctaggaggtaggtgctaaatgaggaaacgaaggcaccaaaaggtgaaggctcacctaaagccacacagctggaagtggcagaagcagaatgggaacccgggcagcctggttcctggccctgccattcacccctctgccatctagaagatgctactggtggcccacccgagtccactggggggtgatgcctgctgctgagggttcacatctgtgctctctggaggcttcccttggctactggaaggcaccctgccctggaggtaagtgtctgggaagttattcactcctctctggccccctcatccaggagccagtaaccggtggtgtgggcacactgtggtactgtgggctctgcctggagctctccgtggggccagctgaggctggacgtcctctgaagccacttccttgcccagctgctccct

SEQ ID NO: 449723 - DNA, 458 bp, Homo Sapiens
  misc_feature (44)..(44): n is a, c, g, or t
  misc_feature (61)..(61): n is a, c, g, or t
  misc_feature (74)..(75): n is a, c, g, or t
  misc_feature (94)..(94): n is a, c, g, or t
  misc_feature (100)..(100): n is a, c, g, or t
  misc_feature (110)..(110): n is a, c, g, or t
tctattctaaagcccatatctttattaatgtagccacagggcanaatgctgttttgtggcnagctaaaagaacnnataagttcacgtggacatnccatgnccgccagtgncttttctcaccaggggctgcttgtgtgtcctccctcctcccacaccaaccctcctgcacacttcagcacaaaaccatatatttctcttcaggaacaataaccctagccttatgggtacaattttccaaccacatatgaatctaaattagactctgctttataaatctatgagtttggattggagccagcactaggattactacaactcagagcaggaagaagagtaggagggcagaagaggagttccaacagaaagttaaccatgatgagaaactatgggacccctcctctctgcaaatgtcacaatctggttcctttaaaaagattggagaaaaatcgaaaataccg

SEQ ID NO: 449724 - DNA, 494 bp, Homo Sapiens
ttagaggttacaacatgaatctttaatcataagggattgttccatcaggctaatttataaaaaatagctctactgttattataaaactgaaagatactttgttacaaagtaaaatacataaaagtacaacatatgtattatacattcagaatcccaccactagagataagtagttatatgtcctctcccacatctttttttctctgttgctctaaacatacacacagaaaaacatactaacaaaatggggtcatgctataattgttgttctaaaactctcctggttcactaaatacttcatgagcaacctgcattgtcattatctgtgtgcctgaagatttctagtggctttccattgcatacatatgcctgaacttatctaaaaaatttcctaccaatggaaactggaatattaacatttgctattttaaaaatgttttaaatttaaaaactccaccttctgcatgcgtttttgcccaagtgggcaactatct

SEQ ID NO: 449725 - DNA, 283 bp, Homo Sapiens
ttttttttctcacagtccttgagaacagaccctgtggctggtgcccatactgagcagggaggggcactcgggagatgcctggaacacctgtgtggtttctgtcccagtggtggccctgccctggggtccaggcccttcatacctgcaaggagtaggacacagaaaggcccaccagccccgggttcaggctgctcctcccgatgacggcaaatagtgcagcaaagagcaccacgcagttccccacgaactccactccgatgctcagccacctatgggggatcaa

SEQ ID NO: 449726 - DNA, 176 bp, Homo Sapiens
agctgggttcccagcccccctccttgtccccaccccaccgcactgggaggccctgctgaggggccagagtccggctgcaggtcccacgggtgggggtggggcccctcattagcactgcagctgacactgagggcttccacctcgctaattgattaaactgtttagaaaccaggaaa

SEQ ID NO: 449727 - DNA, 358 bp, Homo Sapiens
tgagctctcttggcctttattgcccatagaaaacataaaaggtcagcaaagtcacacgagcatccacccgtcatcatatggacctctgtctttggctgtgttgaattccttcccggccagctgactggacctcggaacacagtggctgtatgtgctgagagtggcttccaggccccagggatccacagatcccagcaccccggtgcagccaacaacacagggtgtcctgtctactgttgggtagcatgggaagggcctggcctcagggtgaaggttcccacttgcagcggcgttggatgcagtcagcggcgttgatgcagtcagcggcgttgatgcagtcagcggcgttgatgcagtc

SEQ ID NO: 449728 - DNA, 542 bp, Homo Sapiens
ttcgtggatgaggcttttaatccggggtcagccaggtacagcattggggacatccccaggcccagggcttggcgatgtgctgggaaggaacttaggtagagaggtgggaagtgaaagcatagggaggccatagccctccagaggggaattctaagacagacagttgaaggtgaggcctttgaaaaacaatgggaacatcacctcccaaagagggactgaggtggctggaggaaccagagccgcctctgcactctgcaccgagggtcgcgtgtggctgtcaggagagcagcgtaagcctgtggagcctctgctcgcttcctgctcagaaagccagaagagagctggggcaggccaccagggcaccagacactcaccaagcggccatcaggactgggatgagaggacagaggaaggacactctgtccccaaaccctcccgtgtcctgacggccctagaacttggaggtgtcaggacacaacacagactcaaggctcctggattgaaaatgtggagggcttgggccaggcgcggtggctcacact

SEQ ID NO: 449729 - DNA, 459 bp, Homo Sapiens
tttttgggggggatagcaccgtttattaagaaaaatcaagacaaagaccacaggagggtcccttctaggacacagaggccaggcgtcccaaccccacagtctgggggccactggcaggatggcacttgagctggatcttcaggctcctgcagatggggcagggtggtcatatccccctcctctctctctcagtcgtgagtcctgccttcccccacctaaggcactagctcttcctgagcaccagcggcatccgtccgtccgttgtctgttggaggagtccctgggccttcacttccagatgggtggggatgtggcctggggtgggcggggcccggtgggcggggccctatcagtgctgggctctgcctgtagcagctcctggtaagagttggggtgggccttcccttacagcccctgagggagggaccccaggctgtgtgctggcaggagcgggtggcc

SEQ ID NO: 449730 - DNA, 455 bp, Homo Sapiens
ccatagaatgttttgatttgcctaggatagttttagctatatttattgtctagttgtaattactaatagcatctccattcacttccaaaacattctggttgagatgaaaccttacatagtcaccttcacatttgggtgttgttttagtgtttgtgacttctacaaaacactagtgtcattcttaaatctacttttgttactagctatcatgggatttgttaaggagtgatactgcggccttatgaagtttttgatataaaattaaaatactactttaaaaatttctgttactgtattgctgttagaataagaactaaattttgtatgatccttgaagaaaataagttatggaaaaatatgtaaatcagtggatgtttttgtcctccagtagtcttatttgcttataggatttaattcatgttcttcattagtttgctcctactgcagctgtggta

SEQ ID NO: 449731 - DNA, 829 bp, Homo Sapiens
ctgaaaataaccagtggttgaggtcaatgaaggtggcaataggaattaaagggcaacttcacctgcctttgaagggacagatcccaaagggcccagattaaattttaaccacgattatgtttgccaggattttatatctcaaatgattatgtttggcttttgtaataataaaaggttattttgggaaaagaattcccttttaacatctattgtgtttactaggaggaaatacagggttagacttcgatacagtttagcctttgaaagaaaataaaagacaaatgatttagcagatgggtaattcccaaatctgcagaaatgtaaacagccaggattttggtgcctatgggttttatcaaagaggtaagaaaggcagagaccgacaccagtgcgtcctctttggctagttttaacacgtttacagtcacaattaacattcaaggaatttccttttcatccaagtgtttcttttaaagcacttcataccacaaactaaagttctagctgccatcagtccttcccatacagaagagtagcgaaatctccattatacttccttactttgaaaatgggctcggaccacgtcaatttccttgggttgtttgttttccagtatagggggttcttgcctcctccctccttccctctctttaatgagcttgtattgaggatcctacttcttctaccctcaccctgctctgcactcaccccggagccagatgagcgcgaggctgcgcagagcgctgctgcccagccggagctctgggctcgcaacagcctggtttcaagtccgcgagccggctggcccactgcattctgcaagaaaaaa

SEQ ID NO: 449732 - DNA, 581 bp, Homo Sapiens
ctcctggatctgggcctcgtgggtcttggcctcctcctccagggtcttcttcaggatgttcacctcctgctcacgttttgacctgagctcctgctgggcagctgtggaatccagcgtgtcctccaactctgttttcagcgcctctagctcttccccaaggtcccgtttctgcttctcagctttattcctggaagcacgctcagactccaggtcttcctggagttcagagatctgagattccagctcccggatcttcttgagggccatgttcttctgggcagcttcctcttccactctggccagggcggcctggagctcctcctctttcttggccagctgcatcttgagctccgcgatctgggcctggagctcggcgatctggtcgctgaggtctgtggagtctccctccagcttccggcgggtcttctccagctcctgtcgctgcttctcctccctgcggaggcgctcttccaagtcagtgatcattgcctcatgcttgttcttgagcttggcgaggctcttagatttctcctcctcttctgtgaggttggtggtgaactcagctattcagttagatcgcg

SEQ ID NO: 449733 - DNA, 422 bp, Homo Sapiens
cttcagctcgcaccccagcgccctagcctatccccaggtcccgtttctgcttctcagctttattcctggaagcacgctcagactccaggtcttcctggagttcagagatctgagattccagctcccggatcttcttgagggccatgttcttctgggcagcttcctcttccactctggccagggcggcctggagctcctcctctttcttggccagctgcatcttgagctccgcgatctgggcctggagctcggcgatctggtcgctgaggtctgtggagtctccctccagcttccggcgggtcttctccagctcctgtcgctgcttctcctccctgcggaggcgctcttccaagtcagtgatcattgcctcatgcttgttcttgagcttggcgaggctcttagatttctcctcctcttctata

SEQ ID NO: 449734 - DNA, 377 bp, Homo Sapiens
tggggagggcaacaaaaagatgagtggtttattgaaggtttggtctagatacttataaaaatacaaactggcatgaaattcaacctcatgaagagtccgtcttcatagaagacaagtgagtgatcccctggggagggcaaggtgctgccccagggaaaaggcccacagggcacagatggcagggcttcttctttgccctggtccagcaatcgacctgtccccaggtcttcagcctgggcccccagctggcttgaggatttgatcataccaaatcccagtcctcctgggggatgggctgataccctcagagcagactgcaaagcgcctgtgtttgtcttgcctctgcttcagaatgtccaaggctgtctactgctctt

SEQ ID NO: 449735 - DNA, 448 bp, Homo Sapiens
  misc_feature (146)..(146): n is a, c, g, or t
  misc_feature (421)..(421): n is a, c, g, or t
ttttttttgaaatccatattacctatttattcaacaaaaaactgagtatcttctatggtccaggccatgtccttggcactgcgaacagagataagtcctggccctcaaggagctcacagtctagtgggggaaaaaagacacaagantaaataaatataatgtatttggagtttgcaaagggggccactatgggagacaaagaacagaggaacctaaatatcctatagttagcatccacaggaaagaaagacctgggcaatgtacatttttgtaaagattagataaggcagtggttcttcaaagtgtgggctgggctaattacctacatcaggattcatttgggagcacatatttaacaagtagggtttcccagttacctttcttgcacatttttcttgattttaggtacgtgttgtggggnggggtgggttttacggtttgagggcct

SEQ ID NO: 449736 - DNA, 428 bp, Homo Sapiens
  misc_feature (415)..(415): n is a, c, g, or t
tcagcattaaagttttacttaaattacaaaacggggcgaagaaccttgcccaaagatgatatctcatgtctcctgtgacagataatgaatgactcaagacaaaggtcattctctttgttatttaaatagtttccaagaagttcataagctgttccattgtggtgtgttgtggtgctgaaagcatgctcacccgagagttcagagaatctgctggatctgctcttcactctgccacctacttgctgtgactttaagtttgatcttctgtttctcttcatccttgcagccatagaaacacagcacctacagcacctagacagctgagaaaggccacaaaatcttctcgaaagccaactctgcaatccaatgacctcattttgtaaaaggcattgatagtagtttgaatggctgctangtagtaggcactg

SEQ ID NO: 449737 - DNA, 571 bp, Homo Sapiens
ttccttaccctgagatatttattaaagaaagggtaatcctggagtcctagtacataaaatatcctttgggtgtatacattatgtaaataggaagtgatattatttcctagcattgtaagaaccccagctcccaaataataatgactcttgggtaataaggaagtaccttagcatgcctccaacatattgactgttaaagggcaatcagttctccccggcagtgattgcagcaattgaaagttatattttcatatctagtatagggatgaaatcgtccaatatttttctttgtagcaagtaaggtggttggtgaagactcaaaaaatggattatcaggtgaactctctttgcaggtaactggatctaaaattcttagaaccgtttcagccattttctcagctggggtgctgcagaattcaactgttgatggaatctttttttgattgttaatgccaacatttcccagaagatgagaatttactgcttttgcccacttgtgatttgttaatgctagctctgctgtgcttgtggggttgtacactaggggagtaagtttgctctcttccccacc

SEQ ID NO: 449738 - DNA, 518 bp, Homo Sapiens
  misc_feature (493)..(493): n is a, c, g, or t
acagctcagctttctgaacagttagaacgtatgtcaatacagtgtgatgtatggcgaagtaaattccttgcaagcagggtaatggcagatgagttaaccaactcaagagcagctttacagcgtcaaaaccgtgatgcacacggggctatacaagatctcctaagtgaacgggaacagtttcgtcaagaaatgatagctacccagaaattattggaggagctcttagtttccttgcaatggggaagagagcaaacttactcccctagtgtacaaccccacagcacagcagagctaggcattaacaaatcacaagttgggcaaaagcagtaaattcttcatcttctggggaaatgttgggcattaacaattcaaaaaaaggttccattcaacagttggaatttcttgcaggcaccccagcttggggaaaatgggcttggaaacggtttttaaggatttttaggttcccgtttacctggcaaagagagtttcaccnggatattcctttttttggagttttt

SEQ ID NO: 449739 - DNA, 578 bp, Homo Sapiens
  misc_feature (255)..(285): n is a, c, g, or t
  misc_feature (398)..(398): n is a, c, g, or t
  misc_feature (523)..(523): n is a, c, g, or t
  misc_feature (534)..(534): n is a, c, g, or t
  misc_feature (555)..(555): n is a, c, g, or t
ttttttttgccagaacagagactcaagccaggtttaatgatcattgtctagttttcagagcccagaggctccaagatttgccagcctaggtgtacacaagtgggaggaatggggtcttggacacgggaggcctgcttgctttgtcagcagagctacgaggaagtacagaggtaagaacacacagaaaactggatccatctgctttgctctccccagctggggtgtaccctctcctggcccctttcttgggccccnnnnnnnnnnnnnnnnnnnnnnnnnnnnnnntacacagattgtaggagccctgtcatcctctgtctccaggggacacctgcttctggggggagacatgtcttggtttatgggggtgtgggggtagggggtaaggagggagggtnggtgatcctcttcgggcctttttcttataccccacactggggggagtttttcaacacaggggttcttagttgcgctttacatatgctgattatttcaattcttcccatttaaaagctaccctttnggggtcttttnaccctgaaccacgggggaggnaccaatcaatttttttggagggg

SEQ ID NO: 449740 - DNA, 123 bp, Homo Sapiens
aggccaggcataatgggttatccctgtaattccagggcttttgggagttgaagctggaggattacttgaggccagtaagtttgagactagcctaggcaatataatgagaccctgtctctacaa

SEQ ID NO: 449741 - DNA, 428 bp, Homo Sapiens
gacacggcaggtcgtttgcttttgatcagactctttggaagggtgttggggtggcagtttttatccttgaagacctcagatatgctaagtcaacctaagcaaagtatactcggtggaaccctagctctgtggggtgatctgcaaaatagagtatcctggtcatgtaagttcaggaaatgctacagactcaaggattatttttggggattcaccatgcacagcacacattgaaggctgaaaagtccttgcagaaaggaaactgacttaactttgtttcttaaggatatttgaccacaaaacccttagtctgcatcacaccaacctgatgcctcctggaacctgtgttctgtataatgcgtattagaaaatgttggacaacctgtttcattatcagaaatcccatttctgaggacagtgttctctgcctg

SEQ ID NO: 449742 - DNA, 792 bp, Homo Sapiens
  misc_feature (548)..(548): n is a, c, g, or t
  misc_feature (694)..(694): n is a, c, g, or t
  misc_feature (696)..(696): n is a, c, g, or t
  misc_feature (715)..(715): n is a, c, g, or t
  misc_feature (772)..(772): n is a, c, g, or t
tttttttaacattagtaaactttttatttctgcttttctcttaacccaagggtgaaaatggaaacctgtggtgtggggccagtctgctgaacgctaggatgagggcggggaacaagagccaccctccccgctgccacctggcccacaagagccttcccaggggctctccagtttcagcccctccttgccgagccagacagcgctgctggcctggacgggagggacacccaggctgactgagtgggggagcactttttataaagatcagatcaggtttctgaaaacaaaaagcccccagatcctgcgagcggctatttagacttgatgcacactccaccatttcacaggtatccattccccagcgtcacacatgcccatccccagctggagcacactcttcagtgtggaggacagaaggagcaggcagaagacgaccccggggcgctgggggagcaggtgcgggctcccacatacctgctctattctggttggaggtgtcacaagggaagccgtggagatgctgccaatggggacatgcggcaaatgcnccccttcgccccacacctgtcagcagctagcaacaactcagtcctgaactgctggagacccagccccaggggcaggcaggttgggatcgctgctcaggaggcagctctgggcccagggtggaggccggagaagcccaggcacctcncncgcagagctctgcagaggnccagtctgctaacggcttcatcactggagtggcggctgctaagagcaaagcctgtgncttggtaacctcagggatcc

SEQ ID NO: 449743 - DNA, 1120 bp, Homo Sapiens
  misc_feature (135)..(146): n is a, c, g, or t
ggcacataatttgtttaatccagattggatacatcaggtacagcagtggcacacgactcaatactgtaaatgatatacatgttttaacatatgcactacagtttcaaaagaagacgacaggaaactcaagggtgnnnnnnnnnnnncatagaaagttttcatgttttatcttcctgcagttttgtacagtatatttcttctttgccattgtgatgttgataagcaaagcccatttattatacgaaaatagaaaagaacacacttgatgtatctcacggatgacattaatggggggaagggtgtgacctctaaggaaaacattacattggaatgtctgattatcaaaaatataccatccctcccacctcccaggtttgtaaaatagtccattggtccaaggagccccccaggacttgggtcagtgccgtacactggttagagtgacatcatccagtgtagttgagtaacctgctaagataaatgtcattcccacacttgagaaaaaacacagaacattctgaatagaaaacaagacttaaaaggaacccctttaaagctgtttcattttctgatagccactttctcttagttttaatgatgctcttcatggtgctgtttgggctccgagggtcatgggtcataacaatgtttttccttcatctagtcattttaaagctttgcaaataatgagatttcattaggaaatcagaaagagaaaataaaagtttgtcatggttaccatgccaagtagtgtagaaaggaaatgaatattgccttaagttcacagcattgggatatttttgccttatagttacctggtaattgaagtgggagactggaaaactggaattctttagtaacctcgaaatctagtgttagctcaattttcaaccacttcctctgcaaaacttaaggaaaaactcttaagtacataatgtcccaatgtacattttccttgtctacaatctaataagtgatatcctgaactgtaggaatcatattttgaaaactggataaaatcatcagcatatccacaagttgacatttttgttaattatagatcggcattaactgtcaaatttaagttctgttcaaattctgatccggagaattccggacc

SEQ ID NO: 449744 - DNA, 557 bp, Homo Sapiens
tttctgtggtagtctttattattattttttagctattgatacatagcatggcagcaagattacatcagtaatgtaatataatacagcttttttcattgaagctttgtaccttactatactctaggctatttggagtgttcccccacttgcactaaagtacaactatgatgtctctactgcctctcccagtgaaatataaaaatattgcactacattacagatatagtttacaaatgtcattagcagcattactgagctttctataattgtggtctacagagttaaatacttttaaaacatgagtagattcttataaaaccaaagttttgcattatttcaacagctctttcaaatgcatcagtttcagcaacatgcttgggtatcatgaaaacttccatggtttaatcaataaacaccagctacttacaagtagtccaccttccaggttatcaatggtaagttattttttataaagtggttacacactgagcagattgcctcaagtgtaagttatggaacaatactttagctttcagggaatttggtgtgtaaattct

SEQ ID NO: 449745 - DNA, 468 bp, Homo Sapiens
cttattcaaaacaatattatttaatttaatattttcacctatgagaggtaatgaatgcagaaatatagtctccattatagcagacaggaaaaaatacattatcctactattttctagaaaaatgattgtggcattagcaaatcaaatggaaaaagtgaataagcagactgagattacctgaaaatagttagttgctagtaaggttcagtacaatgtatgtttattaaataatcgctactagaacaaacatctgcgacaactatgaagttaggaaatgctgtattagcttgaacagtttatctgttggtcacattaataagtgactcagaaatattacaagtatggaaaggcatgatagtgaacaatgccacatgagtccattaagcaaaaatagataatggcccctatatcttagaacagactcacttattcattggtatgaataatttagctctaaaaagaaaaatc

SEQ ID NO: 449746 - DNA, 478 bp, Homo Sapiens
ttacgatcctacagagatggtccagctgccaggacttactttggcaggcagcgtgctacaggacgaaaatgtaagagaagtctattaaggctggacaggccagggttatttatactctgtgggccccaagtcccccggactaaagacctaaaggctgattgactcattcctgattgatttaatggaaagtctcccaccccatcatcatttgccagagtaccaggcaccgatgaaaggggacgagtaaagaactgccacttcctaatgtatagtaggccttatcacactgtaagtggtccaagcccatagggatgctctttttggttcctggaatttccagttggatgtgacagagatctttcagtataggtctaagtcaagagtagcctctgggttgaggtgggctgggagattaacatcttacctggggtccttcagataaacctgttggtttttcctgtctcatacaggcccatct

SEQ ID NO: 449747 - DNA, 302 bp, Homo Sapiens
atgagccaccacgcctggcctgaaatgccgtttttatcatacgctgcagactaatgcatcctcagtgtcacctcccagcttgatgtgggacaagccaccaagggtgtcctcaccatggccccgctcaggccaccagttggctatgtttgcccctgccaccccaggcacacaggagttcaggagtcctctctggccttgcctttatcctggggcagctgcaggtgacaacctctggaagaggtggtaagaggagccaggacacaggccagtctgagggacacactcctcccacagtcctggag

SEQ ID NO: 449748 - DNA, 1769 bp, Homo Sapiens
tttttgccaatgatgttgagctttattaatggcccctctccagaggctgctcagttgtccccagggaactcctcagagatcctctgccttcccacatatgagcccgaggacacctcgggagcagagaagtgacaggggtttccgggtcagacgctgcactccacgcctgcgtcctccctcgtggctgcagtcatgatggccccagctattcttggtgcagctccaccggggtactcttccgtgccccgacactgaacattatccagccagaatctgcccagtgccagctcccactttgtacagggcccttcctttggagtaacccagcatgcggcagaagacaatggcatcagaattttgccactcgtcatcgcaaattgtcccccaggtaccactgtagtaaacttcagcccggcctcggttactactgccgacaatcctgtacggacactgagttttcacctctttcacctttttctccctttactccttgctccccgagaagatcctttcactccctggtctcccttctggccagcttgtccagaggcttccttgggcacctgccagccctgggctcccctgttctcccttcacacctgcatgggcctggaactcctgattctccttttcttccttgctgtccttgaagtcctgtgtcccctttgccttcctttcaggcctgtggctcctggactcccgtgggctccctggaagtcctgctcgcccaggggagcccagcactgccaggctcacccttggcacctggggtgtcccactgcaccaggagggcccggaacaccctgcagtccaggttgtccttgatctcctttagctccaggaaaaccagccaaacctggtgggcctggcctcccgaagtcacctttactcccctgggctccaggaggccccatgacccctgcatctcctttcatgcccctgtcccctttgcttcctgggagacccaggtctcctttctctcccttagttccagtttccccttttgggccaatgagacccccatcgcctttgctgcccttctctccttggggtcctggggtgccagtggctccttgcttccctggagcaccctggggtccttggaggcccgcctctcccttgactcccggtgggccttggggtcccgaggggcctgttgctccatctcgtcccatagcccccttggctcccttctcagcaggtggtcccggcgggccaggggcaccaggcatgcccatggcccccttgtgaccttgaagacctggggcgccttgttcacctttgattctgaacatccctgggttctgagtgaagttgtctacccgctgcagcaagtgctcatggctgacgcggacccaggtgagttgggcctgcaggacttgcagcctcgatgcaccctgagccaggtgttctccagggtgtgctgactgcagcaaggagaaggacgggctgtcctcagccgccagagtgtcattgaggaaatacatctccaggacccggagccgcgcctgcagattcagaacttggaccaccagcagcccagcgccagcggtgagcaggatcaggtagatgaccaccacagctagggagaagttcaccccatttctcctcttgggctttggaacattgatttcgaaaggctccattgcaatttggtgaaaagcagcttgttgggtctcactcaagagctcgtcctccttgagaattttcttatttctcattgccaagctttatagatggccaaagtcctggagccagcagaaatgctc

SEQ ID NO: 449749 - DNA, 617 bp, Homo Sapiens
agcggtcgagcagcagttacctactgtgtcttaacactgagtgtgaattttttcttaaagcagtactgtagtactgaatattcctttaaaggaactgcagtgagcctatctaagtttttttaaattaaggcttttaaaatagaaagctgatgcttgatcttgcacaatttttatgtctagtatgtatgcttgagtgaatgtgtgagtatgaatgattagagaaaatttgagtcagtgtactttatagtgtgaatcctgtgagctaatacagtctatacttatttcttccctacctgtttcacatccgtaagatttaggatatacattttttgagaggtagtctgtctgatacaatgtaaatgacaaaacataattcctgagaggcccagaacaaactggagtctagcctggagttaaattgagacttctaaaatgattggaacaaagactaagttgtgccagatgtaaatcaacccctcttttagtttactttagactttgtattagctcatcttttttgtagtaaatctatagttttaaggtttctcaagatgtggctctacctactatgatgaaaattgaagtgggtcaaaagaattagatgtacagtgaaggga

SEQ ID NO: 449750 - DNA, 442 bp, Homo Sapiens
ttttcagaaagaaagaagtcaaattttatttgtttgtagatgacatgaccttctgtgaagaaaatcacaaagagtcagccaaaatgcaactggaactaacaaacacattcagtttatttgcagaatagaataacagcaccaaaaattagttgaatttccatacattaacaataaataattttaaaagaaaattaaaaaccaattccatttgctaaagaacttaaagtaagaaatatttaggaataaacataaaaagtgaggtttgtaccttgaaatctataaacattgatcaaaatgattaaaaacatgtataaatagatataaatcccatactgattggaaaaatgaatatcgctcaatgattatatacccaattgtgatttagattcggtacaatactcatagaagtctctataactttttgttaaagaaacaaaaaaca

SEQ ID NO: 449751 - DNA, 782 bp, Homo Sapiens
  misc_feature (623)..(685): n is a, c, g, or t
ggccccttgtttcaaataaaaagagccaattaatgcaagcaaagttttgggggtttgttttggtccgtttttgtaatctcatttcttccgttttctagggttgggtttttcatatgcatgtacattagggcacagggagctgagagctggagtgggggaggcagttcaacactacttggctggctcaccgtttcaagggctgatggtgtctgaggcccacccatccctcagactgaggtgagcagagcccagggtgccaacaagaaatgaaatctgggcctttgttccacacaacaccagccctgtgggctcctggggctccggttgggccgtgaggggcataggggagagatggcaacagaagtgccccgggtttggtgtgcggctggcgacccccgggcgtgccctgtgtggtgtgcaggtgtttcagggagcctgggacccctacccaggctgtctacacaattgtgctgatgccgctgggtttggccttgctgctggtggggggcggcggggcagggggctgcccatggtggtgcactgtgtgccccacgtgggccgagggcagcggcgggtggccgtgggcatgggccccgtaggctgggtggcccccatgggggccnnnnnnnnnnnnnnnnnnnnnnnnnnnnnnnnnnnnnnnnnnnnnnnnnnnnnnnnnnnnnnncgggggagggttctgcatgtggcagtactgggtgtgatgcccgtgcatggcggcctgcggcagcccctctgggggccccaggtggtggccagccaca

SEQ ID NO: 449752 - DNA, 306 bp, Homo Sapiens
tgcacctagcgtacacacacatgcacgtggcattagtctttgttccagtcattttctgagaaggagtgtttaagaggtacattttttgacatcttgcatatttgaaactgtctctattcaacttaaacttgatggtaatttgccgaagactagaatcctggatgggaaataaacttctctcaaagttttgaaggtatgtttgttagtaaaggtataggctaagctctgttacaaacctcccccaaatacagtgacttaaacatctgattaatagtttctaaactggccgggcctggtggctcgcac

SEQ ID NO: 449753 - DNA, 476 bp, Homo Sapiens
taagttcagctttagttaacagataccatctcggaagagacgattctaatctgggccatactgacaccgaagctgctcatgcaaaattaaagcaagctgtaatagtaagcatcagataactaaatcaaattggcattaattccagttgccattgatttaggcaaagactaaagctgaacttataaaaacaaggaaatgattgacagatctacataataaaaagtcagaaaattatactttaaagcagcttgaggatacgtattactattggattcttcctctttttataacttgttcaatagatattttcaataactacagacacaaggcttattacgtggtagaaattctatctaaaagacaaactcttaacatcactgatatatgtaaaaatactgaactcacatcagggccataaatcagaaacatacggtaaagggatgggtgggaatacttaatccctatgagaacagtta

SEQ ID NO: 449754 - DNA, 769 bp, Homo Sapiens
  misc_feature (46)..(75): n is a, c, g, or t
ctggtacggtccggaattcccgggatatcgtcgacccacgcgtcgnnnnnnnnnnnnnnnnnnnnnnnnnnnnnngtgtgggatgaagggtgccaaggagacagggcagggcagggaccctcaagaaaagcggggaggcggggggaagggatggtacaagcagccatggcacctcagtgtgtccctcaggcacctggacacacaggtgggcaaagatgctgacactgggggccagaaacgccgatacccccattcttccatttttactcagtctcaggtggtcccaaggaggggaccttcgtggccttgctgtgctcacaggctcacctttgtgtttccagctgcagagaaagtaccctgggccatgcagctgcactcccctcccaggaaaggggcaggatggctgcccagatgagtgaggcatcagccctggccccccaggtcttcccgagtccactggaactgatggtgggtgagcccagctccaagagccctggccagtgcttctgggggttctgctatgagaaggcagcagggccccgaggggccctggctcagctgcgtgagctgtgttgccagtggctgatgcctgaggcctgctccaaggagcagatgctggagctcttggtgctggagcagttattgggcacactgctcccagagatccaggcctacacgcaaggagcagtggctaggcagccctgaggagcgcattgccctggaagagcggctacagcaggagtcaactgggcaggactccaatgaatgg

SEQ ID NO: 449755 - DNA, 1114 bp, Homo Sapiens
ctctctttcctcttgtctcttcttctgttcctacgccatttttcccccccgttgttgtcttcttctctgcctgtgtcccatgtttggctcgctatctgttttttcctcttgcgtggtctgtagctcgttgcccttcttgattctttgctctctttttgggtgcatatcctgtctctcttcgtccttcttagtgccttttcttcttcttcgtcctcctatcgtccccgtaccttgttttctcccttaatcccctgcgtgcaatcagcacgtggcccgttgcactttctccttgggagcccatctcctcttgctttccatggcggtttgcacttccagtcttctctccagttttctgagccaccacattttatcagtagctgattttcatcccctccagtctcttgcacactcccagctgcaatcagagcaggaggagagagcacagcctgcaattgctaatttgccaggagctcacatgcctgcgtcacctgggcacagacggccagtgagccagattccgggctgtgctggggcctgagctggtgcttgggagagagtctctcccctgcgcctgtctcttccagtgcaggaggagcatgtttaaggggacgggttcaaagctggtcacatccccacctgaaaaagcccatggtacaacgaaaagcccactagcttgtccagtgccacaggaggggcaagtggaggaggagaggtgtcggtgctccccactccactgccagtcgtcactggctctcccttcccttcatcctcgttccctatctgtcaccatttcctcgtcgtcgtttcctctgaatgtcgtcaccctgccctccctgcttgcaagtcccctgtctgtagcctcacccctgtcgtatcctgactacaataacagcttctgggtgtccctggcatccactctctctcccttcttgtcccttccgtgacggatgcctgaggaaccttccccaaactcttctgtcccatccctgccctgctcaaaatccaatcacagctccctaacacgcctgaatcaacttgaagtcctgtcattgagtaatccgtgggccctaactcactcatcccaactcattcactcacgtgccttgccccacac

SEQ ID NO: 449756 - DNA, 549 bp, Homo Sapiens
aatgcagcggaatcggcagaaagaggggcagggaggggctggagggcacgtgtgaagacatcctgggaggtgattgtcatcccctccagtctctgcacactcccggctgcaacagagcaggaggagagaacacagcatggaatgctaatttgccaggagctcacctgcctgcgtcactgggcacagacgccagtgaggccagagcccgggctgtgctggggcctgagctgggtgctggggagagagtctctcccctgcccctgtctcttccgtgcaggaggagcatgtttaaggggaagggttcaaagctggtcacatccccaccaaaaaagcccatggacaacgaaaagcccactcgcttgtccagtgccacaggagggggcaagtggaggaggagaggtggcggtgctccccactccactgccagtcatcactggctctcccttcccttcatcctcgttccctatctgtcaccatttcctgtcgtcgtttcctctgaatgtctcacccctccgagtccgctgcattgggatcatcaagaatcgaccg

SEQ ID NO: 449757 - DNA, 715 bp, Homo Sapiens
cggtccggggtccgcccagcagcatgactgtccatgcgagcctggtctttggtcctcggaggaagaggccttttaggcccagagcctgcttgaccttactcgctgattgtcactgacagccacagtgcacgaagatggaggcctcttccatcccttctaggtacacgtgtctgtagcctggcatcatgctgctgaaggccagcgtcctctggccaatgaagtcacgcccgatgggatcgtggtcccagacgaggaagcggaccagcgcgatctccggcatgtgcaccatgaaaaccagggtctcctcccaggtggggttgaacccgttgtcgtccaccacgcgggtctgctccctgctgcagtccacagggagcccaatgatctccacctccacaaaggggtcgatgatctccccacggtcccccagcatggagtcgcgcggcttgggaagcatgctggccactgatgatccggagcaccagctgcttcttgagctgcccgggcagggggtcctccgagttggggttgaacacgccctggcacatgcacccaggcttgagtacgtagccgcagccaccgttggcgcgtgaacttggctcggttcagctgcagcatccgcccctctgactggtagttcagggcaaccatttggcagccggcagtctgacgcgtgggtcgacgatatcccagaaccttccccggattctcttgtgtt

SEQ ID NO: 449758 - DNA, 782 bp, Homo Sapiens
  misc_feature (12)..(12): n is a, c, g, or t
  misc_feature (727)..(727): n is a, c, g, or t
ccacgttgggcnggcataagctgcttccctgagaggacatgaggggggggcggtcctcgtaccctctcccaccctggtgtttgggcacctgcgtgggatgcacacggatgacagaatcaaggcgccaggatgggcactctgccctggatacaggctctaccctcctcccccaggacctgcctagtgccagtttggtagtccccctttctggccccttggagcccacacacgtttcatctttttcccctctgagagcaagaagagacatggcatgttctctgggaccctggaatcctaggtacccacatgtgtgccaaagcctaccccacctggcaggtgtcccacagcaacagaaggaatagtagtccccactctttccatcagccctaccctaccctcattccccgacaccctctggcttgaaccatggctgagcagtgccggcatacgctttgccggcatgcttggatgcccagctgtgtccagaggtggcctgggaccgccagttgcacgcctgccacctcagccagcccccgcccagctcatcagtctgaatggagttgccttaaattggcaggtggtaccgtactcactgcccttggagctgtgaccggctcctgcctgtccaccccttcccgaggtggctcctgcttaccttatcatcccagggctctgattagccaggcctggtcgggtcctggggacggacccagatatgcagagtcancctgcactggtgccaggctacctcagctcccgagatcctctaatcaccacctcat

SEQ ID NO: 449759 - DNA, 843 bp, Homo Sapiens
tgatccaggttgcggcctgccacaccctgtttgttcccaccagtgagtggtctgtcctgatattgtagcttcttctccctgcagctggaaggagtagtgaggccagcagccagagtccccggtgtccagtcactatcccagtggaactctggatgcctacagagccacccagctacgccaggtgcctcgaaggtccctgccagccttggccacgaggtcccccaatgtggaacacgggacagtacgggtctgaattctggttcatagcggcagtgcttataataggttggggtcccaggtctccaaggcattggacttagagaagttgaacttgctgaaggtgactgtgtttttgatgaacagtgtgaagttctgggcctgggccagcaggggcctcgagggcacaacgccactcgtccactgggcaccaactccagatctcacaggtcctgtgggtcccattgaacaccacacactggcctgtttttacacctgaggtggcttcacgaagtcggccacatcccacagccggtttccaagctccttgatctgagtgacggaaacccctttgagtttggtgatgatggaaaactggggttccaggtcccgctcctggtagccttttttggcgaggagcgcccaccctaccacatagaccacgatcccaaactgcagcagcctctgcagggcgcccacccgccagttcctggtcatcacatacttctccgtcttataatccagaagcccccagcctgtcgtagcccctggggagcccatgctgccagctcctgccgtacgcgtgggtcgacgatatccaaaacattccgcgggatctccggttat

SEQ ID NO: 449760 - DNA, 750 bp, Homo Sapiens
ccctccagccttggccacgaggtccccaatgcggaacacgggacagtaggggctgaattgtggttcatagcgccagtgctttaaaatagttggggtccccaggtctccaaaggcattggacttagagaagtttgaacttgctgaaggtgactgtgtttttgatgaacagtgtgaagttctggacctgggccaagcaggggcctcgagggcacaacgccactctccactgggcaccaactccagatctcacaggtcctgtgggtcccattgaacaccacacactggcctgtttttacaccgtggctgtgtgtgcctccctccccttcggggcagtcctcgtcgacccagcagttagccagtgggacggacgggtgctctgggcatctgccctgaacttgggctggcgtcacaaggaagttggtcactcaagaagaacacgttctctccctgaggtggcttcacgaagtcggccacatcccacagccggtttccaagctccttgatctgagtgacggaaacccctttgagtttggtgatgatggaaaactggggttccaggtcccgctcctggtagccttttttggcgaggagagcccaccctaccacatagaccacgatcccatactgcagcagcctctgcagggcgcccacccgccagttcctggtcatcacatacttctccgtcttataatccagaagcccccagcctgtcgtagcccctggggagcccatgctgccagctcctgctag

SEQ ID NO: 449761 - DNA, 524 bp, Homo Sapiens
gttgagagctggtgagcttgcccttttcccagctgcctcctggaggccacctgaaggttgctcctccctgggctggggtcatgccctccgaggccctgtggccatgagctcctccttgtcccttggatgagcgggacggcccttcaagtcacactcccagtcctaagccgggcgctgctgcacaggctgcggacttagcaccagctggcctgggcggtggccccacgagtgcctgggagctgggagccaggacacccccgacgccttcaggtcagggaagccccgccccagggcaggaggggagctgcggactcagtgggagactcattccgagcctaggggcagccccacgctctctgagcttcgggatgagcccagcagcgcccccacacccactgctgcaggcggggtcgtgcaccgcactgggaagtgatcccgagacccgcgcaccggacgcgtggtcgacgatatcccgagaattccggaccggaccagcctgctttttactccacgcttcatatgcc

SEQ ID NO: 449762 - DNA, 889 bp, Homo Sapiens
gatccatcgatgtggagagctggagcatgaatacgagtgtcaccgacacggcaaaaggcaggcacaaagggaacgcaaggcgccacagaaggacaacatcaagaggaactgcagaaaacagccaggagcgacatacaccagaggtgcatgatccacaagcaccgatcagaacaaccaggaaggatggcccaccagctctgctctgagatgctagtcagaaccctaagtatgatgaaggagcagtaagatgaacatgaggatgaagagcaggagcacgcagatggtcaccgttgtgccccgtcgtctgctgtgggccggtccatgtttgcctggaaggcccagccggattctcatggtgtaataatgaggcccaatcagctttctttaacttgatgagataaatattttcggattcatcagcttctatgcctgtggtcatgtccacggtgccgtaattggggtggttgacgttgtaggttgacttgtctgatttccctatgagcatctcattgtctcccaaggatggtaagttcttggccccacatgtgttggtggctgggccagaaaactcatccccctcactcacaggagaacaagcttccttctcacagtcagccagaatgccctccttcttcttggtgtgctcctcagacaagaacttgacacaaccatcaatgtcactctcaggttggtatcgaaggagcaagacacagacagagaccaaggtgtaggccaggagcgtgccgatagacatcatctctatcaggtctctcaagctgaccaacagtgcgaggagcgctgccaggaaccccgacacgatgcaggccaccactggtgtctctgtgtacgcagctgacgcgcgaggcctggtcacgatatccatatctgc

SEQ ID NO: 449763 - DNA, 941 bp, Homo Sapiens
ctcccccttgtgcccgggtccccagggcattctggcagaattggccgccgatgggtcttgcctgccgctggtccccggctgggtcctggggggtccctgcagcgtctcttcgctgaaccgaggccggcgctagagaagttgaccccggcgttgccctccgcggagtcagtgcaggagtcgtccctccttgggccggggccggggcgggcaccaaacatgtagaccgggcacggggagtgcgcggcgacctggcaccagcgcggaggccaccttgcgcagccgggcaggcacggcggctcccaggcactcccgcagcagttccagctcctggtccgcggcgccgcgagggcgagaacccgtgggcgccggcccctcctcccgccgccggtgccctgcaaagtggaggccggcgcccccggcgcccccgccgcgctcggggcaggccgagggcagcagccgcagctccacgtcctgctgcacgtagtgctcgtgcaaggccagcgcgctgaggctggaggcgcacgagaagttctcgtctggcttctccacggtaaagcgcacgctgcctgcgtccagctcagatggcagccggcagcgctcccggcagtcggcgatgtccaggaagcgcttcacgtagctctcccactgcaggctgaactgggtggcctcggggggaccctgtggcgcgggcgccagcggtggcgtcttgctccggctgggaggcatggtctgtccggggctgtcgggcagctcgctagggctgatggtgccgctgccctgcccgctgcaaggttcactggggatggagctggcgatggacgggctctcgaagctgcccagcgagctcacagagctgcagcggctcagcacaagcggtgtctcctgcacgtagttctccgacgagctggacggcgtggcgtcctccaccttgctgttgcccg

SEQ ID NO: 449764 - DNA, 263 bp, Homo Sapiens
agagtccaaaaatgaggaagatgtgttcattgtggactctaaacaaaacaaaacacatcttcctcattttgtccttgaggttacaaagtttggtagcaacccctggctaccaatgatctcagttaagctagctgctgtttatggtcactgattcggccagctgttgtgattgtgctcaggtccagctcagtctctaggtgtgtttccatcgtatcttcctgtgcattcgccgacgcggtgggtcgacgatatcccggattaag

SEQ ID NO: 449765 - DNA, 790 bp, Homo Sapiens
  misc_feature (513)..(542): n is a, c, g, or t
tggggagcgcaagctttggttctggctggccgaagcgggagagaggcaaggctctgttcggaaccggttcattcctcgctgaagcccaaggggcaagctcggccttccgacatggtctccagcgactcggcggaagcgtaggacaacctttgccgcctggtctgccaagcccgggctgggctccctgattctggcgttgagctgcgggtctggcacggctggccaagccccggaggggtcggagtcgccatggagttgggagcagagggagctgaggaggcatacggggttccacggtccagccgccaacctgctctcgcatcctgtcctgctggcctcgcagggccagggcgtgctgtgggtacttgctcttcaggtggtccatgaaggcatcacgcttgcggtcggcgtccgccttctggagcccgctgagcgcctccagactctgggccgcgatcaccgtgtgccgccgctcggacgtgtgcaccagccccacgttggagaagcgccggnnnnnnnnnnnnnnnnnnnnnnnnnnnnnnagggtccggtactcccgcgggtactccgcatcgtccgcagacagcatgggggggctgctccgctccaggatctggctcccctcggcccccagggtccctcggtccagcctcctccctgggagagcgggctctgccctccgccgtcctctcccaccaggccagggcaaagcgcacggaggcactgccagggctgcatgggacgcgtcgacgcgtgggtcgacgatatcccggaattccgaccgtaccag

SEQ ID NO: 449766 - DNA, 1079 bp, Homo Sapiens
cggcatggggtcctctcgaggtctagcagcatgctgtctgcggggaaggtggagccgaactcctcctgcaggtggtaggcacggtgcagcagggactccagcttctctgcaaactccttccgctgtgaactctggctcagacagtggctctgatgcagtctctgggttccggaaggccgtccctgggcattgggggtgctgccgctgtccccccgctggcccacgcttagtgcctgctcccacttctgcagagcttcctcaaacagctccatgccttgcatgtacaggctctctgcattgccgtcgctggtggtcagagactcctccatccctctggcatcccatagtcccgagcacgcggctgtggggctggatgagttcactgccatcatcgaggccacactgtgggaggagcccgagtgcttgctgggctcaatggaagagatgccactcagggtgtcgttgctcttgctgctggggctctggactctccggctggagtatcctttcttcgctgaagggaccttcctggccaagaggatagggaggggcaccgtgcccagctggctcccctcccatctcgggaccaacctgcttcttcctcctccgtcgcctcttcagctggtgggcagtcagggccagggccacagtcccccgggccgtggcaaagaggactttccgcaggcctggctgtcaaaccggtagctgggagaatgcagactgcccaaacgtcgtgtacaggaacacggggatctcggccaccgtcatggccagggcctggatcatagacgtgccctcggccctccggaacgccatggcagggccaatgccccaggcaaagtcctcagggcccaagagcttccaaggagaacgtcttcaactggttgccagctgggtcccaggcaccatccacgccccagaaggacagggacacacataccagagggcccctccacagagccaggtaccctctggcgcacgctcacggaccgcacagcctgctcccggacgcgtgggtcgacgatatcccggaattccgggccgtacccagcctgcttgctaaccaaggtttagtcatt

SEQ ID NO: 449767 - DNA, 1588 bp, Homo Sapiens
  misc_feature (80)..(133): n is a, c, g, or t
  misc_feature (150)..(150): n is a, c, g, or t
  misc_feature (174)..(185): n is a, c, g, or t
  misc_feature (307)..(307): n is a, c, g, or t
  misc_feature (463)..(463): n is a, c, g, or t
  misc_feature (801)..(809): n is a, c, g, or t
  misc_feature (898)..(942): n is a, c, g, or t
ggggggtgtagtattggaataggtgggttagtgggttcgaaatggattgatgttcattagtgataagggggtcttactgnnnnnnnnnnnnnnnnnnnnnnnnnnnnnnnnnnnnnnnnnnnnnnnnnnnnnnaggcaatcgggttagtntgttcttggacacactttgttttnnnnnnnnnnnnccaccgggtctggttgttagtttttttgggcccattattttccctctgggttgtgttagataagacgcataaatatacggaggggtggggtggaaaaaaggtaaagagggggggaggaatanaatagggtgttgtgtttgtggtgaggcagacgtggagaatagggtgggggggcggagaggggggaatgtgcgggacaggtcggggtgttgtttggctgaggaatacagggataagtgggtggggtgaaaagggttgtttttttctccgttcgaacngaggagtgggggagtgcggcggaggtgttgactccaaaggggtgcccgcccacatcggtacggcttacgccctttttgtaataaagaggatgtggcggcaaaaggggtggcgttccgccgcgctttattacatgggggtggattagggcaggaaggaggccgggcgttttaaaagagtattgtcatgggtgggccgcggcggagggggggtgcaacgggtgaaacacgcggcgccccctgtttaaagtgggggacgggtgttgaaagggtctgaaagggagtggagttaaacaaagagcccatggtggagctttatgtcagggtggattcgagacggnnnnnnnnngggggggagagtttttggggttcgctttgtgggtgtttttctgtttaaaggacgatcgagatgcgttgcttttgccggtaacccgaccnnnnnnnnnnnnnnnnnnnnnnnnnnnnnnnnnnnnnnnnnnnnnagcttgggagctccttggggttgacttgattcgtttgtacttagccttccggatgtaggttggagcttacggagcggtgtctcaccgccggttctggcttgcctataatatgattacgagtcttatcatgggtcgtggttattgagttgccctccatagccggtggatgatccctggggagtgcgtacatcagccccagagacatggaattgcatggcctgtgatccgtggatgaccccaagtgtctctgggcgccagaacctctttgtaagtttcagtaattattataagattgccacttctggatagccccagcaaagagaggtcatggccccttgatctctgaggcaggtggtgaagtgctagcggggtccggggaatggggtttggccttacgcacctctcactgattctgcagcatcctggggtcctcggcttctcctgggagggggatcctcccagccgctccaggttcagacagggcggcgccagaagctttgctggcattgaggagtccgggattggctcggcctccattgcgccccagcccagccccctccgtaatttcgcccgggccctgtcccgcgtgggcccacccgatcccgggaattccggatccggtgccaggcggttatttttttgtggc

SEQ ID NO: 449768 - DNA, 1002 bp, Homo Sapiens
  misc_feature (81)..(169): n is a, c, g, or t
tgtgcccgcgtcttgccgtccccggtcgccccgcgccgttcctttcgggcgcttgcttcgtgcctccgccgtcctcctagnnnnnnnnnnnnnnnnnnnnnnnnnnnnnnnnnnnnnnnnnnnnnnnnnnnnnnnnnnnnnnnnnnnnnnnnnnnnnnnnnnnnnnnnntctcccctcttcctgccgctgtgcgtgtggtggctcgttgctcccttcgggtccggtttctgtgtgcttgtcctctcgcttccttgcggctttcctgtttttgttccctttttcttttccttctcgttcttctttgtttgctccctcttgtgcggccggttggtatatggtatcgtcttcgtgtcccagggctgcgatcatctcccatgacattgggcatgatcatctggctgggactcatgggtcttgaaccgcttggtaggggatgccatcagggtcgtccttgatgtgtaagtccgacttgatgggcaccggccgccagctgcacgtgggtatcgatggtgacctcttcaaactcggagtgttggattggcattcaggattccccacatgtactgatccacctccaggccctccagcagagcggttttattgcacacaggacagctccaggtccctctctcgcatttcagctgcaggtatgactccaggtcaaagccctgcacatgcttgcaattgtgtcctcgagcaggcagctggatgcgtcggaatgtgtatggggcgcttcagagaccccttgatggccgtctgctccacgccatcctccccgttgagggtcgtgttgcccgaggaggcagccacgctgctgaaattccgcttgattttcgtgatgcagtgtctgtgcgggcaggaggcgcttcttgaggagtccttgcagcacaacgagcggacggagggccggtgtaccagctgcagcatcgaagaggtgggagcagcagcaggcccgacgcgtgggtcgacgatatcccgaggattccggaccggtaccagcg

SEQ ID NO: 449769 - DNA, 1061 bp, Homo Sapiens
tttagagaaggtgataagaggaaaaaattgaagtattgtgagagtggtcaagatccttgtgtagtctggttactttatgaggattgtgggtgttttgcaaggtgagcttctgttggggtggtgtgtgtaggtcgtttgggtggtaggagtcgtttatcagttttattgggttttgtgtgcgagcgcggttggcctcgcgtcgtcgttcgtatttttccggctctgtggtcttctgcggatcctccttcgtggtgcctgctgctcctgaggagctgagtctctggtcggtttgttacgatgtacttgtcctcatcgggtctctgatcctaggtatatcacacatccatggtccagctgcagtggagagcagcttgattggtgtccctgccaacgtgcacgatcactatctggattggcaaaggtgcccagcacgatggtgcagaagatgggtttccggaagatgcctgtcatatgacaattgcgctcgccgtggatcttgcgggcgttgatctcggtttgaagatgctgcatcatgacgaaggtgtttgaagatgatgtgtatatgttctgtagggtggcgtatgcatggggcgcgttcctcccgctgtcgatctggaacatcttctcgccaacaaagagcagggtgaagatgagggcaagctggtagacagcatggcccaggatgttcttcatcatggtcctggagatgagcggcttgttgcggccgtacggcttcctcagcagcagggtctccgtgggcggctcagtggccagtgccagcgaggcaaacgtgtccatgatgaggttcacccagagcatctgcacggccttcagaggggagtcctgcgtgatgcaggcgcctgtgaaggccacaatcacggccaccacgttgacggtgaagctggaactgtcaagaatttggagatgctgtcatagacgttgcaggccccacatcactgccgttgacgatgctgctgaaattgtcgtctgtcaggatgatgtctgcggacgcgtgggcgacagcgtgggtcgacgatatcccgaaattccgggccggtacc

SEQ ID NO: 449770 - DNA, 735 bp, Homo Sapiens
gggtccacgctggaggagcgacgggtggtgaagcgtcgggcgactgctttgggagatgtcttggggctgccgtctgagtctccgctctcctcatcccccatggctttgatgtagctgccgctccgcatcctgcggcaggggatctccccatccttgccaccggtggggtaaccccccagtcatcttgcggcacctgcagatagtgataagtcctggctttggccttggtctccggacccaggagccccttgcctggcccggcccccgggtatccatcccggccctggctgaccatcatggtatgccaggcacttcgcttgaccgactgtccatccagtgacatggacatgccagtgcaggcaaggcagcggccttccgacccgcccgagcgccccttgaagctcaagtcccggtaggacccatctggaacctccaggcagaagggaccaccaggctccccagggggcctcccactcgccaggaagccgctatcactgtccaagttgtcatcggaactcaccagcctgtggacttggcctggtgccgcgcatcccccttgcggtccttgctcttgctcctcttgccgttgccggactggtgggtgtggtgatggttgtcgttatggtggtgattggaggtgatgggggcatcagagcccgggcacgggtaggtgtttccttcagaggcacctccttcctcaggccttgggccaatatagtcccgcttcccggcggc

SEQ ID NO: 449771 - DNA, 483 bp, Homo Sapiens
aaggccccgccttggcagccttatccgtgagtggcagaatggcacaggcccgtctcggggtcctccacgcagcgctccagtagctgcaggtacgtgaggttctcgtgcgtgttggggtcaaagaagcccttggtgtcgtcgctggggtccgccaggacgcggttcatctcctcatctgaagtagccgcgctggtaggccacgtccacaggcacgcggtggctgtgcacggggtcgatgatgccgcccgtggcgatctgggcctccagcaggcggatgccgtgctgccggagaaccaggcccttctgcatggcctggaagagggagatggtgctgtcccgagtatggggtctctgtagcgcggtgtcgtccttctcggtatacagcagctgctcgtgaagctcggggccactccacgcccgccttcacggcctacgtcgacgcgtgggtcgacgatatcccgaaattccggccgtacagcctgc

SEQ ID NO: 449772 - DNA, 970 bp, Homo Sapiens
acctgtcgccgttgggtttagtcaagacaacaagtgttgtcccagacggatgtggtgagactgtcatcaacgttgaggcatttacactgatgcggttggaaccagtgggagttcggcaaagttaaacgagtaatcaaggagaccagtaaataccactccaagtatatacttaagggaatgaaccacagcgaggaacgtataccggaatggttcacagcagcagtattcatcatagccaaggtggagagcgagaccactcaagccagcacttgcctcggaacctgacaaagtttaaaatgggtagcctacacagctgagccgcatttccatgggagacattttggtcattccaggtgatgatgaactacaccaattgttagtggctgagaagaacctcaggaatgtgccagcatcttttgacttttattttggggggctgcatctactaccacaacatgcaatatgggtaacactggcatggctggttagatttgattacctcatgcaaataagtcatgtggtaatactgatattgatgatcaaatgtattgggagattgagttaaagtctcctcaggatgtaataccaacggaaaatgagtctttagaagaactatatttagttaaccatcacctaatttccagataaatagttctgcacaggtcatataagatacaaagagcagtagatcaagggggaggatgatcttggggactcctgaaatatactgtcataacccagatatcctccagtaaataaatggatatacaagtgtggtatacatacatatgtacatacagtggaacattattcagccataaacaggaatgaagcactgatacaggccacacaatgaatgaacctcatataaccgtagaattcctgctaagcgacgcgtggtcgacgatatcccgggaattccggccggtaccacctgtttttcaccactgtctatagccatagcctggat

SEQ ID NO: 449773 - DNA, 1334 bp, Homo Sapiens
tgctggtacggtccggacgtttcgggatatcgtcgacccacgcgtacgacccagtgatgcggctagggtgcagcaggagtttgggggatagccccagtcttgggatctctgtcctgggctggggactgccccctcccctggcctggctcctgacgcccgtgctgccggtgaaacgctgttgacatgtcctgaattattaagcgtggggagggctccggagcacatgctgagcggagcggctggggctgcgcggcgtggcggagcagcgctcgctccctcgctcactcgctcgctcgcagggacacacgcaggggctgacagctgtgctggtgctgataagggaagccacaaggagacgatcgaggagagagacaagcggcagcagaggcagcagcggcagaggcagcaccagggctgcggagctgctgggagtgggagtgactcccccacctcgggcccccaccctgtccctgtcctcttcccgcttgccctgagtttagaagagcagccgctgccaccactgccactcgggagggcaccagggctgctggctagggagggacagggcagggaggctctggccagtcccagcagcctggggacagatgccgatcgagattgtgtgcaaaatcaaatttgctgaggaggatgcgaaacccaaggagaaggaggcaggggatgagcagagcctcctcggggctgttgcccctgggagcagcgccccgagacctgggcacctttgccagcaccagcaccctgcatggactgggcacgggcctgtggcccaggcccccatggactgcgcagaaccctgtgggcactggaacctaatacactcgctggctgcttcctgtaccagtgagagtggctgagccgggatacctgaccaggcataacttgttgaaatggaacccaggtgaccaagcccagtgaagagtaccggttgaaacctctgaatatcaacggtacagaatagggaatacaagagcgaatctttcaccttggcgatcatgacagagtagccccaaagacagggatggcaccctgagggatgagcaggagtaccaaagctgatggaaaaaacagaagaagaagggcaaacgacctcgcacatttaaaagacgaaagaaagggacacacagcgcccaggaacacaggggcacacacagaggaaggaagcgacaagcaaacgagccgaaccacaaagcagaaaaaagaagcagaaaaaaacacaaaggagacaccgagcagaacaaaagccgagagcagacgagacacaacgaagcaagaagaggaagacacagcgaaacaggcagaaaaaagaacgagaccat

SEQ ID NO: 449774 - DNA, 805 bp, Homo Sapiens
  misc_feature (28)..(29): n is a, c, g, or t
tggttgagctttccttcaatttcccacnnttcattatgggtaaaagcttaaaagaagctgcagcttgtaccctgaggcccgtactacttcatcccttcagggcgctggtaccggtcagcctctcttccttctccctgctttgcttccttgcgttcagccgcaatatttttctggcgatggtaattaaactgtgtgtcctcttcagccttcaccatttccttctttcgcttgtcatactcctgcgccagctccccagaacgactaatctcttcaaatagagctgtcctctctttggggttcttcatggcaatagattccacagcaccctggaaaacgaggaagttacgagctttgatgagaatgcccaacttctctaattcctcactgtactcatgtagttggaccactttgttgttgatcttgtactcagaagaacctcctacaatgacacgggcaaaggtacggtcctcagcaccctcctcagagtagaccatgctgacaaaggcccggttggcagctggcttgcccacaggagctccatggatcaggtcccgcagggtctttacccgcaggttgctggttttttcacctagcacaaagctgatggcatccatgagatttgacttaccagagccattgggtccaatgatggcggtgaacctctgaaatggtccgataatctgtcgacccttgtacgacttaaagttctcaatctcaatcagtttcaggaaccccatgacggccgcggcgccggcagcagtaggacaggccgcgccgtacgcccgagaactgaggtagcccgccc

SEQ ID NO: 449775 - DNA, 918 bp, Homo Sapiens
  misc_feature (19)..(19): n is a, c, g, or t
  misc_feature (87)..(87): n is a, c, g, or t
  misc_feature (107)..(107): n is a, c, g, or t
catccgaacaagcaactanggaaaaatggctgaaatcaagtcagggactttcaaatctcccaatctggaaaaaataaccacccctanttctctatctcctagatcancattattttaggtgaaagcaaaactaaaacatgtaagaggttcccactacaacggcaggggcatgaagagttggccacgagaccaccccgagcgccaagcctgtatctgcagatccctctctgctcaggaaccaccacgtcctgtgttctcgccaatggagaccaagacctggggttggttctgggctcctgacagttctcttgatgttaagagtgcagctctgtcaacactcagcataccaaaagctctggagcagcttatggcacacctttccctggtgccatctcttcagacacgatgtgagctcattacaaccgcatcagtaaatggagctaccatgtatattttagtgaaaatacataggcacccgtgtccccatggggtctcacagggctaggctggggacactgctcggggggcagtctgctccataggagctccaagacccctctttgacgctgcttccacgggcccgattacagggtgtgatcccaaaagccaaagtcacacactgctggccagtgcctttaagcaagcttcactgtgcattccctgacaaatctgaatcacagaattttagaaatcctgtcccaaggcaagatgctttccaaaggcccacaccaggcagcaagcagagggattcagcgctcttcccaggaccccactcaaccgcctatctgcatttcggaggcctccctaaaagcagagttgttgggggcggggcggggtttggtctgttttaagacccaccttcccgacgcgtgggtcgacgatatcccgggaattccggagccgtaccagccctgctta

SEQ ID NO: 449776 - DNA, 960 bp, Homo Sapiens
tgggactccgtttgtgccccagatgaatgcgttgtgtgctcaaggtgacttcccagttaggggccctcctagccggagtccccagctgtgaccttcattcttcatccatcctccctggaagagagatcctgtctgcgttcgtccgtggagcttgagaatgtgctgctcctgaaactcgtctcccacctcccgcaggtgcctggcaaacaccatgctgcgaacggtatccccagtattctttccctccatagtggtcgtgaagtaggttttcggctctgtctaacatcacggaccggggctgatgtgtttctcagcagcaggggcgccacgatggaggctgagccctggacggacagacaggagacgtttagacccctggtctcctcataaccccaaagccatcctctgtagtactcgtgcttgtcctgggagtacaggagctgatcaatacacggccgctcgtccaccttctcttcccaggtcccttctttccacccctctgcgtaactttgcaggacgtaaacctggtcaataaagggcccaccagattctgcgatgaactgctcatactcgatgacggggatgtttttattgagacttggaagatcaaaaaactcagaccagggaatccggacctggtggatgtcaggactctgccagtgatagaggcggccccatggaggcaggacaagcacccactcctccgtcttcagcagagtcttcaggagagaggcgattcggatatagacatccctgcgcaggttgaagccttccggggggttgacgtcatacagaagataccgtctgcgggaagccgcccccgacagaatatcggccgccgattgtccgggccagaactcctggccggaggcagaagccggaggccaggacactgcccccagcagcaggaagacgaagctgagtgtcgccatggccccgggcggccacgcactgcccgct

SEQ ID NO: 449777 - DNA, 962 bp, Homo Sapiens
  misc_feature (361)..(370): n is a, c, g, or t
  misc_feature (532)..(543): n is a, c, g, or t
agtccgggactccgtgtacgttgtgatcccgtttcaagagcggggtgaatgaatgcctgaggagtgcccgccagaaaattatgtttgctagttgccgaagggggttcccgtgccagtaaccccgggccccattcgcgtgtatttttctctcggcgtacaactttttaagggcagacattttgggggccacaaaacttaggttaggttcagaaaagcttactaaggtaggcctacctcatagtaaaggaagccaatgattctttaggtaaaggagacactttatttagggtcatattccttatacggattattaaatttagaccaattttttataagctgttaatttagaactagtcttgtnnnnnnnnnnttcttccaaccggttcatactactttatgcttcctgaataccgtgaaaactgcagagctggagagatggctagccaaaaaatagatcatctcatttagagtagatacacagccatactagctcaggtcaacatgttacttacttccctgttactgagacccnnnnnnnnnnnnttatcgggaccttacaatccttatgatacaaagaaaactgtaactatcaaattataaagtaaaaattcaaagaataaaaaataaccttcagtgttttagggaggtcatattttgctaacacaatgaaataagataatcaggaaagaagcgtctgcacttgctgcggcgatcggtgaagaatgttctctggatctttgtattcattgattggattcatcacggctgcatacacttcaccataggctctgcagactaattctgtagattgttttacgatctgctctttcactgtggcacttagaagaaagttcagctgtggtatcaataggttgtctggggctgacagataaccggacgcgtgggtcgacgatatcccgggaattccgggccgtaccagccgcttttaacgaggttctaac

SEQ ID NO: 449778 - DNA, 546 bp, Homo Sapiens
tttttttgagacagggttggccaggctggcctctttatctgtttttgtattgttttctcagaggcgctgagtgaagatggtcagatatgtgtgtatttttttaaaaacgatttgaaaaaatatgatgttcctttgtcgtgggaacaagccaggttgcagacgcagaaggagctacagctgagagagggacggtgaggttcatgttcagtatgtttctgttgcttgctaaactgtatttttcttgcaaagtaaatagaaattaacatcctacatgccaaatccagtccactgtgggcagactgtgacaaatcctcaaggaacagatcattcccatgcagtagaaactattctagaacaaagttaaagcatctcacttcatttatcaggcatacctgaccctgaaatcatacctaaccaggagagtacagctgacatttcatctcacttccaaatttggttccaaagcacagtacctaaaaaagttcacaagtatgctttctcccaggataaacaataacagtgaaaatctattaatgtaatttgttg

SEQ ID NO: 449779 - DNA, 830 bp, Homo Sapiens
cgctagttgtaacacggggtataaacgaggcagtaccataacggcataaggtacgaggctgggtgtcgaattcggcacgagggcgcaaaggggcaagttacccgtcctggcgtttctggggttcgcctcggaggctagcctcggtgctctcgcaggctcgctcgcttctgcatccccgttgccgcccggagccaactcttaagttctggacgccaggcctgaggcagttccgccatggacttctccaagttcctggcagacgacttcgacgtgaaggagtggatcaatgcggccttcagggccggctccaaggaggcggcgtccgggaaggcggatggccacgcagccaccctggtgatgaagctgcagctgttcatccaagaggtgaaccacgccgtggaggaaacaagtcaccaagctctccagaacatgcccaaagtgctccgtgatgttgaagccctaaaacaggaggcatctttcctgaaagaacagatgattcttgtcaaggaggacattaaaaaatttgaacaggacacatctcaatccatgcaggtgttggtagaaattgaccaagtgaagtccagaatgcaacttgctgccgaatctcttcaggaagcagataagtggagcacgttgagcgccgatattgaggagacatttaagactcaggacatagctgtgatttctggccagctaacaggtttgcgaacagcttatgatgctgttgatccccgactactccgaaagtgttgccttgggggccggaaacggtgggggcccaccgtcccgatgtgcgggtccccccggggggtcccccgttgtggggtctc

SEQ ID NO: 449780 - DNA, 897 bp, Homo Sapiens
ggtccggattcttccgatggtaggcgcgtgccgcgagattgactggacggagcgtaggagagaccgaaaaggctgggggtgggagtagcggatttgaagcacttgttggcctacagaggtgtggcaagcagagcacctcagaactcaggcgtactgcccgccgcccgagccctgcgagggccgatagcgagggtgtggcccttatctgcacccagcagagcgccggcggggtacggtcttaggacctcgatctccttctccctcattttctctcatccctacctattgtgggtttccgcatgggccggaccgtggtcgtgctgggcggaggcatcagcggcttggccgccagttaccacctgagccgggccccctgcccccctaaggtggtcctagtggagagcagtgagcgtctgggaggctggattcgctccgttcgaggccctaatggtgctatctttgagcttggacctcggggaattaggccagcgggagccctaggggcccggaccttgctcctggtttctgagcttggcttggattcagaagtgctgcctgtccggggagaccacccagctgcccagaacaggttcctctacgtgggcggtgccctgcatgccctacccactggcctcagggggctactccgcccttcaccccccttctccaaacctctgttttgggctgggctgagggagctgaccaagccccggggcaaagagcctgatgagactgtgcacagttttgcccagcgccgccttggacctgaggtggcgtctctagccatggacagtctctgccgtggagtgtttgcaggcaacatgcgtgagctcagcatcaggtcctgctttcccagtctcttccaagctgagcaaacccatcgttccatattactgg

SEQ ID NO: 449781 - DNA, 1099 bp, Homo Sapiens
  misc_feature (722)..(825): n is a, c, g, or t
cggagcgtaggagagaccgaaaaggctgggggtgggagtagcggatttgaagcacttgttggcctacagaggtgtggcaagcagagcacctcagaactcaggcgtactgcccgccgcccgagccctgcgagggccgatagcgagggtgtggcccttatctgcacccagcagagcgccggcggggtacggtcttaggacctcgatctccttctccctcattttctctcatccctacctattgtgggtttccgcatgggccggaccgtggtcgtgctgggcggaggcatcagcggcttggccgccagttaccacctgagccgggccccctgcccccctaaggtggtcctagtggagagcagtgagcgtctgggaggctggattcgctccgttcgaggccctaatggtgctatctttgagcttggacctcggggaattaggccagcgggagccctaggggcccggaccttgctcctggtgagaggcttgtgggatgtctaggagaggttgtggagggggcttccattggggaatagagtttaggggaggaagtatgtttggtgggtcagatcttcccttagtttctcctcttctgagggcatgtggagagcaggtttctgagcttggcttggattcagaagtgctgcctgtccggggagaccacccagctgcccagaacaggttcctctacgtgggcggtgccctgcatgccctacccactggcnnnnnnnnnnnnnnnnnnnnnnnnnnnnnnnnnnnnnnnnnnnnnnnnnnnnnnnnnnnnnnnnnnnnnnnnnnnnnnnnnnnnnnnnnnnnnnnnnnnnnnnngggctactccgcccttcaccccccttctccaacctctgtttttgggctgggctgagggagctgacccaagccccggggcaaagagcctgatgagactgtgcacaggttttgcccagcgccccccttggacctgtagccatggacagtctctgccccgggaatggtttgcaggcaacagccgttgagctcagcataaggcccctgctttcccagttctctttccaggctgaagcaaacccatcgggtccataattactggggccctgcctcgctg

SEQ ID NO: 449782 - DNA, 922 bp, Homo Sapiens
  misc_feature (760)..(801): n is a, c, g, or t
gccccccagcctttgggttccagggatttaaggttcccgttccagggccccagcccaggaaagcggggtatgggttcccgggtctcagaagtccagttttctggccgggggtcgggagtcccgtccccgaattcggggcaaacttttgggttggggggaggttcccaagttcaggtccaacccgggggctggggtaagtccccatgtctagccaagttctaggtccagttctggaaacagagtcagtatccaggtgggatgggtgggggtggggtccgtggccacatccagccccttccagggagggcctgtgcttgtgggaattggcagcagcggggccactcaccgactggacgagcagggctcccaccttctgctgggcatgccaggtctgcatgcagtgccgaacctgctccaggaattgctcgtggtgctccaggagctcggggatctggtcgaagatctcgtccaccagtgaagggtcacagagcacggagttctctggctgcttcagcggctgcatgtagccctgcatcagggtgcgcagcgactccacatacgactgctctgtgtccagcagggtcatggccacgtgcttccgcatgtcctgggcctccccaggctcctcggcgtcagtgctgctgcccccggcaggctccccggaggcggcggctgggcccatatcgcgcatgtcttccagcgcgatggtgaactgggccagggtcttcaccatctgcagcatgcggccggccagccgctnnnnnnnnnnnnnnnnnnnnnnnnnnnnnnnnnnnnnnnnnntcagcgcggagtcaggggccgcctcccactctcgctccctaagggctcagcccggccgcggcggcagccgcaatgcggtcgcggtggcctcgtctttgaatcgccacccaggcctcgctcc

SEQ ID NO: 449783 - DNA, 881 bp, Homo Sapiens
  misc_feature (22)..(22): n is a, c, g, or t
aaaattattaatagccagactnggaatgaccaagattacttttccacttttcttccccgccttgatgtcccgaagaacaaaaatcccaaaaagggcgcttatttttcctgggtgtgtagcatacaaagctacaccaaggtaatggaaacgtgagccttgtaaccttgtgtctgtggaatcaattaactttaaacagtcacaagtgacctaataaatgcgattctgtcatacgaaagatgttatggatggcccgggcagctaagatttggcgcatagtttcataaacaacatctggatggtcatctgatttcacctccattgaaccaaggaatcggacaataaataactgatgaagaatagaatcttcagtttcagattttgtacttcctccagattctccaaatggatttgtacgcctgcctccctggccaaaggcttttgcctggccaggctgatcttcacacacaggagaaattatgtcaaactgtattggggtgtctggggcaacaagagaatctagagagagggcagccaaatttgtagactcagatcctaaggatcctgaactgctggttcgagctgtcggtggccgagattgtcctgctgctggccgcaggctctcgtgcctctgctggaaagatggggaaggagtgacagcttccagagctgattgatttactcgtgcagcagtttcctctggattttcacttaagtatatttgtttagatatgttgtttattgtacagatccactcttcatgatcttttttactctctgcttgcaaaattgaagatttttttccatcgaaagaggtgatctgaaaacaatatcgtctgtcttcacagtccacagccatcactgaacagttgtctatgtccatg

SEQ ID NO: 449784 - DNA, 784 bp, Homo Sapiens
cggtaccggtcggaatttagggatatcgtcgaaccacgcgtcgggcagtctcacaatcttctttcatttttttctgtctctgtcccttttaggcccagttggaagtgtttctgatggtagaacattctcaaaaatcttgtgggtcttctacgtatgtcacattgattcacacattcagaaaagagggtcctcacagatttttcctgaacaaccccatctctattcttggcttctgttgaaacagtcaaataaatccacaagttaatgcctaacctcttcagcactagccaaaggttgtcaagacacacccttgggcttatctacagagcacacttttctaacagtgaatctcctaattttagcatctcttttttttagtttaacaatcattcagatggggaattcaggctcaagaattatacccagtcatcagatacggattcctttggtccacttatatagttcatgtactctttaaaacaaacattttttgtgaaggtatcagagatgaggtctcactctgtcacccaggctgacagagtagtggtgcacacaatagctcacttgtaaccatcaaactccacaggacctcaagggataactccggcatcagccattccaagtagctgggtctacaggtgcaatgaacaacaagccgggcataattaaaaggcataaactagaagagactagactatgcaaagacgtccaggaatgatctccaactcatagacacaagcaatcacaaccataaggcactcactaaagtgcggataccggtgca

SEQ ID NO: 449785 - DNA, 1079 bp, Homo Sapiens
  misc_feature (58)..(108): n is a, c, g, or t
tggtaccggtccggaatgttagggatatcgtcgacccacgcgtgcgcccacgcgtccnnnnnnnnnnnnnnnnnnnnnnnnnnnnnnnnnnnnnnnnnnnnnnnnnnncagtagtggtgcctcggagctgcactgccaggaagtggtgctctgccaggaagggcggtgggtctctgctggtggtcttgtgcactgggcctgggtatgagagcttctgttccaggaggagcccctctctcatggaggggatccaggagtttggactgggggccattctttctgcttttccccccagcctgccccttcttttgacaggggccttcatctggctgcagtggggtctgtctggaggccccagctcctctctgggcaggtgggtcagggttcaggactcttcttgctgagggttgggagatggggagccctaccacagaccccacggcagcagctcacacgccggccctgttccctgggctgctgggatcctgcgctctaggcttgcggcctgacagcaggaactgcctgggggtgactgccttcggcactgcacactgaatctctggtggccgcggagctggagcctcaggtctgggttcctgagaactgccaggttttgcctgaaggctcccagaggctcagagaagagaagaggcagccagaggaggctctgtgccccagacttcttgaaaaggaggagggcaggccactagctgacttggaggaaacagtccgagtgctcattaaatatccacctgggactgcaatggactcacttgccaagagtgcaccaggtcagactgagaaataaagggggtggccaggaaggatgcaggctagaaaaaggaagaacttcctgaatcaacccctgggtgctaactgtagagtgttaggtgggagcaggggctaagctccccactgcaggactcatgttggccaaagggaagggcatgggtgagaccatcccttggccttccctgctggggtttatagacagcttagttacagggcttgcaagttggaacttggggctgcccctcgtgcccgatttcgccacccaggcctcgctaccttataccgcg

SEQ ID NO: 449786 - DNA, 1062 bp, Homo Sapiens
  misc_feature (92)..(147): n is a, c, g, or t
cgcggggtgtgtgcgaggtggattacaagccctttagaaatttctcacggggagaaaaggatgtttagtggcccccaaggctagggaactcnnnnnnnnnnnnnnnnnnnnnnnnnnnnnnnnnnnnnnnnnnnnnnnnnnnnnnnntccgctgttatcccgggttgagattaagactaaaaaaaaggggctgaaaaaccctttagggggcgaggacccacaaatttcccgccacgttgaggaagcctaatgtttccccggaggtttttgagcaaaggggaggggcctggaggggggttggtgttcaagctggttcctttctggggaagtcccagttggcctgagcagtgcggggctggggagggccctggaagggatgggaggagcccctcagagcagctagaagccgtggggttgaaaaaactggcaccagggcccaggtggatttgggtaacccccatttcctcagtgtggtgggaaccaagggccagttgtctgccccaagctcctgacaagaaggagtgtgaggtgccagtgtttgcggggagacataagagggagggggacggcccaggggaggaagaagaggccccccccaccctcgccctaggggctgggggaggggcgtgtagccctttaagagtgggggaatggccgcccccgcaacatggctatgtacaaagagaattgagggaagattgtgcattgggtgctggggacttcctgccacccccggaggctccccgggtgttaaggtgttagggagggaggtgaaggagcacccctggtcccgcagatgtgctggcagggaccattgctctccagtgtccctgctgcaggatgaggccagcagaagacagcactgaaggccccagtcggtcaccagctttgacctatcccgcgggggtcagggatctctgaggagaatttggccggggccagtggagtgctgatcctggtaggggcccaagtgacagggattgggcagggggcagtggcgtcacctgagggttgaaatgcttcctctctggtgataatgagaggttgctgggttgaccctgt

SEQ ID NO: 449787 - DNA, 1020 bp, Homo Sapiens
  misc_feature (41)..(77): n is a, c, g, or t
tgatatatagggcgaactggagcttacgcggtggcggccgnnnnnnnnnnnnnnnnnnnnnnnnnnnnnnnnnnnnnatcaggccaaatcggccgagctcgaattcgtcgagagcgggatccagcgaacagccccgcttctaacccgagatgctgctgccggcgcccgcgctccgccgcgccctgctgtcccgcccctggaccggggccggcctgcggtggaagcacacctcctccctgaaggtggccaacgagcccgtcttagccttcacgcagggcagccctgagcgagatgccctgcaaaaggccttgaaggacctgaagggccggatggaagccatcccatgcgtggtgggggatgaggaggtgtggacgtcggacgtgcagtaccaagtgtcgccttttaaccatggacataaggtggccaagttctgttatgcagacaagagcctgctcaacaaagccattgaggctgccctggctgcccggaaagagtgggacctgaagcctattgcagaccgggcccagatcttcctgaaggcggcagacatgctgagtgggccgcgcagggctgagatcctcgccaagaccatggtgggacagggtaagaccgtgatccaagcggagattgacgctgcagcggaactcatcgacttcttccggttcaatgccaagtatgcggtggagctggaggggcagcagcccatcagcgtgcccccgagcaccaacagcacggtgtaccggggtctggagggctttcgtggcggccatctcgccctttaacttcactgcaatcggcggcaacctggcgggggcaccggccctgatgggcaacgtggtcctatggaagcccagtgacactgccatgctggccagctatgctgtctagcggatccttcgggagggctggccttgccccctaacatcatccaggtttgtgccagctgatgggcccctatttggggacactgtcaccaggtcagaagcacctctgtgggtcaatttcacagcagtgttgccc

SEQ ID NO: 449788 - DNA, 993 bp, Homo Sapiens
ggatgggggggcgtcctctcttctcgcgagttccctcttgtctcctcgttgcttccttgccctccgtggctcgcttctctcagctgctgttgcctgttggtgtgcgcccgcggggtcgcttggcagcttcccttgctgtttgtcttacggatgtctcgtgctgtcccgtccacttgtagtttttagtctctcttgacagtgattggcgctccctggtccgggtacactgggccttgtccagagggcggctttgggccaagtcaggatgtgagtctgtggtcccacccacatagggtgagatgcgggcatgcatgggggcaggagttactggctgccaggaacctctggatctgcatccatccttgatctggcttggctgtgtgattttgtgcaagttcctgccctctgtggtcccagggtcctgtcttgtaaaagaacagtcccatgctccatgcttccagacacccagcctcaccctccattccagccagggctggccctgaacactccctgggatccaaatgagcagtggggagagggtcagagagaaataatgagagaagggctaggcttgaaggaaaaggaaatggcgtggaggacggtgtgattaagcctctggaaactagagagcaacactcaaccagtgaagccggggcctaacccaggagaaacaatggcaaattgtagaggaggcgaacaggaggccagaggcctgggatctgctacattcatctggtccgcaggcaggaaacgcggggcagacacctggggaggctgcaagtgggatctgcctggcctcgtgcctcaaatggggctacatgtcttctgaaaccggtgagggcactggcaggtcttcttctcactgaggagtctcttgatctgagacatccgctctgcttggcgccttcggtgccggcacctgaccacagaagaagatgcctagcccaatgaaaagcaggaggccggacgcgtgggtcgacgatatcccggaat

SEQ ID NO: 449789 - DNA, 1081 bp, Homo Sapiens
  misc_feature (250)..(281): n is a, c, g, or t
  misc_feature (754)..(754): n is a, c, g, or t
  misc_feature (786)..(786): n is a, c, g, or t
  misc_feature (827)..(827): n is a, c, g, or t
  misc_feature (933)..(933): n is a, c, g, or t
  misc_feature (942)..(942): n is a, c, g, or t
tttttttctcttcacttgtctttgattgtatttctatttccttattcttcctcgagtttatgcgtgtgctccgtagtgtggatgtcgcatatgtggtattgtaggcttcttgcctgacggggcatatggcaatacccctgtgtccaccgctggtataacccccatgggtccacctctccaggaaatttcacctgattagagatcccgtcgctcttaaacttcctgccggttaatgtaattgtaaggaagnnnnnnnnnnnnnnnnnnnnnnnnnnnnnnnnaaataagttaacaaattggctgccaggcaattatataaatgccctcccccttccatcctccaccacgtacctcgccttttcctccgtccattgggctcacactgccacctgctggcaattccttggatctaatagctgatcagtggtgtttgaaagaagagttttttccctgtctaggaatgattgattcctctgtatgcatttattttaatagggaggagaggtgaacatgtttttcaatcacaaggactctcctccctatatatactatgtttttagggaacttccacatgtaataggcactagactggtataataatctagtggtaggaagacacctagaaattttcctagaacaaagggggaaagctgtttgcccagtttcatttaattttttttcttcattagagagtttcatttacaacccctatgctttccacaatctgcaggaagcttctaggtatgcatcttgnctgccacgggctgaactctcagaagttagagnccatggacatattctcccaatatatttctcaagacacattnctgtagtgctttatcaaatcaaagtgctttgtgaaaatataaggtatctcatcaacttagactatgaactccttaaaagcaatgaaccacacgccctgtgtgggtncccaggganctagtgggtgttcaactacttatgcactgaattgaactaaaggagtcatgtgttatcacggacgcgtggttcgacgatatcccgggaattccggaccggtaacagcctgcttgataacacgtttcatatccaattcccc

SEQ ID NO: 449790 - DNA, 707 bp, Homo Sapiens
tccataatgtgtgccacataatgttgttgagccatgacaggatcgttgaaagttgcatggcagaggctgcagaaacttgtctgggtctatcatctctctattctaggtgcaaggcttccaccttagtggactgctgcttcagctcttaagttctttgcagtggggtcttccccaggtagtgcgactgggccacgacaggggaggaaaaggtcatgttacaagatggggcagcactggttcttgtctttgccttctgctgctcttctgatctgagtctagcttcttcgtttccccctttaatgtctccattccatggattgctaggtatctctttactttgttggcatgttttttgctctggtaatgtgccagcttcctgggactcagaaataaggcaatggcgcagcaaaccttacactgggtgttggtgaagagacattggttcttctggatcatgtgctccacttcctctctacccaccggctgggcaccaggacacggcttcccacacggcggcgcagccacatctagcaggtcaaagcgcaccccagtccaggctcactggcacactccagcaactcaagagcatgctgtaaggcccggccagctccgccgtccagcaggcacatgcacacgtggccggcagcagggatactccatcttcccacagcaaacccatcccataactccaggcagtaccagcctgc

SEQ ID NO: 449791 - DNA, 1038 bp, Homo Sapiens
tctcactcttcgcttagatggtttgtgttgcatttgggcaggatgatctcctacagtatcattcctcttctgtaatatggagaccaatccttcagtaggaacaatcctctgcaatctctatcctttttggcaagatcatcaagagaaagacagctctcatcagaaggcagattctcctggagactataggatgcttcttcaggagagagatcttgaaggagatcggagtcgtcgtcttggttatcttcataggaaagggaatcttcagtatcttttaaacatccttctaaaaggctgttcaaatagtcttctgtttctttgttgagttggtcgtctttatctcccttttcctctggggccatacacacctctggaagcagtatgcctaagtcagatatttgattatttccacagagcacattctcagaaccgtctgagtcagcctgcgcctgtggtgattttccatcactgtctgtaagatcaggctgctgcagctcatttaattcattgttctcaagttggtctgtgggcaacgcctcagaagcatcccgaagtggcaaacggagttctttcctctgagcctgtgaatatttaccctcagaaatcaatgcaggaggtatacggtcacagcctggtgaaatcaacggctctgtctttgacttgctggaaagaaacaccttagggtcttcagcaatgccctctattctggccacatcctggcaggcctctgtttgagccagctgcaagcgactgtcatcctcacaagcatcctcagaagagtctggcccagacgggctcccatgctgtctgcggaggactgggtgtggagcgctaacgtggcttcagcgctgcagagcagctcctccatgtggtcctttcctgcagttaccgaaaggcttggggaatctgtttgcacgtccatctgatgacatgcagggactgctccccagggcgatcgcgtgggtcgacgatatcccgtaattccggagccgtaccagcctgcttgtaaacaagggttctatagtcatattgcttgcc

SEQ ID NO: 449792 - DNA, 1501 bp, Homo Sapiens
  misc_feature (80)..(88): n is a, c, g, or t
  misc_feature (123)..(123): n is a, c, g, or t
  misc_feature (405)..(420): n is a, c, g, or t
  misc_feature (470)..(481): n is a, c, g, or t
  misc_feature (544)..(571): n is a, c, g, or t
  misc_feature (628)..(637): n is a, c, g, or t
  misc_feature (656)..(665): n is a, c, g, or t
  misc_feature (747)..(847): n is a, c, g, or t
  misc_feature (891)..(970): n is a, c, g, or t
cgaggccgccaaattatactggtgggaggtagtaaacctggatgggggaggcacgcttgtcgtaacacgaggggggggcnnnnnnnnnttaataggaggaggggggtagcgttgaaagggatnacacagctctgacggcggcgcgggtggcgagataaaacgggaagcgcggttgaaatatatatttagccggccggcgggtgcggggaaaggtatattacacggccgtaacgcgtcgccgttcgttcgcggtcaaaacaacagcaggcacgcacccggggccgcaataattttaaccgccgtgccgggcgcggggaatctcgggtcaccgtaaaccggtgcggtgaaaaacgcgcgcggcggtgtagcggagggctgtcgggatgatcgggggcggcgccaccnnnnnnnnnnnnnnnnaaaggtggggtagttcaaagttcgggtcgagtgagtaggtagggctgccnnnnnnnnnnnncgaaatagatggtcgttggggcaataaaaacaggatatactgagaggcggtgaggtaaaatcnnnnnnnnnnnnnnnnnnnnnnnnnnnnaaaagggcagatggcacccgggtatttggacgcgggaaaaaaattgggcatcatgannnnnnnnnncggccaccgcggatatgtnnnnnnnnnnaaacaagggtatgggctatgcgattaggccgggggaatagtatgggacgggggtggaaaaaaaaggagtaagggaaacgaannnnnnnnnnnnnnnnnnnnnnnnnnnnnnnnnnnnnnnnnnnnnnnnnnnnnnnnnnnnnnnnnnnnnnnnnnnnnnnnnnnnnnnnnnnnnnnnnnnnnaagcggaacggacggcatggggaggaacgctggacaaaacaatnnnnnnnnnnnnnnnnnnnnnnnnnnnnnnnnnnnnnnnnnnnnnnnnnnnnnnnnnnnnnnnnnnnnnnnnnnnnnnnngagactgcgtatcgggagaccgccactgcgcaggcgcccggaggctaagccgcgtcggaacctagctgcgccgcgcagggtaggcgacgcagacgctcccgcgtgacgcacttccggtgcttgccctgcccatccccgtggcggtgggcgtggccatggcgggggcgctccggccggggccggcccctgggctcccgcccttcgggtcccacagtttccagccgccgctctcctcagtgcccggtggcccaggagggcctgggagcccgaagccgtccccgagtcgctcctaggtcactggcgcgatgcgggccgtcctctcggctgatggtgcgtgcgggcgcggatctcctcccctggtcctccgcaccgtccccgagtcgttctccgctctggcagaacgcgagcgccgtccggttcccgctcccgctggcccagcagccccgggctggactcggcgtagggtccgcacggcgtacgcgtggcgacgcgtggtcgacatatcccgaaattccggaccgtaccagccca

SEQ ID NO: 449793 - DNA, 772 bp, Homo Sapiens
caccttcgctccctggaagatgccccttagtggatcctcgggaggccctggcgggactcaagtgtgacagggcgcgagtgacgcggttctcgtagcggtcgaaggcgtggggcgagctcatgcttgttgtgcatgtagcactgcgtgcagaggtcgtagtccaggcacacacggcacttccagcgcatcccccgcagcccgtgcttcttgcagcagtcacagatgatgttggggtgccggacgccgatctgggcgttgtcgtacagcagcaggtcgtgcgcgccctggtagccggcgcggtagttggtgcgcgtgccctggtcccactgcacgaccactgtgcggtcgggtgtcgaggggctgccgtggcggccaagctccaccaccgtgcccacgccgccctcgccgccgtcctgctggccccacttccagtccacgccgcgcaccacccgcatgcccacctgcacgcccgcctgggggtctgggtccatgttggtcggggctgctcgggacctgtccggccgtccagtcgcccgccgggccgccttgaggctcctgggctgcagccctgatgcctggaaactttgggactggcactctagcctcgctgggcttccaacccactcagccgagaggacggcccgcatcgcgccagtgacctaggagcgactcggggacggcttcgggctcccaggccctcactgggccaccgggcactaaggagagcggcggctggaaactgtggaccccgaagggcgggagccatccctat

SEQ ID NO: 449794 - DNA, 1247 bp, Homo Sapiens
cctctttttagagatattttatttggttgagaactgggttttattttggatctcgccatcttcaacagctgtttctcagttaagtggactgaggtgatattgaggaggtgctaatgagtctattggcatccattcctgtgcctttcgtgctcctgtatgtggaagtcagtttgatagtgaacaaggggtcatgcaggactctacattgggttcctgaagtctgggttcttccctctccattctgttgactatacttataggtctagatcttgcttctaaggctgggcccatccatctctcatcccatccattccacacaggatagattgcattctgggctggtcctaaacaaaaccgggccatgaaaggggtagcagagatcagctaaaggcgtcatcttggaagggtccaatccagttcctcccagcagctccacaaagtctcctattccctcgcaacctgctgaggatttctttaactgaagaccatttacgtgtcccagggtaagatcagatattttgatcaccacaggataaattatggagaagctgcagtttcgatgctggtgtggaactaccagggtaaactttccatttggagtctgagaaatgacattgcaaggaaagaggttggggtctgtctttatggttaatgtgaatccatttcctggttcatggactcggaagaagatcatggccacattctgggaagatctgatgctcctcctgctaagaccactctcacagaaatctatgtaccgctcagctgaggggagaggatgatcctgggaactggggaacttctcccccttgagaatccaaccatcaaataccttcaggaagtcgccgccctgacagtcgatggagacctggtcgtagtggatggtaatgaactcctcgggctcgctgatgaagaaggctgcgcagtgcagctgcggccggtcggcggtgaaggtgaactggccctggaggctcagcatgtccaggcaccgcagagcgcggcggtacggctgctccccagccagctcccgcttcaggttggcgctgaagagcaggaaaggatcgtagtccgccgcttccctcagctctaggtaccggctttcccctcttagagccgtcaggaagactgagaatgaagtgacactgaagtttgaagttgggcgacatgctggccttgcctctgcagctgctgtgctctgctccggaggtcctgggctttccttcctacaccctcgcgcacaccccgct

SEQ ID NO: 449795 - DNA, 546 bp, Homo Sapiens
  misc_feature (46)..(46): n is a, c, g, or t
  misc_feature (59)..(59): n is a, c, g, or t
  misc_feature (197)..(197): n is a, c, g, or t
  misc_feature (472)..(472): n is a, c, g, or t
  misc_feature (522)..(522): n is a, c, g, or t
atttacttgtccccaggtaaagatcagaaaatttggatcaccaacnggaataaaattanggaagaaactgcaatttccgatgctggtgtggaaactcccccaggttaaactttcccatttggaattctgaagaaatgaacattgcaaaggaaaagaggttggggtctgtctttatggttaaatgtgaaatcccattnccctggttcatggactcggaagaagatcatggcccacattctgggaagatctgatgctcctcctgctaagaccactctcacagaaatctatgtaccgctcagctgaggggagaggatgatccctgggaactggggaacttctcccccttgagaatccaaccatcaaataccttcaggaagtcgccgccctgacagtcgatggagacctggtcgtagtggatggtaatgaactcctcgggctcgctgatgaagaaagctgcgcagtgcagctgcgncggtcggcggtgaaggtgaactggccctggaggctcagcatgtccaggcnaccagagtgcggcggtacggctgc

SEQ ID NO: 449796 - DNA, 1268 bp, Homo Sapiens
atccacagtggtcctgcgtgtgccctgaggggccatggtaacctctccgatggctcggatttagcaggccaagcagaaactgatttctacgaagagcgtctttgccaaactcatgaaaattgtgcctgccactttcatgcctatgggccagttttgtgacctgcgccgctgaccatcctaagaaccaggtcttggccttccctctgagcactgatagaggtccccaaggctctctggcctgaggagggtgtggggtctgcccagccccaagcagagagcacagtctggggccctgaccaacagctttggcattctggcgttccatggtggaccctagagctcaggcagaagaacaacaccatacctgctgccaggacgcagctgtctcccaggccctcccccacagcccagctcccactggcaggaactggacacatcgcctgcccctccatggtctgcagctggtcttctctgagtattctttagggacgcacgatggcaatgcccccaaagattccagacttgcaaagccccatgatacacataatgcttggtctattaatacccccaagcagggaacgtgccaacgggataggtcatcagaaccaatgaccctttcccttttggcacaagcagtgagtcctgcacagagagggaaggcatataagacccactgacaatacacaacccatagatcaacatccgtaacacgatgtacgcaatccacagcgagcatttggaattcacggggacagcttcatttcccgcttcttggatcatagagcacatgccaatccatatcacatgggaccaacacacacacatttttaatacttccttcaagagtacatgcaccacatggactggcacatccatggtgacagagattgaactatcccaatgagcggaaaccaaaacagatggcgaatactgtctacaaatgtacgtacaaacatacggatagacgtgggaaatacgcatcgcaaagaaatagaagcaatagcaaggcacctgccactcggaatacaatttaaacaacgaacaaagtcgtgaggaggcacaaaggagacgacaacatcatgacaccgtgccacgcctagctagttgacccccggacgcccatcaggggagaagcacagaggacggcaccacaacccccagcgcccgcgacacccaaggcagagcgacaagaacccagccaggcgacccagcagcccacacggcacacccgaggcaacacgcggcgagacaacagaccgacaacgcag

SEQ ID NO: 449797 - DNA, 990 bp, Homo Sapiens
  misc_feature (183)..(183): n is a, c, g, or t
cttcttttgtcctcttggctctttctgctgttgttcatgtgtacatttccagtgtgtggcattcattttgttatcatgggtctccgtgtgccattcatgggccatccttctttggtagtgcctgatccctattggcctctcttgcggtggtgatgtacttcattggacgctcttccatattgncagtaggagagccgcccagattctgagagagtcttttcagggaggtccttgcttggccttgtctctttctaggaatgccatacgctggaatcatgagaaaccgtccaatcctgcctttcgtgctggcgcatgatcattatgcaggagacattatacttctgctgcaaagcttttccttagagaagtatccaaccagatgacagccctttcatcatttttgtaaggacataacaaaggaatggctcgacatcataataccacgttttgtggtccaggaagagcttggctcacaagcaaagcttttgtgcaataaattttgctcatattcccatcaacctcaaatactgaaaggtctttccttcggtaaatttcatttgctggaggatgaaaccatccacacttcttggagtgtcttagcaaaatatttttacttttcatatatttaagacagaattcacacaggtaaagctttggtaatcttgcatattcctgtgggtaaggcgaggagtaccaggtttggatttcatatttaccaaattcaatcacagaagggtaccggccacagtcttccaccccactctcacactctattttctcccaagaaagttcctgggcctgcttaaaaacatccaaatcctcttcagtaacgacatccttgtttccaatcacatttacatctgcactttcttgtttgatgtttatttttatttcagtatcatcatcctgatcaggtttaatccttccgtctgtcaagctccccttccctggtgagggggtcggagtttatgataccgcgaagggtgatcg

SEQ ID NO: 449798 - DNA, 1075 bp, Homo Sapiens
  misc_feature (566)..(566): n is a, c, g, or t
aaaaccctcaagaattccgggaaaaatttttgttaatggggcccgggtttttttcctgggggtaattcctgatttcaaaaaaccccttcaggcccccgcctttagattttaagcctgggaaaaaaattgggccccgaattgtatatggaaaccatccaccaaaagatgtgataaccttaacaaggggtttcttattgtggggatggacccaccccataccacccttaaacttttagcattgttctttgataaaatgacttttttaaaagggggaaagaaaatcagtgccacctgtcagaagtcaaaataggtagccctgtacacacagcccacaaccagaagcggagaaacaaggccacactattgctcagatcacatcttccctgttgggtggcacccctgcccccagctgagatcctgaatgggtcccgagggagtgccgggaccctgtgcagtccatcttagcacctgcttctggcaagaaagaggctggtcttctggacacaccgggtggggagacagaacacttgaggtcaagtcctgaggcagagtggccagccctcttnttgccccatccccaccttttgaatcacccctcactggtctgagctgtgttcagggtgctgcaaggactgggatcgccagtgcctcagatgtttgtacccggaggctgcaccatggcgaatcctgcacctgcctcggtgtggggcctgggaataaagtcagggttacggagtgaggcgatcttgcactcgagtgtcgtgggtgggggtgcagcaggatgcaggtagggcacctccaggaccatgttcccatccaggacatctctgcccattcctatgcagcatcctgcaggacaggaccccagggctctttaaggaaagggctgtgtccgtctgttttcctgtatggctgtaggatccagtaggcatttggggagctgacaaccgttcccctaatatggctgatgtaaagaggggcttccttgtctgggacaggagcaacaccagccccttgatggctgagccccagatcaattcctcgtgccgaattcgccacccaggcctcgctacct

SEQ ID NO: 449799 - DNA, 612 bp, Homo Sapiens
ttgtggtctactagtctggatttcttctgcccacctgacagtctgattttgaggatgtccgatgtccgtggagaaagggagaggttgccaccgtgggtccttctgctccagtgtcacttaaaatttctattaatgttgtgctggttactgacccactaccttcaaagatgtctgtttgagatacgagtggtccaacttcttttgccacattttccattctgttatagtcttcgattttgtcacttgaggtactttccacttgagaagtgtggggatataatgtgttattggtttgttccacttcagtaaaattcactgactctgttggtagagtaggtaaaacttcttctcctgatcccagtccagagaataagagctcagtatctgactcttgaattgttggcctcatgcctttcggaaaatgttttgtactttcttcctttttgattggtgaatctgtgactacatgttcagctggtatagattcagttactaatgcagtagctaagaaaaaatgtgacttttcagtagcttcagggagagttgtgtaagattccaagccatttgcatctggatctggagtagacatgttaactaaagaagtgtcttcct

SEQ ID NO: 449800 - DNA, 1063 bp, Homo Sapiens
tggaacgcctcccgtcctctggggaatttaaaaagggtggaaattataaatggaccttttcttccccctttataaaccccgcggtttaagggaagattccccagggcgccccagtgggcatggtcaagggttatcaagcaggccagggtcttttaagcaaggaaactgggggattatttttaccagtttaaaaggaggggtgcagggggccccaggaaccgcttccggggcctctttagatacctcaatgaactgggcaccagcctcacgtggggcacagggccaaggttaggggcccatgctcctgggcttagctacacccaccttccttcatagccccatggtccagggttccatggcatacagaccctggaggaggccacagtgaatgtggggcctggctcacagttgggactttggccacctcccctgggatggcagacagcagaggctggccagctgagaccaggacctgccctctgcctggtatttcccaactgcctgccctatgagtcactgggcctggtgtggcatctagcccaggagaggggacaaggcagtaaactcaactctgaccggccttagccttcacccacttggccagatccagcagtgcggggatggggcagacccacaaaacccatcccggcacacaggtcacagttcacaggcccgggagtgttgggctggaagtagtcagggcccagttcctaggaaggcacacctgtgtcccactgcagccaagaggaagcaccccaaacactcctcttggggcgcaggagtgctggccagcttggggatagtccctggaagtggtcgggagcactgagggaggagctgaggtccaagccctcctccagtgcatcaccctggtcaggagtggggcagtgtggagccaggggctcttcagccagcacctgctgcactatgggctccagctgtgcaagaccacccgtgagaaggagtcttgttgggagcaggatgcggacgcgtggtcgacgatatcccgggaattccggccagtacagccgctttttatcaacgttctatatcataatggccg

SEQ ID NO: 449801 - DNA, 817 bp, Homo Sapiens
accgcctcgcctctttccgccagcgcccgcaggacccggatgagagcgcacgcttcggggtctccgggaagtcgcggcgccttcggatgtggcggatgcggccgtgagccggcgggggaggtgctgctgctgcctccactgtactcagacccaggtagcacaggattgtccatcctccagcagctcagtgcaacggtgtgaactcagcctgtttcagagcctccacaccatgacctccaagaagctggtgaactcggtggctggctgtgctgatgacgctcttgctggcctggtggcctgcaaccccaacctgcagctcctgcagggccaccgcgtggccctccgttctgacctggacagcctcaagggccgggtggcactgctgtcgggtgggggctctggccatgagcctgcccatgctggtttcatagggaaggggatgctgactggggtcatcgcgggagctgtgttcacctccccggcagtgggcagcatcctggcagccatcagggccgtggcccaggccggcacagtggggacgctccttatcgtgaagaactacactggggatcggctcaacttcggcctggcccgggagcaggcccgggctgaaggcatcccggtggagatggtggtgattggggacgacagcgccttcactgtcctgaagaaggcaggccggcgggggctgtgcggcaccgtgcttatacacaaggtggcaggtgctctggctgaggctggtgtggggctggaggagatcgcaaagccaggtgaccgtggtcaccaaggccatgggtaccctgggggtgaacctaag

SEQ ID NO: 449802 - DNA, 978 bp, Homo Sapiens
  misc_feature (532)..(532): n is a, c, g, or t
  misc_feature (700)..(700): n is a, c, g, or t
ttagacaaaggttcagattatggctctatgtagtagctgtgtgactttgagcatgttacttaaccttcctggccctcccttccctcttctataaaatggttaaacctgacttaaagtttatggtgaggatttagtaaagtaatatatgtaaagccctttgcacagtatctggtaaatagtgggtatgcaataaatgctatttatcttagtgttcatttgtggagaatcaaattaaaaagcctataccagacccgaactcagctctgttactaatctgcctgtgtgaatgtgagcgatattgcctagacttttcttgcccttggtttccttgagaggaaatcaaatgagagcgattatattagatgatcttgagtcccatccagctctgaaagtgtatttccgacatttgcctgttggaggcattgttgagcatattagtgcgtccatgtcagcaatcattaaagacgctaccatcagggtcttccctacgggtgctgctaaaaccacgtgatggcgaagaaacatacacagnttcatgcagttcttcgtcctctgtgttcactgtactgcacatgtgcatctcggactgccaagccctttccttgtgactctagcgtgttctgagaccctgtctgggtgtactggcttgcttctcacgggaagactgttgacaccacctgagcctgaatcgcatggtgcncagtgagtagagtgtccagtacctcaggagacgctggcctacataacggataagtagcagttacaatcgtttttgcaactggaactttagcattagcctggcttcatggcccagacaataaggagctgttttatgaagttatcagagggggctgagtgtgtctgaggaatcagagctgtgttatcttggatgccctgccagagccttattaagcttgaggaaggagagaggatcgacgcgtgggtcgacgatatcccgtacctccgaccgtaccgccc

SEQ ID NO: 449803 - DNA, 1154 bp, Homo Sapiens
ggggacctgtctgccgtgtctccccgggctgtgtgcaattgagtctgtgcacggcagatgtctcagggatgcacaggcccttcatgggttttgggtgacctatccttgggaacatttgcgcttcagtggctggtccggcatcaaaggcaggctcccacccttgaggttcttcatccgttccacatcaaatgtgagggctgccaccagtgggtcccccccgctcaggtcctggaaggcttgctcttcatactccagctgtcgcttcagcttcagcttgttggagagggctaccatggccggactcagcacgtctgggcctcgagccccaataccctttgcagaccttgtcttgaaggtggagacatggggtggagagacagggggccccaacggcgctgctcccaagaactctgtgcgctgatccccgacggccccactttgtgggcccaaaatgtaatggtggatctgggggccactgggtattggatctgccccccatggaagagagaggggtgctggcctggccacagcacggtggcagggatgctttgcttccggcatcaaagaagatggaggacatgggccggtgctcgggctctgtcttcttgctctccagctgctgctgaaacttgtccaggaggaagggactgtgcggggctacaggggccagtggctggaagatgtttgtcatggcactgaagcagtgctggggggtggactgtgggttctccgccaagagccgctcctcggggcagatggggcttagctggaagtcttccccgtccatggggatatagggtgccagtgtctccaagtccagctcattgaaatccgtctgggtactgcattggtccttggcctctgtgtccatggcgaagagcttctcaatcacttcaatcttcaggtcgttatccaaagatgtgtaatagtcttcagggctattgggcgtggagcagctgctgctgctgctggtggcactgggggtggtgctgcccggggcagctgcctggggcacggtgaaggcaggcaggctcccagcctcgctctgggtagctgtggctcctcaacctccgtggcccatggctggctcgggggcaggatgccttgcccgacgcgtggtcgacgatatcccaaacgtccggaccgtacagcct

SEQ ID NO: 449804 - DNA, 1148 bp, Homo Sapiens
  misc_feature (776)..(776): n is a, c, g, or t
tcctgtgtctctggttcttccacttctctgtttgtccccgcccttcctctgcttgcgtttttataggtgtctctttgctatttgtttgccgcggtgtctcggtatgctgttgtcgtggctgctcccttgcgtcaggttgccccgattgccctatcttctgggctattcttgtgacgtgccaatggtgtagtggaatttgggtccgtgtgtatccctctctcgtgatgtcctggtgtcgccctgcgcgtttgtatgtcccgtatgattgttgctgtgccagcctgtgccacttttgggtgatcctgttggcggtgagtcttgctgggtgccgtgtacacgtctcgttgtcgttgttccttagtcgtggtgctagatgccttcggtcgtgtctaaccgttccgctgcccaagattgtgcctgaatgtgttatgtttaatgtggtacattctgggttattgtgtaatgcttgttgactcgctctaggctttaatgttaattaatgtaccgccatccaagtggtcgaggtactctggacccataaatgcttagagttcagttgagacacttggagcctgcttcaagtacataaatgtagggttggaagcttagccattctgtgacacttcttttggggaattcctagatgctgcgtcaacttgccattaaggtgaaacgttcaagaaatttaagagtcgacaatgccaaccattactgctgtcaaagtccttcagtgattaaaaagataccagaaagataccctgatcccttgatcatcntgtggttttaaactacttcagtaagaaccaaaagatgtgctttccaagggtggagacatccaacttgtattcagttccccatttacattctggatttgggtcaatgaaagaagcatccattggggtgatagctaaggcgtgtcctcgccacatatcaatgagatttctggaggggagtagtgtgggaaagtggttataacattgcgcacagcagatgtcagagaatttctgaaagacagggctatctctagaaactcatctgtaagtaaggagacaattaacacttttgaagcccatttatccctgattggaccgacgcgtggcgacgcgtggtcgacatatcaaaggtacggtccgaccgtacagcctgca

SEQ ID NO: 449805 - DNA, 1007 bp, Homo Sapiens
  misc_feature (356)..(393): n is a, c, g, or t
  misc_feature (736)..(736): n is a, c, g, or t
atcgtgtctcacgtttgttctccggtctggatttttcagtgctatcctttgtctggtccttatcccttacgttaaggtggaattaaatgtcgatcactcattattcattcaccaaatttatcaacaccttaagtggcggactcttcgagccactcaatgatcagtagattaaatagactccccccattgccgcctttggtggtgctcacactatattgaggaacgtagccatcaacacattatgaatttatatagtatgttaattagacaataggtccagtgggacaagaagaagaataaataagtaaagggataggcaatgggttggcaagactataattttggagtttatttgnnnnnnnnnnnnnnnnnnnnnnnnnnnnnnnnnnnnnnatttgtgataaagcttatattgtgtgatcctgagtttggggtatgattgaacctaggtagtgagcatagtacctaacagtaattagtttatcagtccttgcttccggggtctgtcccacagaccttgacccaacgacggttgtataacgtacactaacacagatattctgcctgtcactccagctaagggtctgggcccctcacaggacaccaaggaaggtgctgtaaagagtagcagccggctccatcagccaggcgaagcttgcatttattcagtatagattaaatgacaaaggttttgagtaaacactgctagagggtaattgacctggttgccaacaanccccgcccccaccccctgcggttgtgcacccggttgatcaaagattggtcttaagaccacatgagtaaacaagctattcagataaactactctacattcctttgtatctactttaagctatttactcaaagtaaggattaggcggctttcaagccataaccctatcctgagactttgcaaaaccctttgcctggctcttgcccaaagaagatttgttgtcttattattttttatcggaacgccgtggggttcgacgatatcccgaggaatt

SEQ ID NO: 449806 - DNA, 1029 bp, Homo Sapiens
gtagtgtcgtgttgtctttgttcctggtttattccttagtgtctctgttgactggtcgtcttattgtccgtgtcaggtttggtgtcttctgggcttctgtcgtgtgtctttgttggtcttctgttggtctgtgtgttgttgtgcgatctttccttctattctctgcttcccgttgagattggggttcacctcttcctccctgctgagccttgtctaccagttcctgttgaggatgtacatcctggtgtcatgggggctgcgccccttttcacggcttggtgatcttggagttgtccatacgggtttggtcagcttgcccatatgccacacagggtttcccgtccttcctcctgcaccactgtgcgccccagtcagaggctacatgagcagatggtcatggggacggctatagccccatgggaggatcaggcatatgtgtggggatggaaattggcacggtgtcaggggactccaagtgtcatctggctggaggtccagcagggacgggtgttgggggcaggactgctggtacctgcctctgtgaccccaggcttcccatggtccccagaacagccacttgggcctctgtgtctcccttctcccctccgtggtgaccagaccctcaagacgagttgaaggaggtcatggggcatggagggaggtcacaaggcagggggctgccccctatagtgcccagaggcaaggcctcccctggcacctacctgcgtctggccagcgcagggctcaggcagggcagggcccaggggcccaaaggctgtaaggtgagaggctcacagaaaaccctgacacgtggccagccacagcaccacaagagggacagagggaggacatgcatccatgcaaggtggccaaggaggtgctgtgtgtccagggccaggggagggcacggggcctggtgcagagaagcagttggggctgcactgagatgagcatgccacaaagaggggcttgggcgtgacctgggcccgacgcgtggtcgacgatatcccggaattccgaccgtacacc

SEQ ID NO: 449807 - DNA, 1049 bp, Homo Sapiens
  misc_feature (161)..(169): n is a, c, g, or t
gttcggggggagcccgcccgttctgccgctcgatctcaccatgtacaaatagggaacaccccccggggctgggggttcccccggcccagaaaagttgggtcttgaagggttgaagccaggccccttccggggcccccggtgcccaaggacccgggtccatnnnnnnnnnggaagcccagttcagagcgcccccacgccaggacagcctccacggcggtggttctcacgctccagagtccgcagcagctgctggcctccctctgtggttccctgagcatctctgcttcagtgacagacagatggctaaggctctggtcgctgtggcagccgcgtgtgtacaggtggatcttgctcaggagggcgcactgctcctgctgactggacaccagctggcgccaccggaaccgcagctttcccatcagccactgcacatggcggacatccacaggaccctctgcttccatgtggggtgcaggtgggccagggcttggccagggcctcacactggcacacagtcatctcgtcacccagaggcactcgggcctgggccagcatctgctcgggcacaggtcctcgggccaagagccaggacagagccagcagcagctcccgactgccctgcgagccatcctcaggtagttgtgccagtgccagcctcgggtagccctgggagcatagtgctgacttcaccaagcgggcttggacctccagggcgagcgatgccaaggcgttgcccgcagggagtggcgagagcacacggaagaggagctgccagagcgcggaggtcgcctccggacggtcgaacttggcgcggcggaagatctcggggctgggtcccgagggcagcgaccgactcaacgcggcgatggcctcaggcagggccccggcccgggccccagccgcggggtccacccgctgccgccgcctccccatgcagccagcaccagcctctttcggatcgcccgcctccgccgcggcccggggcctgcgtccaatcaccgcacgggccgggtttagtgcggcggctgggacctgatcccgggaatccc

SEQ ID NO: 449808 - DNA, 1028 bp, Homo Sapiens
gggcccaggggctgggcccaggggccttcacccctgggccacccagtcaattttgggtccccccaggagggccttcgggcctgggggccagcatctgttcggggcacaggtccctcgggcccaagagccagggacagagccaggcagcaggttcccgactgccctgcgagccatctcagggtagttgtgccagtgccagctcggggtagccctgggagcatagtgctgacttcacccaagcgggcttggccctccggggcgagcgatgccaaggcgttgcccgcagggagtggcgagagcccacggaagaggagctgccagagcgcggagttccaatcaccgcgctggccggacatgcatccaatcactgcgtcggcagggtcccgccttcgtgtccaagcccaatgaacggttcccctggagtttgagtgtagtctattctgtctcgtgcggacccacttccgggctcctggcaggggcagtcggagcggacgagcctcgccccatcgcgccgccttccaggctgggccgccaggaggcgcccagagcccgccgcgccgcacagcgcagaccccagcgcggccggcccctggcccctggcgcgaagtcccgggcagctcccccgccccgaacgcgcagccggagcccgcggcagcctcctcaggcgctcccgatcctcgcccgcccgcggcagcgcttccctctgccgccgccacggagcagccccggaggaagccggcgcatggaagcagctgctgcccgggcgccgctgagccgggcccgcctgcacgggcggccccgaaagacgcgggccgggaggaacgtggggctgtctgcggggatggaaggtcgggctggcttctggccagcggcgcctccgggcattcgtgaagaccccgggcagcgtgtcaccggggctgttcccgcgatgcccctgcacctcccggggctgcgaggacggcgggagagggaaactcagtcctccctggaccctcgtgccgaattcgccacccaggcctcgctaccta

SEQ ID NO: 449809 - DNA, 856 bp, Homo Sapiens
  misc_feature (795)..(816): n is a, c, g, or t
tgatcaagacgcgtttccaaaattgggtgggtgtcacattgtccggccagcaaaagggaggctttggacaaggccatcccagggggcagaaacgacttgcctttggcttttcgcccacgaattttctgtcgttctcttggggaagcctggccccctggctcctggctttgagaataaggttgtgacagaaggaccgtgcaggcttgccttggggacctgggttggggacactgacatcaggggagactagcctggaaagactgcagagctgccaggctactccctggaaagggcttccccatgctgcctgccgaaattaggaggtagaggtggctgccacatctacctgcaagggccaggcatggttcaaagaggaccctgcattaagctctacacacacatgtgcaggacatgtccagcatggacagagccagagttaagacagtagcaccgaaaatgagcccccattccacagacactggagtcttcactgagcgagacagctgggagctgtcctgcctgtggttacatatctagccattcacagatgtggatatgggaaggacctctttggagctactggggactccctaaccactcgcatgagaacttaattgaatgttacctcttggagggagtctaataacacatgtaggtagaactgaccataaaccctgcctgtgtgtttgaaaaggccagttctcccaaattggtgcccatcttgtctctgaaaagatgggtgatggccagggtctgctgattgatgaatcagatgaatcaggaagatagactcannnnnnnnnnnnnnnnnnnnnnccgaaacgcgtggtcacatatcccggattccgggccgatc

SEQ ID NO: 449810 - DNA, 1153 bp, Homo Sapiens
gggtttgttttgtgtttttaaaagggagagtgaggctttttattgtgtatgaattcacgtggtatcgacaactccacacaatattaaaacactgcgagaaagtgggtgcggcacacctggaattttaaaaaagtcagaaataaaaacaaccagacatcccaatgcagatggcatagaacctgctagaaccacaggcggcggctggaaacaggagacaggtctttacgaaggttagatgggcagcggttccgtggacagaggaggaggcgcggctggccggcatatggcttctgtgcagagggcctggcctcaggccgtggactttttaataagtgaccccttgaggaagggcgtggtggctccacctccacccggaagcccccccgggtcactcacgggcggacaggtgtgtgacggccctctcctacctgccccagaacttgggcaggacgggctgttaacttggagatggatgcgtggcctggaggcctagcgttgcgcctcggacacggtggccggcccgtcaaagggaccacgcagaaggagggaaacaggagcaccttccgccctggccccagccgccccgtttatgtccccagaggccagaggtcgcagctgagctatctgtgcttggcctggggttacccctggggagggtgggagaggggtgagggttctggctccttcctggagagaggagggcaggggaggcggagctggtccgggaaggtgcccaggtgggtcacaacagggtcggggcctggcccgctgtggcccttcacctggctactggtgtctcgctcagcagcggggaaggcccgtgggagacccaggctacagaaggagaaacggccttctctctcccacccgacgctgccttgtgtgtgtgcgtgggtgggggtgagtgtccttaactctcttttcccctggcgtagctgagagaggcttgtccccccaaggctagagctgctgctgccacccccgcccgccagctccccgtctggaggtgcacgcgcgctcctggaaacgcccataaaacatgcgttcaccccagggattcccggcagaaaagcacatgtggcggtcggtgtgtgcactcgggtgccacgtctgcaaaggtattttccacagtgtggtcactgaagtctactca

SEQ ID NO: 449811 - DNA, 589 bp, Homo Sapiens
  misc_feature (104)..(155): n is a, c, g, or t
cttcaggacttaaatgaattcatacctatgtaatactgagaacagtgcttggctcatagtaagtcgtatatgagttttagcaatgaaagcaaacaatatcaatnnnnnnnnnnnnnnnnnnnnnnnnnnnnnnnnnnnnnnnnnnnnnnnnnnnnctctacataactgatgaaggcagtggctgtaaaagtggggagagaagtcaaaatggagaggggatgtgctccttcagtgttgtgctaaataactggggatgctctgaaacacccctaattatactggggttggaaaccccatttgaactgaagcactgaggtgcaagtttactcttgcatgtggtcacacacagagtaagagactgaagcagaaagcacatcttctctcctcattcacctgtgaggtgggttaactgttttcaaagagagaatagggaatagattgtgctgtacagcagctcagagttggcatttgaaatggagacctagtaagtctgccattgaagccatgagttttctgtgtttttaaaacatcttcaatccatgcgacgcgtggtcgacgatatcccgtaattccggaccgtaccagcctg

SEQ ID NO: 449812 - DNA, 2011 bp, Homo Sapiens
ctgagaggcgaggccgggtgaggcggcgagggcggccgacgggcgcgggacgggacggggcagcgagggcgccgggagccgcggcccggaatcggggcgcttcgccccgggccccccagcatgaagaccccggcggacacagggtttgccttcccggattgggcctacaagccagagtcgtcccctggctcaaggcagatccagctgtggcactttatcctggagctgctgcggaaggaggagtaccagtgcgtcattgcctggcagggggactacggggaattcgtcatcaaagaccctgatgaggtggcccggctgtggggcgttcgcaagtgcaagccccagatgaattacgacaagctgagccgggccctgcgctattactataacaagcgcattctgcacaagaccaaggggaaacggttcacctacaagttcaatttcaacaaactggtgctggtcaattacccattcattgatgtggggttggctgggggtgcagtgccccagagtgccccgccagtgccgtcgggtggtagccacttccgcttccctccctcaacgccctccgaggtgctgtcccccaccgaggacccccgctcaccaccagcctgctcttcatcttcatcttccctcttctcggctgtggtggcccgccgctgggccgaggctcagtcagtgactgtagtgatggcacgtcagagctggagggaaccgctgggagaggatccccgcgcccgaacacccggccctccggaatctgggtgccttccgaggggcccccggtggccgcctgccccatgaccctggtgtcttccgagtctatccccggcctcggggtggccctgaacccctcagccccttccctgtgtcgcctctggccggtcctggatccctgctgccccctcagctctccccggctctgcccatgacgcccacccacctggcctacactccctcgcccacgctgagcccgatgtaccccagtggtggcggggggcccagcggctcagggggaggctcccacttctccttcagccctgaggacatgaaacggtacctgcaggcccacacccaaagcgtctacaactaccacctcagcccccgcgccttcctgcactaccctgggctggtggtgcccctagccccagcgccctgacaagtgcccgctgccgcccatggcacccgagaccccaccggtcccctcctcggcctcgtcatcctcttcttcttcttcctccccattcaagtttaagctccagccgccccactcggacgccggcagcgggcagctggggagaaggccgtagccggtgctgacaagagcggtggcatgtgcaggcgggctggctgagggggcaggggcgctagccccacctgccccgccaccacagatcaaggtggagcccatctcggaaggcgagtcggaggaggtagaggtgactgacatcagtgatgaggatgaggaagacggggaggtgttcaagacgccccgtgccccacctgcaccccctaagcctgagcccggcgaggcaacccggggcatcccagtgcatgcccctcaagctacgctttaagctggcgctggagtgaagactgtcgcctcgaagggggtgggggccccgctgggggctttgaggatgagggtgaggacaagaaggtgcgtggggaggggcctggggaggctggggggcccctcaccccaaggcgggtgagctctgacctccagcatgccacgggccagcatctccctggaggcaccgagactcctgagggctgttgggcaaggggacctgtgtgccccgaaccccccatgcttcttttgctgcctttaagccccctatgccctggaggtgagggcagctctcttgtctcttccctgacctcctcccttttccctccccacattttgtattaaactttaatttctttttatttaaaaagtggtgggggtgggatgagtgcccaggactaagggctattccctgtctctgagggtatctaagctatg

SEQ ID NO: 449813 - DNA, 676 bp, Homo Sapiens; identical to SEQ ID NO: 325327

SEQ ID NO: 449814 - DNA, 1005 bp, Homo Sapiens
  misc_feature (453)..(453): n is a, c, g, or t
  misc_feature (457)..(457): n is a, c, g, or t
  misc_feature (459)..(459): n is a, c, g, or t
  misc_feature (470)..(470): n is a, c, g, or t
tggggagatgtgtgtatctatgtgtccttgttctgttcatgcctcataggttgtttggtcgtcccagggtagaatctgtgttcgtatactgcccctagttagtgatttctctcgccctgtgttgtgtgttctacttgtcatctcgagggccttcccccaggccctttttgtcttcacctttgtcctcaaaagtcccccgtgggggcccccacccctttcgaggcgacagttttcattccagggccggttaaagggtagcttgaggggcatgcattgggagcccccgggtgcctcgccgggctcaggcttagggggtgcaggtgggccacggggcgtcttgaacacctccccgtcttcctcatcctcatcaatgatgtcagtcacctctacctcctccgactcgccttccgagatgggctccaccttgatctgtggtggcgggggcggtggggntagngnccctgcccccnttcagccagccctcggaaggcacccagatccggagggccgggtggtcgggcgcggggatcctctcccagcggttcctccagctctgacgtgccatcactacagtcactgactgagcctcggcccaggcggcgggccaccacagccgagaagagggaagatgaagatgaagagcaggctggtggtgagcgggggtcctcggtgggggacagcacctcggagggcgttgagggagggaagcggaagtggctaccacccgacggcactggcggggcactctggggcactgcacccccagccaaccccacatcaatgaatgggtaattgaccagcaccagtttgttgaaattgaacttgtaggtgaaccgtttccccttggtcttgtgcagaatgcgcttgttatagtaatagcgcagggccaggctcagcttgtcgtaattcatctggggcttgcacttgcgaacgccccacagccgggccacctcatcagggtctttgatgacgaattccccctcgtgccgaattcgccacccaggc

SEQ ID NO: 449815 - DNA, 832 bp, Homo Sapiens
ccctctcacccagactcttgtccttgtttctctgctttctggggtgtgtttatggggtatcttggcttataggtcagggggtcaaaccgatgaccccttggccccccgagagacgttgtctgttcccagaggtttgtgctttttctgtggtggtgggctggttctcacgtgccaccaactgccagtgctcctccaaggctcggggcccatgctggggcccgggggccttctcaggctccacagtcactggagggaggctctggaccaggaagcagggaggcagggttacagtctagaagatggaagaaccttggggacactggaaggtcatctggaatcggcacacgcggagggaccaggaagccgcatcagcgtgtgccctcttaccgggctggttcctctcgggagggtggtcttcaggcctgcgctgggcatgggcccaagccaagggtgtggaggtgggacgtgggctccagacccacacagccttcctggtgcactggtgcaccctccctacccctctgttctgagagggctgcagcgggggagggctccccgccccacagcccgtggctctggtgcggggcggtctgagggcacaggctcccaggtggaaaagtgtgttgggtaggtggggtaggatgcagagtgtggagggatggccccgaccgggtggccctcagttgttctcaaatagagacaggaggtcatcgttactattgctcggcaggtcgggggggtccagataagacaggagctcgtcaggatttgtgagttcgggaaggagatccagcgaaggctccggcatgtcggacgctccctgcgctccggc

SEQ ID NO: 449816 - DNA, 847 bp, Homo Sapiens
gattggtatatggctaggccgcctcaataaggtaccctggataagtacacccacagaatcatgcacagttattgcagaactgtaagaaacagtgaagatgtcttgggagccctcattatcagacaaggcataagaaggttcaggccctgaagaacgtgcatgcatcatggcatcactgctgggtggttcaacttgagaaaacataagcgcttttactaaagtacaccagatgtcactaccgaattccagcgtctctgaagcagcatgagtagtggacagcacatcagaatactgagcaaggctgggctctaatagcaaatcacccccagccactggcagagaagcatgcaagggcaccttatcactctcggtagctgaagtaacttgtggaaggatttgagaaactgtatgcagatggcgaaacaattcactactgaaggaagcagaggaaaatggaagcaaaggtgcaccatcataggaagacaggatggattcaaatgacacatcgacactgggaaatacaggcgtagcatgcaaggccgaatcactacttgaagcagcaggggtagtgttgaggatctgattgtcaagcaacaaaggggtgactagaggaaagacttcactactgtaggaaggttgaagaggtgtctcaccattgtataccggttgggttgtctgcgagtataccacgttgaccgtggagaccgaatcctgttgtctggaggatggggtaaaagcatgaggtgttacctcagttgggaagtaggcaaaggtagaataatgtggcggacgcgtgggcgacgcgtgggtcgacgatatcccggaaacttccggacctgtaccgccc

SEQ ID NO: 449817 - DNA, 1268 bp, Homo Sapiens
tttgtttgcgcttctggctcgttctctgttggtttcccctcggtgctcgctcgtgggtggttgggctgcttcctgcgtccgtctgccggcgctcgctgtggtgactgatagtcggcgggttgcgtctgtgggcgcgtggccccgctcgtctctggcggtgccgtgtgtgtgcggtcggtccctgtggtcgtggctggtgcagtgtctgccacgattaccctgtggctgtcttgcgagcctgtccctttctggcggctgggttagtctttgcggcgcggagccagtttcgtcgtccgtcccctgctgttttctccttgtgctgcgcggttcattgcgttgccatgtggtgccctacgggtgcgatcttgcctcttgacgatggcggcgttaagttcgatcatatgaaactgggattgacttcgctgttagttttcgtactcaggaccccattctttggcttcgtctggagtaaatctgtgttgatgccaggtctgctgcgtatgtatagctcgtatccgatggtttgtaggcgtctttaggttgtaaagcatgtaggctttctgatctgcgtatcaggtggagggaagcctgtctggttcctcaatacgatacatgggttctctacccctagtagatccacctccacactgggccctggccacagtcacagggtggctgcacgctggcatccgtacagccacccgtaatcgcactggtctaagccgttcctccatgccgcctggagttcccccacttgttgccagcctggcatcctggttttcacactcttttgcagcctcctcgaaggtgaatttactggggacagtgagttggaacacatcaccatccagatgatccacataacgagtacacatcgtaagtttcctggggagtaacggaatccataagtcctgactcctgcctttcccatcttatctccataacagcccactctgggagcccggatgggatatctgacagtctgatcagccagccagcctgcgtcacactgctcaaatccatcttcataggcagcaaagagctgctctggagttgctatgactgccccaacgtccaaacaagccttctgagctagcctcaaaattcagtgtgtacctgctggttgccgccctgtagtgaaacacaaccccatccacagtcagtgacaccgtgtcttgtgtgtcttcaatcccgtacatgacgtcacagcggtaaagaccgggacgcgtgggtcgacgatatcccgaaacttccggaccggtaccagc

SEQ ID NO: 449818 - DNA, 1199 bp, Homo Sapiens
  misc_feature (522)..(608): n is a, c, g, or t
  misc_feature (856)..(868): n is a, c, g, or t
  misc_feature (1079)..(1119): n is a, c, g, or t
tgcgcgtggtcacatgcgacgttgaatactctggcgtctcgtcctgttcgccagattgtagacggagcggcggcgggcgcgttggctgtgtgtcaagttgtagcgttctactcggcgtgtccgtgctgtctccgttcctcctcttgtccgttttgctctcgtcggtgcgtgcccgttgctggcgtcgtggctgcactcattggctcgtgcgtcttcggccaaggcgcctttccgcggcgcgcgcctcgctctcggcgaacactcggcggctggcgcgccgttgggtcatgcggttatggtctgtgaggagtgggcgtgggatggaacgcggatgggcgaagcggtcggggcgacacgcgagaggtgggtcgcctcgggggactaacggcggtaggggagttgaggacgtcgcagaattcggcggggttggagcagtgcgtgtttgtccgacgtcggggtgggcgtgcgggggtcaggtggagtatagtgtgtgtatttgtcagggaggtatgtgcggcggannnnnnnnnnnnnnnnnnnnnnnnnnnnnnnnnnnnnnnnnnnnnnnnnnnnnnnnnnnnnnnnnnnnnnnnnnnnnnnnnnnnnnnatcggtaattgcgcgcggggtgtcttggcgcggttcgtgcgggccggtgcggtcgcgcccggggctcgtgggttgtgggggcggtgtggtggcggtgtaagcttcgtcacgcgggttccgtgcgcgcgtggcgcgcgggactcccgtcggcgtccgcgcttaatccggcgggagggttgtatcgtcagggggcgtctgggtgtggtcgggttggggggttgtgatatacggtgacctcgcggggagannnnnnnnnnnnntcggcgtgggcgggctggaggttctttactgcctcgcctctgggggtgtgggctgttgtacaggggcgtctgccggggggccgagctggcagagcggcgcgggggaccagcacttcctagcagtgcgcgcgccctccggcctctgcctcggggcgctgatcccggccactcggagcccggtgcttgatgttggagccaggcggccagaggnnnnnnnnnnnnnnnnnnnnnnnnnnnnnnnnnnnnnnnnnaaacacacaacgcccactacggcccaggagatcccacttccgccgcgagctcccggcgccggaagtcctcgcatcccggg

SEQ ID NO: 449819 - DNA, 658 bp, Homo Sapiens
gaatcattatggggacatagtgtttgccctataaattccagaaattcctctggttgaatgtaaaagtcatacttcctcggttttaccttaattagtaaagcaaactaaataaattacgagtaacatttagtcaggtagagttactcctttttccccttctttattaataaattttatttttagcacaatcatttacccaaaaagagagtttgagaatgttcgagaatctctaccactcggtaaccatgctggctgttatatcagaaaaatccataaacatacacagcagcgagctgttttcacaagacttcctgctaataaacacaacactttctcctccactcagatgggagcctcaggatgccaaaacggcaggatgtgccaactaactatagggctcgttgctaaggcaggaggaaatctattcaagtttgtccaggcaaattcgattgtacagtgggatggcgtctgctctgcggccttggacagggagccactggtctgtgctgctgtcccctgaggcaggtcgaagctggtggcccttagagggcaggtaaaatggttctcatgggttagaacataagggctttgagaaaaaatgcaaaagtctcgacgcgtggtcgacgatatcccggaattccggaccgtacgagcctgc

SEQ ID NO: 449820 - DNA, 836 bp, Homo Sapiens
  misc_feature (62)..(306): n is a, c, g, or t
  misc_feature (319)..(334): n is a, c, g, or t
ttttctttgccttctagatatgatgccttaagacaattcaacacccagccatgttgctcatnnnnnnnnnnnnnnnnnnnnnnnnnnnnnnnnnnnnnnnnnnnnnnnnnnnnnnnnnnnnnnnnnnnnnnnnnnnnnnnnnnnnnnnnnnnnnnnnnnnnnnnnnnnnnnnnnnnnnnnnnnnnnnnnnnnnnnnnnnnnnnnnnnnnnnnnnnnnnnnnnnnnnnnnnnnnnnnnnnnnnnnnnnnnnnnnnnnnnnnnnnnnnnnnnnnnnnnnnnnnnnnnnnnnnnnnnnnnnnnnnnnnnacactctgtcttnnnnnnnnnnnnnnnngaacaactctatttgttcacataaatttccttcaacatacattgcagctaagatgtgtacaagattttacatgtattttggaagaaatcacacagaagcagctgctttttcaataaacttggccagcttcacatcttttttggtcagttcaccacagtcatgtgaggtgagagttatctggaccttgttgtatacattgaaccattctgggtgatgattcatcttctctgcttgtagggcaactcgggacataaagccaaatgcctgattaaaattgtggaaggagaattctttgtagatggcatctctctcacttaattccgaccatcctgctgctttaaggtcaagtatagcttggttcctctcctctgcagtcaacctgtgagtacctgatgacatggccgctagccctaggctctggcctcgcagcgccgccaacaagcgccgcgtcgccccgagcgccccgagcaccgccgccattggccgtctgccgagggctccc

SEQ ID NO: 449821 - DNA, 1269 bp, Homo Sapiens
  misc_feature (51)..(136): n is a, c, g, or t
  misc_feature (221)..(221): n is a, c, g, or t
  misc_feature (224)..(254): n is a, c, g, or t
  misc_feature (264)..(272): n is a, c, g, or t
  misc_feature (281)..(281): n is a, c, g, or t
  misc_feature (285)..(361): n is a, c, g, or t
gctccgcaaccccgcgggggtccgacgccgcttcatctcggcgggatcatnnnnnnnnnnnnnnnnnnnnnnnnnnnnnnnnnnnnnnnnnnnnnnnnnnnnnnnnnnnnnnnnnnnnnnnnnnnnnnnnnnnnnnaagggggaaccgccgaagacggcgggccccgccggccgcttatacgcgcgcccgcgtggcgcgtgtccgcggtgcgccgcgggcnccnnnnnnnnnnnnnnnnnnnnnnnnnnnnnnncggcatccgnnnnnnnnngcgcccgcncttnnnnnnnnnnnnnnnnnnnnnnnnnnnnnnnnnnnnnnnnnnnnnnnnnnnnnnnnnnnnnnnnnnnnnnnnnnnnngtctctggggggccggggtgtgcggcgcagcatttgaggaggggcggggggactgccaggcccctgaagtccaagatgaggtgacactgcttgtctgttccacagcacagaggcccggtggggagaaatgctggctggccacacctagtcccagccccggtccctctgggcctaagagccccacagtagatggttcttcagggggtagtccctctctggcccccagcccagggcctctcttcagctcccggggaccctcagtggatggggcttgtcgtttcagggccctatgaggctcagaggtaccagccggaggggaaaagatggatacctggtagaccccgggggatgtcgccccccctgctgggctgtagcccatgagcaggccaccctggagggccccctgcctgactggaggctgtgaagggccagcctccggctctgaggatggagacggctccgcctgcacgtggcgcatgaagccccccttgggtcaggggggccccccaacacggcctttatgctgggcctgggctggggggcctggggacatcccgatgaagaggcctcaagcctagctgtgcgtcccctcttcccaactgatgcctcgtgcccctagcttgcagtctgatccatgcctgctgcactggcaaggtgactgccaccattccgtgcagctcctgagctcagcaggacccttgttgcccacacattgagtccccaactgctcccgcgacttcgtatcttccctcaacacacagcagtctccagatcgtctgcaaagcgcacccccatccgcgtcccttcttccacgctcaccactgccccacacctgtagttccgtgggtcccgttgcacttggggacgtggtagtggttaggggcagttactgagcagccctagctgta

SEQ ID NO: 449822 - DNA, 930 bp, Homo Sapiens
  misc_feature (23)..(23): n is a, c, g, or t
  misc_feature (35)..(35): n is a, c, g, or t
  misc_feature (57)..(57): n is a, c, g, or t
aagaaaaacagagcattttgggngacaactaatangaaacaacgcctgcgcttttantacataggcaggctgtacggtcggaatttcgggattcgtcgaccacgcgtcgcgagacaggctccagcgacccttgggaactcgcccccagcactacccacccccacagccataccttcatcaccaacagcaaaacagaagtgactgtctgagctttcaccacagggagcaccctggagaccacactcaactgagagaggcaaaaaacaaccccggccacacctccccatcctcccctaatacatgcgtcacaatcatctcaacaagaaccaactctaaacctactggggacacagagtcgcgcttttcctaggtcatgcctgtaacgtgtcggcgggcagctgagaaagaccgaagcgtggacattcagcaatacagcaaaggggaaaatgagggacactctttccacttcaggcccaagatggccaactcacatgcccaaaccgtggggctgagttttcttttcctcctaacttgaaactgaaatccatggtgacaaaatataaaagtagcacaatttagagacacttgtccatttgagcacatacactacttgccacgtgctgtctgtttctaggttcgaaagcccggtggaaatgggggtagagaatgaggggaggaccccaagagaacgagtgtattctggaagaggagttgttctgggaggaatttgcccacattagaagcatttttctaattccaagaagtggtgaggtggacgtaaaagttttgacgagcatgaaacagtaactggaccccaaccattctatttatagtacttttcatatcatccatgttgaaagcaaaaaacaacacaccctcaaactcacagaaagtaaatagaccctgaacccaccgacaatgatgggaagg

SEQ ID NO: 449823 - DNA, 962 bp, Homo Sapiens
ccttctagtaactcttcagagtggtcccagcgttcttccactggaagattttgccggctcgggcctgtgggcaggtctttgctgggctcctagatgcctggggtctctgggtggctcctcgaaggtccagtccatgctgcaagtctggcattttccggtgaatctgctggaacattctccggtaccagtctctgggtctgttcaacgctggatcggggggcaatgggcatgccgctctctgtccacgggcccgattccctcgtacttgacccagcgcttgtcccgacgcttgctgtccttggtccacgtggctgacccagttctgggtgtgctgggaggcagggatctttgtgcttgcagagggcttgctcccagggcctggccaggtctgataccacgcagggtccgggtgctgggaagcatctcgtcttggtgtgtagcccccattgcacacagtcctgggcgcggggtcgtggaactggaaattaagggtgttggagccaccattccggatcacgggcacccgtgtcccccgggaggaagaccctatgtgggactggaggtggccagggatgaagtcgtccaggctgagcccagcgcggaggctgcggggtgggccctgcatgcttgggtcaaggtgggaggactccgggcaagccagctgctcctctgcgtgtcctctgtcagggtccttgggactaagaaggaccacatcgctttcactttcttccttcttctcccaagatggtgaagctgaagctcttccgactccaggaatcctggccataccccctcaccagcagcaagcttctcttattctctagggctctgaccttctagcaggtctcagaaaagatgtggacccggtgccagacaaggtggaagccatggttataaccacacacaatttaggaaattggagcccatacccacagatgggcctgggttcaccctccctctgc

SEQ ID NO: 449824 - DNA, 857 bp, Homo Sapiens
ttctggtaaccaaagttcattttacaaggcccagtgtaattctgtcaaattgatgtttccatcgagctgaatccaagccttcaggatctcctgctgttctcaatgccctcttcctgccaggtgtcgagtattctctccacagatgcatggcccatcccatcatccaggcaggagaagacccgaaagccaatggtacttgtcattgctgatgagttgtggtacgtcgtccactctcatcgaaagactgcatggaaaggtgcctttttagttgtctatatggagtagatgctgatggtgtaagagattttccatttgttaaacaaaccatagaaaaaatcttctacactcattgtaccgtcaggatcaagattatggaatacttcctcgagcatctctccatccacattctgtaaaccatactgctcacagatggagaccagcttcttccggttcaggtgaccatcacgggtgatccccaaatcttcacaaacttcttgcagtttctcttctatccagtcttggggaggggaagatccactctgtgaagcattcaagtcatctgggttccaaaaccttaactggccttccgcttcatactcctcactgcgttgcgtcttccagtgctcactgcagtcaccggctgggatgtgtgaaggccgcgcttcttcatccagtggctctatcaccgtcacttcaggaaactcctccacggactcttggaactcgggcaaggaccttcgtccgtaacgcttcccacctctaacatatttgggctgagcttctagtgagcagtctggttcttgaaagtgtcgacgcgtgggtcgacgatatcccgaaacttccggaccgtaccagcc

SEQ ID NO: 449825 - DNA, 987 bp, Homo Sapiens
  misc_feature (29)..(29): n is a, c, g, or t
  misc_feature (813)..(828): n is a, c, g, or t
ggaacattgaaggggaaaagtcttgccgncctggggaaagtggcttctcctttgtccctggaatggaaaaagtttgggaacaggcagaacccctgcagtggacaccctggggttggtctaaggggacaggaaaaaaacatgagcagggccctttcctgagggcaccctgaaaaggtctaccttaaaggtacttcttgatacaagagatgccagttagaccattaaagggcttcaaggattctgacagagggctcctagacatgaaccaaagccggtgcccctcgactttgacttcgaactctcaaataaatgaccagagaaatgtcaccttcatcgtagcaaactggctctttttctagggttcaggtgctgaacagaagcttacttccctctcttctccttcagtcaaacaaaggctttgggtttggaattttaatggtgaaaacaaaagggacctggcgagcctcaaaaagctccattttcctcttccgccgagatgctgaatcattgtacagagaaggagagaggagcacgttcagcagtgtgcagcccaggcatgcagctggtgaggatggcggtcacaaagtgtgctttcgtccttccagctgggcaccaagtcttgcccttggatggggctcagagccgtggagtgggcgagaagcttgattccctgtgagcatctatcagaacaataatgtgtcctggggttgcatttgcacacactgttaatgaataggggacgaacactgcaacatgagggtgcgatcagttatcagtgaaaatgtcaaataaggcctttatgtagcttttagnnnnnnnnnnnnnnnngtaccaaaatgcacgtgttaaatgcttttagtagtaaggtaggccagatatctttttgtttatattgtgcacatctgctaggtacctaatggccatagaaagataactgctgtaagattcagtgttggtacattcacacgacggcgtggtcgacgatag

SEQ ID NO: 449826 - DNA, 1507 bp, Homo Sapiens
tttgtcgacggtccccctccgctgtgatttttaagaagcgtcatgtgtccctgtcaagaaccccttcatgccaggggggggtcttcttccaaattgattccttaaggcgggttattttatgaaatcccaaaagccaggcaatttttgcaaaagggcccctggccagccccctccaagggagggccccagggagccccccctttgcccaaaggctggttgctgcaccccagcagggtcatttttgcggtcccctgctagctgtgagaagttcatgtgccgggagaggttgtgggcgctcccgggaagtgctcctggcacacaggggcaggcaagggcttcttctctccgtttctgagaatgtgggtcaggccccgcatgctcctttttgtggtgggatcgcatgtgaaagaccaggtcggacgttaggcgaaaggacaggttgcactttgcacaccagttctgggtggacaagcccagggaggtgagggtgggtggcaggagggcccacgaagtggtggaggatgatgagggtgggggcacctgggcctgggtatgctccagccacagtgtaggggcacccagaaaagtgctacagagtggagcattctgtggcaatgcttgcaagttccacaaatcaccaaccaaaagcttgggagttgaaagtcgaccccaccaagcgaggtctgtagtgcttgaggagtccagacagctccccccagggcatctgcagattcccctgcagggaagactgaggttagctcaggcctctctgctggtcgcttggttggtttgctaaaggcgcttctttgctcacttcggtgctccgctgggccacacagagaagactttgctgcccagctgggcctctggggatgttctgggtcagcttgtggggcaccaggttggcctgtggggtcatcgtgctccctctcctgggcctgagcatccacctgccggtccttcatcctcggcagctccgtgaaggcgctctgcctctgctctccacgtgtcttcgggggcagcggcttgccaggtcggggcttgcctggggctaccaacagtgccagctccgcactgcccacatcccggcccgccctgcccacagcagcctcagggcccaggcggttcgtcttctcgagcagcactggcttgcagccccggcccagctcatgttcgctaagtcgccatctgttttcagccgatgggctcaatcgggtcatccctttccagcatgccataggtgatcaccagggccggggcacacaagataagcaaggtggccactctggcattcatcagtctttgggggtttggggttctggagggcttggcccagcaaggagccatgagatatggatagctccccatgacacttggctggacacactcggccacagggtccctgggctcttctggagatgtggagcatagtaggttctggtgcagtcacagcctcctcccggccaagagcactgcgatgcccgttaatcccggggcagtaccagca

SEQ ID NO: 449827 - DNA, 766 bp, Homo Sapiens
ttctcagatcctgcgtgactgcatctgcttaaggtttctggacccgatgctcctgtattcatgatgcagcttctttgctccacaggtacatcgtctcccatccatcgtgattcattccgaagattatgacccaattcatgagctactatggaagcaaatttctccacagtgatttttccaaacacattaatcccgcctgcgtggctccttgaacacactgttcccacgatctcattcctgcaggttccacccaaacctttctttagtactagctttgcactgtcatgtctccgacgtgtgataagcaacttttcccagccaactgcatcgaagttccccagcacatcaccagcacccccaactatgttgatcaggtttccattggtccaaatctccagtccaatctagcacaattcgaatatttaacataatatacatactatccaagtagtttgccagtggtatcatctcttctctcacacgcagtctgactttcttcccatcatgtcatacctttccttgtctacgacaatgaacagctccacataccgggtctgctggcaagacagctcttcttcttcgaagtagctgagtcatgctgggaggctcttcctcttcatcctttgcagtttctttctctatatccttcgtctggaaactccacatctcagaggctctttgtacacatcatccattcgataaatgatgtgccccacgcgtccgcgacgcgtggtcgacatatcccggaacttccgaccgtaccagg

SEQ ID NO: 449828 - DNA, 1014 bp, Homo Sapiens
actagtccacggttggctgggagggcagcccagatatccacaatcttgcgcagggtggagtagcgttcctccagctctggcccctcggtctgcatgagcaggtttgctaactccctgcttaggtcctgaatcatgtcgttccgtccttgcttctcaggctggcctgtgtttgggaccataccacgatcctggagctccccattgggcccaaggaggtactggtacttcttctgccaccggcggcacaccatggcttcaccaaccggctactggctggtgtgcagcagagccaaaatgtgtcggcatggcaggtggtaccattgttgaaaggaacagctgcagctacagccatctttgctaacctggtgagagtcctctagcagctgaacgtccactgaagagccagccatgtccaccagtggctggagttctgtaccacctcccactcattgtggcacagcttgtaggctagttcagagccactctggttgcaaggtgtccagcatgccaacctgcgagggcggcacttgtgactgcatgctgtacctgtacctgctgtgcgtctggcttggtctcttctgcagggaggctggtaaggctctctccacagattccaaaagccttcttggacttcagtggcatgcttgccggccgagctctctttaatttgggaggaggtgtgggcaagttcttcaagcctttggtattaaagaagtctatgtaatccacaaagcagaggatgcagtccagcagcgactgctgttcccgaaagaggcttgacaccttgctggtgacaatgtctaggctgtccatgtaggtgttacacgcaagcaggcccttcctaacatgcatgtaccacagcagttcacaggtgaaccagtgggcctgcaggaagttgaagagatcctcatccagtacggcctgggacatctggcagagatttttcaggctggcttcagaagtgcgacagcgtgggtcgacgatatcccgatactccggaccgtaccagcgctg

SEQ ID NO: 449829 - DNA, 1024 bp, Homo Sapiens
  misc_feature (545)..(598): n is a, c, g, or t
ggaaaattccaaaatgtttcattcttcccgcccctgtgtcatccccatggcaagacccaggcccccccagagatgttgggggttttccctccttcagaatggcggggcccccccgcaggccaggagctgacctcatccatggggtttcagaccttaagggcaggaagtttttgctcagaacccaaactggaagtgatgacaagcctagcccccatccctggcccaagaccttcccctgcaggacagacctgatgggcgagtggtggggcagggcatgcctcaatgggagtcacaggtcttttgttcggtggcagcatcctcggcagaggctaggctgtcttcctggcctgtcaccctttctcggatcagctcggcaatggccctctgagtccgcttttttagtttctccagcttgttggccacatctctctagaggtcccagtcaggcttccgaggagcgaggttggccaggtcctgggaagggaggagacacacatcagggtggaggggccaccccaggacaagggggagggcaggctcgagannnnnnnnnnnnnnnnnnnnnnnnnnnnnnnnnnnnnnnnnnnnnnnnnnnnnnctggtgggaagggaataaagaagtgacgagaaggaatgcggggcagagggagagcaagtggcgaagagaaacaggactcacagaagcagcgaggatgccagggtggtccaggcactcaccacgtcctcgatgacgggctcggcgcttggcggcctccagctgctccttcaccttctcctccagtgcaaccggtttggcctggggcaccctcctcattcttcaggtcctcatcctccgggacatagttccgcagcgtaagttccctgtgcttctcgccttcttcctcctcttctttgagatgcttggtctttggctccccatcttccttgtccttgcgcccggttttctcccgtagggccttcagccgttcctttcgccgcaacgcctcttcctctagccggcccacaccagccgtaatcgccacca

SEQ ID NO: 449830 - DNA, 809 bp, Homo Sapiens
gtttttgggaaaagttcaaaaatatatacatatattcagacatgtgtacatcccacatgtgcagacacaggcacgcccagagttgttgctgtttctgcctccattcagaatggcaggggccacccagcagacaaggagctgaccgtcatccatgggggtttcagacttgatgggcagggagtctctgctcagaagccaaactggaggtgatggcaagcctagcccccatccctgcccaagaccatcccctgcaggacaggcctgatgggcgagtggtggggcagggcatgcctcagtcggagtcacaggtcttttgttcggtggcagcatccactgcagaggctaggctgtcttcctggcctttcagcctttcacggatcagctcggcaatggccctctgagtccgcttttttagtttctccagcttcttggccacatctctcttgaggtcccagtcaggcttccgaggagcgaggttggccaggtccacctcctcgatgacgggctcgggcttggcggcctccagctgctccttcaccttctcctccactgcaaccggtttggcctggggcaccctcctcttcttcaggtcctcatcctccgggacatagttccgcagcctaagttccctgtgcttctcgccttcttcctcctcttctctgagatgcttggtctttggctccccatcttccttgtccttgcgcccggttttctcccgtagggccttcagccgttcctttcgccgcaacgcctcttcctctagccggcccacaccagccgtagtcgcctccatcttgcccgcgtacccc

SEQ ID NO: 449831 - DNA, 351 bp, Homo Sapiens; identical to SEQ ID NO: 245693

SEQ ID NO: 449832 - DNA, 1090 bp, Homo Sapiens
  misc_feature (248)..(257): n is a, c, g, or t
  misc_feature (390)..(390): n is a, c, g, or t
ggaggggggtgtttcccattgggcggggtggtttgaaaactccgccccaaagagtcaccccccccgggcctccaaaaagggggggataaccaccggggccctccccccccgcctttgttttgttttccacccacccccaccaccacacaacccattggcggaaattcctttccctttgttttccccccaaattttttttccctccattccggagggggtttgttcccccccctgccaggaacgaccannnnnnnnnncaagatccccaccctgtccaggtcatcagaccaaagggtcatttggcttttggctccctgtccaagtctcagcagcccttggcacagctggctgtctcctctccttcttgaaacacaaaggtgcattgccctnctgtaaccctcctggtttcagcctacctcgagatcactcctaagctctttttgctacatccccttctcccccagatgtagatgtccccaaggctctggccagggtcgcttctctgtccccacccccctgctagccactcacccaatcctgtggctttatgttgacgtttccaaacttacgtttttgaccacggcctctctttcccccaaactccagtctcacatatccaactggctatttgataccacaactcggatttctcgaaggcagatctatcttgacacatccaaaagagaagccttggttcctccctcccaagccactttcctgatcccagtctcctcgttcctggtaacgatcctcatcggtgcccatcagagatgtgcgtgcccaattcagagagttcttctcttcctggttcctggtccttccctcctctatgacatccagttcaccaccaatgcaggctctagcctcccaaatcccatgccttcttccacttcctccatcccactaactccaccttggtccaggcctccagcaaccagaggaagtcaacagcccgctacctccttccttcccctttgactcctgaagtctacgtatgctcagcacagcaatgtaattctgccccacgcgtccgcccacgcgtcccgacgcgtggtcgacgatatcccgaaactccggaccgtacagcctg

SEQ ID NO: 449833 - DNA, 809 bp, Homo Sapiens
ggggcatttgaccgctcctccctccgcgttggaggcggaatagtgggttttgctgcaaccggtttattttccttctgttttcacccattctggcacaatctggcgccatcgtccttcttgtgaggccaagcctgaaaatgcgaagcagagaggcaggaccaaaattgaggcgaatccaggaacctgccaatgggtctccgggtgcggtctctgaaactggaggatatcgggaggaaaggctctccgatgcggagataatggggaagctcttggcatggttggctgtaggtatgtgataccggaggagcaggagtcaaataggatacgccgacttttaattcaaggaacccttttctgaaacactttgccacaatgaaggaaataaggatctagtttgaagcactaagaagaataagacatcagtttgaaaagaggctctatcagaacaacacgaattctgctaaaattgaagcaagaacaaacatcaaatatatgttgacacttgggtggaagaatggtgaactaattgatgctttatgaaaagttgatagggacagtgctccaaagaaatcagtttacaaatggataactcgttttaagaaggcataaggtaatgttgaagaagaagcccacagtggcagatcatccacatcagtttgtgagaaaaaagttagttcatggcgtaattgaagaaaaccaacaattaacagcagaaaacaacaggcaacaccatagacatctcagttggttcaccttacacaattttggactggaaaaagttcagccaactttatacctgataggttcca

SEQ ID NO: 449834 - DNA, 1065 bp, Homo Sapiens
tccaacccagtgtcaacatatatttgatgtttgttcttgcttcaattttagcagaattcgtgttgttctgatagagcctctgtttcaaactgatgtcttattcttcttagtgcttcaaactagatccttattatataaatcttcaacttcttgatcaaatgaatatgacaaatgatgttctctaagaaaaacacccttcaattttattccttccctgcatattttgagtaattatcttccaagacccatgtatcttttctcaacatctctgagagtaacaattccttattgtccttcattgtggcaaagtgttgtcagaaaagggttccttgaattaaaagtcggcgtatcctatttgactcctgctcctccggtatcacatacctacagccaaccatgccaagagcttccccattatctccgcatcggagagcctttcctcccgatatcctccagtttcagagaccgcacccggagacccattggcaggttcctggattcgcctcaattttggtcctgcctctctgcttcgcattttcaggcttggcctcacaagaaggacgatggcgccagattgtgccagaatgggtgaaaacagaaggaaaataaaccggttgcagcaaaacccactattccgcctccaacgcggagggaggagcggtcaaatgcacgtcttcaggctcaggcccttccgattggctgctgggacacaacgtggcctgtcattggctacggcaccggcgcagggccttcggagaggaagtgtggaagtcccgcgcctctaaagcccgcctttcgtgacaaataaaggtcgtagccgcagagtcaacgggcggagctaaagtggtcgtgattcatgctgtcgcgggaaccccgaaggtgtggccccacgtaacaagaagatgacccgaagttgctccgcagtgggctgcagcacccgtgacaccgtgctcagccgggagcgcggcctctccttccaccagtgcgtatgggagcagcctcgaagccttcgaactccctgcggggcccggcgggccgtggcgtggcgtggggcggggccccgct

SEQ ID NO: 449835 - DNA, 2092 bp, Homo Sapiens
  misc_feature (1948)..(2035): n is a, c, g, or t
ctcctggcggaagtggacaaggtggccagactgtcagatggcagccactgccccatcatcttgtgcggggacctaaattctgtcccttattcacctctctacaacttcatcagggatggagagctccatgtaccatgggatgccagcctggaaggtatctggacaggaagacttctcccatcagctttaccagaggaagctgcaggccccactgtggcccagctccctgggcatcactgattgctgtcagtatgtcacctcctgtcaccccaagagatcagagagacgcaagtatggccgagacttcctgctacgtttccgcttctgcagcatcgcttgtcagcgaccagtaggactggtccttatggaaggagtgacagatactaagccagagcgacctgcgggttgggctgagtctgtccttgaggaagatgcatcggagcttgagcctgccttctccaggactgtaggtaccatccagcactgcctccacctgacgtcagtatatacccacttcctgccccagcgtggccgcccagaggtcactacaatgccattgggtcttggaatgacagtagattacatcttcttctcagctgagtcctgtgagaatgggaacagaactgatcacaggctgtatcgagatggaactctcaagctcctgggtcgtctctcccttctctctgaagagatactctgggctgccaatggcttacccaagccccttctgctcttcagaccacctctgcctgctagccagcttcgggatggaagtcaccgccccatgacagggctcccaggggaagagagcttctcttccagaagagctcacgtggatcagagactgtgcgaaacatcccatgcatctagaaacttagatccaagaaacttacatcccgtcgcttccccctcctcgttccctttttcccacggtatagactttcatccaggtctggctgcgttctctgacctgtggtccttgccccaagcccagcctcttcctaatcctgtgccacagcactcagtggccctgggagaggcataacggggggctccacccttgccttccatgtctccagacgctacccccttgatttttaattaccagggttatgggagttcttgatttcattggttatttgctttcaggccgtattcttgatgtcccttctgacctgaccttttccctgccttcaggacattctgggcctagtcctcttgccaggcatgcatatgtgatacatgtctatcatgtatgtcgccctcttggcgcgtgagactcctgcatagatatgactgctccctgaccacttcacttttcaatgtcgcgtgctgccacgcctgaggcccgctcactaccttactcaagtacctatgcaacgagcacgcactacgcaggtgcatggcccacctctctccctttcaaacctcttgcgtcttcttcccgcccttctttccttgtccccaccagttgccgggctccggccgttccgggcgtttttgtcgaaataacatggggtgttcccaaaatctcctggccaacgcgacaaaaactttctacggggtgaacttgctgcctacccctcgttcctccaccactgcgagcccctcgcccgacccgccctgagacaaccccagaaaatcacttcccgcactttcagaactcctcgggcacgggtatatattctttttcccccatagcgggcggccacccgatacccactcattgcattttcccctacacgagatccctttatcccacctctaattcacaataccggctacacacttccccccctctacaacatgtttctcattccccgccataaccccccacctatttttatatcaccccccctgcccgaataatattatccttaaaccccattcccgccgtcgcctcctctacgccgagggttccccaattctcgcttgcctcttaccactnnnnnnnnnnnnnnnnnnnnnnnnnnnnnnnnnnnnnnnnnnnnnnnnnnnnnnnnnnnnnnnnnnnnnnnnnnnnnnnnnnnnnnnnttgccataatcaatacttataatcgcaaaacctccctttgaattcgataattacacc

SEQ ID NO: 449836 - DNA, 713 bp, Homo Sapiens
  misc_feature (615)..(615): n is a, c, g, or t
ggcccctggtgtgggctcagaggcacggctattgggggcagggcaggagatcgaaggcagctggatgtgatttccagcagccgaggacagtgggagggttctgtggccaaccagttacatgaatcccgcaccctcgcttcccagctcggtgaccctgacagagaacctgacagctccgagcctcagtttactcatctgcaaaatgggggtgacaatgtgccctcacagggttaaggggaaggcaaggtgacaaagcccccagtgggggagagtcagtgttcctcgcccttctgatcccagggagggtctggctgtccaaacccacagcctagcatgcctggcagggaggcccaatgtgccgctctcagctgccacatgccagaatcacgtggggaggctcccaccatctgcctgcccaggagctggattgtttgatgcagagagggctgggctactctgttcttataaagctcctcaatagatctgaaaatgcagcttggggaatttgtttagagtgtctgtccctccagatagaaaattcttggccttgcctgaaaggcaaagggggtcccccgattctcacccccttcctttccggaagggcttccaccgagnccagggccagcatgagacatcccaggctactcagatgtggggctccccacccccgacgcgtggtcgacgatatcccgaaattcccggaccggttacca

SEQ ID NO: 449837 - DNA, 1107 bp, Homo Sapiens
taaaccagcgtgggggtgtccccctgtcgtgcagaggttcgttgggaatatatggtcccatgagaccctgtgaggtttaccaggagggggccccccttccgaaatcagattccccggggcggcaaccaggggccggtcaaaggagttgggcggacatcccccgacagagggggagccctcctgttctggccctgtcatttgggtccagggtgcccgggccctcgggggccgctgtgcagcagccacggccgcagcatagagaaggcctgcacgttcagccatctgggtcgtctgtgaagccggtggccgctggagagcaccgtgaagaagtctgtggctaccgccccgtccacctcggtgacggggccccggctgccggggccctgggcgtggagaagaagccgccggagtgtgggagcccttgctggaggctggcgtagcgcagccagtcgaccagccgcttgctgagcagggtggcctggtcctcctggagggtgcccgggctgaggaccacgaccttggccatgacggggaggaggtgtctgaggctgggtccctcaggctgccggctctccagcgctcgtagcacgccctggcccacggctctgacctcctcgtttctgtcaccctgggccaagagaacggaggccaccaggctcagctgccggctgttctgcgtgtggtcccaggccaggctgaggctgtcagagggggacatctctcgcaggatggcggcgcaaagcacctggagctgctcggggcatgcaggcaggccgagggtggcctgcagcaggtctacgcatgtcttctccagcctccggctgtacttcgtggctgagatgatgaggaagagcctctgcagggagtcgagggtgtccggccccaagtcctccgcctgcagcagtttacagatccgggaacagaacttcttcagctcctcgtcctggatctccctggcctggtggagcaaactctccgctcctgccgagaacatcacgccgccgccaccagacgcgcacgaacctcggaaactccaggagctgcagcccaggagctccgcaccccggtcaacttccgatcccagggaatccggaccggtccagccgc

SEQ ID NO: 449838 - DNA, 788 bp, Homo Sapiens
gggtcccggcttctccctcgtccgccgtgaggccgtggtaccccttcgtgccgtttatcgcgggagcgcccctgttgccctggataccccgggaactcgcggaagccctcggtgccaatttccaagcggggccgtcttcgtcccctgttcacccatcagccccgggtttcccagggggtccggcaaggtccttggggctcctctggcaccctcggaccctggggaccctcatcgcctcggtagcctttaggtccgatagggccagcctcgcccgggtctccaggacaccaacggggccttctcttccctgatcaccctgcgggccagcttcaccagggttctcctgcttggtcccccgcgtgcctggggtcccccgtggtcctctctctccagggccaccccgctcccacgggggcaccgtcaggtcctgggttcccctcgtcgcccgcctctcctttctctccggggggcccaggcatctcccggctggccctcgtctccagatggtccacgagctccctggtctccccgcctccccgtcagctccaggctcgcccttttctcctttcagtccaaaggcgccggggtctcccttggggccagggggtccttgaatgtccgtcaaacccgggcgagcccttgcagcctggcaggcctgggtaccccatctccccattcacgccgtccatccccgtcgatgccacgcttgcccttctctcccttgtagcccttgggtctcatgcgatcgcgtggtcgacgatatcccgtaattccggaccgtacagccc

SEQ ID NO: 449839 - DNA, 808 bp, Homo Sapiens
aggtacaccccattctgggggatgcttggggaagacagtccacgccattgcagtaaaatcctgacctgcttgagaaagggatgtgggacggggtgcagtagctgtactggtccatgatgtgctgtgaagatttccttccgctctgagagggatggggaccctcgccacacgaactgcagccccccggcctcctgcatgctgccttcaggtcgtagtcgatccgggagccgaggtgggcattgaagcccgccagcgcaaatagggtgggcttctgtggcagaggcgccataacgggtcaaacgtgccaggagaactttggccggatcccaaatgtttcatagagaaacccgtgtccttctgtgagctggcaggatctggtcatcaaggtgcgtcacagcctcgtcatgcatgacctggcctccgatgacaaattccaggcgtccttcctccaggagctggcggacctggtatttctgctggtccgaggcgacgccatcccaccacagccggaaaaactcctgctccacagcgatgaaccggcgcctgctgtccgcgggccagctcttccaccactgaggtgtagacattggcggcgtacgcccagcatgctttcactgcacagtgtagacccagcccacgtccatgtggcttgtggggcaccacgaaggcccggatggggccggcaggactggacccctggcaggtcgcagcaacaggagcggtgccagcaacggctagccagcacagctgcccaatcctaccgacgcgtggttcgacgatatcccggaattccggaccagtaccagcc

SEQ ID NO: 449840 - DNA, 2097 bp, Homo Sapiens
  misc_feature (85)..(85): n is a, c, g, or t
  misc_feature (197)..(245): n is a, c, g, or t
gggcgggtggttctgccatggcccaaccccacagctggaaaaaacgggcgtggggcgattctgaaagcccctgtctgggtttctnctggggcagaaaagtgcccccagtcctttcaggcggttttgggagcaggggcctccaggagacacagggctgagacggggtgggagggaaagtgccaagggaggcccttgtnnnnnnnnnnnnnnnnnnnnnnnnnnnnnnnnnnnnnnnnnnnnnnnnntcttgactcatcttaacaaggctttggggcaattctgtgctatggaggccctgccagcccctcctagtagtccaatagggaggccaccgggaacaaggcacaggatggccacaagggggtgctgctggcccagggcttggcagctggggtggagggtaccctggagatccagccacccagaacagtccctttctgaagacaagccagcaacaaggcacctgcaggcagttctggggactggggagggggcgctggctgcctcaggtgtcccctcccaagggctgaggccccccgagtatggatccgagctccctggtctttggtgctttcttgaaatcctcctggtggtggcagaacccagtggggaagagaggggggtcttgccgtgaagtccaggcccgtctgtcccaggatggacgtgtggtgctggctcagtgctgcctccatggcctgtctgtccatccattctgcctctggctcagggctggctccaggcccccgtctccctgtgtgtcggcttgttctggggtgggtgtttgctctgtctcagagctccccttcaggcctgggccgcgccctaagcctcctgggggaagaagccgagcttggccagtgacatctccttccgcaacctcatgatctcccagaacatgggctctgcgtcctgccgcaccaggccttgctggatgtagcggatgtaggtgaagaagttgcacactgcggtgatcctggcccgggaagatggcgagatgtagtaatggcttttggagtccccgagccggattcggtggcggcaggtgcgggtcagcccgctcagggcacatgtgttggtgctgctacagtcaacctcggccaccttcactgtgggcagcgtctgcgaagccaccggctcaatggtgagcgtgttgtcctccacggcggcccgtaccagcaccgagagctcctgcatcgtgaagtccaggcaggggcccacgtcctcccggtacaccctttccaggaaggggcaggtcttgtccagggtgggggattccctccaggcctggaactctgcaaacagggttgtgtccccctccttgccctttctgtctggggtgagggtgtgtcccgcagcgggacacacggcgggggcagagggtgctgctggtgctcttgtggcgagagtggccctttcggggcccggccttggtggggctcagcagctgggggtgaagctcgcggttgggagaggctggtgtggacgtgatgaccagcgtcttcaaggctgtcacctctgcctgcagcatgtcgatcttgccccgagcctccttcagctgcttttctgatgccgcctgcttcatgttggcttctcgaaccatcttgtgagcttcctcaaacaggctggcccgtcagctcttccagctcctgttctagctgctcccgcaccttggacagccgctcacattcctcgtcctttagcttcagctccttctgcgctctgtgcagctcctccttcaggaactcggagcccttctctcggatctccatggaagagctgcgcaggcgcaacacgtccagctgggcggctgcggggccctcctggccttgggcctcctcccctgcagaggtctccaccagggctcctggggactccctgtggccttggcagcgggtccgtgctcttccaggggaccagggacacgctgcaaggggcggcgggaggacctggtctggctggggtggccgctccacatcccggcgcctcggggcgcccaggcgtccgttcccagcgccgccgcgtcctcccagcgccgcgtccccgcccgccgccgactccgccagggcacgagccgccccaccgcctgtcagcctgatc

SEQ ID NO: 449841 - DNA, 858 bp, Homo Sapiens
ttcatctgagtcacggcgactgtctccagctgaaacagcagcgtctatcgcaatctttccttaaaagagactcttgaggagatagccggagagatcctggccggcgaactccagcgtcttggccgctggcgggcaaggggcggcccctggtggaaaggctgcacgcgggtcaggccatagccagaatcaaccaccactccggtcaggaggccagaggcatacagggacatctgcagctggtcggccaggaggaccgatgggacatgcagcaactcaaacaggatctccagcatcttctttcggtccgcaggctccctcaagggtgtctccgtgatgatcacaggggggacctcttgctcccgtctgtggttctccaacacaaatgaccagaggtactgcacaccctcccagttgaggatgcggccccgctcgatggggtagctaaaggtgtcaggatggcaaatgtcgatgcccaggctcacacgcctacgggcatagctggggccagggttctccttgcacggtaggtagttcacgatgttcgggaagaccatctgaggctcattccagccggccgtgccagccttcaaaaagccagacccgtggtcaatgataacggttcttgcagccatggcggaggcagaggtgggtgggaccagaaatctgccctgtaagatgccacaaaagctgctctcagaaacagtgtctcacaagaggcacccactgcaaaacaacttgaaaggggtgctgtgtgagctgccgaactcagctgcacactgcaaacgcctgcacgagagcggctgcacgtggtgcgacgcgtggtcgacgatatcccgagaattccggaccgtaccagcc

SEQ ID NO: 449842 - DNA, 699 bp, Homo Sapiens
ccatggtgcatcatagcagatgccgtgactgcagggctcatgggcacagggatggctcgggtgggagtcagatgtgggggcaacggagccacggcgggcagaggcagcggaagccattttccccatccacacaggaacctccctcgccgcatgggctggaagcacactcattgatctccacgttacaaaggggccctgtgaagccaggttggcagacacagtcgtagcggttgatgccatcacggcagactccaaaggtgcaggggttgctggcacagtcgtcaatgttcacttcgcagttcacacctgtggtcccagaagggcagcggcagaggtacttgtccaccaggtctaggcatttgccgccatggcggcagggctggctgcggcattcgtccacctggctctcgcagcgtgtgcccgtgtagccaggagcacaggcacatgagaagctggcgatgccatccacgcagcgaccatggtggcatgggtcaggggagcagtcgtccacgttgcgatcacacagcgtgccctcaaagccctcggcacagcggcactcgtagccatcgggctggtccacgcatttggcgccattcctgcagggcgtgctggcgcattcgtccacgtccagctgacacgtggagccgctgaagccgacgcgtgggtcgacatatcccgaactccgggccgtaccagcct

SEQ ID NO: 449843 - DNA, 1274 bp, Homo Sapiens; identical to SEQ ID NO: 246343
  misc_feature (880)..(880): n is a, c, g, or t

SEQ ID NO: 449844 - DNA, 953 bp, Homo Sapiens
tggaatgagttgttggccttacagcgttgagaggtattatctactatctctacagttccgggttcctgtgtccttggttgcgccatgcttccacataagccagctcacatttttctcggccagtcatgttcgccacttgaccttgcccaccatgtaaattgcagcgaggatatgtcgtcgttcgctacttctcacagtcgatgttggagccagtgcgggtcggagcccggactcacggcagaagttcacaattgttgataatgaggcagtggccacagggctccatgctcaggatgtaagccaaaatctgcatttccccgtcaaactctcaagagcaccgacaatcaccaaatcctccagaaccaatgtccactggtctgggtgtttccggtctgagaacctctggtttgcgaatctctggtctgagcaccactggggtaaggttttctagggttggcttcagacaactttgctgcttgcctgttagttcgcagaaacgaagccagcatgtcctggcctgtgtcctctaagcaggagatgaacaaaggaagagcctgactccctcgagtctccagatctatgatcagctgcctggcctgatcccgccgagatccagagcctgcccgctggatgtcctcgatcatatggggcctgaacagctcgcggctcagcagggcgtccacagagctggtccacctgcagctcttccaccagccgcagccggcaccagccgcaggagcacgccgatccgcttcgtccatggcgagtagccaactaagactccaggccgcctcagtccgcttccgggcctcggccgcccagcacccagtccccaggacccgcacaccgcccacagggcctgcaccccgcgtcacggccccagggtcagtcttcagctccccaccgcctccggacgcaatcctataatccagggccggtaccagcctgccata

SEQ ID NO: 449845 - DNA, 1198 bp, Homo Sapiens
gttgttccattttggagcatttctaaattctgacttaatgtggcaccaccactgacatcagaattacatttggtccaattatcctggaagcgcttagaattttgcaatgcagactctgttgctgtctcatagcttttcagcagcttttccacttacaccataatttgacctgggatcagctgacctcggacggccagacaaattactcggtctccagtcatgctcgtggagcatatttcgataactgcgaggacttaggtgtccctgcatttgtcttactaggcctgttgtggatttcttggtgggattatcaggcacattttccatgggcacaggcatgtgggcattggttttccaaataccggacacatcgttactttgtgatatgctacctgtgtgagtagatgaggtatcccagggccttgagatcctcccgatgattttgagcagctgtgattttgctgtattgcctgacaatttctatctgttctaaaatacagttctgttaaattcatcagtctttgctgccagcttctcattccttgtagtcctttcaaagccacaactgaaatttctaagtgggctactgctctctgctactgaggagctacagtcattacttacatgaagatcaggatgagatcttagacagggtgatctgggatcaccatttcatattttggattactgggggtagagcaggttttctgaaaccacgaagtagaggggctcctttttgcacctatcccaatgtcacatgaccacatgctaagtccaacatcttccattacttggaggcttgcctatcctattttgacttctggtacccaaagaggaaaagatgataccatctttcgaagttttcccttcatttggatacaacatagacatctcttgttgtctcaaagggaagtgagggttgtaattccttttacttcgaccctcatggggcacccagctgttgtggtctaacctttccttccatctttcataggcttgttcagaatccgagctgggaaaatttcgagaggtgcttcttggaggaggaactggtggagtttcatttctttttaaatcgattgtatcaattccacattttttcgtagaattgctctggagcacattggtacagctcagattcttcctgtttttctgttattctttttctaaactgatggaaatcgaagaattccggacc

SEQ ID NO: 449846 - DNA, 722 bp, Homo Sapiens
ttctgtctggtatgggttcgttcctggtgctcggtggctcccggggggccgggggcctggatttctggggctgaggggcatgctggccgttcggcgaggtgggagcggatcttgcgtcgctgcttcacgtctgccgcacccatcgaagctgcacctccttgggctcgtgtcgggatggagaggctggacgacgagtacgaggccccgccgcccagggcccccggggctgcgcctgtcgctgaaatggagctcagctcaccgaggctgctgaagatgccgagctgctgcgatgggcgacttcttgcagggtccagcagtctgcccaggccaccaactggttccgtcccccagggaacgcgtgtccttgttcagctgctgcaggcgggagcatgagctcactgatcacagttggtttgtcgtcttcaggtccagggagcccccggctctccacggggtcccccacatagcattggacacttctctggatagaggtagtcgtagggcgggcaggcccaggcggcagatggccagcccggacagaggcaggcgtggtgctgtctgggccactgagctcgctgtccgaggactgcttcagcagcgggtccctgaaggtcaccggccccttccccagcggggacttgagcttgggcttgggaggcactggcgacgcgtgggcgacgcgtggtcgacgatatcccaataacgccgggaccagtaccagg

SEQ ID NO: 449847 - DNA, 1247 bp, Homo Sapiens
  misc_feature (438)..(458): n is a, c, g, or t
agttttccgggtaagcctggggatgcacctttggtcgctgctgcgtggtgatggggcacgcttggacgtcctgtagacctgggcgcgatggatgaggtggttctgtactgagataggcgcactagccgggcgtgggtcgccggatgagatgtgtgccggggtgcactggctgcagtgtgccggttccgcgatcctcggggcgtctgtgtctggctcgctggcggtgggccggcaattcggcttccccaggacaccctgttaagccaaccccacccgcccgccaaaagcccgcctacactccggacggcagcggggagaggctgttcttctccaggtgccagccctgctgctgaaagtgagctcgccgcggcccggggctcctggccccagctcaggactccctgcagagagcaggcagggataaaagctgagcggcgnnnnnnnnnnnnnnnnnnnnnaacacaggccgcacgaaggtccaaagccccaagcccccaagcccccggcctctggacggccaaaccccgaggcgcgggactggaaggacaggtaccaggctgcgggcgcgcggctgtggccatctctttccgccctgagtccgacgaaccccggctgtaatctgagtgcctagcggccctaagcagcccgggctccgggagggcgccagagatagcacagcgttagggcggggaagaaagggtgaatctcagaatcgataatccgcactggctgcccacgaccctgggcgccggcctggtcctcggcagctttctggcggctgcgcttgtgtgtgtaatgtgtcccgggaggaccggacacctcaatcccccggcccccaactcgggcgcctgtccgcgagcgccgggccagacgccgaagaggaaggtgaccgaacccgtagcagcttccgagagcgtacccgtttgcaaattgctgcaggaagagcgaggcgggccttgcgctttgttaatccggatacgggaagcactggggaagggaccgaggttaacttcgacctccgctggggcagatacgtaaaccttctcaaacctccgagttcaccttacagcgaacattaaatacccttgcgactacaatactcaacaaatcgaacactgacgtaaaatcttaagaataaacgaatctttgttctgatagagctcgttcaaaatggaaatacactccacacatcttcctctataaccgacgcgtgggtcgacgatatcccgggaacttccgaccgtcca

SEQ ID NO: 449848 - DNA, 787 bp, Homo Sapiens
actgggatttttatttttaccacccccaagcagacaggctcaggggaggagcagacatgcagcacagggtccgcttcgaagtttcccagccacagtgcttcagaaaactttcagaacaaaagccataccaacattccttactgctgcatctatcttctaagatgacagcagttggcagagttcgtccaccccagcctagttagcattcaacacatggctatgggagagcgcccctcatcagtgggctcctcccccagggccctgtactccaggctgctccacacccctctgcccacctcaggccattaaggttggggtgcacatggactgtttctcagcccttcccccagggggccagggaagacaaggaattgcttgtcagctgtgacatgcgaggggtggcagggaagggcagaagtaggaaaagcagcagcacagcaagcagcaggccacttcctgggcacagttactaaggcacagtgaccatggtgaggaggatcctcaggaccgggctggagctgcctgcagccacccggggacttgcgtctgtgcctctcggcctcccctccgtcaccacaaacccagaaatggggcaacctgcccagactgccagtgaccagatgggcactccatggcatctcagcaagtctccttcctgccccaggcccctgtgggcagcaagaaagccagagctatctgcgcacgcgtggtcgacgatatcccggaaattccggaccgtaccagcctgctaaaataaccgcgtgttctatatctacctcattcttgg

SEQ ID NO: 449849 - DNA, 596 bp, Homo Sapiens
  misc_feature (63)..(78): n is a, c, g, or t
  misc_feature (451)..(451): n is a, c, g, or t
  misc_feature (505)..(505): n is a, c, g, or t
  misc_feature (525)..(525): n is a, c, g, or t
  misc_feature (527)..(535): n is a, c, g, or t
  misc_feature (565)..(565): n is a, c, g, or t
  misc_feature (584)..(584): n is a, c, g, or t
aaggctggtacggtcggaattaccgggatatgtcgaccacgcgtcgatcggagcggcgcccgnnnnnnnnnnnnnnnnagcaatatttatatataatttatttacattcacgcccgataaaacccctatgtgccccggcggccgggcaaggtgtgtacataaggccaagagtaagtgcgtgaatgcacttaagacaaagtcaggacacgagcttcacatgacaggccccgcgtggggacccagccagccctggggacgggcacgccacgccacacacacactcaccactgtacagcctgggactcccattgcatattcacaggccccgcgggcagggcacctcaaggctgggggaggggcaggggcagggaggagccgtggggtgtccctggggtaggttgagagggcagcatttgagaggcaaattttgcaccaacacttgggcgttagncgttgagcagcttaggttttccggcattgagatgttttttggtttgggggtttntttcgttaccccggaggggngnnnnnnnnnaagattagcacacgaggctttcgttgcacnttcttctttttgttggtcnttttccttaata

SEQ ID NO: 449850 - DNA, 792 bp, Homo Sapiens
aaaatgaatgtgcatattcgatgtcaagcgaacgtgggccctaactgtgggtgtaaatgcggtggaacttgccaagaccctggcagggatgggtctccaacccggaaatatttctccaacctcgaaactcgtttccagatcgaccctaagacgacagggaaaggagagcagcaaagaaggaaatgggattggggttaattcttccaaccgacttggtatcgacaactttgagttcatccgagtgttggggaaggggagttttgggaaggtgatgcttgcaagagtaaaagaaacaggagacctctatgctgtgaaggtgctgaagaaggacgtgattctgcaggatgatgatgtggaatgcaccatgaccgagaaccaggatcctgtctctggcccgcaatcaccccttcctcactcagttgttctgctgctttcagacccccgatcgtctgtctcctgtgatggcagttcgtcgaatgggcggtgcacttgatgttccacattcagaagtctcgtcgtttttgatgaagcacgagctcgcttctatgctgccgaaatcatttccggctctcatgttcctccatgataaccggactcatctatagagatctgaaactggacaatgtcctgtttggaccacggagggtcactgtacactggcagacttcggaatgtgcaaggaggggatctgcacatggtgtccccacgcgcacattctgtggcacgccagactatatcgctccacacatcctccaggaacttgctgtacgggcctgccagtacactggtgcg

SEQ ID NO: 449851 - DNA, 815 bp, Homo Sapiens
ctcttcttccaatgttatgatttcaggatcatcatcataaataccaaatcatacgataatagttccagctttcatactggccaccttgattatcctcaagtcccttttctccatatttgtcatactttttccgtagatcttcatctttgagtacttcatatgctctatttatttttaaaaaattgccatgtgcatttgggttattcgggtttttatcaggatgtaacttcaatgccaatttcttgaaagcttgtcttatttctctactgcttgcagttttggacactccaagtaaactgtaaaaatcctgatctgtgcccactaaaatggccatatacactatcagaaaacagagaatgatccttttcaagtctctgatatagtcatctttatttaaccagactcccattctctttcttatgcaagttctgatttaagtgaacattaagattcactgctggttccagttgatgtaatatgcaaatttgagaacttctgtctacattacttcaagggtgaatcaagcatcacaaatctgtccccaaaaatattaatctgtgaatggtcttcagctcatttctaatacttccttttcattccacaaaaatataccttgccatcgcggggtcgcttcctgtagctactcccccatcctcaaatcctggcggcggaccccgcctggccgagcccaagcaccgcgtgcaggagagaagcacacgcactctccgacggcccagccgcggcgcacgggattggtgaggtgcagccacaccggcgactaccagcgcgcggccggtaccggtaggttccccgct

SEQ ID NO: 449852 - DNA, 1027 bp, Homo Sapiens
  misc_feature (76)..(136): n is a, c, g, or t
  misc_feature (381)..(409): n is a, c, g, or t
aggaaagggcccggaaagaagggaagtattggaggaagggccaaaggggttaagaggttgggggagggagagaagnnnnnnnnnnnnnnnnnnnnnnnnnnnnnnnnnnnnnnnnnnnnnnnnnnnnnnnnnnnnnttggggcaacctcctaaaattaggctaagaggaggtgctgaggtagacattaactagaacattgatgaattaaaaacactattctgtaatacagagcaatccgactggcacttgtgctatcacgacataagacaagccacaaaaacaaacaaataacaaaacgaaacataatacccaaaccaaaaggcttagttttgcttggtccagcagggcagcagggccctcagtgctataatttacatacnnnnnnnnnnnnnnnnnnnnnnnnnnnnncgggttggatgtcatggtgcaccaccacggcttcttaaccttacgaagatcatgcataacactatgtgaacaaatcctatgatacacaccaggaggctggtaccctgtctgcgaagttggatgccaagggcccggggaggccgcagctgctggctaaccggcctgcagggcctgcacccctctttctccccacccttttcccctgacccaacctctctggtttgtcctgcacccctctcctggccatctctgcctttttcctctccccatctgtcccaccgcgtagggtgagtctcgcctttcatcctcccactgaaatatccaggtaagtgccaccattacagccaagccggcagaggctccaggaaggaggaggtatgatgggagggggaaagatgaccacaggatgggcctaggaaaagtgaatgaacagagtctcatcttctgcttttctgtctcacatcctggtgcgcccccagttttcaccctagctcggcttgccgggaagcaggcccagaaactacctgaccctgccagccgtcatggacagagtcgaaaggctgccccacctctcgacgcgtggtcgacgatatcccgtactccggaccggtacagcct

SEQ ID NO: 449853 - DNA, 757 bp, Homo Sapiens
  misc_feature (677)..(677): n is a, c, g, or t
catcaaatattaaaacattgtttaatatggaaactgagctttttcactctaagaatctgcctccaaattcaagctgaagatttggatacactgtgattctgaataaacagtcaagaaacacgacatcaaacaataaaagcttttagccaaatgtacagtatccagtaaaaaaaggcatattgagctttaactgcatcaatcatttgctgttctctacatttgctctgcattataacaagatgaaaaataaatacttggttaatctgcttatttcatgcaaatttgtcatgtaaaggacctctcttatttgttctctatttaatatgttatcaatcaacatataatcaaataggtaggtgaccgttataccttgccttcagctgaatttagaattctctctatatttttaagatgtcttaagcatactcagaaatgaaggactcaagaaaatgttcagtcttttatttaaaaactataaacagtcaccaaagtaaataaagccattctataacataaactgttaggtctatattttttactgcacatcctaaggacacagcagaaaatggtggttgggaggccttccacatttttgggatgctaatagaccaggcaataggcagttataaatgggatacatttcacgctgggggaaaaaagacaatttaaggaagtgnagcagtttctgagcaaggaatgtggtacagtatcgacgcgtggtcgacgatatcccgtaattccagaccgtaccagcctg

SEQ ID NO: 449854 - DNA, 513 bp, Homo Sapiens
  misc_feature (362)..(439): n is a, c, g, or t
aataggttatgtgattaggagtagggttagggtggttatagtagtgtggccaagagggaaagaggaagcggtggatctggacagccacaatagcaagcaatatgggcaggggtgcatgggctcactggggccctatccaaggtaaatggaaataatggagatgaagaaaggaggaagaggaggaagtagcgggactggactgtagagttttgtaggaactcacttcatggaacagaaagagaaaagaggaaacaaggctggagtggaaggatgccagaggaagaaaaggaaatgtgcagaagaaaaggaaatgtgcaaaagaaagtgcttccatgggaagactaccaggttagttagaatgnnnnnnnnnnnnnnnnnnnnnnnnnnnnnnnnnnnnnnnnnnnnnnnnnnnnnnnnnnnnnnnnnnnnnnnnnnnnnnggtataaaggggcattctggcccttcaaaacaatgatcttcaacagtaaatgcaagcacaagaaggctccaggc

SEQ ID NO: 449855 - DNA, 500 bp, Homo Sapiens
cttttccacagggatgtgctcactactttgacctgctttcaccgctcaaacttttccatcctctctctatcccaccttctcttcaagaactgttttctgttgctcctccagatcttccactgattgaggccagtgccttcccttaggctgccttttccttcccctcttccactccagccttgtttcctcttttctctttctgttccatgaagtgagttcctacaaaactctacagccagtcccgccacttcctcctcttcctcctttcttcatctccattatttccatttaccttggatagggtcccagtgagcccatgcacccctgcccatcacacctgatcttgcagtactcattgaagctatctggatccaccatttcttctttccctcttggccacactacctttactatacccttgtttagaatttaagaaccttcttcttacacaggtcctgccatccatcctgttctgcctttcctcctctctgccctgaaag

SEQ ID NO: 449856 - DNA, 692 bp, Homo Sapiens
tgtttatcgatgccacgctttctgccctccatccttccctggaggcccctccaccctgtctgtcttctgtaggtgactcccctgtcggcgctgcctcattgtcccacttccacattctttcttgaagcctttccccttgcatccacatttcttctctttgcttccttggccaagggaaggtacctgcctgtctgtggccaatatttctctcagccacccagggcctgtcgcttcatctgactcagtcatctcttctccatagggatgtgctcactactttgacctgctttcaccgctcaaacttttccatcctctctctatcccaccttctcttcaagaactgttttctgttgctcctccagatcttccactgattcaggctagcgccttcccttaggctgccttttccgttcccttcttccactcaagccttttctcctctgtctgttctttctgttccatcaagaaggcgtcccacaaaactccacagccagtcccgccacttccttctcttcctcatttcctcacctcctttatttccatttacctcagatgcagccccagtgagccgatgcacaccctgccatcgtgcctgcccatctgctccccatcaagcccatctggatccatttcctcttagccacactaccctatgcaagaatgacgtctgggtaccagctcgattctatcat

SEQ ID NO: 449857 - DNA, 1576 bp, Homo Sapiens
tccgtgaccttagctgtaaactttaagcacgactgcttttcctccaaggactgtttttcttcaaatgactggcaccagccagcataagcatgacttaaagcagttgttgaatcttttgctcaccaaatacagagcaattgggttaatgcaggaattcagtgaagccatgttgataccaatatagtccaataccaacagaaagctcaaaagttcacatctattgggatcattctgattataaagagtgagcttcagaatcctgctgaggtgaaggggaagccagcagagggcaaagacaaggaccaggcaaaagacggttttggccacttcccgtctctgctttaggtgatcatttaaagcaatctgcatgccacttttctttcttcaacattttcccaggtcattagtgtataaaacaaatgccagtgatggccaatggcaagcagaaatagaaactgaacagccaccaatcttttgctgtcttgtaaaactgcatgaaagctgtcttctgaacgggatgaagcaagcagattcgcagataacttcctttgtagtccatcgtaattatatcaaaacctatggcttcagggacagccagaaccacagagaccacccaaatcaaaacaatttctactgctgtccattttggaaccccaattcctttaattctactccaagaagcaacagctcgatatctgtcaatactcagagcacatagactcagcacagtgattcccacggaggctttctgtatgaaaggcaccagcttacacatctcagctccaaatggccagtcctctgccagcagcttgtagacattgatagggatgtcaatgacgatgtgcagcaggtctcccagagccaagctggcgatcaagatattgggaccgtttcgcatgcacttgttcttgtagataattctcagaagtgtggagttcccgatgatccccagcacgaacacaaggcaggacacaaccgtgttgatgtatttgaaagtctccttgatctcgatgggtccttggcacgggggaggggagatggtgcgtggcggagatcctgccgtcctgtctcctttaggcacctccgcaggtgccaacgaccgcgccagactggcgttggaacccttgggccataaggtcttagtgggtggcgtcattatctctgcggtttgcaaaagcggagtggccctgtcaggcgggaagcctctctcctctccccagatccgcgacaggccgcaggcaagaaccagcgcaaccagggcgcgtccgcacagacttggaggcggctgcatgctgctacctgctccagaaggcgtccggtggccgctccgcagtttcagagcctagagacaagcagaggaaggaagacaggacacttgggtcagctgcccgagccaagtcgctgcaaacgctaataccgcccgcagcctcttcgccagtatccacgctcaaaagtaactcaagtttgcgcgccagtgggaaacttggcgctcatgactcgccagcgcgggtcgaaactccttcctgatcgacgcgtgggtcgacgatagtcccgatacttccggaccgtaccagcg

SEQ ID NO: 449858 - DNA, 526 bp, Homo Sapiens
  misc_feature (462)..(462): n is a, c, g, or t
  misc_feature (472)..(472): n is a, c, g, or t
  misc_feature (478)..(478): n is a, c, g, or t
  misc_feature (483)..(483): n is a, c, g, or t
  misc_feature (501)..(501): n is a, c, g, or t
gggttccaacgccagtctggccgagtgcgttggcacctgcggaggtctgagagaggagacaggacggcaggatctccgccacgcaccatctcccctcccccgtgccaaggacccatcgagatcaaggagactttcaaatacatcaacacggttgtgtcctgccttgtgttcgtgctggggatcatcgggaactccacacttctgagaattatctacaagaacaagtgcatgcgaaacggtcccaatatcttgatcgccagcttggcttctgggagacctgctgcacatcgtcattgacatccctatcaatgtctacaagctgctgggcagagggactgggccatttgggagcttgaggtgtgttaagctgggtgccttttcatacagaaagccttccgtgggggaattcactgtggcttgagtcttattgtggttcttgagtattttgacagatttccgagngtttgccttnttgggnttggntttaaggggtttgggggnttcccaattggggcagccgttggga

SEQ ID NO: 449859 - DNA, 904 bp, Homo Sapiens
  misc_feature (165)..(165): n is a, c, g, or t
  misc_feature (182)..(207): n is a, c, g, or t
  misc_feature (210)..(210): n is a, c, g, or t
  misc_feature (215)..(587): n is a, c, g, or t
aatttggggtggagggaaattcccaaaagcccatttaggttcatgggccccagggattcttcctaaggaaaaacaggctaatgacccaatgtttcactttaacttacctgggcccgcggcggccaaaacgaatggttctaggaaagcttcttcgaggggccgagngcggccgaccatgtttnnnnnnnnnnnnnnnnnnnnnnnnnnggntaaannnnnnnnnnnnnnnnnnnnnnnnnnnnnnnnnnnnnnnnnnnnnnnnnnnnnnnnnnnnnnnnnnnnnnnnnnnnnnnnnnnnnnnnnnnnnnnnnnnnnnnnnnnnnnnnnnnnnnnnnnnnnnnnnnnnnnnnnnnnnnnnnnnnnnnnnnnnnnnnnnnnnnnnnnnnnnnnnnnnnnnnnnnnnnnnnnnnnnnnnnnnnnnnnnnnnnnnnnnnnnnnnnnnnnnnnnnnnnnnnnnnnnnnnnnnnnnnnnnnnnnnnnnnnnnnnnnnnnnnnnnnnnnnnnnnnnnnnnnnnnnnnnnnnnnnnnnnnnnnnnnnnnnnnnnnnnnnnnnnnnnnnnnnnnnnnnnnnnnnnnnnnnnnnnnnntctttcctcctgtcttgtaaactaggcaaggtggggggaggagggcagcaggagtagtagtggtctccttcttactgtgggactggcccctttggtttagggtatcaccaaaggcagtgtctaggccagcccagtgtctctgcccagcaaacctccatctgctgtgcactcacagccaggccatgctggtgtttggtacaggttgggtgcatgaaggatgaaggttttggcctgtctggggcttttgcctgcctttcttcctttctttcggacgcgtgggtcgacgatatcccggaacttccggaccggtaccagcc

SEQ ID NO: 449860 - DNA, 570 bp, Homo Sapiens
agttttccacaaaggctgttagttttgttttgttttttcctttattgatgggatttaaagtgcatataactgaaggcaaagtccaaggcctagagaaagatatgaggcccgagagagaggctcagagattctagaggcggctgaagaatacccacctaaaaaggccacttgagccacgcaggctgtgccatcctcgttgggctcgtagccccgactgcacttcttgttggtccggcacctgtagcttccataggtgttgacacatacgggcttgtctcgagggcacacgaatgggaactggatgcattcattggtgtccatgcaatggccattttcctgctgggagaatccttggccacactccagtggggctgggtcctgaagtgtgtcctcatcccgggggtaggaggatctccagcactgagttcatctccccgctggccacgttccggttcaccattttgccatttggccacgtcacctccacactgctggcttcatccttccccaggccaaagtgtgccacgggctccatctcacacacggtagcctgagcccgtggcatcgata

SEQ ID NO: 449861 - DNA, 727 bp, Homo Sapiens
ggagcccataaaataaaattgagaatggcatttcggggaaggtctacatatatgtatttagtaagttaattcgtaagttcactttacatagtaaattaatatttaccagtttttaattgctttcagtgtacttgactcaaattaagaaaccctacaatgtaaggcaagtgtatcacaagctccatggccaaaatttggcttatataagaggaccagtgggcctgtggaacatttaatagaatcttttccataatgctattagttctactgaattaaaaaatattattttgagctgttattatcttaagaagtatagcccatggatatttgatttggcacccatgttaaagaaaaataactatttttaaaagggaacgagcgtatcttacagttatctcactcattcttttcaaaattcagtgcaacatatttggctagcttaaatttaagtgcgtgaccgttcaagattttgtttcaactaatttggagtggttgtaaaaaattattcatattttactttctacatttcaattttaatgttaatttgtattctctttctccaaaaaggaaaacaagatcaaccttatttgtgtatggttcagcctatcggtcttataattattctacaataaaatgaatttatgtaactaactattttcatgctaacttccaaaaatatcctgcgacgcgtggtcgacgatatcccgacattccggaccgtacagcc

SEQ ID NO: 449862 - DNA, 1214 bp, Homo Sapiens
  misc_feature (1077)..(1077): n is a, c, g, or t
cggggacgcagcgggctgaactgctggtgtcagagcccggcgagcgctggcagttccgcggcggggatgctgaggagcgctgggtccgggagcagccctggcccctgcggacttccgaggccgtgaaaacccctgcgctgcggcccttcccaggcccccgaggccgtttcgccgttcccgaagcccgactgggggaagagtccagcaccaaagcggccgttctcggattccggagcgttctggagccccgagagacgccccggggttctagaagctccccggcggcgcccagtcccggcttcattcgggcgtccctccgaaacccactcgggtgcacgggtcgtcggcgagccgcgaccgggtcctggcgcgcaccatgatcgtggcggactccgagtgccgcgcagagctcaaggactacctgcggttcgccccgggcggcgtcggcgactcgggccccggagaggagcagagggagagccgggctcggcgaggccctcgagggcccagcgccttcatccccgtggaggaggtccttcgggagggggctgagagcctcgagcagcacctggggctggaggcactgatgtcctctgggcgagtagacaacctggcagtggtgatgggcctgcaccctgactactttaccagcttctggcgcctgcactacctgctgctgcacacggatggtcccttggccagctcctggcgccactacattgccatcatggctgccgcccgccatcagtggtcttacctggtagggttccacatggcccgagtttctgcagactggtggtggaccctgagtgggtgcttggggccttccccgggcccccccgagaaactgggccaaaactcccctgggcattaccaagtttgcttgggtgcattcgggcccgcggtttcctttccccggggcccccatttcacgcgcccttggttggagaatcccgcgggccacatccccttgggcctcctcggggggatgcatccttctccgtgcctccttggtccctggttcccccctccatgggggctgcccctccttgttattaattaccggtgaattgttantcctgccccgccccgttccccgtttttgcgcgcccgcctcttcggtatccccgcgccccgtcggttcgcgagccgccccctgtcacgtattgccccgtctcgctatcagcccacctcatttatctgcgcccccgttg

SEQ ID NO: 449863 - DNA, 854 bp, Homo Sapiens
cttgggctgcacaagtgagggaaacagggatcaacgtgttccggaaactctgacaatgagagctggatccgacgacttgagttattgctgctccctccccctctcccaagagatgctactggtccccccatatccattctctgtcgtcctccatcaataagataactcccaaggtgagccaggcacatgcggccccgctgaagactacacttcccaggttccctagcagctgcttgtggccatgtgactgagtcccagccaatgagaggccagcagaggtgagcctgccaattctggctcatgcctttagcaaaaagtgggtgtgccctcttgtctatttctgcttcccccaggcttggatgcacacaggagggtgggcgctggagcagccgctgtgtacccagaattggaaggtgcgtatgaagaaacgcagagctgccctaccagctctgggccatctcaatctagactaattagaaacaagcttccatcttgcttaaaccactgtatttcatggtctcctaatcacagcagctcagaatcaactccaacaaagacatccccaccaaggcaagctatgaggaacaggaagcatacaactggccttattgtccctttttgggcccaagacagcctcatggcccctttctggcccccagccagcctgccccaaggaagggcacaacagtgactgcacctgggacagtggacagctgggactgggtgtcagaaggaaggggtgatggggagggagagacggatccgtgcagaggactcatgtcagtcttctcctcctagaactagtccgacgcctgggtcgacgatatcccgtaactccgggccgtaccagccct

SEQ ID NO: 449864 - DNA, 1015 bp, Homo Sapiens
tcggagggccgggtttccacggggtttctcccctcccccgcaggtagcttgtttgaagttcggctgagggccccaagatcgccccagggcagcccagggtttccttcaagcggccgatccccaagccttggaggcccagcaggtgttgggatcgtgactccaacgcctggatcttggccagcagcttcaggtcttccacctcatattcgggcaccgtcaggaagccgtactcatcatacttactgatggggctcagctcgatgctgtcagatgaggcctccccagcttcccactgcagtgcctcctggacaagctgcctcagcagctctgagcactcgctggcttcgtcccccagggcctcctgcagccttctcagaccggccaggtacttgctttccacctggcagtttctggcttggaggtaggcgcacttcgtcagaagggccttctccttctcagccacctttctccagatctttgtgacctggtggatctcggagttgaggaagcagttctgggtccggtaagcttccatgtcatccttcaggtgctctatcttcccctgctggctcaggaagtccctgttggcagcgtcggggcgcaaaggagaggtcgatgctgtccaagggattggcatcctgagcggtccgcgagtaatacagctgacatttcctttcgtcgtagaagaaccagcgggatttccagccccggatgggccctttgccgccgaacttacttaaatacccacagagtttcttggggaccgcctccagggaccgggcgcagtcccccgattcttcctccggaggcggcacctgtggatccctggcagactcttcggacccaggggcagaggagctggactccggggcgttctccccagcgccctccatcgctgccagccggagactgcggagggacgaggggtccgcgggaccaccagggacaaatctcggagactcggcgggcagcttcccaaaggcctcgtgccggattcgccacccaggcctcgcta

SEQ ID NO: 449865 - DNA, 974 bp, Homo Sapiens
tcagggaaaggggacttcctagaaccttgaggcaacaaaaaaggagttcaaccccttggccacagggggagtctggcagtgtctccggcaaccaccagaaaatgaactttgtgttcctccacatcctgaagagtcgaggtttgcatttctctacagagctagggctgaatgaagcagagacttctgccacccccactagctggcccagtcctggaagcggaagcagtcacttgcgatcttccacactgtgttgctgggtgaggcctgggcggtcaggatgaagttctggttgaagtcccgttgtttgttcccctcaaacttcactgatccacagatgacaacaaggaccgtggtctggcttggtgtggcttcatcatgaacaggctggcagtctaccacgctgatttggaactcgctggaaggcaacatttcaaaaaactcactcaaggattcttgtcctgaaacagcattgccattccagaccagggtggctgtgcccatgtacaggcgggacagcaaacgccgccgcttatccatggtggtgtagtagacattgacaaactcctcagcagctctgcaggcctgatccacataggtcttgaaatccacagatgccatctctggttctatggaaggagggctccaccagggtatttcctctgccttggggaaccaggggctgcgcggcgacgtccagggtcagcgcgggccgcggcccccacggtcgggacgccccccgcgtgggacgcagttccactgaggggccggccgcggaggtcacaaggtgggcccaccgaagcctctggtaggggcacgggaagagccgcctttctctcctcctcctccttcttggaggcttactctgggtcaccggggccccagagccgggggactttccggcgcagttccgcggcttcccgcgcgcggccagccggtctccacgcagacgcgcctcgttttgaacgccacccagc

SEQ ID NO: 449866 - DNA, 1335 bp, Homo Sapiens
  misc_feature (938)..(938): n is a, c, g, or t
aaggtagcgaggcctgggtggcgaattcggcacgagggagaaagctggagccagaagccccagctctggcattgcccgtgacccctcagaaagaatggctgcacatggacactgtcgagctggagaagctccactggacccaggacttgccccctgtccggcggcagcagacacaggagaggatgcaggctcgattcagtcttcagggagaactactggcccctgacgtggacctgcccacccacctgggtctgcaccaccatggagaggaggcagagagagcggggtattccctacaggagctgttccacctgacccgcagccaggtttcccagcagagagcactggcactgcatgtgttagcccaggtcatcagcagggcccaggctggtgagtttggggaccagctagcaggcagtgtcttaagcctccttttggatgctggtttcctcttcctactgcgcttctccttggatgacagagtggatggggtcattgcaaccgccatccgtgctcttcgggctctgctggtggctcctggagatgaggagctcctcgacagcaccttctcttggtaccatggagctttgacgttccctctgatgcccagccaggaggacaaggaggatgaggacgaggatgaagaatgcccagcgggaaaagcaaaaaggaaaagccctgaagaagaaagccggcctccacctgacctggcccgacatgatgtcatcaaggggctcctggctaccagcctgctgcctcggctgcgctacgtgctggaggtgacatacccaggacctgcggtggtccttgacatcctggctgtgctcatccgcctggcccggcattccctggaatcagccacaggggtcctggagtgcccctcggctgatagagactatagttcgagagttcttgccccaccagtttggtctccctgntgggggcagggcctacccctagtctataccaagtaccctggtgctactgccatggaaactacttcgtgtcctggcctcagctgggaggaatattgctgcccggctgttgagcagctttgatctccggagccgcctgtgccgcatcatagctgaggctccccaagaactggccttgcccccagaggaagctgagatgctgagcaccgaggcctccgtctgtgggctgtggctgcctcctatggacagggcggttacctttacagggagctctacccagtgctgatgcgggccttgcaggtggtgccgcggggagctcagaacccacgcactaaaccctgtcatgcagggatagctcactgtcatcttctcaccagttaacctggagccggagaacccg

SEQ ID NO: 449867 - DNA, 1260 bp, Homo Sapiens
  misc_feature (94)..(102): n is a, c, g, or t
  misc_feature (353)..(388): n is a, c, g, or t
cttcccaggtgggggccccgggccccggaaggtagttttcatggcacgtagccccagggttccttggtaatagactaagggggtaggcccttgnnnnnnnnngggaggcccaatgggggggccaagaactctggaaactatattttttaccaaccgaagggcactcccagacccctggtggggaattccagggaaatgccgggccaggcggattgagcacagccaggatgtcaaggcccaccgcaggtcctggggatgtcccctccagcccgaggcgcagcgaaggcagcaggctggtagccaggagcccccttgatgacatcatgtcgggccaggtcaggtggaggccggcnnnnnnnnnnnnnnnnnnnnnnnnnnnnnnnnnnnncgctgggcattcttcatcctggtcttcatcctccttgtcctcctggctgggcatcagagggaacgtcaaagctccatggtaccaagagaaggtgctgtcgaggagctcctcatctccaggagccaccagcagagcccgaagagcacggatggcggttgcaatgaccccatccactctgtcatccaaggagaagtgcagtaggaagaggaaaccagcatccaaaaggaggcttaagacactgcttgctatgctggtcccctggactcaccagcctgggcccgatgacgtgaatgacactgggctaacacatgcagtcgccagtgctctctgcctgggaaacctggttgcgggatcacggtggaacagctcctgatacgaggaataccccgctctctctgcctcctctccatggtggtgcagtacccagttgggtggtcaggtccacgtcagggtccagtagttctccctgaagacgtgaatcgagccatgcatccatgtcctggtgtcatgctgcacgccgagacagtggaggcaagtcactgggtccagtggagcttctccagctcgacagtgtccatgtgcagccattctttctgaggggtcacgggcaatgccagagctggggcttctgagctccagcttgtctcatcttacctgggctcactggcaaaacgctgacatgaggggttcctcactttgctgacattagcagagggtcctcctggcctctgcatcctcagaggctgtctctcctgtttgctcttgcgtgtggctgtgagatctcaagaaagcaaccaagctccggggtcaagctggtccagcaaccgctcgctgttcctaccgacgcgctgggtcgacatatcccagtaact

SEQ ID NO: 449868 - DNA, 1108 bp, Homo Sapiens
  misc_feature (865)..(898): n is a, c, g, or t
tgtttgcaggtgatgatcctctccaccagctggttgtaactcagtttcccaactgcacgcacagcctcaggactctgtggatcaacaagccagccatggtacagaggtatgcctagcgggtcaaagtcactgcactcgggtgtatactcataatcagagacgcctgtgaatcgcacattgacatccagacctgtggccagtttaggcagcactgtcattgcatcatccacattctgctgaaaattaagctgaagtccctctgacttctcctggggcttgatgggacaggaggcagtttccaagatgggccatgagctcatccgatgtgatcacttccttctgcggggggagcttcaccttccactgaagaaagaggatgttcatgatggcaaggagagggcaaggccgttagtgctctgggtgatgatgggtgtctgttctcctttccaagggatccacttgacacagtagaaatctggctcaggctgtcgggtcctgggggactgaggaagctccttaaagaagggggtgctgttccaagattgagaaggagggttcagccgtggcaatgagatgggggagataggtgcaatgaagggggctgccagtgccagctgccttccagctgtcaacgcctgagcttatacaggtttacacagctttataagcgacggtccaggctggttgtggccacttccggactcacgcccagtactgggggcactggaggagggtgaaggcaggcagggacacagccaaggtgctccaggtcgctcagagagtcttcaggattcctgagtcgccgagtctatggcatgcgctccgggccctgactacaagctggttttcaaaggaagtttgtggnnnnnnnnnnnnnnnnnnnnnnnnnnnnnnnnnnatcaggacgaagaaaaattaggcaaggacaagctccctggaggaggaggggcctgcccagcgctggtggatttccatcaggactttctgacccggtcagcagctttgtgatcagcagagagggagcgagaaacaggagagaaaaacacagaccctttccgacgcgtggtcgacgatatcccgtaattccggaccggtaccagaccccgtt

SEQ ID NO: 449869 - DNA, 1354 bp, Homo Sapiens
  misc_feature (1100)..(1133): n is a, c, g, or t
ctgggtgatgatgggtgtctgttctcctttccaagggatccacttgacacagtagaaatctggctcaggctgtcgggtcctgggggactgaggaagctcctggggcatggagcatgcccttattgtctctacttcagtgcggtgtcccaagggttggccccggtggagctgagctagcttcaggcagaggggactcaaggttgtccccacactggctaggcagcaaagcttggtctgctggctcccgttctctagcctccccatcagcatctcttgcatctgtgtcctgagggtgctcatctgggcctgccagaacctcatggttttcagggatgactgcttctgcagtcccggccttaccaggggctggatcctcaggctgatggtattccatggtcaaaagggactcggctgagggggcactgaaggtgtttactaacctcagggagcttgcttaaggcaggcttgggatgcaaaagagtgacctgtccaataagaagggaaatcagtgggctggaaagcaaactaaccccagaaaagtcttggaaaaggaatgtagtgtagaaggctggctagtgtttgtgcagtaactcctggctatgggcagtatatgtgtaaacagaagggccccgtgctgagctctttccacctctaacttgctgtgaccagatgagaccaagaggtcgtggggcttccagacttgggagggaagactggtgggattgaacacatgggtggagtcagcttcccttaaagaagggggtgctgttccaagattgagaaggagggttcagccgtggcaatgagatgggggagataggtgcaatgaagggggctgccagtgccagctgccttccagctgtcaacgcctgagcttatacaggtttacacagctttataagcgacggtccaggctgggttgtggccacttccggactcacgcccagtactgggggcactggaggagggtgaaggcaggcagggacacagccaaggtgctccaggtcgctcagagagtcttcaggattcctgagtcgccgagtctatggcatgcgctccgggccctgactacaagctggttttcaaaggaagtttgtggnnnnnnnnnnnnnnnnnnnnnnnnnnnnnnnnnnatcaggacagaagaaaaattaggcaaggacaagctccctggaggaggaggggcctgcccagcgctggtggatttccatcaggactttctgacccggtcagcagacatttgtttaccgaacgactgatccctcagaaaacaatccttccctcggttgctagggacattgcggagttgcgggactacgtttcccacgtcgccgcacgccacgcccccttggcc

SEQ ID NO: 449870 - DNA, 585 bp, Homo Sapiens
  misc_feature (446)..(479): n is a, c, g, or t
catggtcaaaagggactcggctgaggggcactgaaggtgtttactaactcaagggacttgcctaagccaggcttgggatgcaaaagagtgaccttaaagaagggggtgctgttccaagattgagaaggagggttcagccgtggcaatgagatgggggagataggtgcaatgaggggggctgccagtgccagctgccttccagctgtcaacgcctgagcttatacaggtttacacagctttataagcgacggtccaggctgggttgtggcccacttccggactcacgccccagtactgggggcactggaggagggtgaaggcaggcagggacacagccaaggtgctcccaggtcgctcagagagtcttcaggattcctgagtcgccgagtctatggcatgcgctccgggccctgactacaagctggttttcaaaggaagtttgtggnnnnnnnnnnnnnnnnnnnnnnnnnnnnnnnnnnatcaggacgaagaaaaattaggcaaggacaagctccctggaggaggaggggcctgcccagcgctggtggatttccatcaggactttctgacccggtcagcagcttt

SEQ ID NO: 449871 - DNA, 723 bp, Homo Sapiens
tccgggctgagtgagcctgactctcggactttgaaaagaaagttcaagaatgagggtggtgattcagggactccaaagtcaggccatgtggtatagtggaaatgtaagatctctcgagtttcttgggttgtaaggttttcccattctagctgtcgcactgtataatatgacttgatatcttcagagatcaatgttaatttcaaatttgtgtcttcaaagatcatctctttttcttctttttgtggccagtattgtgcgcattttaacgaacctttctccatcactctgttgagcatgacgacacccctgcttttctgctcccacaccatctcccaaaagtgaccgcatgtgttaggcaaagggccctgggtaagaatgtaactcctttgggcttcttccatttttatcaaactagcgttgatatagtcattatcttcttgatgtagtttaatccgactatggtcaaagggactgacgtctctgtacctatttcggtttttgttcttaggaagcttggccactctacatgggaagtctggagagtgctccgtcgaactgggatcctctgagtcaatggccgcccagctcccggacttgtcgatctgctcgaactccttttccatctccatgacgggccagggcggctgctgcgcctccttctcggcccactgcgccgtctgccgctctaggccgcgtcgcgctcttagccccgaggcccgctgc

SEQ ID NO: 449872 - DNA, 1289 bp, Homo Sapiens
  misc_feature (227)..(227): n is a, c, g, or t
  misc_feature (1258)..(1258): n is a, c, g, or t
  misc_feature (1260)..(1260): n is a, c, g, or t
cgctctgggggggagagaggctctcactttggaaccagaaaggtacgcgcgccccccgggaaaaggggtttcccccccgccggtaatcgggattttgtgggccccccgggtctggctccccccatccccgggggtatgggaagaaacgcgcgcgcctttgttgtcgggcgcggttttgggtattaagcgccccgccttccaggaagaccttcgccgccatgtggggnacccggccgcgttttctagggttatccccccgggagaggaggggggcatttcccttcgtggggcccatacagccaagaaaggcccggggtatcacccccgggcccggaaggtttccccaggccccgccccgaggaacatggccctgggcgggtgccgccaacaacgcggacgccgtgcgtcccgggcatagaggtgacccctggattgtagggggtattgaagaggaaaggtctcaagaactgaggggtggtgatttcagggggctgccgaagccagggccatgggggtattgggggaaatgtaaggttctctggaggtttcttggggttgtaaggtttttccggttgttagcgtcggcgctgtataatatggctggatgtcttcagggatccaatgttaatttcgaattggtgtgttcaaagatccatgtctttttgttcttttggtggccagtattgtgcggcattttaacgagcctttgtccatcactctgttgagcatgacgacacgcctgcttttctgctcccgcgccatctcccaaaagtgaccgcatgtgttaggcaaagggccctgggtaggaatgtaagtcctttgggcttcttccatttttatcaagctagcgttgatatagtcattatcttcttgatgtagtttaatccgactatggtcaaagggactgacgtctctgtatctatttcggtttttgtttcttaggaagcttggccactctacatgggaagtcactggcttcatgtcggatatcctggtaaatggccgcccagctcccgggcttgtcgatctgctcgaactccttttccatctccatgacgggccagggcggctgctgcgcctccttctcggcccactgcgccgtctgccgctctaggccgcgtcgcgctcttagccccgaggcgcgctgcaatccccgacccctgcagctgccgccgccctagccgctgctgcttgttcttgtgaaccggcagccggaaccccgctttttgaagaattccggcccgtaccaccggggggngngcgggggccggcccggggacggagagggg

SEQ ID NO: 449873 - DNA, 607 bp, Homo Sapiens
tcggtaccccgtacaaggccccgtggagaagacactcttggacacagtgaccctgtcctctggcaccttggcccagtcacccgtggcccgccagcccttcatggggaagctgatgtcagtggctccgctggctgggagcttatggatgctgagaaccaggttgtctgtcacctggtatgcatccctcaggtccttcatgcggaagccgatgacgtccacaaagtcctccaccagccggaacagctccttggcgttggggcccgccagctgggcctcctcccacttgtcccgattctcctctgccaacaggttgctaaggatctggacaaagttctgtacgtccccaggggtggggctgtagtacgctctccggaaaatctctgtcatgttcctcaggaccatcgatggtggacagcaggtccccactgtagctggtcccgtcctgagagatctccaccagtgtctggatgacctccgagagcccctccccaggcagccctcgctgagccttggccaggtgctcccgggtcatcatctggatgtacctgtagtcaatggaaaacagcggatgtaaggtggaaaggctccagtaggcgatgccttctcg

SEQ ID NO: 449874 - DNA, 894 bp, Homo Sapiens
  misc_feature (354)..(354): n is a, c, g, or t
agctggggtgtttttttgcagtcaagaccattctttccaacctctgggttcttgcaagttgccctcaccttgtgtgtggagatgcattccaagaatgaagcctcatcttgctactgagtgtggggttcagggaagctctttaggccacctggtgaaggtgcatggggaggatggagcttctcctcagctcctctgagcagccacctatgtgatctttaaatccaaccccaatgggagaaaagggcgagaacagtctgtgccctgggactcctatcaggaagcttgacaggcagctgggcatcagtgcagctgatatcgtttgaggagggagacagatgcttggaacctgggtgncctgggctatggagattgaccaagcaagatcaggagctcctgatagcaggcgtctttgagcctagctggggtagaggcactgcccatctcttctccaccttctctccacagaatgtttgcagagctgggcagttgaggaaaggacagcccctggttggtgcctccaaaggaaggtggacttttttggtggagacgtttctgccctgggcaccctcctgcccccgattcatacctatggcttcttgagaaggctcacagctgtggtcttaacgtagactgcagaaagatggcatgcggcccctggcatttcgccaagggttttatagcaagtctccttcctccatagggacagcagcaccagccctgtggggcatggagtggaagcccagaagggcttctgcaagctgcacagaatcggggtaagaagacgaagagtaggcaccgggagaggcttccttatgttacagctgggacacgaacagttctgtgaatgcaaacacctcctgagtttcgcaattgagacacatgattcggagaaac

SEQ ID NO: 449875 - DNA, 925 bp, Homo Sapiens
  misc_feature (763)..(771): n is a, c, g, or t
gttttcgtactcttgacctctaagtatcgtccactctagctgctcgatgtgcctgggcttaccaggtgggagcttctgttgccccgtccgcaatggctgcttcttgaaccaccatgggttgatttgccagtttccttgcctactttgctgttccttgtcccctctggcaatgtcacatggattgactacctctggggcgatgtgtataagcccaatcccgaatgtctgcgggtatttcacacacctagtttcatttctgccacgtcaaatccagctgaacaacagaacatatttttcctccaaagatctacacaccgccctcctcggagcagacatttgctctttcccctcccactagatcttggatttgggcaaacctcggtaaacactgggcctcttgcaagcctcaggatgaaaactgtagggaatggagagggacctccccgccctccacttgacacagcttctgtttacgcatcaggataaaccgagataatggggataaattgtttaggaaaatatatctgtaacgtcctaaccattttcattcattcgttttattgtgacatttattacaggaacttccgggtcaattttcctttcgcacagacaccaatgtgcccaccccttgccacgcccccttcctcccacggctgggtggcctggctggtgggcgctcataattacctctggaaacgagtccgtgcatggctgagacttcccagcctatgacctggcccggccatttttctttatgcgttgnnnnnnnnncctgctaggttttgcctgcacagcttgtaggatcttgttcattggatgctgccactgaaaaactgatcaaaagccatatgctgctcatgtttcctaatactctccggacgcgtgggtcgacgatatcccaaaaccgtccggaccagtaccagcc

SEQ ID NO: 449876 - DNA, 701 bp, Homo Sapiens
gtcccttacacatcccaggatcgtcatggcaaactgtgaagacagccaggttcattgccggagactgccccaggtcaaaatgaggttggccatgccctacaaccacagggtacaggtccagacgtcacaaccaggcaacttggaaaccccttgactgtgcactgggggagatgtcggcccctctctgtcatacccttacagggacatcccgggctctcgtactgaggttatgaaaagtctgttgcattgggggctgtcggcccctctctgctgtcccctacagggacacccgggctctcgtactgaggttatgaaaagtctgcgcattggggggctgtcgcccctctctgctgtcccctacagggatatcccgggctctcgtactgaggttatgaaaagtctgtgcagttggggggctgtcggcccctctctgctgtcccctacagggacacctgggctctcgtactgaggttatgaaaagtctgcgcagttggggggctgtcggcccctctctgctgtcccctacagggatacccccgggctctcgtattgaggttatgaaaagtctgtgcacttggggggctgtcggcccctctctgctatcccctacagggacacccctaggagctttccttgcgttaaacatggaagggctctatagaaaaacggattcattgcctgcaagtatcgagagggggctc

SEQ ID NO: 449877 - DNA, 521 bp, Homo Sapiens
ggtccccgccgttccagttgcggttgctgttcacgtgaccctggcctgtgcagccaggagtggggcacttcagcacgttctcatgcatggctaagatctctggggggatcctatccttgtggggacagccagaaaggctgcggtggtgagggtacaacccggtaacgtggccagtgccatcacagcctggtgttggacacttgatctcacgcttctcagctcttgaaggatctgttcagccttgagggcgatggcctgctccaggaggcccaggtttccccgggtcatcatgtcctgcatctccgactcgtcagtgactgttgacttccgggagtgggtgtcctcgtccttgtcatcatccgagcggacctccacaataacagagtactcaggcttgggactgggtgattctgggccccggagctcaggggccttctgggcagaggtgttgagaggtgtcctcctgaaagatcacatcaggaccaccctccatcctcctcccgacgccggtccgacgatat

SEQ ID NO: 449878 - DNA, 614 bp, Homo Sapiens
  misc_feature (492)..(540): n is a, c, g, or t
agcagatacgaatcgagccggtaccagacgtcattttgcatacgtggatcaaggggcaacaatacccaccctaccaactctgacattcctaaatcccaaagtggtttaaactgtatactgtccccttaatttcaatcttgttaaacagagtaatacttccttctcatttgggctctgctaattttgttggagcccacattaaacacatagtaacctatgtccaacccccacacttgcaaattttacattgttaattgtttgctttcaaaatcctgaccttcagtgattgccaacactgccttccatatcagttggggttgctttaccatcaccctctataaggtttcttctttttctgttttcctattcaatgaagtagttaccatgacaggtaaagtgttgttaccccactcgcttgtcgtctaggatttaacttctattccctaaaatgctcctacactcagccatgataccgaacataccactgacttnnnnnnnnnnnnnnnnnnnnnnnnnnnnnnnnnnnnnnnnnnnnnnnnnccctgtgttagttacttgttatgacgatcggagtctcctatctatctacctcgcagcgcctgggttccgctata

SEQ ID NO: 449879 - DNA, 304 bp, Homo Sapiens
  misc_feature (283)..(283): n is a, c, g, or t
ccatccacaacaccggcaccagccagttgcacccatgacactgtgcaccattggaaaaaaaggtccctttgctctgtcacagtgtttagaccagactgtactaaagatggtctaagactaaacacacaagttaaaaatcccagataagctttatttgaatgtttcacaaacaagttgcacatttctctgtaactacatagtaaagcaaatgttagtttacagctcagaaactgtaagcaattcacgcagtgggggcccggacggcgtggtcgacgatatccantactccggggcgtacagcctg

SEQ ID NO: 449880 - DNA, 770 bp, Homo Sapiens
  misc_feature (746)..(746): n is a, c, g, or t
caggggttcgggaatcagactttgcttgtgtgaagcccatgagttgagcccggtgtctgaagcgatgtttgtggaaggctcgtggcgattttcacaaggagtgtcttcgttgggcgtcccgtccctccggctcgggagtggctgaagctgggcggcgtttgcgcatggggcggaagggcgtgaggctgttgtggcgggtatgttgccgtcaatggtggagggccattggcccggccttccccagcctcttccggcagcgggtacttcatctcttcatagatggcctcactctcttcagagtccgagtcggcgcccgctggagggttcgggcccccacccccaagagggggcccagccaggcctcctccacttcgtcctcctcccctaaagacgtcccccaccatctcaatgtacacaggctcttcctgggcacccacatcagggtccccagctactcgggaccccctagtgaggcgctgaagaggcaggttcccccctcgaggagaggggcctggggggcaggactcatcgaaggagacagagagctgggtgttagggcttcgcctgggcttctgcggaggaaccttccggctggactctcggccctctggggttggcttctgtgagcctgctttcttgctggggggcagtctctgccccagacccaggccccaccatgctcgagcttggtggaggcccgaacgcgtggtccgacgcgtgggcgacggcctggtcgacatatccantaccgtcgggccgtaccagcctgg

SEQ ID NO: 449881 - DNA, 748 bp, Homo Sapiens
tggccagccacacccattcgccctggaagagccaaggccacggagacagctccggctcacccctagtgaatctccagtccctcccagaactgcctggagtcgccgcactgtgccagaaaccgcaaaaggagacaccacgggcggggtggggccgactgctgtccccagactctggacacagtctggcccgcccagcggagcatcagtcacagccagccgagtccctgggcccagcagcccattgcaacggccggccgcgtctccagcacccgcggtccgggaactgggaggggtctctccgcgcctcaccagcagcggcccgactcgcggtccgagcccaggccccagcgaggtgccaagcagtgcccaacctagcgccgggggccagccgcaccgcccgcgcccgcacccaggccccggagcccagtgccaggagccgcagcagcgcagcggctaaccagtagctgcgcggcccgggaccctgctcttcggtgcccgcgtccggccccatccagggctgcacaccagcagcgccaggcccatgccagggcatctccccgtgcaggcctcagggccagcaccaggcccagctccgccgccggccacgggcccccgggtggcagcagcactgccaacgggggtgtctcggtcggaaagggcatccagaccacgcaagacagccagcgccatggtacagacaccaacgaggagcctaaggagcaccgacgcctggtcgacatagccccta

SEQ ID NO: 449882 - DNA, 1024 bp, Homo Sapiens
gcatttccttcctccaaggatggcagctgccactgtctgggcacgtgggcgccggctcgtccgtgcagtgtggtggaacgacgcacagccgtcctggtccctgcacgggggtggcggccacacaccggagtctcagccgggcacgccgggccaggcctccctcctgctgtgtgcaggtctcaggctgagtagggcagtggtgggacaaggccccaccgtccctgccagcagctgccccagcctggccctgcccaggccctcctggttgtggacaagggaagggccggccgctgacccaggcatccctcacgggcatctagggacatggaggaccaggctgcaggccctgtgagagctcagccagggggggcttggccaggtgggaggctggagccagcacgaggcctggagcagaaggggctgcatacaggaagctcccgtctgtcccctcgtccttccgtccacccccacgctggatggtcctttgccgcggctgtctgatgccgtatcctgtgctgtgcctgggctgctggcatggggtggcccccattacgtgggcctctgatgggggccccagtggggctgggccacagccaggcgccctgggccctcctgaattgacagggtgtgcagcaggacccagggcctcgaggctcttgccccgggctccacggcctcctggagggtttacctggggggagcagagcccagcacctgatgctccactgccccctggctgaccagtggccctgtaccttgtgacctccaggtctcggtccatcagcggtgcctcctcaggcctttccaccagcccactcacgcagtcccccgggctgaccacctcaaacctcacccagggcgccagacagcctcgccaacaccaccggggagagagcagagaagcaccaaggcagaaccacgggcacgccacgccgcccacagaacacgcaacgcaccgaagccagcaccaccgccgaccgagggaacggccgagcacaccacacaccgagccgaccgacacgaa

SEQ ID NO: 449883 - DNA, 755 bp, Homo Sapiens
cccccattcgttaaaaaagtgattttaaaatttaaatttgatacttaacagatagaaagctatgtgattggcaacgagctgcagtaggcagtcccttcaggcctctccctcgatggaggagggcggcgcatgatgggtgtagcctagctggcgggccctaaatctgtctgagcagccgccccttcctccctcttcagctccgcggtgacagcagggcacgcagggcagaagagggcttgcacttccagagcagcaggaggggaggggacccattcaaatcacgaagtcgtcctggtccgcagggctgaaggcggctgctctcagaacgtccagggagttcaccaagatcagagtcccagtgaggtgcttccagcgcttggtgatggggtttttcatcttgtccaggcccaggtgcagctcctggatgacatcccggtagctgtccccgatctgatggctccaggtgagtaagaagtcatacgcaggcttccacatggcctcgctgtccacaaccccgttcctgtcccggtggggagactcgtaggcgtccatctgctgcttggagaccttggccagcttctcagccagctcccgccagcgctgggccacctctacagccgtggtcaggagcacaagtcctggatgagtctgaccaccaggcctggcagtccatcttcagtagggccatcacaagctccttctggaaggaccgacgcgtggtcgacgatatcccgggacttccgaccgtaccagcc

SEQ ID NO: 449884 - DNA, 810 bp, Homo Sapiens
  misc_feature (63)..(83): n is a, c, g, or t
  misc_feature (85)..(90): n is a, c, g, or t
  misc_feature (92)..(94): n is a, c, g, or t
  misc_feature (96)..(287): n is a, c, g, or t
tttttttcgtaggggtggccccgcccgcgccgcaaagagaaaagtttgttaaaaatttttttnnnnnnnnnnnnnnnnnnnnngnnnnnnannntnnnnnnnnnnnnnnnnnnnnnnnnnnnnnnnnnnnnnnnnnnnnnnnnnnnnnnnnnnnnnnnnnnnnnnnnnnnnnnnnnnnnnnnnnnnnnnnnnnnnnnnnnnnnnnnnnnnnnnnnnnnnnnnnnnnnnnnnnnnnnnnnnnnnnnnnnnnnnnnnnnnnnnnnnnnnnnnnnnnnnnnnnnnnnnnntcttcgtaggagtcttttattttttggtgtcttaaatgtcaatgatcacaaaaacttccgggttctcttcattatagacctgcattgctgaatatgttattgctttgacttctgttccctgagggtgcttggacaatgaaaattcttctccccacccggggtatgaagaattcatcagcactgaacttataaagccattcatccaaaaagtgaaacagaagagactgtaagtcatctccttgggtttctacttctactgtttggaggggctccactgtcccagtatctgtcatgtaaccaaacatggccattgcacattgctcaaatgcttcctccagagtatctccccatgcgtgtaacctaaagaagtatattcatgctctgtgtgatccaaatcctcgtacttcctattgactggcggatacttggccttgatcgccttctgttcttcagtcaaattgtaatctctaacatcttcctcttcctgcgccatgactgcaggattagacactctacttccccc

SEQ ID NO: 449885 - DNA, 1036 bp, Homo Sapiens
gactctgaaatttttacccccctccggggttgtctttgcgccgaattgaatattttggcccagagggctggcgggggccgcgtaaaatattggaaatattccgggagctctccggcgcctggggagatcccccctcgttcggattaaggattcccaccgttaaaatggacccttgcgaggacacctcccccattcgtcgggagatttggtttccaggcaaacgcgttttcggcgttgggcccgccccgggggggtgtgtttttaatgtgggggggaggaaatttcccaaggcccccttacgtcccaatggcgccccaggatgttttccctttagggagaaccacggcttagggcgccactgttgccactttaccctaactgggggccccgcggcggccaaacggaatgggttttagaaaactttcttcgagggccggaggcgggccgacaagttttcctcctgcgctcgctcgctgtcggacgcaggagtcttttattttttggtgtcttaaatgtcaatgatcacaaaaacttccgggttctcttcattatagacctgcattgctgaatatgttattgctttgacttctgttccctgagggtgcttggacaatgaaaattcttctccccacccaattgatcgtaatttgaaatttctttgatcaatgctaagtactttcacttcccggggtatgaagaattcatcagcactgaacttataaagccattcatccaaaaagtgaaacagaagagactgtaagtcatctccttgggtttctacttctactgtttggaggggctccactgtcccagtatctgtcatgtaaccaaacatggccattgcacattgctcaaatgcttcctccagagtatctccccatgcgtgtaactggacatctgctgtatgatccaaatactcgtacttcctattgactggcggatacttggccttgatcgccttctgttcttcagtcaaattgtaatctctaacatcttcctcttcctgcgccatgactgcaggattagacactctccc

SEQ ID NO: 449886 - DNA, 1153 bp, Homo Sapiens
  misc_feature (652)..(662): n is a, c, g, or t
tggaaatctgaatgtcacccgcggtccggagcagataggatgggctgggaaggtacccgggaactgccgccggaattcgctggcagctgtgcgaggctcagattatttaaattttccacaaatttctacggattaattcaatggcagctcactttctccttttatgatcggatgggtccgaaagtgaggaaaaagacaatggtctacaaagaaagaggctgccaagtggagacagaaaagcagttatgagactgatgatagattccaatttgttatcgaaaggaaggaggagacctgaacagtacatccggagaatccagcaaagcatactacggcatgaacgtgcaagtggacagaattaaaacacatgccagaaacactaatggattctaaacaagatgcagtttcatttcctgagcctatacgtgatgtttttaactgttctccagttaatatgtctccatttccagaaatctaacaggagaatctctgactgcttaacagatcacctaagcttgcgatttgtgcaatcctttctagagtaagggctccccggctgctccccggccactgtgtacccaaagcagcggctgaaatagcccggagtccaacagctcagcgtcaagcagctcgtggtttgtacttacatcannnnnnnnnnncagagcaagagtgaaagtttattaaaaagcgttagaacagtaaggaacggcaaggagagaaaataacggaaagtacaacttggaagagggccaagcgggcgacttgagaaatcaagtgcctgtacttacatcattcttaaccctttcgctcctggagggggctcagcgggatcagggggcccctgaacttcggaacacgcaggacctgggtgtgagagaagagtcccaaagcttggcgtgagcaatgcactcgcggagggagagagcccggggcttgcggggggctcatcacccgctcgtagacaacgggcccccgcaatccctgcgggctccgccggtgtctcaccgtcaaaacggcaggtgcaaaaagcattggggagccgttgccagcgcgcggaggtaatgcgcttcctgtccatttatctcaggaaaccagtgcagccttcccttcgaaacaaaaattaacctctcattagccagcactcgttcca

SEQ ID NO: 449887 - DNA, 995 bp, Homo Sapiens
  misc_feature (911)..(947): n is a, c, g, or t
gaattcagcagggaatatgcacacctggaggggaaaacaccctaataaaaaacccgtaaaataaacccaaccattctttccaaggcacagcactggcattttcagattgacaagcagaacgagttttgtttctcgtgaaaccaaaatcatgagttccagagtctgttctttgaaacagcttttccactttcatctccctttctggggctcagggaacgatgctcgtggccttcctcagggccaggtagccggtgacgacgtcagagggcagcctccgaatgtaggaaaactcttcaatggtgctgaaccgcagtttgctctgggggtctgtgtagttggcaagcagacctgaaacatcagaatacttcttagctggcttaaaggatggaggagcatcaatactgaagtagttaggatcgttcagttgccacggcaatgccctttcagaagcgaggatttgtttcaggttcttccaggttctgttcttcttgccagctactgcgccaccgtggccagagtgcacaaagttgggatccttaaatggcaaaggtttggcagctttttccacaggtcctgtgctaaactcagagggcaccattttattctcactcatggcttccatgctgataccctgcgcaaagctggaagcggacgcttttttcttcttactggcgccatagcccccgccgctgctgccattgtgggaagggctggccggcctcttcttgctgttccggactattccgggagtggaagtggtggccacaattggaatttgcgccgccatcgcactccgagtcttcccctggtccccccacctttttcccagcgcgggccttggaacttcctttccgctgttacttccgtcttccgctctcgacgaattcgagctcggccgatttggcctgatnnnnnnnnnnnnnnnnnnnnnnnnnnnnnnnnnnnnncgccgccaccgcgtgagctccaggtcgccctatagtgagtgatcatcc

SEQ ID NO: 449888 - DNA, 1077 bp, Homo Sapiens
  misc_feature (146)..(146): n is a, c, g, or t
cgcgttctcctctagtagggattcctggacggggagaccgacgggtctgtgggcgcctccccgggacacacttcggcccgctctgcctgggctgggccactttacgttctgggtggggctcaggaactgcgtgcgggcgtaggggntgagcatgctgatgatgaccacctggccccactcctccacgtcgatcagcaggttacagagtttccggtagtttttgtgaatcaggtcgatgcgctccgggcagacctcctcaaaggccatcaccacacttgcccgccaccagcgtggtcttgtcagccagaagcttctcaatgacttctatcagctgatccttctggtcagagtccaaactgtagagtttagggatggcgtgggcagctgtttttccgcacatagggtgacatgtccgaggcggcttccttgatagctagcatcatgatgggcactatgatgggcacacggatgctagagaggacacggagggcactggcacgaatcagctggttgggatcctttaggccacgttggaaggtggagatggacagcagggccaggtcttgctgctcctcagcgtagcgtaccaggtacacatagacaagcttcttcacctctatgttcttacaggccacgttcttcaccaccgcgggaaacaggtctgaagcattctttcctcgggcaatcatcgccacaatcctcttcatggcctccagcttgagagaatccttgttggtgtccagcatctccttcaggtcatcatgccgcttgtagtcggaggagaagatgccgccgctcgcggggtcgtggccgtactcgggctccccggggccagcggagccgcccttgtcttcgctgtaggcgggggcggccgacatggggcggccagggagacttcgccgaggaggaggttgcggggccggaggccggcgtggagcggaggaagggaaggcgggccggtccggtccgggctggcgaaggcggcggcgcggcacggggttcagcagaggctgcagtgtgcagcggcggaggctcgacgcgtggtcgacgatatcccataagcgccgaccgtaccag

SEQ ID NO: 449889 - DNA, 741 bp, Homo Sapiens
  misc_feature (719)..(719): n is a, c, g, or t
tgatgcggcttttcgggattttgtttttgttgttaaaggtaggttggttcctgcatttccactctttgaccatagggacgcctggctacgaaagggtctgtaaattggcctgctggcctataggggccccagggtccttcgcgtgccgattgcaaggcagcaactccgaagtttctaagtcccatggtaagtggcagtggttgggctggactgtggctggaggatcaccgggcctcggttctcaagcaccatctgtctggctgcagctgggcccttcaggctgtggggccagtgttgcttgtccagctgcccgccatccgggtcagatcagtctctgggcaaggaagagctgctggcatctgcttactgtccttctcgcaggccttccgtccagccgttgggtgcctcctgagcgcctgccccggaagtcttcatcacacgcgtggccctccacatcagtccaggaggttggctgttgagcgcggcagcccccagcgactgatgcttcgacaagtgtttcctctttgacttccgtcattttggtcttctctgagaaggctcgggcaagttcaaacagtttcctccgggtggactttcccatgtgtttcagcttgtgcctgaataaggcatcttcagacagcagcggggttggcgtcgccagttcctggggcaggagaggagcagcccaagtcgtcgacgcgcggtcgacgatatcccantactcggggcgtaccagcctgg

SEQ ID NO: 449890 - DNA, 442 bp, Homo Sapiens
  misc_feature (424)..(424): n is a, c, g, or t
ttttttttaaagggaggttggttcctgcatttccactctttgaccataggaacgcctggctacaaaaggggctgtaattggctgctgcctataggggccccaggtccttcctccaattgcaaggcagcaactccgaagttctaagtcccatggaaagtggcagtggttgggctggactgtggctggaggatcaccgggcctcggttctcaagcaccatctgtctggctgcagctgggcccttcagctgggggccagtgttgctttccagctgcccccaccgggttcagatcatctctgggcaaggaagagctgctggcatctcttactgtccttctcgcaggccttcctccaccttgggtgcctcctggacgcctgccccggaagttttcatctgaaaagggagagggaagctgcctcatcctntaaccctgcagggcctcg

SEQ ID NO: 449891 - DNA, 1038 bp, Homo Sapiens
cagtggttaccccggttttgggatatgtcgaccgcgcgtcgggcaggcgctccttcatcgggatcctggacatggcggcttcgagatctttgatgtgaactcgtttgagcagctgtgcatcaattacaccaatgagaagctgcagcagctcttcaaccacaccatgttcatcctggagcaggaggagtaccagcgcgagggcatcgagtggaacttcatcgactttgggctggacctgcagccctgcatcgagctcattgagcgagcgaacaaccctccaggtgtgctggccctgctggacgaggaatgctggttccccaaagccacggacaagtctttcgtggagaagctgtgcacggagcagggcagccaccccaagttccagaagcccaagcagctcaaggacaagactgagttctccatcatccattatgccgggaaggtggactataatgcgagtgcctggctgaccaagaatatggacccgctgaatgacaacgtgacttccctgctcaatgcctcctccgacaagtttgtggccgacctgtggaaggacgtggaccgcatcgtgggcctggaccagatggccaagatgacggagagctcgctgcccagcgcctccaagaccaagaagggcatgttccgcacagtggggcagctgtaccaggcagcagctgggcaagctgatgaccacgctacgcaacaccacgcccaacttcgtgcgctgcatcatccccaaccacgagaagcaggtccggcaagctggcatgcgttcctggtgcctggagcagctgcggtgccctggggctgctgcgcagggcttcgcatctgccgccgggcttcccaaccggatcgctcttccaggagttcccgcctaccgctacgagattcctggccggtcgaaatggccttccccattggcttcctgcgcgggaagccgccctgcgttctctgttcacgcctggcacttgttcccgctttatccggataggccctagccaccccctccgactgccttcgtgcccctgcgccgacctc

SEQ ID NO: 449892 - DNA, 1328 bp, Homo Sapiens
gtgttcgctttatgtgggttttctcactggtttggttgtgtgtctgtgtgttggttgctgtttctctctaggtgttttccgttatggtgtctcgcctgcatcccctgttgttcttgcttcctgtgttgtgttggtgttgtcttcgctatgttctttatcctgtggttgtcttgaggctatgtcgtgggtgttgttggtgaaaaagaggcccatctcgatgtcacctggagacccaggcaaccccggagatgggttggagtctgggccataaagtcatgaggctgacaccacagcggaggagctggggctcttggggagggagggacctaggtgtgggaaacagtgcaacatcattagagctgagggaaggggctgctggagaggctgaagcactttgtggtggggagggaggcagtctggacttgtgtcctgccccccacttgctagccgtgtggccttggattaagcctcagtttccgcccccgtcacatgggggtaatagaccttcctcagtgtggtgagtgtgagatgagataatgcgcatgcctggccccagcgaaagctctgtcagtgtcagctgctctgctgggcacccagggagggtccagcccggacaggacaaggggaactcatccctggcagtgtcaggaaaaagatctggagttggggcttcgcagggtgtctgggggccatgaggaggcaggtgggagctgtggagaggctgcggggggctggagggctgctttttgagaaattctcctgggagccagtagggaggcagggccttgggtgcccagggctgtcccagggccagtgcagggaagggttccaagattcctaggtcccgatcctggctgtgatgccaccttgctgtgcacctttgggaagcccctctcctcctctgagctgccccctcatctgaaaaagagatggactcacccatctctaacctcttgcctctgagtctagaaccttctctaacgtcttgcctctgagtctagaaccttctttaagtgagagcatctggacatatcacagcccccaccctcacacccagaatgggcctgtcatacaggagctgctcataaatattaactaaatcaaacgagtgcactaagggtctctcacaacatctgggtccaggagccaccctgcagcctctgaccaggccacaagggcagtaaacacccacgggtgtggagagtggacatacctcaccccgacgcgtgggtcgacgatatcccgggaattccgaccgtaccacctgtcttttaaatttaaacacccccgggggggtttcctaatttggtggtcaacccttaaaggct

SEQ ID NO: 449893 - DNA, 556 bp, Homo Sapiens
acagccacagagaaaaacgtatttacagagggagaaaggataaggggacaggaggcaggcgtgtaaaaaaacatgggcccccgagcagggagaacacagtttctctaggagatggggcaaaaagatcttgggggtacaatggagaaggtcaaagggctcggtggttgcttagagaagtctcacgcgtggctctaggtggcccggtgcccccgcattgggacagagggacccccagggccaggaaggcagtgtgagcagcagaaagcagccggcccccaacagcaggatcaggccggcccccacgccgcagcccagggaccaggagtactcgtaggtgaggcgtggggccgggggaggctccgggctgactctctgcagcagggcccatcacggaatgccggaacacctccaggctcaccaagagcagcaggcctttctttgtggttctctgaaagatgcgtgcattctcccccgtggtgaagaatttaaaataggtgcagtttgcttccagaatcttggatctgagaggagaggaacctggtctcctaggtcctgg

SEQ ID NO: 449894 - DNA, 1098 bp, Homo Sapiens
acgccagctgggtgggcgaaagttatcagccatcttgggaggtaaaggaggccttccgtcgtacagggtcgcatcgcggagtggaagggcaacaatgaggaacgtgggcagtcagctggggctcgaaatttcgggggtcgcctgtgccggattgccagtggacggagcagaaacccagccgggcttccagcgtgtgccctgggttccgctgtctcccccaggcagccagggaggtgcctggccaccctcggacacattgctccagcacggcttgtccagtcccgtgcggcacgtgcgcagaatcctccgggcgcaccagtcccccagctctgcgtatttgcccgccagctccctcatctggcctccccgaggctgctccaccaggttcagtagcatcatgggcaccgccatgggctccgcagccgggggcccctggagctggggccggcccagtcccgacgcgtcctcctgcacccagtggacgatctgatccatcatctccaccgcttccgtctggtaccgcacttcccctgtggctctccacagctcgttcatggccatggtgtagaaacactcactgaagatggttcgctgcaccttgaccgggcggccgtcccgagtcagcacaaaggcacacttcttgccaggaggtgccacccgggcataccgcagcaagaactcaccacctgcttttgctgcgtccagaagctgagcatggcggaagcgctcgaaagtgcggtacaggcgacaatacatccatacctgcctcccctgcagccacacatacttgaggtcatcatacacccgcccctcgcggccaaggcacgtgaagaagcccccgtgctcctggtcgtgggagtgctccatccagaaagccaccacgcggtccagctcctgccccacgcgctccttccaggcctgcagagtctctcgctctttctccatgtcctgtcgcgctgggagacccttgctcatccctcctgctcctctaggaagccagacagagttgtcgcggtcccgtgactgtcactcagctgacacagccgcgcccggctccgacgcgtggtcgacatatcccgtacttccggccggtacagc

SEQ ID NO: 449895 - DNA, 573 bp, Homo Sapiens
aatttctattaaacaacccatgcttctgtactcttgtgtctgtccacctgtcctcctgtgcagatgagagagggtgctaccaactgttcggattgagggttggggaacaagaggaatgggaaagggaaagccaaacaggtggggtgtatgtcatgggagggaaagaaaggacggtcctcaagaggaaagatgaaaggtcacaaaagatgagataggagagttggaggtaagaagtcttgctcgcctttttccagtggatatggtgaggaagtgaaagacactggaactcatgctggcacaggagtctgggccccaaggtgggcactcactggctctgttctcccatcagatcaaacctagcacatatggacaggcctcaagcccagatttatctcaaatcaaaccatttcaaggtcttccttctggaaccatccatttttacggttggcgaaactacttggaaaagaaagtataagcaggcttgttggctctcttcatccctccacctgcctgtgctcacaccggacgcgtgggtcgacgatatcccgtaactccgggcggtaccagcgcgtt

SEQ ID NO: 449896 - DNA, 700 bp, Homo Sapiens
ccagggcaccaggggggaccccaggaccggctgctctgcggctgttagtcaagagttattttgtcgcggtttgcaaacgtcttcctgccttgagctgggagcttcaccaggcttcggtgtagcggacgtccacttccttcaaattgggaagcttggccttcagatcttcgtaggtgtcagctgagagcttggtgctgttcatgtttaaactgcagagactcttcatggagctcagggccagcaggccagcgtctgtgaccggggtctcgcacaggttcagcacctggagcatggtgaggtgttccgacaggagccgaaggccagcgtctccaaactgagtggaccacaggttcagctgcttgagcgaaggcagtttgatgaggtgctcggcgcaggcactggttacattggtgaagtgccaaactgaggttctccaggtttccgaaggagccggagctcagcaaacgagccaacggtcagcgtctgtggacttggagggcagtgttagcctggtgggcccgcctttcctttgcagctccttcagctcccgctgccggtcactacagctgctcgtacatgcgctttccccacgtctgtgctctccagggattgagatgatctgcagttggttatcattgccaaacgcgccgcgacgcgtggtcgacgatatcccgggatttaccggaccggtaccaccctg

SEQ ID NO: 449897 - DNA, 324 bp, Homo Sapiens
tgttagccttgtgggcccgcctttcctttgcagctccttcagctcccgctgccggtcacacagctgctcgtacatgcgcttgcccacgtctgtgctctccatggttgaggtgatctgcagttgggtgtcgttgttgtcgatgatgttgtattccagcatcaagcacaggctctgctgcatggtctggttccccctcagtgccaggagcatgcagggacccagcttgttttctgccagggagagcaggaattttatttggtcttgtaacaggagccatgagatgtgcaacccatgctggcgacagctccgtatgtgcaggccaac

SEQ ID NO: 449898 - DNA, 916 bp, Homo Sapiens
cattatccatccgaactccatcaaggtggcagcctcactgacggggttccggctctccaagtgggtcctgcattggccctgcccagaccccatgtgcctccaccagtggaaaggccagctaagccacacaggaagagtaggcgtaggaaagccacaaagtgaaccccaggaggccagcctggctacgcagccccatcccacacacacagcccggtgactcagggcccacgtgtgcagacaccgggagctcacagggacagcgccccgggggatcggaaggaacttttgcctctctgtccctctctgtagggatggaaagaggagagcgatttctgggatggaagccatctgcctcctctcaactctcgctgcccaaccagaaagggaagaaaatacaggaagatgcgggacaggtgaggagctgggtgagcgccaccagcctgcagcccagcagagcagggcttggccaagcctggcgccagggacttcccccctacccccaccacaggcccctcgccaggtgagaggcaccgacagagtcccagacagatgccccagacaggatgcccggcgcaacccccgccccttccgctaggggcccccaggacgcggggctccccctccccttttggccagccgcagagtccagcgggtctcccggccagggacgtcgtgggagaatcaggaagtcgaagccacacagccgagaaggggcagctggcgtctcggaggccgtcacgagctgtcactccgcgcccgccggacttgccgctcaattaccaacttcaacccagggccggccccggagcctcccgccgcccctaccccgcgcacctggcacacctggacctccgcgcccgcgtcacttaccgacgcgtgggtcgacgatatcccgtaattccggaccgtaccagcc

SEQ ID NO: 449899 - DNA, 1103 bp, Homo Sapiens
  misc_feature (27)..(27): n is a, c, g, or t
  misc_feature (45)..(45): n is a, c, g, or t
  misc_feature (55)..(55): n is a, c, g, or t
  misc_feature (95)..(95): n is a, c, g, or t
tctctgccagcgcagagctgccagaancgtcatgtcacactctgntcggagctanaattcatctctcaccagccgctgccgttcggatcgtgcanaacacatccaggcgcccagccactggccatctccttgtagttgcgctggtaccgcgcgtccacagcttccagcagctcgcgctcctgagcccgcacgtgagctaccacctggcgcacgcgctcgcggatcagctcctcggtctcggcacgcgcgcggcccagctggccgacggccgcgtgcatctgcgcgtgaaccgcgccaaaggcactatcctgctcctgcagcgcctgcgtcatggcgtccagctcctcctgtcgctgctggatctctgcgctgatgtcgcacttgagctcactgtggctgctgtcaaggagcgcgcacgagcagcacagcggcttggaacatcctcggcagtagatgctggtcagcgtaggggtgcggtggttggggttggagcagaagatgttgttggtcttgcgggtgccgtccaggaactcacgcaccgactggttgcgcagctctgctaggggccgggcctcgtgcttgaggaaccactggtgtgcctcgaagcacttggcgcagaggagctgctcgcactcaaagcaccagaagtcggccgactctttgcagcgggtgcacacagcctgcgcatccacaatctgccggtacaccgacaggcgccgctgcagactctcgaaaaagacgttatccagggcgggtgtgtctgcacctaggggccagggcgcctggcagatggggcactgcatgcccgacgcctccaggcatcctgagcacagcgtgtgcagacaaggcagcagcttcgggcacttggcttccgcctggcattgctggcagcgcagaaactggaactcctcctccgaagcgggggctcgctctgtagggctggggctggggctgggctggcggccttcagagggggtctcggggggaggcatggtgggctcctggggccgggcggggtcctgctggggcctcggagatcgggcgggtgcaggctccatggaccccagcttagtttcgattctcggtttagatcccgagaattc

SEQ ID NO: 449900 - DNA, 693 bp, Homo Sapiens
gttccaaagggaaccgagaaaaaaactgtaatccacatgagctggggtaggcactttagtagttctcctaacatctggcacagtcccttatggtaaatcttcaagtaataaatacttgatttagagattagactttacaggtaagatactcctgagagaggcaagaggaatctaacattcgactaagaaacaggaagcgggtggcagtaggccctggggtaccgctgctgggaggggccttccagattaaggcggacccaggcccgaggcaacaggcctagagagggaaaagaggcgttttgctccttcctggaggaataatgctgaatccttgcagcctctggacagatgtgagaaggcaccacctcaagaggggaggagcggggctgatcctggtcgggcggacctgagtcgggcagccgctctcccggaactggaagggaaagccaggcggctctcaggggctgttggtgtctgagccgggagggtcgaagcgcccagggcactgcgccccgcaactgacgctcctgcaaggaaaagctctgggttgcgtatgcggcttgtcacctcctgggtgctgcagtcgtgagccccgagaatgtcttcgtggtagcgttgctgatcccgcagcacgccgatgacgttgccgacgcgtgggtcgacgatatcccgaaattccggaccggtacagcc

SEQ ID NO: 449901 - DNA, 1537 bp, Homo Sapiens
  misc_feature (107)..(107): n is a, c, g, or t
  misc_feature (117)..(117): n is a, c, g, or t
ccctttcggttatgtgggccagtttgggggatccggttgtccatttttaaaagggacccccccaaaccgggtttccatggcccagataggccgtgtccttcccacangccttccccngcattttcctgaattcccttgctgggtggtcccacgaggcccagggctttgctggccgatgccaggggcgtggatctcacgtccaagctctgcctgtctggcgctgcgttctcccgatgcaagtcctcgctggagctccaccaggtccaggaagagcgacttggagaaatggtctaaggcgtagacagctgccagatatggaagcaagcgccattgctgcattggatactcaagcactggtatttcctcctcctctgtgggtccaaactgacgccgagtggctgagaagcgaagagcgatggccacggccagctttaggttaaggatggccaggctcacgatggagacccggcccgaggacaggctccccagggacgctccaaagcgctgcctgacgtccttaaaggggctgacataggtgccctcgggggtgacgtctcccatccggttcagaaggctctggcgaggaactctgaccttgtggaacatggcgaaaccattatccagaccgttctgcccgagtttttttcctatgtcgccaaccatcactccaggcatgggaagaagggtcttcgggtcccggatctgcacgataaagggatgcagcccatggcactggtcccctggcacacacagcttagcaaacaccaccgcgtgagtggctgtcttgcccatgttgccaacccaaaacttggcagcttcgaaatcaggggaatgtatgatgaattcctcagtggcaggatcgtagtgggcagttgtgcgaatggccttggtattactgccgtggcttaattcggtcagagcaaaacatccgaaaatctccatcctgaagatcttttgaatatatgtgagatgtctttcagaaccagaactgtaaactgctgatccgtgtaccaagctatggaggaggtacttggcagccagagaagagtcatacatgcccaggcactgaatcaagtcggggaccttcagagggctcttgtacatgtcttcgacactgaggaagtcatactcgaagatccgcttgcatcgaaggaagttcagctcgcgatacttctccaaggacagatcggctccaggggaacgagcgaaaagagggtcattctcaagagctgagaagatggttttcttaaagcggagcatgccctccccttccgtgaacagcgccagctccttccagctgaaggacgctcttgctcggtaggcatcgaggggccccctggggaattctgggagcagagctgtgtcgcctccgttgccacagtggatgccatcgcgtgataagagcccacacactccacagttcaacgcctgccagggaaaccaaaagcaggaaaggaatctccagcggcgccattctcatttccgtcacccgagcgcgctggtcgacgatatccaaaccgcgggggaccgtaccaga

SEQ ID NO: 449902 - DNA, 407 bp, Homo Sapiens
agtgaattgccctcacatgcttctggcaaatctctgtgctggcctgaaaccagtgactcatcttctcacataggtgttgtcaagtgatatttgattttgtaaaaataaccagtaggatccaaagaactttagctatttatgttcatcttcaaaaaattattttaggcaaagtccatactccttttaaaacaatatttatgtcctatgtttgtgtatagacatgactctactagggcataattagagtttgtgtattatttttccaggtttggggatgagtcagtccttgcccatccacaattttgtttgtgaacttataacaggaataagcaaaattcatacctgactagtgttcagaatgtagcattctgtgcgaaaaagtattgaagattagcttttaaaaactg

SEQ ID NO: 449903 - DNA, 1949 bp, Homo Sapiens
  misc_feature (14)..(14): n is a, c, g, or t
  misc_feature (24)..(24): n is a, c, g, or t
  misc_feature (44)..(44): n is a, c, g, or t
  misc_feature (55)..(55): n is a, c, g, or t
  misc_feature (87)..(87): n is a, c, g, or t
cccttttgactttnacccttgccnatcccagggccacagaccanaggaaaaatanggcaaaaacccaattcacagtacggcaaaaanccccagggctgctcagctgagctgatgaacagatgactgactgttgggctggggcaggtggacggtccaagtgtccttcagcggccctccctgattgcctgtgctaatgcggcccttgcccttggccctgcccctcccaggtctccagttaaaggcctcagctctggaaatcaaagctgtgaatgggaaatggagaagcccaggggtgcaaagtgctagtgattggcatgtttgtcaacaagagagcccctgaaaagagtaaagagtggctcacaacagaaggtagaaatgccacagtgtgttccctcagttcaaacagaggaaaagtctctgcttgaccagagatgggactctttcccaagatgtctgaactgactgcaattttctcctgaaattcaacgctaaggcaaagaaggaaaacccaaaaagctaattatagcctccaggaactctcagacctttccacaaactagtccctgacaattctgcaggagctctgaagatacggaactgtgtagagcaaaaccggaaagaaccgttgtctctgagggaaaagcacacaagcccgcaggtgtccgctgggctctttcaaaaggtcctaagatgttcccagaagatgacaatgaggcagccacggtcctgctgagtcttcagaaatggcctttctaggataagtgctccttacacaagtctccccggggcgtcactgtcacaggaatggtggtcaccacctgattctgaaacacgaagatcttgattctttcaaacacccagaggaagataagcaggatgctgacatactgcaagcatggcgaactttaccatctcccagaatcctggctgataagaaatgacttccacagggtatcggatgatagcattaatcacaaatggagcatctgcgccctgcccaccagccagatggggttgggatcattcaggacggtggtaacgttcctctcctggtaggcagcaacaatatgggtgaggtcgtagtcataggcaaaggggctggtcccgttgatcacagatacttgggacacgggtatcggatgatagcataatcacaaatggagcatctgccggcctctgcccaccagcccagatgggttgggatcaatttcaggacggtggtaacgttcctctcctggtaggcagcaacaatatgggtgaggtcgtagtcataggcaaaggggctggtcccgttgatcacggatatgttgtatcgggcatctaggccaccacagctcagcggctgcttctgctgcagcctcaggtctccgttcacgtataactgggatcccgggacaggaaaggaggactggagaaacgccatgctctgcatcacgagggtcgccatcctgtgtaatcgataggagaaagtcaggatgagctgcacaccgagaacgtgctccgtggactgcaggggaagctccagcttaaaatgtaacatgtccgtcttcccatcctggttcctgtcttcttctctagtcgaaacgagcgggacgcgcaggcgatccccttgcagccggttgaaggcggggaacgtgctccaggcgaggaacccgtcgctttcgggtccgagcagggccacgagcagcacctggtgttggaagcgcacggtcggctgctcctcgtagctgctccgcttcagccaaaacccgtggctccggaaggccaccagcagcggcgggatgtacgtgagcgcagcggccagcagcaggaacagcgcggctttggagcagagccccgcgcggtaactgcgctcgaccgggtgagagaagagctcatagagcgccatgagcagcgctcgcaggcactccgcgagccgggggaccaagtttggcttctcctggttgcca

SEQ ID NO: 449904 - DNA, 887 bp, Homo Sapiens
gggatcgtgtcttgcttgatcccattggtactttcagcctgccacaacagatggttggatcattcagagcgtggtaacttcttctctggtaggctgcctctatatggtgacgtgtagtcataggcaaaggggcttggtcccgttgatcacggatatgtttgtatcgggcatttagcccaccaacagctcagcggctgcttctgctgcagcctcaggtctccgttcacgtataactgtgatcccgggacaggaaaggaggactggagagacgccatgctctgcattcacgagggtcgccatcctgtgtaagtcgataggagaaagtcaggatgagctgcacaccgagaacgtgctccgtggactgcaggggaagctccaggcttaagaatgtaacatgtccgtcgttcccatcctggttcctgtcttcttcgtctagtctaggaaacccttacaggcccagcagccctggtcactaatgagtctgggaggaatccacatcacttctgtacatacacaatgacccactgtcttgctgtacacaacaggcattatctcctccacgaaacgagcgggacgcgcaggcgatccccttgcagccggttgaaggcggggaacgtgctccaggcgaggaacccgtcgctttcgggtccgagcagggccacgagcagcacctggtgttggaagcgcacggtcggctgctcctcgtagctgctccgcttcagccaaaacccgtggctccggaaggccaccagcagcggcgggatgtacgtgagcgcagcggccagcagcaggaacagcgcggctttggagcagagccccgcgcggtaactgcgctcgaccgggtgagagaagagctcatagagcgccatgagcagcgctcgcccgct

SEQ ID NO: 449905 - DNA, 751 bp, Homo Sapiens
tggtcccacagagcaccctcttgttcttggtgcctactgcagtatcaataatcttctccttcaaagatgaatagactctcttgcaacaatttaagccccatttactctcagtctttctttgttgtatcgggcatctaggccaccacagctcagcggctgcttctgctgcagcctcaggtctccgttcacgtataactgggatcccgggacaggaaaggaggactggagaaacgccatgctctgcatcacgagggtcgccatcctgtgtaatcgataggagaaagtcaggatgagctgcacaccgagaacgtgctccgtggactgcacgggaagctccagcttaaaatgtaacatgtccgtcttcccatcctggttcctgtcttcttctctagtctaggaaacccaaacaggcccagcagccctggtcactaatgagtctgggaggaatccacatcacttctgtacatacacaatgacccactgtcttgctgtacacaacaggcattatctcctccacgaaacgagcgggacgcgcaggcgatccccttgcagccggttgaaggcggggaacgtgctccaggcgaggaacccgtcgctttcgggtccgagcagggccacgagcagcacctggtgcttggaagcgcacggtcggctgctcctcgtagctgctccgcttcagccaaaccactgagttaaagagggcggtagggaggcggttagggaggccggcctggccgagcgcgcccccgct

SEQ ID NO: 449906 - DNA, 1174 bp, Homo Sapiens
  misc_feature (126)..(126): n is a, c, g, or t
  misc_feature (1106)..(1106): n is a, c, g, or t
gttttcccatccttttccccgcaggttttcccctttctccagtggccttcgtgtatttcagcctttttcatagccagaaacttgtcaggaccctgcagccctttgtttccccagatgtactgacanctggttgtctctggtctttgcactcgccattgtagcagcggccctgattttgattgcatgcatatccgtcttgcttatgaagatttggtgggcactgaccagagtctccagtacaatattcagtaatatcacactcgttcacagcatcccggcattcataccctcgtggctgaaaaagacatgaggtattgttacagcagggcccgtcgctgcagtgagccccgttggagagggaacatttcttacagcataatccatagcattccacatgaaaaccacaatcacactcctccccagcttccacgtatccatttccacattccgtgggctcaaatagctttgttggcctgttgaaaaggcaggctccacctcctctctgtaaaaagtctctatactccaaaatgctgcactttgaaaattttcgagaatgggacacccctgtttcctccatgatgcagccaccccaggattctgtgcagtcacattttggctttctgctagaaggttcccattggattccaaggttttgagccaggctctgcgataatacttgtgccactgccattggaagaccatactcattcacaccaactcctcttgtgcgagaacagacacctccaaagtaactcagactgcttctcttatagtgaaatgtcacccgcgagatgaggtgcacagcatcagcatgctgcttaatgcgctgccggtattttgagaactcatggagcatctgcacagggttggtggtgatgtcatctgatccttctcagtccaggtctctacagccatccaggactacctggtgttgagctgctccttgtaaatagaatccacaggttgacccggactttgcaagttgttggtatgtgcatgagaagagcgatgcttcttatacgttttgtgatcactaacatcataagttccaatatttcatttcttcaatcgacgcgtggtcgacatatcccggactccgaccgtancgccttggcttttgattaaaaacacgcctgcggggggtgtgctagtagtgtcacctccatataggccc

SEQ ID NO: 449907 - DNA, 408 bp, Homo Sapiens
  misc_feature (333)..(333): n is a, c, g, or t
  misc_feature (348)..(348): n is a, c, g, or t
  misc_feature (372)..(372): n is a, c, g, or t
  misc_feature (378)..(378): n is a, c, g, or t
  misc_feature (397)..(397): n is a, c, g, or t
tggagcctgccttttcaacaggccaacaaagctatttgagcccacggaatgtggaaatggatacgtggaagctggggaggagtgtgattgtggttttcatgtggaatgctatggattatgctgtaagaaatgttccctctccaacggggctcactgcagcgacgggccctgctgtaacaatacctcatgtctttttcagccacgagggtatgaatgccgggatgctgtgaacgagtgttatattacttgaatatttgtactgggagactctggtcagtgcccaccaaattctttcattaaggcaagacgggatatggcatggcaatcaaaatncaggggccgctgctnacaatggcgagttgcaagaccagnggacancccagtgtcagtacatctngggggaacaaa

SEQ ID NO: 449908 - DNA, 837 bp, Homo Sapiens
gcatggccaattgcggatgaggtgccacaacccctttttccgtgcaagccccgctggattctttggccgcaaaagggggcaccaggcaatggtcgtccagatccgtggagtttgtctggcgggaaaccgagggtgtctttggaagactgagaggccaggtttttccgccatttggggggtcccaaagaggaggtttgtggaaggggtatttcccagagggttcattggaggtggtggcggcaggggcccaagttcaggttctttttggctgagtgggcccttgagaacagtgcagagctcattgatgtagacatagagcttggctggccggctccgggcccgagacaggaccctagagaggatgttgcagaactccgccgaggccaaaaacagagagtgggcacgttgctgccggttatagaggaatgggaccacctcagggtggtctgctgtctgcatcttacaaagttcaaggaactcttcgaacagcttctcattctccagcttgtagcatttcttgccgcccgaactactgcttcctctggccccatgaggctcagaggagctaggggcttctgccccaggtgaggccgcattggggagtgggtgggagggccctggctgagcagctgcttcatcttcgtcatcatcatccagcacgatgatgctgttagcggtggccataggggatcaaatcccccggagggaggaagtggtggggatttcagaattcctgctcagaaaccgtctctcgaggcgaccctcgccgcaattctcagaacctcgcatggttccctccgccttccttcccactcccaccgcaggccccactacccc

SEQ ID NO: 449909 - DNA, 736 bp, Homo Sapiens
gttgggcagaaagcacggcccctcaaggcctcccacccagggatgtccagtgtgtgttctgcacaactcgaatgtagatatttggtggcaagatggtctcattgcctggcatgtggcaccatccggcagtgctagcgctgaatgcacggcctccttgttcacaagccagcccggcaggcagacacactgtaggccgagtagccctgaagctcaggctccctgagctcactctctgcacggcaagttgccccagggctggggcaggtacggtcagccgcatgttcctggcaggacacaaaggtctggaagccatggggacaccccgaaccccagcatggtggatgtagggcggctcctcctggctgtggatctgcacccgaatacctgcctcaaacgacgtctcatttgtctccctccagatggggcaggttactcctcctgctggatgtccagcatgatctccaggccactgcccatgccccctgcccaggctgggcaagcgagctccagcagggtccgcagttgaaggtgtaacacttcccatagcgagtatagaccagccgttgatcagaggatccccgttcctgtatcctccaggcaccgcctcctagcctggagaccaagcagaaccctctgcctccctccccttaccttcctcaccccctccagctcttcctctcctttcctctcaaaacgcgtcgcgcccacgcgtcccgacgcctggtcacgatatcca

SEQ ID NO: 449910 - DNA, 877 bp, Homo Sapiens
ggtccaccctagctctgaaggaacaggcgccgctgcgccgtccacgtcaggggaaacgactgccaggccatgcaggggggagtttagctgccgaaaatgcttgcagcaatgaactggcccaaggcgtcttgaggcctcatctgctcatagaccacgaaaagggcattaggaaaacgctggctgcccaggcgatgaggccgcggcactctccggctcgaggtaggtcagcaccgcctcggccaggagcagaagtgggtgaggctgcgtcgagccccgcggcgcccagggcctcctccactcgctggagctgccgcaagtccagacccaggatgcagtagtctgcgctctcaaagcacagcgcggacgcgggctcccccctctcgaaaggcccggttaacgcgcacagctctggcgtctctccaatcctttctgctttgcgccgcgccacgtccggagaatccacctcccagactgcagcccgggccaggcggcccgcggtttttaagcgaaaatagagcgagtcgaagccagcgccgagagacaagatctgcgcgcgaagcgcggcctggggcgcgccaatctgctccaaaaaagcgcgcacgcagtgcctcacggcgcgtgcgcggacgtagtagcctcggtgaatgagcggtgccggcgcgccgcgcccggaaccagcaacgcggcaaaggggtcctgcacgtacccgcgcgcggccagggaacgcttgctgagggcgctgctgtcgttggtgttctgtaccgcgcctgcccgacgctcacggctccgggggcccatggccagaagagactcaggaatggcagtctgtcacggttgtgagccgccctgtggttaagcacacacctcacggacctcg

SEQ ID NO: 449911 - DNA, 755 bp, Homo Sapiens
agactgggcggacggaagcaagactccgtctcagagacctagatgtgacacggaataaccgccctgcccataaactggggaccatgtacatagagggtgtaaaaatcagtcgagtgggacacaatcgatactcgtttcgaagtaaagtagaagatatcagagttgatcacaggaagtgaggataacttgctgtgtgaaagccgtgctgtttcattatccatagattacacagagtgcacacctcttggggatgctcatgctctgactgggcatgtaacatgcactgcttatagatgtcagattaaaacatatattttaagattcgaaaatacaagtcagtatccctagcaatagttctaactttctccattgcttggtgttatgatgtctggctcagccatcatcaggccctgggacctgagcagtgtggccgcagggccagcagagtgacccgtggaccatgggccccctggcgctgccccttcaggtctggcctgtgctctggtgtgctgccaggcggggtgctcaggcctcttgggtccaagccttgcccacagctgccccaagtcactgggggggtcttctgggcctgacgcctccagctccgcccttgtcctccctgctctcaggagccacccccacctcacctggcccatcctctcagatgccatggactctccaagcagagaccctgagggcacagagtggcgacgcgtggtcgacatatcccggaacttccggaccgtaccagcgcg

SEQ ID NO: 449912 - DNA, 1142 bp, Homo Sapiens
  misc_feature (242)..(242): n is a, c, g, or t
  misc_feature (245)..(262): n is a, c, g, or t
  misc_feature (264)..(273): n is a, c, g, or t
  misc_feature (275)..(285): n is a, c, g, or t
  misc_feature (287)..(299): n is a, c, g, or t
ttcctgtaaggaagtttttccccatttatgtccacccccccagaaggttaggttcccttcccaaagatttcccaaggttagccagttttccccgttccggacggttgtaaaagggacgggcaagttgcctagtttataattaggacttcacttttagggaccccctttgttccaagaaaagctgggtacggggtaagcttggggcccctggaggggatactctagagccggccgcccttttnggnnnnnnnnnnnnnnnnnntnnnnnnnnnngnnnnnnnnnnncnnnnnnnnnnnnngaaagtgaagagctgtttattaagcatctgctggggcagccttgaactaagtaccacgtgggacacaagagcagcatccacgcccagcccctgcctgcaaggagtgcacagtcttgctggagagacaaggcgagccatcaggagcgggcagcaggggcagccacaggagacggacagcagggtggtcccaccgcatggcagcctcagggagtgagtacaaaccccatttccttcactcagtctcaggcaaggcacattgcccgtcttgctttgtcacacatctcaccactcgttccctcaacactcatgagaggccacattgtacacaaccagacgaccagaccctggttacaccagataggacaagcttgaaccccattgatgccaaaagcacaagcatcacgtcatggctcccatcgagacgcaacgagacacaagctcgggagaagcaggccagacccgagaccatgacacataatgctcacggacgaggaaacaggaagatcacatagacaacggaaaccacacacagagacacagaagacccacgaccgagcacatagaacatgagaacagggggcacagaccaagcgggaaacagaaagaggagaaagaaacacaagcacgggacaacacataccagaccccaccacaagagcaacacgaccatcagaacacacaaagacgggagaacaaccaccaacaagacaaagaggcaacgaaagaaaccacaggaaacaaagacacacaggagacagacaaaacacaaatggaagactacagaaaacgagaaggacaaccaacacgaaccacaaaaacaacagacaacaacgagaaacacaa

SEQ ID NO: 449913 - DNA, 624 bp, Homo Sapiens
  misc_feature (449)..(577): n is a, c, g, or t
gagctatctcaagtactttcattttattgttaacttttggcagcagggtgcaattaaaggagagaaagaaaacaaagtgataagtgtaaaataatgtacacacatgtgtaaaagaaaatgacaagacaggatgactatttgtctcttggttagctccttgggctctatgtctccttcctcggagaacctcgttttcctttgcccagatttgttagggtgggtaatccaggcgcctgctcccccatgatggaagccaaagacgtccctggagcagcgtcccgctgcatcctttcctgcactgcccacatggacacaactcagccgattagtcttcctctcagaactttagtcttgagcaaagggattaaagggtgaagtgactgaaggtatgcccttccaaagtggtacgtgagctaatggctaaagtttgccaagcccatccaagcacnnnnnnnnnnnnnnnnnnnnnnnnnnnnnnnnnnnnnnnnnnnnnnnnnnnnnnnnnnnnnnnnnnnnnnnnnnnnnnnnnnnnnnnnnnnnnnnnnnnnnnnnnnnnnnnnnnnnnnnnnnnnnnnnnggacgcgtgggtcgacgatatcccgggaattccggaccggtaccagc

SEQ ID NO: 449914 - DNA, 1550 bp, Homo Sapiens
aggcgtcgttgtacaccgccggttattaaacgacggcagtaccataacggttactaaggtagcgaggctgggtggagaattcggcacgaggcccaagatggcggcggacgtgtccgttactcaccggcccccgctgagccctaagtctggggccgaagtcgaagccggcgatgccgcggagcgccgggcgccggaagaagagctgccgcctctagatccagaagagatccggaaacgcctggaacacaccgagcgccagttccgtaaccgccgcaagatactgatccggggcctcccgggggactgtgaccaaccaggaagtacatgacctgctcagtgactatgagctcaaatactgtttttgtggacaaatacaaagggacagccttcgtgaccctgctgaatggggagcaggccgaggccgcaatcaatgctttccaccagagccgcctgcgggagcgtgaactgtcggtgcagctgcagcccactggatgccctgctgtgtgtggccaacctgccccccagcctcacacagcagcagttcgaggagctggtgcggcccttcggcagcctggagcgctgcttcctggtctacagtgagcgcactggccaatccaagggctatgggtttgctgagtacatgaagagggactcggctgcccgtgccaagtcggacctgctgggcaagccgctgggaccaacgcaccctctacgtgcactggacggatgccgggcaactgacgcctgcccttctccactcccgctgcctctgtgtggaccgcctgccacctggcttcaacgatgtggacgctctgtgccgggcgctgtcagctgtccacagccccaccttctgccagctggcgtgcggccaggaatgggcagctgaagggcttcgcggtgctggagtatgagacggctgagattgcggaggaggcacagcagcaggcggacggcctgtccctggggggcagccacctgcgagtctccttctgcgcccctgtggccccccggcctgcagtatgctggccgctctcatcgctgcccaggccacggccctcaatcgggggaagggactcctccccgagcccaacatcctgcagctgctcaacaacctgggcccatccgctgtccctccagctgctgctcaaccccctgctccatggcagtgcggggtgggaagcatgggcctcctgggtgcccccccagccatgccgctgctcaatgggccagcccatgtccacggcgctgttgcagctcgccctgcagacccagggccagaagaaagcccggacatcctgggagactcacccctgggcgccctccagcctggggcccaagccagccaaccccctcctcggggaagctgcctgcaggagggggcctgcccccggagctgcctgcccggcgagggaagccaccaccctgctgccatccagtgcttggccctgctgggggtgaccgggaggcctgggcttgggtcccccagcggaccagctcactcctccccccgccctgtggtctccgaggctctggcctcagaggctccagaa

SEQ ID NO: 449915 - DNA, 1098 bp, Homo Sapiens
  misc_feature (1008)..(1008): n is a, c, g, or t
  misc_feature (1033)..(1033): n is a, c, g, or t
  misc_feature (1084)..(1084): n is a, c, g, or t
tttttctggtagaaggcggggttctcctcgtacgctgcggagtctctgcggggtgtagaccggaatcctgctgacgggcagagtggatcagggagggagggtcgagacacggtggctgcaggtctgagacaaggctgctccgaggtagtagctctcttgcctggaggtggccattcattcctggagtgctgctgaggagcgagggcccatctggggtctctggaagtcggtgcccaggcctgaaggatagccccccttgcgcttccctgggctgcggccggccttctcagaacgaagggcgtccttccaccccgcggcgcaggtgaccgctgccatggcttttccccatcggccggacgcccctgagctgcctgacttctccatgctgaagaggctggctcgagaccagctcatctatctgctggagcagcttcctggaaacacaggatttacttcattgacggcagatctcatgagccctttggatcgaattgccaatgtctccatcctgaagcaacacgaagtagacaagctatacaaggtggagaacaagccagccctcagctccaatgaacaattgtgcttcttggtcagaccccgcatcaagaatatgcgatacattgccagtcttgtcaatgctgacaaattggctggccgaactcgcaaatacaaagtgatcttcagccctcaaaagttctatgcgtgtgagatggtgcttgaggaagagggaatctatgggagatgtgagctgtgatgaatgggccttctctttgctgcctcttgatgtggatcctggtgagcatggagctagcagaatttttcagggattactttctggaaggagatcagcgttggatcaacactgtagctcaggccttacaccttctcagcactctctatggaccctttccaaactgctatggaattggcaggtgcgccaagatggcatatgaattgtgggaggaacctgggaggaggaggaggatgggcgaaaccaaggggccgacngaaggatttgggacattattctttnctctttgggacagaggatgtgggatttgtggacagcattttgttcccaatngttttttgaggggc

SEQ ID NO: 449916 - DNA, 1709 bp, Homo Sapiens
  misc_feature (152)..(152): n is a, c, g, or t
  misc_feature (567)..(582): n is a, c, g, or t
ggtgtttctttgatgcatgaggtgagagaagcgagtaaagtgattgggtgtctctcctgattagggagttggagctgctctctgtgcggcctttgtggttgctctaacattctgctctattggttacgtaagttagtgtgcggtgtggcganggcgactgcgttcggtgagtggggtggacgtctgtctattgttgtcctgagcagatcgttggcattcgtgtctcggttaggtcagcgcatggttcttgtggttgacggtggcggcgacagaggacagccgggggtcgagggtgtacacacacgcgattggatagtggagcgggggtgtaggtggggtatttgccgattgggtttagtgggtatggcggggatatcttactaggggggcgtggtgttgttgcggcggctgcggattttgagttgtgcggggggtgaggtatcgtcggaatgttttgggggtagaaagccattagtaggagcgggattagtggcggcggggcagcagtgcggtacgttgagtggcatggtggccacgtggcggtggtggggtactgttcgcaacgtnnnnnnnnnnnnnnnntgtgggtactctcggggaggcggatgggaccgacgggttggtggagtagcgggttgtaggggtgggcgggacggggtgtgggcggcggggtggcgctggccgatgggcggccatgggactctctcataggatgtggaagtcgcgcactctcccggcaatgggttctgcggggcctagtttgctgggttgccggctgacgtgcgagacaccccacctccactgccaccacagtggcccacacttgcctcaaagtcctgcttgcttacaagtacatggatattcccaaaccattccattagttaatctgccctccctgcacacacaacatatacagcgctatttcctacacctattggactgaaagtgcttggaaatggaatggttttagaatatgaagaagaacacaaaccaagtagctgtgggttgaacctggacgtgagctggctgcagggccgttgggtagaaaaccagcatctcataaacaggtcactacaaaaataggaagagtataaaaatagaatatattatgtcactatttcgtcttctctttatagtagcgtatcgtaggagtgggacaggtggcctttcccgaccctgctacgctggctggtgcccgacaaacctccactggatggtttgtcactggatggtttgttgggttggtggtcacaggcgcaaaggacatgcacacggccacgctacgctactgtaaccaagaggtgacttcagccatgaataaggtgaagaggttacacatctacctacggaatataataacatacaatgacttataaagtgactacatgcatatgagcaagcaaagtacagagatgcctagaaccccactacagctgtgctttatcaggaaaagcacatagaatatgtttttctaccttaaccctcttctactttaaaaatggtttgctgaatttttctatgtttttaaaatgtgttttatgcttttcttgttaaacacgtaaaggatggaacctaatcctctcccgagacgcctcctttgtgttaatgcctattcttacaacagagaaacaagtacattaatataaaaacgagttgattattgcggacgcgtgggtcgacgatatcccggaattccggaccggaccagc

SEQ ID NO: 449917 - DNA, 840 bp, Homo Sapiens
  misc_feature (638)..(767): n is a, c, g, or t
caggatccccggaataagtccaacttatacctttattaaaatttggtgtgtgtatccatccaatctctgtttttagagattgttttattatgtgctttaagtccacataaataatctcatactgaatgtgtcactgtaggattttttcttcaaaattgtatttttgaactttctgtatatatatatttctttaattttaaccattttatgaattctaaagtttatgtatttccccatcttaatatattatttccaattttttgattacaagcaatgtaatctaaaatgtacacttttgtatggttttcttctgtgtatgtgcaatattttgtctaggatatatacctagaagtggaattgctgttatagagtgtgtgatttttcagctttaccagatattggtaaattgctgtctgaagcaaatgtagcagttcacactgctgtctagaattttctcatatccttattagattttgaattgtcagaccctgtgatttttactcttatgatggctgtgatatgcttttttgttttaatttgtacttcctttattatttatggggataaatatatttccatgtttaataagtatttggattttttcttctgtcaacaacatatataaatctttgtcaccnnnnnnnnnnnnnnnnnnnnnnnnnnnnnnnnnnnnnnnnnnnnnnnnnnnnnnnnnnnnnnnnnnnnnnnnnnnnnnnnnnnnnnnnnnnnnnnnnnnnnnnnnnnnnnnnnnnnnnnnnnnnnnnnnngaaatgctccattgtggtaactgtcttttcccccattgaattaatcgtctccgtacattcatttggactaact

SEQ ID NO: 449918 - DNA, 919 bp, Homo Sapiens
tttttttggtgacacattgaataataatggaaatagtcagacaccagtggattgtatatatttggccattttccttctttttgggttttccttttccttgctgatccttccttgtttatccgatctaatgcaataaaatgcgtaattaatttctaaacgcttccattgagcggtgcaatttgtcaagtcgagttgttaatagaattaagctttttatcagcgattagcaaaagaaggttaaaaaattaattacgaaattgtatgcctccctggttcaaagccaggttttggattaaatgttcgataaaggtttcctgacacgttataaaacatttagcaaaagctgctttcctctagtgcatttaaaacctgtctctgagctaaaccaaccagcaaagcaagagcatttgcgcagacctcagtagtgcacacaagcgtggaaagatagaatatcacttttacaaaatactgaagaaaacactggttttcctccccctactcaggaaaaaggacaagccgtgacctcgcaagtgtttttcatctttaacttttgatagtgtgatttgcagcttgagtaaaattgaagaattggttgaaagaagtaataaaacagtccattgatgatataattaatatataacattcctttatctgtaattatatacaacatatccacaaaggttagtatgtaaaggatagaaagtaaagagttgaaagcatgctcaaaatatctgatcctctctaaattgctgttacaatttatgcatttctcctgtacctggtcctctcttttctttctctcttctgtgtgtcagtctcacctcacttttctatgagtggaataattcaatccatttcacccggacgcgtgggcggacgcgtgggtcgacgatatcccggaacttccggaccgtaccat

SEQ ID NO: 449919 - DNA, 1084 bp, Homo Sapiens
  misc_feature (122)..(241): n is a, c, g, or t
  misc_feature (618)..(627): n is a, c, g, or t
  misc_feature (704)..(750): n is a, c, g, or t
  misc_feature (982)..(1038): n is a, c, g, or t
aattatttagtttttaatacattttattgtacattaaaacagcacaattaaaggggtcccaacgaggttggtagtgccttccactatgtgaggacactaagaagatggtcatctatgaaccnnnnnnnnnnnnnnnnnnnnnnnnnnnnnnnnnnnnnnnnnnnnnnnnnnnnnnnnnnnnnnnnnnnnnnnnnnnnnnnnnnnnnnnnnnnnnnnnnnnnnnnnnnnnnnnnnnnnnnnnaatggtttatacagcattgcaatatatttaattaaatgtttaagtaaatttcaggggataatgtcttctgtttctttctgtgtggagtagggagtaagtgcattttagacaacttctttttttgttgttgttagtaataggttcgtttagatttgtcttctggattgatgtttggaaatttatatttatgttgaaactgttaaattttgtttcatattttcaagtacatttccctcaggtataacaaggatttatttcccatttctttagtgtctttttagctctaattacctctgattaacatgtcctattttaattgcactttatcctttattttttaagttagtggtttatctgtttactaattatttttaccnnnnnnnnnntcagcctttacattttcattctctgttcaacaaatttttagtttaatatttcctaattcctcctgcttactttagtnnnnnnnnnnnnnnnnnnnnnnnnnnnnnnnnnnnnnnnnnnnnnnngtctttttaaaatttaggtttgaatacctagttaattaggctctttgtttttaagacaatatacattagtatttaaaattaggagttatactctgagtacagatccaaaagtatcctgtatattacggtgtgtataatttgtcattgtcatattatattcttctaaatgattttgaattcactcctacatcaaattatttatgagagacaattaaaagtggtagtagcttannnnnnnnnnnnnnnnnnnnnnnnnnnnnnnnnnnnnnnnnnnnnnnnnnnnnnnnncgcgtgggtcgacgatatcccgggaattccggaccagtaccagcca

SEQ ID NO: 449920 - DNA, 723 bp, Homo Sapiens
  misc_feature (67)..(151): n is a, c, g, or t
  misc_feature (347)..(356): n is a, c, g, or t
  misc_feature (653)..(668): n is a, c, g, or t
catgggagggggaggtcgaaaatataaatttattatgaaaacctggaaggataatccaaggaaggtnnnnnnnnnnnnnnnnnnnnnnnnnnnnnnnnnnnnnnnnnnnnnnnnnnnnnnnnnnnnnnnnnnnnnnnnnnnnnnnnnnnnnacagttcagcacaacagaagtgcagaagctcacctacccaaatggcattaaagcctcgctgtgtaatcgtgtcagaaaacaaagcatactgacacatagtgctctacttcccatccacttgagttctaagaggtaaattaaaaagctccctgggaaggggacatgaggttgctcaaaaacccaacaaagaaaattnnnnnnnnnngagagagagaaaccacaccccacagtctcatttccgatgttcatttgtttaaaaaagggattaatccatctgaaagtaggagaggaggagtgggagagggagagaagctcatggctttcacagacagcctgactcccctggaggggagaggaggaaggcagagagacatgatggtttcctggttgagaggggaaagagaagggactagtagaggaaagaagagaggagaggatattcaggagaggagaagtaggggcaatttaaacactgacgactaatttagtttactgtgtttgnnnnnnnnnnnnnnnngggcgccgctcgcgatctagaaccgatatcccgggaattccggaccggtaccagc

SEQ ID NO: 449921 - DNA, 820 bp, Homo Sapiens
aggtgcacggtatcatagatatgcgtctggtctcttgcctgaagctcagaacatctccaaggctgctggtccccagatttggcaggctccctttccacctcttcgagtgctggcccaggtccgcttagctcccgctgtgctagacaagcaaggccacgctgtgacactgaagccgcggtctgcttggctcagcagttgctcctcacgcgggcaggtgcttccaggtgctgacaaaggccgtggggataagtgagtagggcactgtggtgatgcagttccatgtatctgaagtggggtcatagcagtccagagtcttacacctctgggtcccaaagtagcccccgaccacatagagcttgttgccggaagccagggcatggcaggacatgcgcttggcagtcatgtccccaatccgcgtccactggttggtctcacagtcaaagcggtaggccgaggcggctgtgaattccgtgtcacctcccatgatgaagatctggctgcccaggacggcagcggctgtgtaccgccaaggctgggggcactcggccttgatcgtccacctgttctccgaggggtcatagcactggaccttggacaccatgtcccggtggatgctggttcctccgaaaacaaagagcttcagcttggcactcaccactgcggcattgctgacgccatcccgcaagggggccaccatcatccacttgttggccccagggtcgtatttctccacttgtttcagggagacagaaggcgaggccgggaagaccctgcccgacgcgtgggtcgacgatatcccggaattccgaccgtaccagca

SEQ ID NO: 449922 - DNA, 829 bp, Homo Sapiens
tcaattttgttatgtggcgagtctgtgccccaggagtctttctgggtaataatatccatcctgttcggataccactcttcccatatattcctgattcacctggtggatgatgtcgtgagccatggggaataatccgcatgttgtgaaaagcctgggtacctcactttaaaattcaaatcgctctctagttcgtttcaaattccagtcttgattcttctgtaaactgtcttgcccttctgttgaaatcaccctggatggaatgatctattgacaagatcagcaggtcagacagggtttattttctctggatcgtcctccttactgtgtttcacagcatcacgcattgcagcaaagtcaaccacagcgggcacacccgtaaagtcctgcaggatgacacgagcaggcttaaatggcacttctatgtttcttgtgctgcgtgacattccaatgtagaatatgtttcaatatcctgtttcttcaccaaaaactcatcacaattccgaatgggctgcttccagaagaactctgtatcgaaaatggtaagcgcccatatcttgaatcctccaatttattcaaattgaagaagtgttcgtttcctggttgtacaggatccaatggctcagcaaggtgtgcgaatgggttgctcatgattactgatggccacgtgttcctccgactgcacggcggggctcccgcgacacggcgaacctgacccaaggagcggtacgcgttcccgtgcgctgcgcggttccagctgccgcctccacgctccgccccctctcccgacgcgtgggtcgacgatatcccggaattccgaccgtaccagccc

SEQ ID NO: 449923 - DNA, 627 bp, Homo Sapiens
  misc_feature (560)..(573): n is a, c, g, or t
agtggatggatggacagaatgatggacttttgggggttggatgggaagatggtagcagataaagacagctgacagatacatagatggaccagtagacaattggtccactcagggctgccactaacctgtagaacatccctgtgcaaattttaaaaaggagcccttttcctccagacagatacagccccaaaccagggtgcatggcttggggagcagagtataggatggattgcagtccccagtcacctcttctgccagcctccccacatatggcacaactgtctaatgacacggtaggccaagctgaagtgaaggagaaaggagccggaccaagatgggcacatgaggagggtgccctcctagctccaccctcaccaggatgaaggcgtgcaaggggctcagcaaggtgtgaatgaccttagtccgcaagttcagggaagcaggcagagcggggaggtgcctgagctggggcctggagaggggcctgggaaaggaaaaccagggatagctattttcttacagtggagtgagatcttacaggtatcaggcacaggcaggannnnnnnnnnnnnngttctggggaggaagggccaggagagaaagggaatcagggcctcgggccgaatt

SEQ ID NO: 449924 - DNA, 1593 bp, Homo Sapiens
tgggcccccggggctcccggccagctctgagatccggaatgacagctctgaatttcatctgttgactgtaaaggcagagtcagagatgggaagatggcctctctgtacatgggggctcaggacctggggggtcctgtgtgggactaagctcagggtctctgctgagccagcccttccctgggatgctgggcagagggaaggaagaggacagctccagcctctgcctggcaccctgcaatttggaggtccccagttcagaggtgctctcccagggctgacaccctcaatcacccatggacaggacgcccttacctcatttccagaccacctcttgctgccactatcaacgctgtggaagcctgagtccagcccaccatcgtaccgatgtcccggaaatagatcctctgcagggctggggccagccaggcggatctggtcagccatgatgctggacaacagccccccatcctcctgccagaaagcagggggtgcctggggccgggaaggggcattcagtatcccagggcttccttcctccccacctaggacttaccagggactgaaactcgggggccgagaaggggccaggtcccccagggcccgacccacgctgccccggcctctgtggacaaatacttgaagatgtgaagtttccccttcaggcagacctgggcaggtggactctgcagagggttgctgtccagcagaatgacctgcaggtgccttcaggcggcaagaaggagactgggagttcgggagacgcggttacaggagaaatccaggcggaccagagggaggtcccccagctcttcgggcagcgtactgagctggttcctccggacattgaggtcccgcagggaagagaggccacacagttccgagggcagggattggagctcgttgctgctcacgtcaagctgtcgcaggcttcccagggtgccgatgtcagggggcagggctcccagcttgttgttgctgacgatgaggaccctcaggggcagctggcagatgtagggtggcagcagcgacagctggtttcggctgaggttgagttaggtgagggctgtgagattccccaaggctgggttcaggcatctcaggcaattgtggtagaggctcaggccctccagggacaccagctggcacgccgcctcgggcacctcgggaaaccggttccgggacaggtcagcctgggtgatgtctgacaggtcgtagctacgggccgcgccccgggggaagtgcttcaagcgccggttagacaggttcagggtcccggtggccacggcctcctctagggcccgctctgcactgcgtctccccggcagacctggagacccgggcacggaggtcgtggctgccgcctcctcacccccggcggcgagtggagccgctacggccgccgccatccgctcccggcggctcccgctgcctgactgacgggaccggccgtccctccttcccccaccccctccttggagccgccgtagttgcctcaagggggagggagcggtgtccgggaccggacggaccaatcgtgccccgagacgcgtcagaagcggccaatcagaacccgtcagtgggggtggagctccg

SEQ ID NO: 449925 - DNA, 771 bp, Homo Sapiens
agcggggggcaggccaatatggcttcctgcacctggtgacgcttggcgaaactgaggtctcatggagaagccccggagtattgaggagaccccatcttcagaaccaatggaggaagaggaagatgacgacttggagctgtttggtggctatgatagtttccggagttataacagcagtgtgggcagtgagagcagctcctatctggaggagtcaagtgaagcagaaaatgaggatcgggaagcaggggaactgccgacctccccgctgcatttgctcagccctgggactcctcgctccttggatggcagtggttctgagccagctgtctgtgagatgtgtggtatcgtgggtacaagggaagccttcttctccaagaccaagaggttctgcagcgtctcctgctccaggagctactcctccaactccaagaaagccagtatcttggctaggttacagggaaaaccaccgaccaaaaaagccaaagtcctgcacaaggctgcctggtctgccaaaattggagccttcctccactctcaagggacaggacagctggcagatgggacaccaacaggacaagacgctctggtcttgggcttcgactgggggaagttcctgaaggatcacagttacaaggctgctcccgtcagctgtttcaagcacgtcccactctatgaccagtgggaggatgtgatgaaagggatgaaggtggaggtgctcaacagtgatgctgtgctccccagccgggtgtacaggatcgcctctgtcaatca

SEQ ID NO: 449926 - DNA, 1377 bp, Homo Sapiens
  misc_feature (296)..(318): n is a, c, g, or t
  misc_feature (1199)..(1199): n is a, c, g, or t
  misc_feature (1265)..(1265): n is a, c, g, or t
atcctctatcaacttttcccgttataggactgttaggtcctaggtagcgaggcctgggtggcgaattcggcacgagggaggagcccaagagcgagcgcgcagcacgaagctcgagccgcctccgccgcgcgaccccacctcggccgccgccgcctgcgccgcgagatccgccccggcctccccgagagcgagccccggccgccgcgacgaccagccgcgctaaccgccgaccaaccgccaccgaggcgcctgagcgagagcagaggaggaggaggcatgagtgaggcgggcgaggnnnnnnnnnnnnnnnnnnnnnnnctcccgcaggctccgacggaggcctccgcgtacctgtcgcaagattgcaggcctgtgccttgacgagagcctcatccacgccgtgttgctgcgcaagagactatcaggctgagcgaggacaaagtgaggcagctggtgaaggatatcggccggcagatccatcagctgagcatggctggctgctactgtgtgtctgtttccaccgcgtataccatgggccgctttcgattccccgtgctcgggatccgcggagttatgcacccagtgcgtgcttaagacgtttcccgacggcattcccgctctttccacaccttgctctcccctgcctaatcgttagcgcacacttctatccgcgcctatccttgtggccttcccacggctccttggtgccggtttcactatgcctcccgccgttgtcccaccgctttacttccccccttttctccgccccctcctcccctctgtcactagcgtatcccggccagcctccccccattcgacccacagtccggtgttatccctcccccgcgacacgcccgcgccgggtcctgtggagctgtcgcgcattggttgccagaggatcgggcgaccccgctgctcgtccggccccgagttgtacttcgcgcggcgtgctttctctctcctcgtgctactttaccccactctcggcgcgtgtcgttgtctccgctcgcccccgcccgtcgcacgtttttcttagcgcccccctccatccctctgtgcggtcgtgcgctctctttcgattacggcctccgtcctcatgcagcaccctcgcgtcttgatacctctccgcgcacctgcctcagcgttttctccccgcaagcccggcgcactctcgagcgtgatatcgcgccgctgccgancgtagattatcttagttggactccgcctctcgccatcctgtgctcctcgccctccctcacttcgcngtaaggacgactcgcgctctcaccggtctgtttgctcaccgtctctgcgcgtatctactgtatatagttgctgctggatcccctgactcgagtgcggggttggacgatggtt

SEQ ID NO: 449927 - DNA, 790 bp, Homo Sapiens
gcagtgtgacatgcagaagtagaagctggtgaggggcagggtccctggccagaaggggcatggccacctcccaacctgatgacctctctggctggcctcccaggaggagggacactcccaccccaacttcaagttggggtgggggaggtggcgggaccatgctgggcctgacagggtccaaggccatccttggcttcaacgtcccaccaggggagggtcttggccccccacctgccagcactgggccctgcctctgcagctgtcatcagaaccttcccctcacccacacctgctgctcgcctcccacctgagaggaccacctgagggacccagcctctagccaggttctctgcccctcaccagcccctctggccaggtcaccagctgccactctcagatgttcttttggcctttgcagcgtctataaccctccccaccttctgctcctgcaccctggccaggcctcgtcacaggcaaggacacaacagctcagcaggtgaagccctgggcctggtgggactcaggtttgaataggaaaagagcagtgaggggccacagtgacaccaagaagggaaggacgggggccctctgagaccccagggaaaggacttttggggcagaattcccaagaactgagagggtccatcccccatgggcgttggccccttactctgccagatgctgctcgttgcctggcaggagccagatgtggtcaacctgcattccctgggagcccactgtcccccgacgcgtggtcgacgatatcccggaattccggaccggtacagct

SEQ ID NO: 449928 - DNA, 876 bp, Homo Sapiens
  misc_feature (249)..(249): n is a, c, g, or t
ttatggttgtattagagatacggtttcaccattgttggcgagtctggtctttggactccgtgactttaaagtgatccggcccgccttggttctcccagagtgcgtgggattaacaggtgtgagccaccacacctggccaggataggcagacttttaaatggcgtctggtttccccgatagcaagagttccaagggacagcaagtagaagctgtcagcctcgttaagattcaggatctgaaagtgacacnaatgtcacttccacttttggataaagcaatcagagccacccatattcaaggggaggagataaaacccttaggtcttgggggacttgagtgtcaaagaatttgtggccacctttagttctccacattctgccagccaggatgaaaagggtttgtttttagttggacattatcctagtctgacctcataatgaaatgttttgcattcatgtagatctttacacattaaaagacagttcatgtgcactgtctcaatttgtcctcacaatatctctgagatagtagttgggcaacaaggagacagaggcacagaggtgagaggcctagggtcacacaacttcctggggacagagttgagacttacatctcaatctcttttctctgagtccatgtagagggattctggtttgtttaaccaggtcactttgctctcagacacagagagcaacagaagatgaaagcatatttccctttggctgaaaatgtggccacagagctttgcaggtgaagttcaagttgctggtaaatgtcatgttaacatggctactgcagcgcctgctacttggtaagactcttttttttcggacgcgtggtcgacgatatcccggaactccggacctgtaccagcct

SEQ ID NO: 449929 - DNA, 941 bp, Homo Sapiens
acgagcggcaaaggaactcagcccagatcgccaacctggtgtcagaggacgaggcagccttcctggcctccctggagcggggtaggcggatcattgatcggactctgaggaccctggggccttcagatatgttccctgctgaagtggcctggtccttgtcactgtgtggagacctgggactccccttggacatggtagagctgatgctggaggagaaaggggtccagctagactccgctggactggagcggttggcccaagaggaggcccagcaccgggcacggcaggctgagccagttcagaagcagggattgtggcttgatgtccatgcgcttggggagctgcagcgccaaggagtgcccccaactgacgacagccccaagtacaactactccctgcgacccagcggaagttatgagttcggcacctgtgaggcccaggtgttgcaactgtatacagaggacgggacagcagtggcctccgtggggaaaggccagcgctgtggcctcctcttggacaggaccaacttctacgcagaacaggggggccaggcttcagaccgtggctacctggtgcgggcagggcaagaggacgtgctgttcccagtagcccgggcccaggtctgtggaggtttcatcctgcatgaggcagtagcccctgagtgcctgcggttaggggaccaggtgcagctgcatgtggatgaggcctggcgtctaggctgcatggcgaagcatacggcacccacctgctgaaactgggcactgaggcagaccctgggccctggcacagagcagcagggctcccatctcaatcctgagcagctgcgcttgggatgtgaacacccagacccattgaccccagagcagctccggcagtggacgaacactgtgcaggaggccgtggggcaggatgaggctgtgtaccttggaggaggggccccg

SEQ ID NO: 449930 - DNA, 771 bp, Homo Sapiens
  misc_feature (639)..(722): n is a, c, g, or t
tttgtgcttgacgtgcccatcttccttacccacccccttgacctgcttcttgagctttgctcagggcttcttgccacctttgcagctgtacatggcacctgccatagggctctaattgttaaactgagaaattgagaaaacaggaaactgactctttttggggggagagtaagacaaacaggaaaaggaaaatgaagacgtggttgatacagatcgttggatttcgaaaggaaaagtctacggataaccgaaaaaaataaatatttagaaatgcatagtcttggctggttacataagtatccatgcttgttcttgtggcatagtagttacgagacatttttagttaaatggaaaaatgtgaattactatagtttgagtgatatgctgctttccaaattaaaagcagcataacaaaaacattcccctaatactcataaataattcattgaattggcaataattcacctcctaatgacttcatatgaagtataaagtaacttcgatacatcagaagaaatcctatcttctagtataagaaagtaatatgattacattaaatgcgtctcatataagttataaaaatggtatctatgagtaaagaaatgcttgtgaacagaaaaattgatcttataaaggtcnnnnnnnnnnnnnnnnnnnnnnnnnnnnnnnnnnnnnnnnnnnnnnnnnnnnnnnnnnnnnnnnnnnnnnnnnnnnnnnnnnnncagacgcgtgggtcgacgatatcccgaaagttccgggaccgtaccagcc

SEQ ID NO: 449931 - DNA, 540 bp, Homo Sapiens
gtcagtttaataacataaatatcatcttctctctatcgctacgcgacacaacttatgtgtattttgctctctagtctagtttttcttcattgtgctatctaccccttgcttggtttccaaagtgcagttagaatgactataaattttaacctccagaggaggagccaagccaagccgttctttgcacccaggcatctggggaagtagagaggccctcagcctggaggggagacctaggccaaggaactgggtgggggctctctctcatgtgtgtgtagggggtgagttgagggcatcttcccccagcccacattcctccttcccctacgttcaaggtggcttgtcccttctcaatcctcccgcccttcccctaccttctgagaggatggggtcctgggaactgcaggacacagctcccccagcctcccacactgtcctttccattagcaagttcagttgtttgccctgtcccagggctggcggtctgaggagggacctggcagtgcggcgtgtgtgtcgacgcctggtcgacatatccca

SEQ ID NO: 449932 - DNA, 970 bp, Homo Sapiens
  misc_feature (44)..(330): n is a, c, g, or t
ggtgctttttcgcgcctccctttgtggttgtcgttttgtgtggnnnnnnnnnnnnnnnnnnnnnnnnnnnnnnnnnnnnnnnnnnnnnnnnnnnnnnnnnnnnnnnnnnnnnnnnnnnnnnnnnnnnnnnnnnnnnnnnnnnnnnnnnnnnnnnnnnnnnnnnnnnnnnnnnnnnnnnnnnnnnnnnnnnnnnnnnnnnnnnnnnnnnnnnnnnnnnnnnnnnnnnnnnnnnnnnnnnnnnnnnnnnnnnnnnnnnnnnnnnnnnnnnnnnnnnnnnnnnnnnnnnnnnnnnnnnnnnnnnnnnnnnnnnnnnnnnnnnnnnnnnnnnnntggagccctctgttcttaaatactcttcaaaatcaggctaaacctccagaaaccgaatttctaggctgcaatggcattcctcatcgcccatgctgcccttcaaggcgtttctgcagctccaacaacagctcaccctccgtctccccacaggctctggggtgaccctgaggtttcctctcccggccaccatggccctaccaatggtcactgctattcccacagcaatggtttgcctcatgcctcgaaactagaaaggctggagctgggagaacgagaaccctaggagaaagagaacaagaaattccaagactgtcatcctcctaatcagagggctagacttggatgtggctccgtccccacccatgtgccaccatcactgggcacttaatacctgcctggatgctgccaggccaagagctctgcctggggaccaggtacagtaactggcccccagatggcactggagatgcgttccacagtctggggagtgtggtactgcgtgggcaggggcacagatggtccaggaaggtaggtggcaggagaaggcccagcagggcccctcccaaaagactcaggccagagtaagggcctgcgagcgcgtggtcgacgatatcccatacttccggaccggtaccagccg

SEQ ID NO: 449933 - DNA, 642 bp, Homo Sapiens
ttcacccgggaatgtgaccgccacacctggggcccctgtgagccggcaaggattgagcccaagggtccggttagagttacagcacccgatcaacaaaagtagggaggactcaatcaagggtctgcttggtaggagtcgctggtgggagtggcctgtgccatggaggcacccgttcctggggcccctccccctggccagggctgccttgctggccccagatgtggctggcttccctggggaggagaggctgagcacctccttgggcaggtaagaggcggtcctctgagtgccgcacccagtccttcatgccccggcggccccgcatggggaacgtgatgtcactggacacagtctgagacgggctctcgctgaatgctgatcactagattatctgtgacaatcagagagctctggaaggccttgagagcatcgcaccaccaggtgaatgaagtcctccacgacacggagcaggtgcacagagccaggggacacctgctgagctctcgtcccacttctccttgttttccgcatccaccatgaagctcaccacctggaagaaaccggacgcgtgccccgacgcgtgggcgagcgcgtgggtcgacgatatcacaatacgcgcggggggggccatggttatctcaa

SEQ ID NO: 449934 - DNA, 765 bp, Homo Sapiens
cgggacccgctgaacctggcgctgcgccgctacgcgggcatgaccctcaccaacctcacctttggggacgttgccaacaaggccaccctgtgtgcgcgccgcggctgcatggaggccatcgtggcccagctggcctccgacagtgaggagctccaccaggtggtgtccagcatccttcggaacttgtcctggagggccgacatcaacagcaagaaggtgctgagggaggcgggcagcgtgactgccctggtgcagtgtgtcctgcgggccaccaaggagtccaccctgaagagcgtgctgagcgccctgtggaatctgtctgcacacagcacagagaacaaggcggccatctgccaggtggatggcgccctgggcttcctggtgagcaccctgacctacaagtgtcagagcaactcgctggccatcatcgagagcggcggcggcatcctccgcaatgtgtccagcctcgtcgccacccgtgaggactacaggcaggtgctccgggatcacaactgtctgcagacgctgctgcagcatctgacttcgcacagcctgaccatcgtgagcaacgcgtgcggcacgctctggaacctgtcggcccgcagcgcccgtgaccaggagctgctgtgggacctgggcgccgtgggcatgctgcgtaatctggtgcactccaagcacaagatgatcgccatgggcagcgccgccgccctgcgcaacctgctggcccatcggcccgtcaagcaccaggcggcgctctagagtatc

SEQ ID NO: 449935 - DNA, 1511 bp, Homo Sapiens
  misc_feature (28)..(28): n is a, c, g, or t
  misc_feature (97)..(109): n is a, c, g, or t
  misc_feature (322)..(322): n is a, c, g, or t
  misc_feature (578)..(659): n is a, c, g, or t
  misc_feature (706)..(715): n is a, c, g, or t
gggggggagttaggagtgtttacgtagntagagaggggaaaataaaggaaggagcgctagaaaggcgggaaagggaatgaggaggttgtaatataannnnnnnnnnnnntataagtatggaaggtggtagagcgtaatgaggggagggatgtgtatagaggggagatgtgcagaacaagtaggttttgcatgtaaacccgcgtgaggggtaaggtgtacatcggttggggtaagcagaaacaagtgcgtgagatagggtagagaacgcgaggcggaggaagaagagggtaaataaaaatagtagcgagtgtggtgggaggangaggaaaaggtgaggagcggagggttagaacacgagatatggtagatgataaaatatggcggggaggaatgttggaagcaataatgtctgatagtatgtgctatgcggacggagtattggggaaataagtggtaggatgggataagattggtcggggagaaaaaggcaatgggttcgttcttggtggatataaagtgaatgggggtgttgatagcgcaaaagtaagacgtagattgggtaaaaatcgtgatgtggnnnnnnnnnnnnnnnnnnnnnnnnnnnnnnnnnnnnnnnnnnnnnnnnnnnnnnnnnnnnnnnnnnnnnnnnnnnnnnnnnnaaggatgatgacgtgaggtgatcggtacaggaggtgggggaattgtnnnnnnnnnnatgcgcgaaggtgtgaagtgagaatggattaggaatgggggggtagaagaaagggggtgaggggtgagtggtttaggggaaagaaaagaaggtgagggagggagagattgtgggaggtaggggaggaaaaggcgtggatggaagcgatcggattgggatgggaggacggataagaaaatagggggaaaaggggaggggtgaggaagaggggcgaaagtgggcatggccgagggtggtcgaggggggatgaggtgatttgtttagtcccaagacaaggtgcaatgtgaggggcttgcagaggggagggcggaaccaccgttggggtgttatgtatgttgggatagactgatcttagtcttcaatgtagtcttctgggtaagggctgcgccgggggccgggtcgggagggggcaggcacacactccacgttgggcaggtcccgcggcagcgtgctaggccccgcgggcgcagcgcgggccgcgaagttgtggggccacctgtgggctccaggagcggggtggggggtcgcccggggccaccgcgccccccgacattggggctgagggctgcgagccgagtttcggggcctctgtgctcgggggcccacctctgcggccgggccggggcttctgggggccgccgggcagttcccgctgtggtggtgatgggtgcggtggtcgcgggtcgggacccgagtacccggccgcccctcagctaaggaggggcctgcgcgggtcctgccgcgattcctgcccgacgcgtgggtcgacgatatcccaaaccgctgaccagaccag

SEQ ID NO: 449936 - DNA, 651 bp, Homo Sapiens
ggggcacatcgtaggtctcctgcacgcagcagtgggccatcgggcacatccttgctcaccgatggaggaacgtcgtagactgcgtggtggttggacggtggcaggcccttctccacactggggggcacgtcatacacctccagcaacgggtctcggccattgggacccttgacagccatgggggttgtgtcatacacctcctgggccatactggctgggaagcagcccccgaacacgggggcacatcatagatgtcctgtgtccccggggccagcaggtgtcgcggtatgtcgtactcgtcactgctccaggctggcggcctcgtatacatagccctgccccacgcgggtgggcaccaccaccatgacccagagcccagggaagccaaggcccagcacagtgggtgaagaggcaggcagcacaatggcctgcccagggccacaggacccctcaccagcaccagcctgaagcgggtaggggccatgccaggcagcctccttccctgaaggtcttcctgccttggggaggtcaaggcctccctggtgggattctccagcccccgggcacactgcgcccacacgccatccaccaccaggctcactgttagccgacgcgtggtcgacgatatcccataagtccggaccgtacaga

SEQ ID NO: 449937 - DNA, 1001 bp, Homo Sapiens
  misc_feature (404)..(686): n is a, c, g, or t
ttcttacttaatcttgtatcttggatagtacccattgcccacagccttagtatttatatagatgacttagttttcaaattcagtgttttcgtcgataactggaaaaattcattgaataaaggaaccctaggggatagaggctagatgggtaccatgaatgggactaagggaaggacaccggacactactttatcactaccctagggcaccttaaccaatccacaaagtgcataggcgcttacctaatgaattaatggaagatagaaaagcatcgcttaattggcaggtatctgtaaatttccaaataagattcacatcagtgctatctgtatgtaaaaataaacagatgttccaatccgtacacaaacattctcccaatattagggctttcttgtgtcttcctnnnnnnnnnnnnnnnnnnnnnnnnnnnnnnnnnnnnnnnnnnnnnnnnnnnnnnnnnnnnnnnnnnnnnnnnnnnnnnnnnnnnnnnnnnnnnnnnnnnnnnnnnnnnnnnnnnnnnnnnnnnnnnnnnnnnnnnnnnnnnnnnnnnnnnnnnnnnnnnnnnnnnnnnnnnnnnnnnnnnnnnnnnnnnnnnnnnnnnnnnnnnnnnnnnnnnnnnnnnnnnnnnnnnnnnnnnnnnnnnnnnnnnnnnnnnnnnnnnnnnnnnnnnnnnnnnnnnnnnnnnncaaaattaggctttctaaaggactgatggcatcctgctgccagatgccacagtttatggggcccatgcctttagaggaaagaacattgtgcagtgcatcccatgctagtttcctagaatgatttcagtggtagatcactttctgattgatttatattttaaagcaattatttccagaatcaaaagctcgcgacgcgtggtcgacgatatcccggaagtccggaccgtacacccttggcctttttaattattagacaacgcggcgagggctttgtttttcttatttaaggtgtggtgacgctctgaagtagggcac

SEQ ID NO: 449938 - DNA, 1336 bp, Homo Sapiens
tgatgtaacaaattttcctggaccaagtgtgacttgttagatcattggtagatgtttcgttagtatgtgacgaggacctggcatgaccactagccaagtacttgtgaagagcaggattgtgtctttctgtggattgaagttaacaagtgtcattgggcaatgaagcgcttctgattacttgttggattttgttattgatgtatgagtgtgtgttcgttgaggagccctgccctgtgtacacaagaaggacaagtattcagcagggttcattcaggatacggttgtcaccttctgatcctagatggaatgattaaattgccttgactggggatcatgtaggtacaggatttgcagacagttctgaagggattagaaccatgagggagaaaagagttgacttgctgggctggtaaaatgtcttgattctgtataggttttgacggattcgaaaggtcttcattctctgttcctacaggattaggagtatatggagtggagttggagctatgacattcgctaatggtaccagacctgcattgttataatcacttggtgcaatagttgcaatgtggtcggcatggatgtatcggataaggaacagttttatgtggattatatgttgaaggaggtgttttggatggcccaagaattcgtgcagctatgtcctttgccttcgttagtacatgtctgtcaccatcttgttttcaaaaggagttcactgggaaaatttccatttatgcggctaggtcttcctttgggatattggatttcctgggattgttccacaagaagatatcatagcatgaggagctttgcagccccccttgaaagcctgttcaagtattctcttgcaccgtttgcttctcagacatatttaccctgaataaatcttcaaatagggacgagaattctgtgcatcaataatgttcgaggctaacagttcaagagctactagtttgtctttactgaaagtgaaacagttgagtatattgaccacttctgttggctggacagccaccattttatgctgtaatgctttcattgccttcaactggggctcggcccaggaaaaatatctcagcaaatcaaccacctgttcactagaaaagtatccatgcacatattcaattgcttttaatttgtattctgtcaaacagcctgtctaatttcatccagcaccatttcaaaggactttttatccatcttgactactatcccgacgtggttttaacagttatacttgcaattaaaagacgttcatccctggtctgctccgccgatagtaaaaaatacggacgcgtggtcacgatatcccagcattccggaccgtacagcc

SEQ ID NO: 449939 - DNA, 779 bp, Homo Sapiens
accacctcccagtggcgctcacagccattgggcagcacctcatactcatgtagggatgatggcacagagttcttgtgtggggagctcatatgttgtgaccccactccggttccgggccacccgtctgagatttcagtgttgtctgttgccactctcttacgaaggggtttcagactcattctggggggtccaaggatgaaggaggcaagggtagtcagtggccctctgggaagaaggaaatgtctgggcacaacctccggacattctttgtcgatctgcaagcagcacctcgttgtccttgaagtacgtgttccaccggctggtcagggttggtgtttgagtggatggtcctcaaaagtcacatcctgcctggacacacccatgttggccttggcaatgccaggctggatgatcatttccctcaggaactgggcatacagctccctctgcttggccaggatggaggtccatgaggctctcgtccaagggaaggtagttcaagagaatcttccagcagaggcaccgcagtccgccctcacaggggatgccactaaagctgagttcccgcagcttttccaatgcaattgagggctccattcaggacatcctggaaatctgcaattcggctcttgtgcagacattgacactggtgttgacttccggaccccccagcacgcctccgccgcctgcgcctcgtgccgcctgctctgccgccgccgccaccgccccccagcgacgcgtggtcgacatatcccgtaactccggaccggtacagcctt

SEQ ID NO: 449940 - DNA, 922 bp, Homo Sapiens
  misc_feature (616)..(797): n is a, c, g, or t
  misc_feature (837)..(874): n is a, c, g, or t
cgtgcctttcggtgcatgttgcgtcaccttctccctcctttgaaggtgttccatcactgcgagtcatccagtcgtcttgatttaggttgtcccggatctcggccatgaggttgttgtatcagaatcaggtgtctgcctcggcgtgctctttccactcactatttgggctcgttgtcaaaggtgtattatagggtccccacgatttcattcatgccttgcacataagcgatgccagggttgagcttggcgtagatgaacaggatccgctccaccacctcccagtgggcctcacagccattgggcagcacctcatactcatttagggatgatggcacagagttcttgtgtggggagctcatactttgtgaccccactccggttccgggccaccgtctgagatttcagtgttgtctgttccactctcttacgaagggtttcaaactcattctggggctccaggatgaggagtcaagggtagtcagtggccctctggaagaaggaaatgtctgggcactacctcctgtcaagagggaacaggaaataatcttgttactcaaggtggaagttttcgccatcccatctgccaggagaccccaagactccccataagcattgnnnnnnnnnnnnnnnnnnnnnnnnnnnnnnnnnnnnnnnnnnnnnnnnnnnnnnnnnnnnnnnnnnnnnnnnnnnnnnnnnnnnnnnnnnnnnnnnnnnnnnnnnnnnnnnnnnnnnnnnnnnnnnnnnnnnnnnnnnnnnnnnnnnnnnnnnnnnnnnnnnnnnnnnnnnnnnnnnnnnnnccgctctcgacgaattcgagctcgccgatttggcctgatnnnnnnnnnnnnnnnnnnnnnnnnnnnnnnnnnnnnnnccccacctcgtcagaataaaacccgcgcggggggtcgcccctattctt

SEQ ID NO: 449941 - DNA, 1364 bp, Homo Sapiens
  misc_feature (22)..(22): n is a, c, g, or t
  misc_feature (35)..(35): n is a, c, g, or t
  misc_feature (44)..(44): n is a, c, g, or t
  misc_feature (66)..(66): n is a, c, g, or t
cggcctgaaaaattaaccccgntggaaaccggccnatctgggtnagtgatgagcacgtcgaacatnaccacaggtcgccctttccccgtcggtatgaaccacatgccacacacagcagcccagagttaaaggcctgggctgctttctggacctggtacgaggtgacaggcttatggaagctcttgagggcattgatggccttggcatagcccagggccctccacttgtctccctgaacactgtaggctttggccagaacttccagcttctctgtgatatggaggttgtgatctggttgccttctggcttgagggctgtgcacagacccacttatccaggacagcaggggctgggctaggctcacaatcctccctcaagggaggtggggtagtggccactgatgagggcttccagatcagcctgcactaacctgggtttctttcccccatcactggcttcatcatcagagatgggctgggcttgggtgtttggtgcctcttttgccttttggggaggagacacaggcctggtgggaggaggaggaggagaaagggctgtctgaagcagggcctcatgggtgccaggaggaatagaagcatcctgctctgccttgctgggctgtggatggtccaagtacctactggggatgaagatgctgaatccagctacatccaccagcctcctctcctgaaggcacaagctcagccaggctgacttcaccagctgagcacccgggggcagctggggtagtctgagaaggcggagggctcgctcatagtccatgccttcatccaccacaatgtgagtgacacctgggccctgggcagggcatagctggccgccatgctgaacaatctgcttctcaaagagttctgcccgggctcgtccaatgccagtgcgcacaacatgggcccgaagggagctcagccactcttctgcttcttctccctcttccctcctaggaatctttgcaagtacttttgatgatgcatcagcatgaattttctgccgcttgggaaatgccttcaagatacccctgggatccattgaagtatggctggatcccggcctattggagcgttggtcagggctgctgtcctggtctcagcctctcgacatgggggtgctcagcgccgcagctgcggggagatggggcacggccgcagcaggtgtggggagccctccgggaatggaggagtctcgcagctgcgggtgaagtcccgggcaggtgcggtgtactcgccgtgtacgcagctggcgcaggccagggaatcccagctcggggctagaagaaagctggagtgcccgaccccggccccaagagtctctccaacccccagagtcggtccccgggtggggtcgac

SEQ ID NO: 449942 - DNA, 748 bp, Homo Sapiens
ccatgtactctctgttcatgggagctgctgcccccacctccagtctgaccgcgttccatgttatgttaaggaaaaatccgacacagtggtgggtagaacccgagagaaaaaatggctgtgggatggggtaggggcgacactggctcccttctgcatttgcccaccctgaagtccctcacagcattccctggtgccctctactcccctcccgggttccgtcttgtgggggataggtgtgctgcctgccctgtgctgcagagggaagtcgcagtcagcagggtgaggggtggctaaggcgtagtagtgttgaccttgctgtgggggacggggaaggcaaggaggtccccaggcctctggctctggggtgtgatttggctagagatggatccaggactctttcccctttaggtgcctgcccaaagcccttggggcagaggtgggagtcctgagaactcaggaaggtgcctggcttggcaccagacctctctgtagagtcagctcccaggtcctgggaggcacccgaatgccagcagatgctacaactgtccccctaacccccagatatttcgtccacagcaagatccttggcagggcaggcagctgccacctccccaccctgcaggacagaaatccctgaatattagtttgaggaaagtctttgtccagcctgtgacacaagacccccacagaacccctgcaccgacgcgtggtcgacgatatcccggaaattccggaccggtacaagcct

SEQ ID NO: 449943 - DNA, 1551 bp, Homo Sapiens
tagccccaaaaaacgcagtggcagcctctcccccgagagcaaagtgtgcttaaaaaagacaggtatttttgttgtgacgccccccttttccacacaaacttgtatgggagacactgggagtgagctcctgcacccccaaaatttggtataattttccccgcagtcaccatcctcctggggacgagaggcgtcgggaataccccactggcggggtggaattttcccccccttgagagtcccccccataggatattctctcggaaatgcccccacggctctggtggggtgaattcccctccttgtgggagtggtccccgctatgattttatttctcaaatagacccctgagacaaaaaaggttgtgggcgtgggcgccacaagggggggcccatggagaacccctggtgggggtcccccaagggttttcttcccgtgaaaggggtttaagggccatatgcacctgttcccctgacccccgggggagggcgcaaaagggcttgccacgtataagcccaatggatttacgggcccacttcccatctcgcaaggcgtggggcaaactaaaaccggagggcccccagtttttatatggagaaaagggggaacacagagaggagggccagggcgaaaaaaggaaattgacccctgagcataaaaaacaaatcttgggtggatccagatcactcatatccaagagatgaaattccttccagggtgtgggattggggtgagatttccttttaggtactaaggttcacccaagaggttgtcagccagggtttggctgggccagcagagacttgacaactccctctacctaaccagctgcccaactgtagaaactaccaacccaccgaccaacagggagagggaacaagcaccctcaagggggtcaagttctagaccccatgtaataaaaggtggtttcaaggccagatgtacattatttcattaaccctcacaatgcactctgtgaggtaggtgcaaatgccagcatttcacagatatgggccttgaagttagagaaaattcaacagtgagggacagcttccctggttagtacggtgaagtgggcccctacctagaatgtggctgattgtaaactaacccttaactgcaagaacatttcttacatctcccaaacatccctcacagtaaaaaccttaaaatctaagctggtatgtcctactccccatcctcctccccacaaccaaacaccagtgcaggccaacttgttcagtggagccccgggacaaagcaaatggaagtcctgggtgcttctgacgcacacctattgcaaagcaagggttcaaagacccaaaacccaaaatggcaggggagggagagatgggggtgggaggctgtcagtggggaacaagaagtggagaatgtcagtctgagtcaggcccttctgtcttgaacatgagttttttatggcgggaggtagactgaccctttttgacttcaggtggctggagtgagccctgctccccctggctccttccgacgcgtgggtcgacatatcccgggaattccgaccggtacagccca

SEQ ID NO: 449944 - DNA, 892 bp, Homo Sapiens
  misc_feature (310)..(356): n is a, c, g, or t
  misc_feature (391)..(411): n is a, c, g, or t
gggcccacaaatttatgtaaaaggggcgaataaatggatataaaagagaaggagggaaggtgggaaaagcaaggcctgcagaagaaaggagtgacctccagctggacgtggggccacaaggtgagcgcagcactctggagactgagacaggtggatcgcctgagcccaggagatttgagaccaccctgggcaacactgtgagaccccatctctacaaaacacgccaaagttggctggccatggtggcaagaacccgtggtcccagctactccggaggctgaggcaggactgctcgaccggggaggcaaannnnnnnnnnnnnnnnnnnnnnnnnnnnnnnnnnnnnnnnnnnnnnnaccaagcgagagccccgtctccaagagaaaagagnnnnnnnnnnnnnnnnnnnnngaaattgaccctgagcataaaacaagtcttggtggatccagatcatcatatacaagagatgaaatcctccagggtgtgggatggggtgagatttccttttaggtactaaggttcaccaagaggttgtcagacagggtttggctgggccagcagagacttgacaactccctctacctaaccagctgcccaactgtagaaactaccaacccaccgaccaacagggagagggaacaagcaccctcaagggggtcaagttctagaccccatgtaataaaaggtggtttcaaggccagatgtacattatttcattaaccctcacaatgcactctgtgaggtaggtgcaaatgccagcatttcacagatatgggccttgaagttagagaaaattcaacagtgagggacagcttgcctggttagtacggtgaagtggccctcgtgccgattcgccacccagcctcgctacctagcctatgttatagtt

SEQ ID NO: 449945 - DNA, 1651 bp, Homo Sapiens
ccttcatcgacctggcaggccatccataacgtacctacacaccaccatctttggcctcacatcatactgcccctgactgcgccctgctcctcgtcagtgccaacactgggattgctggcaccacaagggaacatctggggctggccctggccctgaaatgtgcccttcttcatctgtggtcagcaagatcgacctatgtgccaagaccacagtggagaggacagtacgccagctggagcgggtcctcaagcagcctggctgccacaaggtccccatgctggtcacctctgaggatgatgccgtcactgctgcccagcagtttgctcagtcacccaatgtcacccccatcttcacattgtccagtgtgtctggagagagtctggacctcctcaaagtctttctgaatattctgccgccactcaccaacagcaaagagcaggaggaactcatgcagcagctgacggagttccaggtggatgaaatctacacagtaccagaggtggggactgttgttggaggaacactttccagtgggatttgccgtgagggggaccagctggtggtgggccccacggatgatggctgcttcctggagctgagagtatgcagcatccagcgcaaccgctctgcctgtcgtgtgctgcgagctggtcaggctgctacactggacgcttggggactttgaccgtgcactgcttcgcaagggcatggtgatggtgagcccggagatgaatcctaccatctgctcggtgtttgaggcagagatagtcttactgttccatgccaccaccttccgacgaggattccaggtgacagtacacgtgggcaacgtacgtcagacggcagtggtggaaaagatccatgccaaggacaaactgcggacaggcgagaaggcagtggtacgtttccgcttcctgaaacacccagagtacctgaaggtgggcgccaaactgctgttccgggagggtgtcaccaagggcatcggccatgtcactgatgtacaagccattacagcaggagaagcccaggccaacatgggcttctgaacccttcaggcagggacagttctattgctgtccctacaatatataaggtgacttctggccatgctgccctgccattggcggctctgtgtgttaataggctagggagagaggggtgctgtctgccacttgctccctgccaactttctggagaggtgccaaacttggtgtggccaggaaagggcagtcctgagggagaagacaggattcagggcagtgctccgaagctgtgtgctcacctggttggctcatcaaacctggcaaccctgtggcctgtctgccggagctgactggatccactcatcaattcttcgtccccactactaagactgggcatgttttgctggtgtggtctctgcacttcaggaatggtcacaacagggggtagccctcaaaagcactccctttttctatacctcttctcaaggccatgtaagtagccatctctacctggctgtggacaaaaggttatctgctcttggcatctggtggtggtggccggccagagtctgaagaaatggcacagggacagtgaatggtagtgtagcaccctgtgctgaggtctgaggcctctttctcagctttatctccctttctttcatcagggc

SEQ ID NO: 449946 - DNA, 890 bp, Homo Sapiens
  misc_feature (95)..(121): n is a, c, g, or t
gagtaacagacagcataggtgaactatagaacagccggttaataaagcaggtggtacggtccggattcccgggatatcgtcgaccacgcgtccgnnnnnnnnnnnnnnnnnnnnnnnnnnntaccagagcaagtactgtgtgaacatgtggaagtccatgccctaatagagttgcaattttttattcttcttctatagtggtggcttggtttgtgtacctatttttctgcatttgtattggaaaaggtttcttttaagacattttccaaaagtggagaggaatatgtgtgttcaggaagggctttcaaaaaactgtatatctaaataaagctcaaacggtgaaatcctgtcacattttcacaatgatgcttaaaagataattgagtaaaccaggttgttaatctccttaatacctgaaagaggacacactgaaactgaaactgtgacatcctgctaggtgagttcaggttctgaacctaggaaatcctcataggagaaaccacatttaaacaaagatgggactttctctgagagccaaaaccagataaatgtagaatactgaaatcctgtgttggacattaagtaaacaagagataatgatacctaaattaatcctctcttgtgcttatgaaacatatgcactgtacaaataggcataccaggaggaaatagatacattaatcatcatttacttatgatacaaattatttattttgacaatttataacgtttaaaaaagttttttaaagatctagaagaaaggtgatatagtaaacattcaactctgtacagaacatgggaggtcagtgcaaggctacttcccaatcactatttggctcttaagtacctcttcccagtttcctatgtatcacctattctgtccggaattg

SEQ ID NO: 449947 - DNA, 1111 bp, Homo Sapiens
  misc_feature (953)..(1015): n is a, c, g, or t
cccccttcgtacagtagcggacgtagggctggtagatccaggccatctccccagtgtagatcagctccgagctcctgtctaggatgtcctcgccctcccagtctaggacagaagcctgccactgagcaatcttgtcaatattctctaaacgtcgcttgcgttcgttgatctgctgagtcacatttctcatgacagccaaagcagctgccacatacctgtagtcactgtggtcttgggcagtatactttaggagctcagccaactgtaagggatacttgcagatcttctgcactggagtcaaaaggaaaccatcgatagcaatgtcaatcatctgctgcaagaggcgacaggcctcaaagaagtgctggtagcggctgtccttcatcagtttggagagctccatgcaagcatccaggtggttgttacaatactcagagtatatccagaatccatcttggtgctctaggaagcagggtcctatctcgctgaggtgggggtcatcattgttatactgtttctccaggtctctcacaaagcccatctgaaatctgtagatatcttcaatgttcccaaagattaccttcagttgctcgtcactgaacatgtcccttctcttccggcactgcttcagatagccctcacaaatatccttgaggtgcttgatgtagtgacgctcagtgctcattatctcattgatgacattggcccgcatctggtcccggttctgtagtggccgccccagacagaggcagtctgaattggggtccaggtgtccgttctgcacatcgctgggcccctcctccacctcatcctcctggttcacccagagcattcccgatccgccccttatcacactgcatggtgcttgcgaagtccggcttctctgaggccccgtagctggcgcgagttgtcgacgggctgactagaagggctgggtctgaagcaagcgagannnnnnnnnnnnnnnnnnnnnnnnnnnnnnnnnnnnnnnnnnnnnnnnnnnnnnnnnnnnnnnacctcgccttcagtcagtaatgttccatgccaaccggcaggctctgtctctactcgccctgactgctcctagaggtcttggcagggagagccgctt

SEQ ID NO: 449948 - DNA, 1073 bp, Homo Sapiens
  misc_feature (230)..(230): n is a, c, g, or t
ggggggggcgaggcgcaaaccgcggcgcgagaccggggcgtcaggggggcggagcaccggtggtttagaggggcatttcgaccgacacaggctgggcgggaaattttaaccgggggagtgggcgcgtggcccaataaaaacttcgcaagagaacggccaaaacaaacgcggccaggcgcccctggcgtcagcgcacgacagtcacgtgggaggggcagtggccaggtcgnccttggacgggtacaccaccttcaggctcccttccagatccaccaccccggacctgctccaccaccagaagggagggcccgtcctttccagcactgggattcgttgtgggatctgggagttgtccagagactgcatcggcttcagtatctgagagtgatccttcctctgttattttctaaagtgtactttttcatttctgccattgttcagaatgagggcatccatgacatccttgcaaatctgcagactggtggcacttgttacttccaaggacaaatcagaagtcgttttcttaacctttgtcttctcactgttggttattggtgggaaggaaatcacatcaccgtctgcatccacaagacacgggtaattttcatttccatccagcaagtgaaggtatctgtgcaggcccgacacactctgccgcttcttctgcttcctctgctcctcggcctccagctgcagctgccgcaccagctccttggccttggcttctttccgccccaaggggacaatcttgaggtcctgtgggggccgggcgcagtacagcaggggccctttgacggcacggagctcgtgggtggcaagggtggcagccgtcctcttctcacagagatcttcgtggagcttggtctgcgaggtgaggaagcgcttgagtgcattccctggctgcaggtccatgcctcgcaccacggcccccacaatgtagggccgcacatcccggacctcggggctcactctgacttgtcagaggtacggggttttcagagaccgtgcaggaccctgagcagcagccgccggcatctccccgacgcgtgggtcgacgatatcccggaactccg

SEQ ID NO: 449949 - DNA, 855 bp, Homo Sapiens
  misc_feature (30)..(30): n is a, c, g, or t
  misc_feature (54)..(54): n is a, c, g, or t
  misc_feature (817)..(817): n is a, c, g, or t
ttgggttagggggccgggagtttgctttgnttaattactcggagtggcagggtngggtccactcccgcgctttgaccaggtcgtccctgccccgtaatctgctcattcatgactgtggagagttcgctgagcatgtccttgtagtgggacctcagttcttcctggtactccagctggtcctctttgatgaggcgctcagttcacgtcaaggggctgcccagcagtgcatgtgcggagttgcgctgaaggatctccgttcggaagctttacttggttgtgcagggtacttctttgcattggtttcttcaagaaaagctcgtgcataggccattggcccagcattaaccttgcacgctgacacttccttgcagtttgagctgcagtctgatcatgtccacttcttccattgtgcaaagctgattaagctcagaaaccttcttggacatctcgtcaattgccacttcaattggattcagttctgtgctcgattggctaattacttgtattctcttcttcacgtaggggaacaggtgactcgttgtcaggatcgtccgccgcttgcactgctccgccaccccaccgtgcttcttgcccgacagcgtgaagggtgtctcgaagacaaagcggttgatgttgtggtgcatttcgaaatctgtcttccggtcttcgatttccttttcctcaaagaacggcgtcacataggtcacctggatgtaggcatatttggggtccaaatccttggggtttaccttgttggaatcctggattatcttcacattgtctgctccaaatttatctgcatagagcgacgcgtggncgacgatatcccgtaacttccgaccgtaccagcactgg

SEQ ID NO: 449950 - DNA, 689 bp, Homo Sapiens
  misc_feature (283)..(293): n is a, c, g, or t
  misc_feature (630)..(642): n is a, c, g, or t
ggtattcaaaattagaccccctaccccgctatttctcctctcttagatgacatgccccattaaccgcatccctgattgggttcattatctccccattaagtaatggtgacacccccccttacactagtatcccaactctgataccaatccttaaggtattgagtccagttagaccgagccagaagctattgttgggcccatactggcgccaattctgagaacccaccttagccacattcaagccatttaaccccttttagacaccccaatggccagatgaggnnnnnnnnnnnggatgaggtccattaaacttttatcactggaaacatgattcccactgtttccaaataggaaacctaccctgggagacttccaccaaagtgcagaaggacctgatgcacgggctcatcatcttaacactagagtcccaagtcaaaactctaggaggaggataagaaaggtctagtctgtgaatcacctggacagaaaggtcatatcccaagtgccctgcctatctgtgacagctgctagcccacagacaattctggttatgaagttatctcttgagaatggcttgattctcttatgccacccacagtattagtctgggcagggttcctggatattacnnnnnnnnnnnnncgacgcgtgggtcgacgatatcccgagaattccggaccgtaccagca

SEQ ID NO: 449951 - DNA, 489 bp, Homo Sapiens
  misc_feature (218)..(229): n is a, c, g, or t
agatgggcaggcacttgggattacctttctgtccaggtgattcacagactagacctttcttatcctcctcctagagttttgacttgggactctagtgttaagatgatgagcccgtgcatcaggtccttctgcactttggtggaagtctcccagggtaggtttcctatttgaaacagtggaatcatgtttccagtgataaagtttaatgacctcatccnnnnnnnnnnnnctcatctgccatttgtgtttcttagatgggttttatttgcttgaatgtggctaatgtggttctcagaatttggtcagtatggcccgacatagcttctgctctgtcttactgactcaatacctttaggatttgtttcagagtttggatactagtgttagtggtggtgtcaccactacttatttgggagataatgaaaccaatcatgatgctgtttttatagggcatgtaatgtaagagaggagaaaagacagatctgtggc

SEQ ID NO: 449952 - DNA, 1152 bp, Homo Sapiens
cagacaacagcaacggtggggcaggatcatggggtataaagtctccctgggtggggctaaaaatcaggtagatgcaaaaacatccacaaggggtcttgcagggaagggctttgcctcatttctttgagggcttgggagggaagggtcttggtgagggatttgctcagaactaacacacagcccaccctgagcctggaaatcatccattcatagaaaattcccttccagagagaatctggctttacctgcacccacccagtcccctccagactccccactacaggagagagctcttctagagccagagcttggtgtctcaagggggaagacccctgtcctaggaaccccccagcacccctgaatccctcccccacagggccctggggggaacatagcaaggactgcagcccaggctttgcctggagtagacacagccggggctgggctatgagcatcttaagccatttccacttctgctccagctgcctgaccacctgggacccgcaaaggcccaggctccaaggaagtcgtgtgctcccactgtcacccatgctctgctgcctcccgaccctctcccaacgcaactgggttggaaatggatctcggcagaccagagtcagagtaactaattaatcagagcctatccccagagcccagcttgttccctccctaatgcgccttgtcccttcccccacccaccacatttctgaatttcctgcagcccacccaccccctcagatccccaccccaagacttccaaggagctgaggggtcagaggagaggagaatggggtgaagtgggacctacactctgctgaagctgctcatgggtgtggatgaccaaaagtgaggacagaagacgaggccgggggacaggaatgggttccattcaatccagcaacaacatgcaccatgtctcgtccacaggaaaatgctgggctaccacaactgcctaccctagattaaaaaacccttcctttcataaaaatagatgagagtctcttgctttataaatagattacatttagcttaagttacatcttatattctccctaggtcatctgagctcctacccacagagttagtccacgatggattggcccttcacgacgcgtgggtcgacgatatcccgtaattccgaccggtaccagc

SEQ ID NO: 449953 - DNA, 1700 bp, Homo Sapiens
gcagtgggggaggcatgaagagaggtggtgtgggtcgtggtttgtgcgtggagtggtttgtgagcatatgagcaatggttgacaaaatattaggtaagttgtagcggaggattttgtgattaagagcacgatctgctaaggaaatctgttcttagggcagccaatgggtatgcatgtcttgtttgagttacttctatggtgaggtggctggttctggtttgttttcctcgttaattggtcttctgaccagctcctttttgtaagctctccagatattccgtaacattgtcataaccataaaacttggccagatgaatgaggattcctgtggcacagcggccgtcacgcttccgacagtagctgcaattgcagatcccacgacaggggggacacacccaatccgggtccagcaatgccgatctgacatcctccccatagcggttccgcaggcatggtccacaagaactgtcctcgcacaccacagcaaccctggttccgacacactgtcttggtgtcgatggtcttttgtcgacactgatggcacgtgttacccagaactttatcatagattttatctcgaacagttatggcaacattttctaagtcctcttcggtgatatcctccactggccgaaaagaagatatacggtgacgtcgtctgtactcccggcatttccccccaattgtcttccttcttcggaagctgtaaaactcttccgcaaatttagcggctgagacagtgaagttctctagagcaaacttctcaggaggccgcgcactccgggttgggttcatacgccgcgtgatctgtccctccgagaaggcccgcctcactgtcttcttcctagaagctgaggttggggttcgtactgggaagaaatctggcatcgagttcaattccgccaataactgggcaagcatggctttgttctccttgatgttcatggtccttttcagcaaagcatctgaactctcctggctctcatccgcgagagtcatcgctcagactcagaggtagaatcttccctttgtatcacctgtctacagtctttctttcttgtcaagaattgtttttttctcattctgtaagcgtgcgctagaaaacaactgctcggaagaactgtttttatctggtttgttggccagcttcttggtggggaactgaaaggctactcgaagaccaatactacttcttctagacctgcttcttctaggggtagccttatcttcttcttcatcttcctcttcctcgctcaccaaagatgctttgccatcatcactcaaatctgactccacgaccattacttctgggttagtctttccattcagatcactctgcgtaaatcctgcaaaatcctcagtctctgagtcagtgtcctctataaaaattcttcttagctcttctgtgaagtatttggaatgaaagcgcacatcctgctgtttccctgactctagtgagtcaaaactatcgcagctctcctctgacgagagggtttccatgggaacatcatctcggaagccaacaaactcttcatcatcactgggggcgttaaagatgtcagccacttctttagggatctggtagcgagtcgccaactccattcttcctaaccgggctccagtctcctcccagcacgcggccacgggagcccggactcaccacggcccggcgcaccaagaacgccccgcgcccgagcccc

SEQ ID NO: 449954 - DNA, 898 bp, Homo Sapiens
gttcttgagtcttccgctgccttggtcactgatgcgctcctcggatcctccagctcttttttctctcgttccaattctacctgggcttgtctggccatggacacctgtttggtcacctctgcattcttccgcagcaggtcagcgtggttctgaaccagctcgctgtacttctcctttagcttgctatatcgctgttcattggcttgagctttcctttctatctcagacaggctccgctgagccttctcggtgtcctcccgctgcctcctgagctcgtccagttctgcccgcaggaattcacagtcgtcggccgcctgctgccgcaggtgctgctgctcggccagatctgcttccagctcgctgacgtggcccttcagctgcagcacaacccgctggctctcagtcttcatgttttctagctgtgccttcaatccactgatctctctgtatagtcgctcaattaagtggtccttctcatccttgttcacaccattttgactgttgaaattgaagggatcactgctgaatgaactgccaaagatgtcatcaaacttgttgtcaaataaattctgctgagaggcatccatgtccatgaggtcatccttctctaggactggctcgctgtcgggggatgaggcctctgcagggatcaccaccacagggctgatatgttctgacagggctgaggctcgcaggaagttgggtgggttctcaggcagctgggggatctgaatgagccgcttgaagtactgcaggttgctggagcggtagaacagatctttcaacctaggggtggagaaggacctgaggggtgctgggtgtcttcatcagccccatgtaggggacagagcagccacctggctttcctgccccctccccatcccgggaattccggacc

SEQ ID NO: 449955 - DNA, 695 bp, Homo Sapiens
cattcgttatttattcgtgtgcgaccccggctccccgcagcctccacccctcccgcgtcccggtttcagaaggaacgcggccctcagctccctccgaagaggccccgggtcaggtgctgcagccgggtccccgtgcgtcggcccagctcgtccagcaccgccttctccttctggaacatctgctgccactctgcctccgtgccgtgtgtgaatcccagcaagtgacagagtccgtgggtggccgtcacagtcaggacgtcattgtaatcttcattttctttacactgatggaagatatactccactcctaggaaaatgtctcccaaattgtagtcatctggaaaatcaggctggggaaattcacctgctttcagatgctcatgaaatggaaaagaaagcacatcggttgggacatttctatctctgtagattctattaatgtgctgaatattcttgttgtcaacacagatgatccccaggtcaaatttctgcactcctaaaatcctccttacaatctcgatcttactgcgaagtggcgctctcctgatggggatgactcgctgcagatttctaatcaccaaactcatttcaggaagaataaccagccctttaaaaatgtttgcaacggaaccggtgtctggacccagcaaaggacgcgagagcgggcggaccctcccgaccggaagccccgatcc

SEQ ID NO: 449956 - DNA, 992 bp, Homo Sapiens
  misc_feature (707)..(756): n is a, c, g, or t
acccggaataacttgccaagaagcttggaccacagtgagggaggcatcgcccacagcctcgggatgtgtgggcacagacactctccctttgtagtcctgaccaatcttgatatttccattttgggccacaaggacagtagtctctttcaaatcttttccatttttgtccacttcaatcttagaccatttgatgcggagaaattcactggtgttgtaactgggtggcaaagtaggcatcgttgaaaaatgacaaggtaggctgacttttccagagagggagcccctcaccggtgggctttttcccactttgactttatgtagcgcatgggttactattaaggttgaacacatccataagatgctctttatatttatgaacatcttggccttggaaggcggcttattgcagtttggggggaaaattcactgcagcgctgcgcgactgggttcggcgttgcccaggcgggtcacataggaagcgtggtggcccggggaaggatgcggagggtgcgggacggtgctggaagatgcgggaggatgcggggctggccgaagatcttggtcccagctcctgtccacaacacctaatgttctcggctgttgcgtccgcacgcctggagttcttccccagaaaggctcggggcagctcgcctgcaagttcaaatgcgggttgtgacacccatcatcattatatcactgtaccgtcnnnnnnnnnnnnnnnnnnnnnnnnnnnnnnnnnnnnnnnnnnnnnnnnnngttcattcacaggctccaaaagcgctccgcagcttcagccactcctaagagtccaggcttggaaagcaggcggaggggcggaaaggcagctccccgcgcctgcggtagggaccgcctgcctccctccccaggcactcccacctcttggcgtcttcttcctgacaagaagtaccaatcggcgttggggacagccggacgcgtgggtcgacgatatcccgatactccgggccgtaccg

SEQ ID NO: 449957 - DNA, 964 bp, Homo Sapiens
  misc_feature (681)..(681): n is a, c, g, or t
  misc_feature (837)..(837): n is a, c, g, or t
  misc_feature (852)..(852): n is a, c, g, or t
gtggtgtgtgcctttgggtgtcttgcccggtgacgcctgggttgcgcttagttttctaaggcactgcgattggaagagctgtggtgtgtggactgggacttaattactacagtgtgtgtgcctttttgctgtgtttaatgtttgactacgggtgtggttaggttttagggtaaagagtcgctagcgcaggttttgcgatgtaaggtagtgttaattttaacttgtacgagtacagtcgcttgtgcgaattcagaattggtgttttttaaaggttgcacgtaacgtgggataagcttgaagtggtaaagtgtgttggttctcaagtgtgtgtaatgcgttgtgttgcgtgaggtagttgggtaattgaaccagtgtatgtgacgaagtagatgtttgtgttatgtggagaagtaaattgttctggaatgacatgggtgtgcagcgtgaaagccagtgaaatattgtcactgaagacagtgaaatagagtgaatacaatttcctccctgtgccgcgtcgaaatctctgagataaccagtatgtgtagtttcttcttcctttagtgctcaaacaacctgtacacagaaagcatgttttgcatgtgtttggaggagcttttacccccagtacagacatttgacagccgtcttgtccttttcataataatcatgaatacttttccnaggtcagtacgtaaagatgtaacccagttctttgtaaggttcagaatatttctagaatggaatgtatgtccgtattttgggccattacctactacagacattgaagcttgtttctaatgttcacctagaactcctaattttaccttcttttgtttnctattgtgcagattncccaacagtgggattaaagagtatctggcgtatatattttgacattaacatttattttttaaaatccgaacgcgtgggtcgacgatatcccgatacctccggaccgtaccag

SEQ ID NO: 449958 - DNA, 907 bp, Homo Sapiens
  misc_feature (273)..(273): n is a, c, g, or t
ctttgggccatggcagccggaggtgctgtgtgcggcttcgtctatctggagggcactgcctgggcggtccctgaggacaccgaacccttggcatcctgcacattgggacatggcaaccacagagagagcagcccttttctttcccccttggaggcttccagaggaattgactactatgacaggaacctggcactgtttgaggaagagctggacatccgcccaaaggtatcgtctcttctgggaaagctcgtcagctacaccaacctcacccanggcgccaaagagcatgaggaggccgagagtggggagggcacccgccggagggcagccgaggcacccagcatgggcaccctcatgggggtgtacctgccctgcctgcagaatatctttggggttatcctcttcctgcggctgacctggatggtgggcacagcaggtgtgctacaggccctcctcatcgtgcttatctgctgctgttgtaccctgctgacggccatctccatgagtgccatcgccaccaacggtgtggttccagctgggggctcctatttcatgatctcttgttcactggggccagaatttggaggtgctgtgggcctgtgcttctacctgggaacaacattcgccagcagccatgtacatcctgggggccatcgagatcttgctgacctacattgccccaacagctgccattttttaccccatcgggtgctcatgacacgtcgaatgccactttgaacaatatgcgtgtgttatgggaccattttcctgaccttcatgaccctggtggtgttgtggggggtcaagtatgtgaccaatttgcctcgctcttccttggcctgtgtgatcatcctccattctctccattctatgctggggggcatcaaggtctatatttgacccttcc

SEQ ID NO: 449959 - DNA, 1237 bp, Homo Sapiens
  misc_feature (1096)..(1105): n is a, c, g, or t
gtggtaccggtccggaattcccgggatgggacggcgggtgcggcggggccgagcccgcacgatgcctcacttcaccgtggtgccagtggacgggccgaggcgcggcgactatgacaacctcgaggggctcagttgggtggactacggggagcgcgccgagctggatgactcggacggacatggcaaccacagagagagcagcccttttctttcccccttggaggcttccagaggaattgactactatgacaggaacctggcactgtttgaggaagagctggacatccgcccaaaggtatcgtctcttctgggaaagctcgtcagctacaccaacctcacccagggcgccaaagagcatgaggaggccgagagtggggagggcacccgccggagggcagccgaggcacccagcatgggcaccctcatgggggtgtacctgccctgcctgcagaatatctttggggttatcctcttcctgcggctgacctggatggtgggcacagcaggtgtgctacaggccctcctcatcgtgcttatctgctgctgttgtaccctgctgacggccatctccatgagtgccatcgccaccaacggtgtggttccagctgggggctcctatttcatgatctctcgttcactggggccagaatttggaggtgctgtgggcctgtgcttctacctgggaacaacattcgcagcagccatgtacatcctgggggccatcgagatcttgctgacctacattgccccaccagctgccattttttacccatcgggtgctcatgacacgtcgaatgccactttgaacaatatggcggtgtgtatggggaccattttccctgaccttcatgacccctggtggtggttttgtggggggtcaagaatgtggaacaaatttgccttcgctcttccctggcctggtgtgatcatctccatccctctccatctatgctgggggccataaaagtctatatttggaaccctcccgtggttttccggaatgcatggctggggcaccaggaccctggccccggggaacaggtttgaacatctggtcccaaaaacagttgttaaggggacattggaaacagggggnnnnnnnnnnttatgggagtttctttttggcccagccccccacccttttagaaccgaatccctggggaaccctaactttttggttaaaaaatggggacccgaaaaccccggggaatcccccccgggggaaacttgtcttggg

SEQ ID NO: 449960 - DNA, 1204 bp, Homo Sapiens
tcccccttgtgttcgtggggttttgtgtttcacgtgtcgtctcttgtgtgcctgttttgcgttgtttctggacatgctgtgatggctacataccgtgtttggttgttggcccctggtctatgctgtccacccgtgttgccggtgcgtgtgcatttctcgcccgcgttcgtgtttgtgcgctctgttcgtgtttgcctggcgcccctttgggcgttccgttgtggtgctttcgtgtgttgtcgggcctggttcctgtgcttggagttcgtcgtggtctgtgtgggctctgctctcgtgcgtgttgacttctcagttgcccacgtgtgtcaactgtaacattaggtgcagcaagttaccatgttgtctccaattgcgcacatgtgctctatgggctcaagtgtgtggttaggcagccgttgcttgtttaaccgtccgctcagtccctgtgtccacctggaccgttgtgtttttttaagatcccctgattgtgtgtgccttctgctgtagtagctcctccccatcgaatatgcccaggaactttgttgtatgtttcatagatccgtatcctgtttactatcactgcttgtgatgtcttctagaatgcgacgttttgtttcccctgggatatgtccacgaggttctccacacctggcccagatatcaagtgggtccttcttcttcgccctggtggatcgttgcagatggtgcattctttttggttgttaacattcaagctgctctctacaggactcttcccactcatactgcacagaacatttggagaaaggatcccaaatggctttcgagatgatgctttaccgagagaggctgaaggaaagacacttgatgttatgtggctagctttgcatgtttcatcatttacagccttttggtggttcataggagttctctgcgtttccctgctgacttccggggggtgctctttcttctggagcttccaatatggctttaggtgcataacaaagcccctgcgctcctgccccggccgcggcctggcccggggctgcaccagcccgacgcagtggtggcggcagcagcggtggcgggaggcctggctcgctccccaccgctgagtcggaccgagcacccagcgcggcgcggcgcgacgcgtgggtcgacgatatcccgggaattccgactcgtacagcctgctttaataaccagtgttcatattcaccaaacg

SEQ ID NO: 449961 - DNA, 887 bp, Homo Sapiens
  misc_feature (248)..(248): n is a, c, g, or t
  misc_feature (715)..(723): n is a, c, g, or t
tctctccacactgggaacaggcatgtactgcaggtcagttaagatgactaagtaaatccatgataagaatttaggagctgaaactatggttgttacaagtggagaaaaaaatgaaaatgcaaacaagcctctgggcagcaggtgggaggtggccaggcccccacacatctcctgtgcggcccttgaccccttgttgttggcaactgtcgtgctctccaagtggaaaggcaagtgatttgatatttccnttttttttctgactctatgtgaaaattcttttcaaagtaggtaaaagccatcactatatttcaaagaggtcacagtgacatcatatacaaaaggaaccagattgaaaaagatattgctgacatagccagtagtgagattactaaagaataaacagaaatgccttggaaattatttttacaccggcttgaattgaaacattaaagcagaatgaaagctgtaaggtgttcactagttttccaaatgcgttgtcaagtttattggtaagaaatagactcctaaatagatgcagaaagcacttaagtgttctgctcaattcaactatgtgatttttgtctctcagttaaaaatttgtccacctatgtttcaggatatgactacagacgaaaacgatttgtgctttgctgttatggatgtccgtggtcaggatgcctcccacagtaaattaaaatgcttgatttcattaagnnnnnnnnnttagaccctttaatggttaaaacacttcaaaatgctttgaggcagaaactaaacctttccagaataaaggtagcaattcctatctatctaaagtaattccttcagctttcaaatgcagcgacgcgtgggtcgacgatatcccggaaacttccggaccgtaccag

SEQ ID NO: 449962 - DNA, 548 bp, Homo Sapiens
gtcactctaaggatccttttgtggtcacccacaagcacactctggttcacaagcagggcactctgttcccctcccccttaagccaacaaccacagtgccaccaagctcacacctgtccttctcaggctggcatctcccccaccctgtgccccttttcatggtaccaggcccgcactgggggcaattgacttcctccaatccccactcctccgagacccaggagacaaacagcccttccttggggaaacttgggaatcattctggcttaaacaacacctcctcctgctgctcactcccgctgagcccactctactgccccagctccgtttctaccaccgcatcctcactgggctcactgcaggcatgctgaacaaggggcctccaaccttctgccctcctgccaaaagatctggggagtgtgaggagagggtggcatcaggagctgctcaggcttggcggagggagcggcatgggcgatgtcactcagccccttcccggtccgcccgcttccctccttcatgatttccattaaagtctgttgttttgtg

SEQ ID NO: 449963 - DNA, 1028 bp, Homo Sapiens
  misc_feature (11)..(11): n is a, c, g, or t
  misc_feature (46)..(46): n is a, c, g, or t
  misc_feature (70)..(70): n is a, c, g, or t
  misc_feature (91)..(91): n is a, c, g, or t
  misc_feature (115)..(115): n is a, c, g, or t
  misc_feature (131)..(131): n is a, c, g, or t
  misc_feature (214)..(214): n is a, c, g, or t
atggcaattgnaacatccctctccaactcccaagcttggggccccnaccgttaccctgtaatgctgtccnagctgctggggcaggatgcgnaaaaagtcatccggaaggttgccnagcagtggtgggttcnagttccgatagcgtctctggtcttgtaggggctccagagcccagcgcgtccgattacggggagtccggacttcgggggagccnagaggggtagggccggtcgaacacggtgcatgtggtaggctggcggggagtacacaggtgggggctcttcatccgagctatcaggttccaaagtccttggtccaagatctccggggggatgctgtcctccgagtcggagctgtcctcatagcacgccagccgctgctgccaccgccctccaggttcatctgcagcagctggtcgatggtggcgtccacagcgccgctgttggcgcgcagcacgcattcgatgatgtcgtaatccatgttggggaacatggtcttgaagtcgtccatggcactggttgaactccaggcggcgcacctggcgggcaggccaggctgttgttgagctcctgggggcggccgtgcctcccaccgcccccagcgtgaccccggcggtagccacccccgccagctagcacagctgctgctccggcggaacaggctggtcattttgcggagccgcttggggaaaatgtttctagccggccgcaaagccccttccccagggtctttccgccgtcagccgcttacttgccctgcggtctcgggcagctcactcctgcgcctcctcctccccgggtagccaggcagcaatgggctgccgagagctccgggttaggagagtacgggcgcggggccccaggcagcccttggagagcggtcctcgcggggcggtggcatgcgggaccgggccgtgctggggctgggcggccgctcatccacacccccggtgcatccatggcaccggacttcacggaatggtccacaccgggcagcgccacgcgcgtccgctccgcgcggccgcaggg

SEQ ID NO: 449964 - DNA, 1255 bp, Homo Sapiens
  misc_feature (50)..(82): n is a, c, g, or t
  misc_feature (1053)..(1061): n is a, c, g, or t
  misc_feature (1121)..(1159): n is a, c, g, or t
  misc_feature (1220)..(1220): n is a, c, g, or t
gaaatgaacaccatataggggaacggagctctacgcggtggcggcgcatnnnnnnnnnnnnnnnnnnnnnnnnnnnnnnnnnatcaggccaaatcggccgagctcgaattcgtcgagagcggagtccaggcggcatggaggggccccggagctccacccatgtccccttggtgctgccgcttcttgtacttctgctgctggccccggctaggcaggccgccgcccagcgctgcccacaggcctgcatctgtgacaactccaggcgacacgttgcctgccggtaccagaacctcactgaggtgccagacgccatccctgagctgacccagcggctggacctgcagggcaatttgctgaaggtgatccccgcagccgccttccagggcgtgcctcacctcacacacctggacctgcgccactgcgaggtggagctggtggccgagggcgccttccgtggcctgggccgcctgctcctgctcaacctggcctccaaccacctgcgtgagctgccccaggaggcgctggacgggctgggctcgttgcggcggctggagctggaggggaacgcactggaggagctgcggccggggacgttcggggcactgggtgcgctggccacgctaaacctggcccacaacgccctggtttacctgcccgccatggccttccaggggctactgcgcgtccgctggctgcggctgtcgcacaacgcgctcagcgtgctggcccccgaggccctggttggcctgcccgcccctgagaacggctcaggcctacaccacaacgagctccagggtctgcccggggctgtctttgtcccaaggccccccgccctggccccgtccttggagctggggcaccaacccggtcccctaagccgggggaggaggaaccgggctggcccttgcccccggccttgtgggaaactgcttgctggcaccgtcgggggcccctgcaggcccctggggctccaaggggtctttcgccacactgggtcggagcccgggaaagccccgcaaacttccggggggaaaccaagtagaacaccccggnnnnnnnnntctaagggccccgggtcccctattgccgccggctcggcgtatttgcgcggggccatttcnnnnnnnnnnnnnnnnnnnnnnnnnnnnnnnnnnnnnnnaatgtaaattgggccacgcccttgcgacccccacagttcatctatacacacggccgggtanataacgtggcctttaccgatcctccccccgccgcc

SEQ ID NO: 449965 - DNA, 1359 bp, Homo Sapiens
  misc_feature (1205)..(1205): n is a, c, g, or t
  misc_feature (1270)..(1270): n is a, c, g, or t
  misc_feature (1304)..(1304): n is a, c, g, or t
ctgtgcttggttcggctgtctttgcttctgtctcgggcgcctctgcgctgtgtgtcgcttgtgttgtattgtggggagtgtgcttgtgtccgtgttgttgtttttgctggtctgcgttggttttggttgtcctttttgtgtgtgtggcgtttgttttgctgctcgttcgcgttgtttgctgggcgtggttgggtgtgctgtgcgcctcagcgcttgttgtgcggttgtgggttgcccatcgcattgtttagtgtgtcggctttgtgcctgcttttgtatcgactggtttgtgtgttgatgctacttttgtttgctttggcttgtaggttgtcgcctgtatggtgttatcccgtgggctcgttgtcttttcatgttatcgttggtgtggtgtttggtattcgcccaaggggttggttccacttggctgttgtattgggggtatctgtttctgcgttgtatgttgtcttgggtggtcttgagtgtttatcgtatgggggctctgggtctctcttactgtgctccgtcgttcttgtcctgcggctatcgtggctgcatgggcatgttcagggtctggggatctacagtcgtgcatccagagtcccttgttgcctgtcagtcggtgacttcgtggctgcagattttcggtgcttgtatcgtgttccagtctgctccaggtcagatgtggattcgttcagtcatgtactgtgtacaggtccacttttgtcgttgatttgtgttcttctagctgctgggtggtgtgccagagcaggtactctgccggtgtctcaggatggtgacagatgaggcagagctcctccagatgtgaacttgtcgtactgtctgagccctccttttccttgaggaggtctgctgatagtcagtcctccactgctggttgtggttttggtcaggttgccagagaggattttccaggcgtattctcggaggtacttctggaaaatggtggtcagggcgatcatgggctccccagtactgagctgagagcattgcaccatgcacttcttgtagtagacaaagaggtcggcgcagcctggggagcacggcacccccttcatcagtgttgggcttaggtggcccctgggctttgaaatcagccacaaaccgatctatcagctctccgaggttcttgtcttgggattcgatatacacgtagagatgaggctcaaaacacttggaaacaatgnccatgaaatggattgtctggggctttaggcttctttggttgatctaaatctcctttctccgttgnccagttacctccatctctggtgttggactgcatncttccaggaagggattggtagatgggggtggagactcaagctttttcagggtccc

SEQ ID NO: 449966 - DNA, 893 bp, Homo Sapiens
gtactgtcgagttccgtttagctgtgttcggctgtgttgtctggcccgtggtgcggctggtggtgtcaggggggtcgcgctgccgcctggggcgtgtctgggggtctggctatgccttgggggggcgacgcccgtcagcgtggtgcgcgctggtggcccttgatcccgcctggtcttgctctggcggctgtgtaggtgtgggtcaggggccgccgtgcgcgcctgcgcatggggccgcacgagccacctgcagttccactcatttggcagttgtgggagtgtgtcggagctcacgcgtcgctgccgctagaggccgtctgagaaggtacgccaggccttgacatccgtccgaccctgccactctgaccctcacgtggagaaccgacatgcgacgtgctcatggatacaggtacgggcatatgtttggggacggggtggagggaagccttgttgcatttcttatgtacaagattcagatcctaaactcagaattcctctccgacaataaacccgtgccagcagacgcactccagcactgcctggccctctctgctgtctgtgcttgctttgtggccaagtgccctcagctgcaaaacgagatggacaggagaggctcgcagaccacagacactggcctcccccgtcgccccatctctaagcgtcccctccagccggcctcagcagacaagtcaccaccatcaggtgggtgatcccagaagcagctacaggtttctacatttccagacatatccagcggccctgcctttctacaagaaattggaggaattttaaataaagttttgttcccttgtaactcattctttaggatataccactttcttccggacgcgtggtcgacgatatcccgataacgtccggaccggtaccagccg

SEQ ID NO: 449967 - DNA, 1494 bp, Homo Sapiens
  misc_feature (141)..(141): n is a, c, g, or t
  misc_feature (457)..(479): n is a, c, g, or t
  misc_feature (1165)..(1388): n is a, c, g, or t
gcaggggttttaacggcaagcccccggaggttctgttttttcggttcagaccagaagatacggtgtccttgcccttcccaccatcccaccaatttggtactctgaaagtttccagatcaaagagcccgtgagattactacncaggaaaacacttgctttcggtggccagcagtgtaaattaatctttccctctctgctcaaagcaactttgcaactctcgtctatagaggtggccagtaaaacccaagcaaaaatctaaacgggcaccaggtggccactgagtggcgactggtcgagtagcagttggtcataagggatcagggctggttttgaactcagacttgaaacttgacgaaaataaagtgctctgtcaaaactctcacagcaggttttcagctggaacaaggagatggctactttttgttattgcctacaataacacacgcgtgtgtgcaannnnnnnnnnnnnnnnnnnnnnnttaaagctccatttcactcctccacaaagaacagaggcacctccttaaacaaagcaaacggggaagggttgcaagctcattaaaaccaacatgagcacccagttccagagatacagacacaattaatcttagtgttcatgaggaattgtttttaaaacacaactgggcaaaactttcatccagacaaaagccaaaaacaaaagccctcaagccacaaaagcttgtagaagaggtgaggcgataaaggtgatttacacatcagtatttttagcatttggtggataatcttaatttatctttaaccttcacaacatttactttgtcataaataccctacaccatgaaaaaacaaacctgtataaaacagcttggaaaacaaacattcacagtatcaatacagcccatttctcacggtgctaccctgaagctagccgacgtgttgcctttgcctttgcttcataaactccctcccatgttggtgttttctggtaacttcaggaaaggcccattggatggagaccacgtgtgcgtgtctaccggaagcagagccctagaccttggtattcgaccagtaagcagcgctcatgggattcatctgggaaatgggaatagttgaaaccttttttgttttgtttgagagcaagaaggcttaatataaaatcctggggccggcctggtggctcatnnnnnnnnnnnnnnnnnnnnnnnnnnnnnnnnnnnnnnnnnnnnnnnnnnnnnnnnnnnnnnnnnnnnnnnnnnnnnnnnnnnnnnnnnnnnnnnnnnnnnnnnnnnnnnnnnnnnnnnnnnnnnnnnnnnnnnnnnnnnnnnnnnnnnnnnnnnnnnnnnnnnnnnnnnnnnnnnnnnnnnnnnnnnnnnnnnnnnnnnnnnnnnnnnnnnnnnnnnnnnnnncaaccgagtgaaactcccgacgcgtggtcgacgatatcccggaaattccgggccggtaccagcctgctttataaccggggttctatattcacctgatagtgtgggg

SEQ ID NO: 449968 - DNA, 943 bp, Homo Sapiens
  misc_feature (826)..(826): n is a, c, g, or t
tctagagtgactttctttgaaaatatacctgagtactctgagaaaccaggccaagcctacgtgttctccctggctgatttcagtggaggaagaactattcaaaaattcatttattatgcttttgtttacctttttattgtcaaggttaattattggtttaaggagaggttttaaatgaaatataggagattatgtctcagatgaagttgaatttctgacatgaaatgctacatttttgaaatgcaagtgtttttcaaaggttcttaggctttaatcaaagcaaaaagcctcatctaaaagtttctttctgttccaaatcagttcctttagagaaacatggtaaatgcacttggaaatttgttttaatcccctgttataaaattagcctgaattctttttgtcttagcacatagagaccctacatctaggaaagtcttattctgggccctattgcactcagatgtggtgtgccttactgatcttgaaacattagttatatctgtgtgccctattttaaatttaaactcctctcctataagatttactacaaatacattttttgaagaccactgtaaaatcacatattctctaatattttaaataaatgaaaggctgctttatttctcttataaacattggtataagagaaatttggtgtgttcatgaacacgctaaatggcttggaaaatgggtgtggttcaaagcctgatgcttcaagatctctggtttgaattggtcacaaccaggaagtattgcccctttttaaatttaaactcctctcctataagatttactacaaatacattttttgaagaccactgtaaanatcacattattctcctaagtattttaaatacaactggaaaggctgctatattttctcttaataaacattggtataagagaaattgggtgtgttcatgatcagcctagatggtggaaa

SEQ ID NO: 449969 - DNA, 2043 bp, Homo Sapiens
  misc_feature (49)..(113): n is a, c, g, or t
  misc_feature (183)..(183): n is a, c, g, or t
  misc_feature (245)..(246): n is a, c, g, or t
  misc_feature (270)..(270): n is a, c, g, or t
  misc_feature (273)..(273): n is a, c, g, or t
  misc_feature (358)..(358): n is a, c, g, or t
  misc_feature (370)..(371): n is a, c, g, or t
tcccttttatacccccttggttttttccaatttttgggaagggttgctnnnnnnnnnnnnnnnnnnnnnnnnnnnnnnnnnnnnnnnnnnnnnnnnnnnnnnnnnnnnnnnnnaatgagggtggttaaatgggggttctagttagcttgcctgtgctttcccttctttcattggccccagtcngaaaaacaggtgggtccccctaaccccaaagcgccccttggatgagggcttcacttccaccnnttgccagagcctctcccccttaanccnttgcggccagcccccgccccccaggggaagtagtataaacctgggctctggggacaagcagccctggatgagaactccagctctngcccacctctcnntgtgggtccctcaacttcctgggagcctgggcacttcatctgaaacccagagacctacgctcgctgtgcggagtctgaggaccacacaagccatgcaaggagtctgggcaccaggcctgggacacaaaggggcaaggaagtgtgggcccctctgtcctcagtccaaccccaaccggacactcccagggcctctgctcactgactcccttggtctccatcctgccctcacctgcccatcatgctcccccaagggtgggtgggggtacagtggccacacatgctggaggctgaaggtgtcccctatccccacctctctgaggtcacgcgaggctgggcagagcagggtgatggtgggtcagcgccccggacaggctgccccaccgctgagccctcctctcctctcttctcccacaattaaagcgcagaacagtggcagggagtgtgtgtgctggggtaggtgggggaggcctcctgggtcttgggcttgaggcctggcaggtagatgaatcctcaatcctggacccccccaggggtgccaggcaggtgtggagaggagatgctcaccctgcatccttaaggaggcgcagagggcaccctagtctttgacgagcttgtagacatggtgctgggccccgtgctcactggtggagacttcgaagacaaaagcaatgacaagcagggtctcctgggagtcccggctcgtgaccacctgcaggatggtgaagttctccagcacgctgttcatcatgtacttctcgggcaggtgcttcagcttgtggatgaagttgatcatgtactcgcacatgggcgagcggtggatacggtacacaaagcgcccgttctccagcctggcatactcagtctccaccttctctaccacctgtttgccaaaggagcacaccttggtggagacgctgatggtcatgctatcagcagagctgtactgagagctgaccccatagaaaggctcccgggccctcctggatggtgctgttgaggtcggcccagcacttgacacaggaacgaaggcattagggggccccttctcatagagctccttcaatcctccctttttctcggggaatttgtcatagatctggcgcacatctactgcctccaggggtgggtctgagaaggcggggttcgtctggccgatgtgcacaaacaggtgtttgctgtacgtgtcagggtctcgctgcacctccatgaaggctgaatactccaggagccgcagccgggaggaggcaatggtacggtcctgccacacaggcacagaggcagcagctgaggggagcggggccaggggctcataactgctgagcgtcggcgtcagggtcggctggatggggtaggctggctgtgcaaagggcttgatgtcctgagagggtccaggctgctgtcccaggagaggggggctgctccagaaccgcgaggaagtggagaagacggcctggggcagaggggaaggtgggctgaacttgttctgcaggacactggcagagacgatctgggcagaggacatggacgccatgctctgaagggctttgtccttggagacctggtccaggttcatggccttgatgccaacctggtactcccgcaccttcttccgagctagaacctgtatgtggctggacacctgttttctcgtccgagtcttccccgtcctcac

SEQ ID NO: 449970 - DNA, 863 bp, Homo Sapiens
ttcgaagtcgtcgtttccgtcatctcagtgcttgttaggtcttctgtctgccttggagtgatttcttatgagtgatgcccagtaagcgtactttagaaatgaaagttctgattctaattgtccaagctgattgtttcagattctctttgaagacttccatccgttccgaattgaattggtgtatggcttgaaaagattttttggactcgggacttctctttcccagggcgccgttgggtcctcacacgctcgccgcagggccgcgatctcagcttgcaaggcgcgcacctctgccagctctgcgtccatggcgcgttgctgaccgcagccgggccggcagcgcagctgtcactccgacctgcgcgcttcacccgcgcttcaagcctcgcgcgcgctcccggcgcggaccatcccagagctcacgcggaggggaggcgggagagctccgcgtgaccccagcggccctgcacgtccaactccgctctcgcacgagagcctgagtcctccacttccccgcacacgtttccctggctgtctaagcagtggctatactttctctggagagcgcgttctttgctactccaagcccaagcgctccgctgctcaccctagccggcagccttggagccgcccggccgcgtgcctcacctaaagaggcagggctgggatcacgtggaggggagcgcctctttatttttttcacctacttcctctcttagcgccgacctagtccaggaattggtacatcacagcgatagtgcttcaatccgaaactaggggattttggtttaggctctatttgcagtcgttgagggggagctgccggaggcgcgacgcgctggtcgacatatcccggaactccg

SEQ ID NO: 449971 - DNA, 818 bp, Homo Sapiens
tatcgtcgaccagcgcgtcgccaggaagcgatggccacccatactccacacagagcatccagcaggggtctgcagtgagcagagacctcacctttgatgggacctttgagcacctgtatgtcatgacccagaagcacacttctgaaggttcctgtggcttcctgtgctcagcacctggactgtgcatcttgccttgctcacagggacccatactgtgggtggtgcgtgctccttggacaggtgcagtcgccgttctgagtgctcgaggggccagggcccagagcagtggctatggagcttccagcctgagctgggctgtctgcaagtggcagccatgagtcctgccaacatcagccgacgaggagacgagggaggttttcctatcagtgccagacctgccaaccccatgtggccaggggagtcatattcctgccactttggggaacatcagagtcctgccctgctgactggttctggtgtgaatgtgcccctccaccagatcctagtgaggccccagtgctgccgagaggagccgactacgtatccgtgagcgtggagctcagatttggcgctgtagtgatcgccaaaacttccctctctttctatgactgtgtggcggtcactgaactccgcccatctgcgcagtgccaggccctgtgatgagcagccgctggagggtgtaactggttgtgtcctggcagcacctgtgcacccacaggccctcgtgtgatgctgggccatggttgcaagccatcagagcccgattgtctccccagaaccctcctgcaagaggtgaccccaggctctggatgtctctg

SEQ ID NO: 449972 - DNA, 1274 bp, Homo Sapiens
  misc_feature (93)..(93): n is a, c, g, or t
  misc_feature (102)..(102): n is a, c, g, or t
  misc_feature (104)..(104): n is a, c, g, or t
  misc_feature (106)..(106): n is a, c, g, or t
  misc_feature (112)..(113): n is a, c, g, or t
  misc_feature (127)..(127): n is a, c, g, or t
  misc_feature (137)..(137): n is a, c, g, or t
  misc_feature (189)..(190): n is a, c, g, or t
  misc_feature (201)..(201): n is a, c, g, or t
  misc_feature (209)..(209): n is a, c, g, or t
  misc_feature (222)..(222): n is a, c, g, or t
ttttctttttgggaaaagggaggcccccctcaatcaaattgcaagattttcaaaatatccccccatttctgggttctctagcgctttcccttncccaacccntncntgcccnntggagaatgcgacnctgtaggagncagagccttctcccccagccccttggtagagaagtgcatggtcactgccgcnnccacccagaanctgagacngggcacttccccnaaccctccccacacccagctcagctctggtcaaagaaactttatttctagatttattcacagacatattgatattacaagagctcagtacttcacgtgcctttaatgggtgagggactttgtcttagggaatgagataaaagaaaattggggtaaaaggaagtattcttatgagggacaaacggcacacaagcagcctaaagagcatcaaaaggcttatttcataatcaagacaagaagtaaaaagacaagagtatcaagaacactggtaactgacagggagctagaagtctgcttagatttgggaaaaggacaatctgcatgcagttttttggcgtgggctcatgacatgcagatggctaatcagcaatgcttctggcaatgagcacttctcgcccctgctcatgtgcgtattaggacagacgcagcaagtgcttccttcatttcgtctgtgattggtgcactgtggttgggcacgggcagaaattactcacccttacattacgacttaagctttacaagcttcatttaataacaactgaaatctggtcggtacgtctcccaaagtatgtatggaacttaagggattatataatatggattattatcttgtgaaatgttttttgacaaagacaaaaatataattcagtaactaagagtggaatccacagctagtacactagggatacccaagaggacaaatattctcttagagtgacagccttttggaagatcccttttcagctgactcttgtataactcactgtgaaaaagagaaagagcaaaatttccaaaaggcagaaagcagagacatttttcttaaccatcaggtgttggggtcgggctcaccgaagggtattcgacagcttctccctctcccacctcacccactgagcactttgcagcagtacggtgtcctggtagagcccaactaagtcagagcataccacgcgctggggaaaagggggctgtaaaggaggtgtcagggaggtgacagcactcctgcgtacgcgtggccgacgcgtggcgacgcctggtcgacgatatcccgta

SEQ ID NO: 449973 - DNA, 772 bp, Homo Sapiens
gagtgcggctgggccgaccggcgaggccggtgcggctgcagggccagtgagtgatcagggaagttggcagtggggagcatgtccgtgggaggcgcagtgagacgtggctcacaaggcagctgggactctggctcatctgcgcgcagtgccacgttcagctccgtggtcagaagccgccggaggtgtcagacgccaagcctgcttcgacctgttctgactggaagcctcgagcgatgtccgttccgagccctggcggtatgttgacccaatccggtgacgctgtccctgaagcccatcttggccataagcttctgggagacggctattatacatggaatagcgagaagaagttcctgtgcgcacaagagagtcgtgctgttgaagtggcatcgtcaaaagagtcagaggctgtgttgtttcccctcggtctcactatcagacccactaaggcttgtagtagatgcttttgctccatgactgacagaggagggaggttcatcatcggacgtggagctgaggctcagggcaagctctgcaactctttttttctgtttcttgatgggggcagtgcattctgggtcagttctcctcttcatcagttaagtctgaggggagagagcgagctgccggggagtcggtagggggggtcaggcgcgacactgtcgccgccgctgccagagccgccgcctcctccgtcagtttcgtttcccccccagccagcccggtccgccagccgccctcgcaccgacgctcggtcgacatatcccgtaag

SEQ ID NO: 449974 - DNA, 1741 bp, Homo Sapiens
cttatgttctgacccaccgtgaagacgcacatcatccaggcgtaggctgcgccaaactggaactcgtaggcctgatgccgcttcacgttgcgcctctcggcggccgagcgcgccgggcagagccggatcatgtacatgagcaggcctgggatgcgcagcaggtccatggcgttgccgataaaggctgaggcaatgacgtagttcacgaagaaggcgccgttgtcgggcaggaacacacactcaaaccgaatagctgcctcagccaagaatttcttatcaaagagccagcggaagaagaggtccaggctgctcagtcccagcgagggtaggagcagcaccatgaagatgaggaaagtgtagcacttgtgcatggttgtcctgttctccccagagcgtgtccagtgggcttcaaagaaggctgagtagtagacgatggtgggaaggagggccgagaagcaccacagcagcagggtggggaagaactgggtgatgatggggttgttgaggtactccacaggcttggtgacgttgaacttgtccatggtggtgatgatgatggctggagtggtgaggaagaagaggaggatgaagaggacgacattgatgaccaggcagcgcagccaccagatgaagcctcggatggagaggtgctcccagtagatgttctgagggtcaggggcataggacacggtccagttggagatgtgcagggactcgctgcaggatgaggggcgtggctccccacggcaggtgcagccctggcatttacacacgttgaagtccttcaggatgatggcggtgatagtctcattgtggaaggtgacaaaggccatgccaagaggcttctcattcaccttctccttctcccgcttgtagtcttccttcagcttctgctccagctttgtgtagtactcaatggcctccacctgctcacagcctcgcaccacacagcagcagaggtggccacagggcttggggttgatcatggtaggcacgttctccttgctctggaggtttgtgaagtacagctttccccgctcggccttcttcctctctgcatcgaggaacattaggcgagccacgttgtaacacgggcgggcttcgagaactgtgcagttggggtaggcttcctcaaaatgcttcttgatcttttctgactctgcatatttggagattccattgatgaagagggtccgcttcaccagatcatcctccttgtagcgcatcttggaggtgtgtctacgcatgctgtagacggtgagcagcagatacaggaaggcgaaggaggtgtgcagccatagcaggttgttccctgatttcaagttggcaatggtggttctcccaaagctgtaggcattgttctccagcaggtcccctgagaagttgacaggcagcacgatgcctacggagaggacgcccacaaccaccagcagcccgatgatgtgccgctgaaaggacaggtagtgcacggcatcgcccccacatttgtcccggatctcatcatcctttatcctgaagatggctgtcagccaggaacagaaaccattgtccctttggtcaaagtcaacggagctggagacagaggtgagacgctcataccggtcatggctgtccccgtgcatagctgaagccacactgtctgcatctgtcacacaaggccatgccgccgcatagtcccaggccaccttccggaggatagagacctcggccgattcaccccaggcctcgtactagcgtaatg

SEQ ID NO: 449975 - DNA, 928 bp, Homo Sapiens
  misc_feature (49)..(49): n is a, c, g, or t
  misc_feature (59)..(59): n is a, c, g, or t
  misc_feature (64)..(64): n is a, c, g, or t
  misc_feature (688)..(704): n is a, c, g, or t
attatatgctccccaaatgaaaactgcccaagtttttcatttgcccccnaggtgaaaanattgnaacctctacgtcaaaaacaaatacagtaattgtttagagggataaaatcaactataatgacatgggccgtattaaaatacactgcgcaaatatgaacagaaaactcacagcacaactataggaacaagaagatgttatttaactgcagtgaaataagaaggcttggagagagttgggaagcctgaagaccagataagcgagtttagaattcattcagcaaccttactcatattccactctcccgcccctcaccccaagcaaaataataaaatcctgctcttgcaaactgaaacagatcattatttttgactaaggaccacagggtgtggaaccccaatcagtaactttgtaactattacactgaatgtaggtccatgtgttttgatccttttacaggcccttcctttaccaattgtaaagagtgatttccctggggtgcctctctggagaagctttacatgccagcaattccagaatgtcaaatatttcattctcagccccacccaacagcagtaatcatgctaagcccattgactttggaaaattctgcaagttattttaacctcagttcggagaactcaaaagtaggttttaccaccacctctaagtttaaaatgcccctcnnnnnnnnnnnnnnnnnccatgtcagagaaaatgtattaaagtactagattccactgtctctctagaaagcaaccagcttagtgagaaatgactactcaaaatacaaactcactactccctgacttgaggaagaactaaagcttctcctaagggtaaaatgaacagaaattttgcttgaggagttcggacgcgtgggcgaccgcgtggcgacgcgtccggtcgacatatcccgtaactccc

SEQ ID NO: 449976 - DNA, 1085 bp, Homo Sapiens
agagagttgctgacttctcatggggggggtgtttggggctcagttgcaaactcggggtctcatttgtttacaagtggggaacccaatggggcgtgggaccttgacgggggccagaggagtgttctttcccaaactgtcaaaagtctttatcggtcagggtaataaagggagccgccctcatttgccccagggattctcagggccttggggctgtggcggctgcggttttttcagccattccacaatgtcctcagctgtggacccatagttgtcatactggaacaagaaccgtcctttctcaaaatagcagatggtggggaagccgcgcacgctgtactcctccttgatgttttcaaattcagaggagtagacattcatcccggccagcacggcgtggcctcgcagctgagtcgcagccttctggaaatgcggcatcatcctcttgcacatgctgcaccagggggcataaaacatgatcaggagcggcttctcttccttcttcaggagccgtctgaagtccttttcactgtcaaggtggacaacatctttggctccaggatcttcctcccacagtgggggcccttttggatccttcaaaaaggccactatggacttaaatgtcacagctcggttatattcagtatgaaatgcaccatcctggtaatggaataattcaacctttttgtccttcgggctcaggtcaactttcatcttcttgcacaattttctactctctgcatcaccacagtccacccagcagatggtcccttgtcctttcaccgcctgggccactgtggacagtaacctgagatgattttcagctgccacctcagatttggagtaaagcaccagtacattattccgggttctgagcagttttttcaagtccttggggtcagagattctctcaatgagcgaggagacctttgcagaggacagccatgatggcaggaccacccagattgccagcagcagccacgccggcccggcccgcgccatcccagcagcgctgcccaccgctggctcctttctccactccggcgcccgctcccgcccgcccgcctgctagctccaccgcggccaac

SEQ ID NO: 449977 - DNA, 1007 bp, Homo Sapiens
  misc_feature (984)..(984): n is a, c, g, or t
gtccgctctccatcggatcttcgggagttgatttcattgaagagctgcatcagcacgaaggtgttaaaaacaatggtatagtgctggctgggtggtgaatgtagaggtgccttcctcccactatcactatcaaagaatttctcacccgcaaagacaaggataaagatgacaatgagctgatagaatgcatggcccaagatgttcttcatcatagtgcgtgagatcagaggcttatttcggccataggggcgccgcttcaacagagattccgtagggggctctgtggccagggccaatgaagcaaaagtgtccatgatcagattaacccacaacatctgcacagctttcaatggggaatcctgagtgatacaggctccagtgaaggctacaatcacggccaccacattgacagtgagctggaactgcaggaacttggagatgctgtcatagacatttcgtccccacatcactgccttcacaatgctggtgaagttgtcatctgttaggatgatgtctgaagcctcctttgctacatctgtgcctgcgatgcccatggcaaaaccaacatccgctttcttcagagcaggcccgtcatttgtgccatcaccagtgacagccacgacctgccggtgttccccaacagtgctgtcaattatgcctttcaccagggtgtgcttgtcagtgggagaagatcgcgccaggacccgaagcttaggccagatcttgtccagcttttcttgctctacctcgcctttctcgttgcggatgagccggttgaattctttgccttctaagcacaggaagtcatccccaggtgtcagaatgccacatttggtggcaatggcccgggctgtgttgatgttgtcacctgtcaccattctgacagtaatgccagcttgtttgcatttggcaatagcatctggcacctctgggcgcacagggtcctcaatgcccaccaccgcgataccgctcagttccgacgcngtcggtcgacgatatcccggtaa

SEQ ID NO: 449978 - DNA, 1247 bp, Homo Sapiens
  misc_feature (1236)..(1236): n is a, c, g, or t
ggcctgggtggcgaattccgcacgaggcccaggctcccgccactttcccgagtcccgaaacagcagccacatcaagaggcccatgaacgccttcatggtgtgggccaaggatgagcggaggaagatcctgcaagccttcccagacatgcacaactccagcatcagcaagatccttggatctcgctggaagtccatgaccaaccaggagaagcagccctactatgaggaacaggcgcggctgagccggcagcacctggagaagtatcctgactacaagtacaagccgcggcccaagcgcacctgcatcgtggagggcaagcggctgcgcgtgggagagtacaaggccctgatgaggacccggcgtcaggatgcccgccagagctacgtgatccccccgcaggctggccaggtgcagatgagctcctcagatgtcctgtaccctcgggcagcaggcatgccgctggcacagccactggtggagcactatgtccctcgtagcctggaccccaacatgcctgtgatcgtcaacacctgcagcctcagagaggagggtgagggcacagatgacaggcactcggtggctgatggcgagatgtaccggtacagcgaggacgaggactcggagggcgaagagaagagcgatggggagttggtggtgctcacagactgatcccggctgggtgggcctggccccttctcctctggggaagaccttgtcccaactcgatgggcacagccagccaacctaagactatgttggtacttggacttgttcgtgccccagagatgggcaaagctgtgcacttgcagatacattcatgaggggagaggcgccctcccttcctgaggagctgttggcctgggtgggcaggaactgcagtatggccatgggctgagcaggctgagcacctcagcctttagggcttatggccaggggacactgtatgactctcctctcctgcaggtgtctatccacctggggtatggcatctaccgacctgtctccctggggtcacatgctttgtttccattcttgtcctggctggaccagccactgtgggaccaacacccctcccacactcccccagactgctcgtctatcaccaggatcgctttgtactttgtgcaaaagggtctggctgtcccttgctgttttcatctctgccaagcctattgtgcctctggctgctgtatgtgtgcgcgtgcacgtgtgtgtgtttcatctgttcattcacnatagcgattac

SEQ ID NO: 449979 - DNA, 966 bp, Homo Sapiens
  misc_feature (71)..(71): n is a, c, g, or t
  misc_feature (943)..(943): n is a, c, g, or t
aggtgcccttgtgcagtgcacagcctgaacaactgtacccagcagccctataagatgtattgaagggaaanggggaatatggtagtccaggttttggagaatggggatgggggtgcaactctgtgttaggaaggaatggtgggggtaggggaaggaggaacagggggactggtaatagtccctggagccttctgtcagagtggtcttcacctggctggtggggagacactttgggcccagtgacttcctatcggcctcctgtaccccttttgccagaatactggggagccagtgtggggagacacagctgcctgacccctgggggggctgccctgcccgccagcgtgactctggtgcgcctgttttctctcgtgcaccccaccttggcctgggcccctgtcacgcaggaggcccagttaagaaccattcctgtttttgagtggtttctctctgcccgtgcctctagcacagcttagataaaaggaaggcatgggcgtacagtggcttcccccaggccctcactgtgtcctggggcaaccgatggtggggaggggccttggtatgtgaggttgccctgccaccctccatccggccacagcgaggcggcagccagcctggctcccctgtgggcatcagcaggcacagggtggggctgagcgcccctgcgagccgcccaccctgttctgcggcctgcctcccggctctgcgccctgtccgcatgtccgtatgtccgcagggcaggccttatctgtagacgggtaggcggatgtgggcatgctggtggtcgagtagccggggcacggccaccgtctcatagcccttgcccagcatctgctccttgatgcagggcggccggatgtcgttgatgagatactccagtgactgcaggctactgctcagcaccgcccacgcgtccgcggacgcctggttcgacgatatccantacgtcggggccgtaccagccgg

SEQ ID NO: 449980 - DNA, 1617 bp, Homo Sapiens
  misc_feature (151)..(241): n is a, c, g, or t
  misc_feature (271)..(279): n is a, c, g, or t
  misc_feature (322)..(353): n is a, c, g, or t
  misc_feature (535)..(558): n is a, c, g, or t
cgcggggagaaatgtggggaccccaaaggagggtgtttagcgccgtaattaaataaaaatattggggactctttattttcgttttattttgcagaagccccaaaacaccctggtgttttagggggaaaaaaatttgggtttggcacaaaannnnnnnnnnnnnnnnnnnnnnnnnnnnnnnnnnnnnnnnnnnnnnnnnnnnnnnnnnnnnnnnnnnnnnnnnnnnnnnnnnnnnnnnnnnattagctcccaaagggggcccgaaaggggnnnnnnnnncccgaaaatggatcccacccaaataagggtgaacagggttgtnnnnnnnnnnnnnnnnnnnnnnnnnnnnnnnnaaaataaaaagggttgtgaggcaccaccggagatagcgtttttagagggataaatagatttttttgttaaaaatataaaaaattgggcttttgcccttacacaataaaataaatggattttccccccttttaaaaggaaccatttttggtttccacctggttaccacattttttaaagggtnnnnnnnnnnnnnnnnnnnnnnnngcaaacaaaaaattagaaggccaggatgcctgttaagccacttttctaacataagtgtccccctggttttttcctctgacaaaccctgactgaaggctcatgatgtgcaggcactggggtctcaaagaggagaaagacttgtccctgcctcacggatgcctcagtcttcccaaagcaggaggcagacaagtcaccaaccgctacggatgtagaatggatgtattatacatccattaaaagcagatgccaatgccttcttaaaattaaacgatatgctgcaattcccactgaattacttatacaaacctccttacatacaagctgtcctgacttactaggaagcaaaaatgccaccaccttctcctgataaatacttctctaatgggcaggcattaaattacattttgtgatgtttgcccctaaacatcacaatgcctagtgaagtcagttaactttcttttaagcaatggtgcctattttactctgagaatgagacactttgaaactaaggaaggaaccagtcctgtatctagatcaagactcatcagtaccatcaaaagctgagatgaaacagtgtaagtttcaacagaaatcttcaatctcccatccgttgatgtgcaatgcgctcctgtgtcagccgctccaggtctttcgtgcacattttggtggtcgttccagatcttcgtagagcgacctgagcgatgtccagtctcctgtaattctcaggcttgagctaggctccggacgacctggaggcatcgctctttcagagtatacactggcagtgtgatattggcaaaaataggctgtccgtcaacattgagagatggcacaaataattcagtttggttaaccagaagcccatcgtgtgtccctgcatctctgaagagccaaaggtgacctcggtagctgtggatgcggcggcccgtgccaggcggcagcgttgggtagggctgcggctcgccgtcgaagttgagccatacgggcagcacgacgcgcggactgcgattgcagaagctccgctctcgacgaattcgagctcggccgatttggcctgat

SEQ ID NO: 449981 - DNA, 753 bp, Homo Sapiens
gtatgaattgttcagataccacaaagcaccacttaagtctaaattgcttgattatgtcagaaaggtcctttgacttcaactctactcatttgaggatctacctagagtggaagtgtcaagtcattcttcaaaagggatttatctgtacaattcagttttcttttgttcagaaatggcaaggcaatagtttgtcagttcacactcttcgctggcgtttctgattctgtggactgtctcccatctgtccaggcttcccgggtactctttagaccaaggtcttctgttggtcaacgacacatgaatccactctctcatctgctacactgctgcctgagccactgctcttttgcttacgtggtggtgtggatttcccagaatctaagtcgagatctaagtattccacctgtttgtctcctttgggcttgatcatagggctgcttcctccatcaagactgttactgccaaagagatttgggtcttcactggacaggtttgggttcatgggaacataattctcttcactgtcgtgtgagtcactgcttgaagttgtgctatgcactgaatctggtcggggggacatgggaaacctggaagagtctcgagcaaaactcctagtgatgggagatctaactggggcttgtaattcttcccattctggcaaaggttttatttctaaaggcgctggcttgacctttcttcttgtagcaaagtcacctatcgccttgtgaatccgacggcctggtcgacgatatg

SEQ ID NO: 449982 - DNA, 700 bp, Homo Sapiens
  misc_feature (255)..(291): n is a, c, g, or t
  misc_feature (471)..(546): n is a, c, g, or t
cttttcaaggggggggaagtgctagtccattggtagatgtacgtggtggtccgatctctcactagtaatgctctacagagggggctcgggtgcccatcctcccagtatgctcaggtgaggcgagctctggtgcccatcctcccaggagtgtctctagagaggcggctcttggttgcgcctcctccctagtcatgcgcttggggaggcggctctggctcttgccttcccagcatgccctttactacaaagggctannnnnnnnnnnnnnnnnnnnnnnnnnnnnnnnnnnnngttcactccctgtagaacttggatgaaatcagtgtccatggttctttatgtttgtagtcttgatgtgctcctgtggtattacttcccctctgataggacattgtagccagcctcagcactcagtgagttcatcagggccacacccagtagaggaaggccaagcaacctccacttcttcannnnnnnnnnnnnnnnnnnnnnnnnnnnnnnnnnnnnnnnnnnnnnnnnnnnnnnnnnnnnnnnnnnnnnnnnnnntatagcaaggtagcacgcaggaggcagcagcagcagcaacctttgatcacggagtgagattttcgggtctgaaacctgggaacacgagtctgcgaaatagtcggttccctccagaatacattttgaatctgtattctaagttccacacatgacc

SEQ ID NO: 449983 - DNA, 1054 bp, Homo Sapiens
cagccatgtgccaccctggccggggtgtgtgcactgcatgcaggttctcccttgcatgcaagatgggtgctggcccactgtgaggcttctgctcggggaagttctgtggagtcactaccagggccaagaggcaggtgggctggctctgggacgagggccaggtgtgagcaaactgccagggtccgctgtgccactgctccccggccacatgcccgcccagctgtcgccttaaccagactgaacagacaggatccttcagggcccttggccccactctcagtgcattctgtcatcagggattaccacctgtaccattttcataaaacaaaaccaaaatcactaccatcaaatggccttgtccctctaaagaagtctgcttaaaattctgtttttaaaacccagtttcctagttttccaggcaaatagttacctccgggaaagttgctgggggggcctgaagcacaatgtagcgcagatgcttcctttccaggccattctctcacccagcctgcacggaggagatgggagatgctgggggtcctgccctcagtctttttgggccttaggcgtttcgttcatcctgctaaggggatgaagcaaacacgaggtgattcctttgcctttcagagtggaagccctggagtttgttttgaaggccaggaggctgaaggatctctaagctacggtgtgggcttaatagcagcaggctttgtcctcctgtctcctccaagccagtgtctgattccttggcaacacaggtcttagtctgtggagtggctctgctgtggccttcctctggccgggcaggcactgtcccagccatagccagctcctgagaataggtcagcctctcctttctgtctcccagggcacatccagcccgtgcctgtgttcactgtgccccgaagtgcaattacccataccccttctcagcctggggaccccaggcaacacagactgtccactcaggggagctgaatcccaggtcagccctgccaatgtcccttaggaactgccaggcaaggccctggtttgtatacttgttcgtgccaca

SEQ ID NO: 449984 - DNA, 704 bp, Homo Sapiens
aggctgggtgggtgtacttgccccagccccagaaattggagccgtgggccccttgggaatggggggtatcgcgcctccaggaagggggcctttatacgggatataagagggctgacggggcgtgttttgaaagttcccaagggcaacgaggttgtccgggaagattaagggttcgttggcggtgaagccaacgaattggagggacatagcgcgtggggtggcgccagggcccaataaggaagcgcgcgagggcgttccctgcccagaggccgtggttctctgatccaaggccaaagaatggccggaggaattcttttgccgttggggggttttgccgaggcaaatgttgggccctttgtagggcccgctcagagatacactgattaacacaaggtgggcagctcgaggtatccaaggtcaaggtggctggagagtacagggtgctcaaatgcccgcagcagggagagggaggaagggctgagagaacctcgcagagaggaaaggctggccgctgccctcatgcttctttcaacagtggaatatcatctgtgtactcctctgacgtgagggataaaaggctttgtatgtcactgttctctgaatctgcagtttctttgtgtgccagttggcggttccctgagccggccacccaggaagaggtggttagcctgatgcaccatcacagtctctgcgaacgcgtggtc

SEQ ID NO: 449985 - DNA, 948 bp, Homo Sapiens
  misc_feature (73)..(73): n is a, c, g, or t
  misc_feature (137)..(137): n is a, c, g, or t
gtgggcctgaaagaagttttccctgggcagggagaagacctgtccctaatgggtccatcaaaaactgtcccanctgcaggcctttggtggggactcatgggctgaaagacccaaatgaagtggagactgaagggctnctggtccacccatgggcccagggaggctctgtccagccacactggcatacccactctcctcgctggaatgcttcgagatgaagatgttcttgaggtaccgagccttgcggtcctcttcttcctcggccccgccatcggccatggtggcctccgtgtcattgtcgtctgaggcctggatggtctccagcatcttcaggcactgttcctccaggtactcgatctccaggatctcggccgcatacagcaggtcatccaaggtcctccagccattggcttgcagcgtggctgtatatgcatagctccagagatctcgctggaaggtctttggcgagaggaagtccaaagtactagtgttgactaattgcggtggaagaggatctcaaaccatctatggctggtgcaggccagcaccgtccggtgggcgtggaactcctggctgtccaccatgatgaccacatcgcacaaagtgcccaggccaagccgcatctggttaggccttgcacagtagccccgtggggtggctagggttctgcagctggatcatgcccatttttgtcagatccatggtgctcccctcggctcaggcatgaggctttctttccttctgggctctgcgtggcggggctgggtgggcttcctgggccaatagaggaggcgcagccgagccgggcactgtggggtgggtgtgcgtgcctgtcggggggtgtgtgcctgtgtcggggaggggtgttgctggggaactgttgctctccgtatcacggcggcagcgacagcatcgcccggcagttcgcagtacccgctctcatcgccc

SEQ ID NO: 449986 - DNA, 865 bp, Homo Sapiens
aacttattcaaagcactttaacccataccaaccccacacccctttcttcaaatgcattaatccttagactgcgaagaagccggcgacatcatcatttcctccaaggtgacaggatcaggtttccatgcagcattttccacctgccccgaccatgaccacagccacggacccgtctggaaagtcaagactgggagaagctcaagggcggcccaggctcaggcgacttcccaacccacgatggggcccaccagcccgacccggagagtgtccgtgaagcagccggccccgcaaggacggctttggccaccaaccggaggtgggcctcatcctcccagatccatggagtccttcagaatcgtgcctcgctccagtgtcccacatcagaggccatgggagggccgggagcctcagggttcctgccccatctgcccagagcctgcagtcctgaccaaggagggttccccatacacgggcagaagctgtggacccagggagcctatcccacgccgtcctccgcatgtggcccgtggtgcaggaggggccctgggcaaaccaaggtgcggcccccaagtcccccgtacccaggggtcaccatgcctcagctggcctcacgcccgctccttcccaggggtcaccatgcctcagctggcctcacgcccgctccttcccaggggtcgccatgcctcagctggcctcacgcccgctccttcccaggggtcaccatgcctcagctggcctcacgcccgctccttcccaggggtcaccatgcctcagctggcctcacgcccgctccttcccaggacccaataatgctgccctttatcaacccccagacgcgacggcgcgggtcgacatattcccgtta

SEQ ID NO: 449987 - DNA, 871 bp, Homo Sapiens
ggaattcccgggatgtccactgccttgctgcagtcacagaatggaaatctgcagaggcctccgcagtcacctaatcactctcctcctcttcctgttccattcagagacgatctgccgaccctctgggagaaaatccagcaagatgcaagccttcagaatctgggatgttaaccagaagaccttctatctgaggaacaaccaactagttgctggatacttgcaaggaccaaatgtcaatttagaagaaaagatagatgtggtacccattgagcctcatgctctgttcttgggaatccatggagggaagatgtgcctgtcctgtgtcaagtctggtgatgagaccagactccagctggaggcagttaacatcactgacctgagcgagaacagaaagcaggacaagcgcttcgccttcatccgctcagacagtggccccaccaccagttttgagtctgccgcctgccccggttggttcctctgcacagcgatggaagctgaccagcccgtcagcctcaccaatatgcctgacgaaggcgtcatggtcaccaaattctacttccaggaggacgagtagtactgcccaggcctgcctgttcccattcttgcatggcaaggactgcagggactgccagtccccctgccccagggctcccggctatgggggcactgaggaccagccattgagggggtggaccctcagaaggcgtcacaagaacctggtcacaggactctgcctcctcttcaactgaccagcctccatgctgcctccagaatggtctttctaatgttgtgaatcacgagcaccaggagcccctgacaaagccctttccatgtcgcctctgtcttcaggatcaaacccgaacactgccaa

SEQ ID NO: 449988 - DNA, 2218 bp, Homo Sapiens
cggtccggaattcccgggatgtcagcccccggtgccacacgagattccaacgtcaatggaattccaggaggtgcagcagacacaggcgctggcctggcaggcccagaaggcccccactcacatctggcagcccctgcctgcccaggaggcccagaggcaggctccccccttggtccagctggagcagccctttcagggagccccgccctcccaaaaagccgtgcaaatccagctacccccccagcaggcccaggcatcgggtccgcaagcggaggtgcccacactgccgctccagccttcctggcaggcaccgcctgcagtcttgcaggcccagcccggacccccggtagcagcggcaaattttcccctgggctccgctaaatcattgatgactccatcaggagaatgcagggcctcttctatagaccgcaggggctcctctaaagagcgcaggacctcctcgaaggagcgcagggccccttcaaaagaccgcatgatctttgctgccaccttctgtgctcccaaggcagtgtcagctgcgcgagcacacctgccagctgcctggaaaaacctgcctgccacaccggagacctttgctccctcctcaagtgtcttcccagctacctcccagtttcagcctgcctctctgaatgcctttaaaggcccctctgctgcctcagagaccccaaagtcactgccatatgctctgcaggatccctttgcctgtgtagaggccctgcctgcagttccatgggtcccacagcccaatatgaatgcctcaaaggcatcgccggcagtggccacccttcctgatggctacggcagctgccccccaggcaactgccaccactcaagaggcctccaagacctccgtcgagccgccacgccgctccggcaaggccacccggaagaaggaagcatctgggaaggcccaagagggacagccgtggccacacgctagcctttcatgactggcagggcccaatggccctgggagaatctaaatctgagtgactgggaggtccaaagccctatccaggtctcgggtgactgggagcacccaaacaccccccgtggcctgagtggttgggagggccctagcacctccaggatcctgagtggctgggaagggcccagcgcatcctgggccctgagtgcctgggagggcccgagcacctccagggccctgggtctctctgaaagcccagggagctctctgcccgtaggttgtgtctgaggtcgcgagtgtctctccgggatccagtgccacccaggataattccaaggtggaggcacagcccttgtctcccttggatgagagggcaaatgcgttggtgcagttcctcttagtcaaggaccaagccaaggtgcctgtccagcgctcggagatggtgaaagtcatcctccgagagtataaacgatgagtgcgttagatatcatcaaccgtgccaacaataagctggacgtgtgcctttggttatcaatttgaacgaaattgataccagaaaccacgcctatattatcatcatcaagctgggctaccatacagggaattctggttggcatcctattttagacaggcccaagtttggccttctgatggtggtcttgagcctcatctttatgaaaggcaactgtgtcagggaggatctgatctttaattttctgttcaagttagggttggatgtccgggagacaaacgttctctttggaaatactaagaagctcatcaccgaagtgtttgtcaggcagaagtacctagagtacaggcgaatcccttacactgagcccgcagagtatgagttcctctggggccctcgagcattcctggaaaccagcaagatgcttgtcctgaggtttttggccaagctccataagaaagatccacagagctggccattccattaccttgaagcgctcgcagagtgtgagtggggaagacacagatgaggatgaacctgacaccggtgaccaggggccaacggcccaacagcaggcccctccccgtaataggtgtagcagagatctcgctcctgtgttccctggcaagaggccactgacagggtgcgggcgacattttgtccctggggtaggtgtccaagttcacgaagtgtcggttggatttccacttggtttcgaaattggcaaacttggacattcttatgtgggtgaattcacacggaaaggacggcagaattggccattgggtcaagctaga

SEQ ID NO: 449989 - DNA, 1093 bp, Homo Sapiens
  misc_feature (139)..(139): n is a, c, g, or t
  misc_feature (143)..(171): n is a, c, g, or t
  misc_feature (216)..(256): n is a, c, g, or t
  misc_feature (685)..(694): n is a, c, g, or t
  misc_feature (738)..(772): n is a, c, g, or t
ccattttacagggggttttttaccctggaaatggttaccatttaaaaaaagggcaatttttcttaaatgggttcaaaaaacagtaagggcttggtttccccttggtaaaatttaaggggatttaaaaaaatttattttntttnnnnnnnnnnnnnnnnnnnnnnnnnnnnnttttttaatcaggaggaaaaatacttaaaagacatgccaatttgnnnnnnnnnnnnnnnnnnnnnnnnnnnnnnnnnnnnnnnnnctactttacaataaaaaaatttaaataatcggcagggttaaatgaatgtaaaatgaggaatgtacagtgaaaaaccacttaatataaagcattccaggttgataaaagcctcctcaggcttatggtttgttttccaaggaaattatgtttcaatgtaaagtttgaaatactccagacatacattccatgtaggttttgggtgccaatgttaaaatttcaaattttgcatgcaaggcttagcaaagaaacactggcagaattccagcatttgcaaaattctaagttttggtgaatattgtaaatattacaattggtattagaaagccatgatgaatccagaattaagagaaaacccatttcataaatattttgtttgattaaaaaataccaggcttaccatgttctaaataactcaagaaaatatctttnnnnnnnnnnggactgcaatttaacagtaatctgtatatctttagctgccattnnnnnnnnnnnnnnnnnnnnnnnnnnnnnnnnnnntgttacaactggtataaagtaaccctatgatgctccccttacgagaaaacaaaactgtacacatttataaacaaacagtctctcccatcagttaacacacagagccttctctacaccaaagtctctttccgtttgccaccagaaagggctttgtccctcgctcttcggatgccgggctgtgtctggtgtgtctttaagctcttgctgtcctctgccatctgcatgccagagccacatctgtaagcgttttcatcaacttctacctgagtaacactggaaactgtggatgccctcctctgggctgtgagtttcctcgcagag

SEQ ID NO: 449990 - DNA, 792 bp, Homo Sapiens
  misc_feature (37)..(37): n is a, c, g, or t
  misc_feature (124)..(124): n is a, c, g, or t
  misc_feature (163)..(163): n is a, c, g, or t
atctattctttctgaagggcgcgtccatagaacgacngctgaccatcagaaatctgactgaggaggttcaaatcgacttaatctgccttttgttttatgtctctcatcacgttcttcttgaatntgctttaattcttctttgaagagttccaaattgcttttnttcttttcttcctctccttttttaagtggaggttttttggtttctatcacaagaagagatggtggtctttcattggaagactgatttggaggatttttttgatctgcaaatcttgaagatggcttatagattttacctcttttttcatctgtttcatgttcttctttagctgcattaacaacaccccctcgcacaaatgttttcactttattaccatcacttccttcaaaagcagcaagaaactcctcataaatctcagcagctgccttttcatcctcctttttctttaattcttcctgttcctttttacttaaagttcgcttagctgtactcatttttccaatactgaatgctttaagtttgttttccagaagaggtcttgagagattctgatgaggagaatcacaaaggctttcacgggcactttcattcctataattatgttttcttgggctcttaggtcgtgtccgacttggcatatcactatctgagggtccagatgcatccatatgtgcatctgaagatccagatgaatgaacatctgatgatctcgtctttgaactggccttctgagatccgcctggcgttttgtccgccatcttgagctttgcccctccttcggcggcccc

SEQ ID NO: 449991 - DNA, 1094 bp, Homo Sapiens
gtttcctccaaaactcgtacgagaggtcaacgtatccaaaacgtgaatgtcaaatcagcacaacaggaagcatcagcagatgttgctactcctaagatgccaggcagtcagtcaggaagaaaactaggaaggcaaaagaaatttctgaagcttctgaaaacatctattctgatgtcagaggactatctcagaaccagcaaatacctcaaaattctgttacgcctaggagaggaaggagaaagaacgaagttaatcaggacatactagaaaacaccagttctgtggaacaagaattacagatcactacaggtagggaatcaaacaagattaaaatcatctcagctgttggaaccagcagttgaagaaactactaaaaaacgaagttaaggtttcatctgttacaaaaaggactcctagaagaattaaacagatctgtagaaaatcacggaaagtgttgaacacttatacaatgatctaaaagttagtacggtaacaagtcctagcagaatgatcagaaaattgagcaagtactaatttagatgcttctgaaaatacaggaaataagcaagatgataaatccagtgacaagcagctgcgtattaaacatgttagaagggtcacgagggcagagcaagttcagtccatcagatgtgcagagaagactccaaccttgagctcatctcagttgactgttcaagcagaatttgatatgtctgccatacctagaaaacgtggtagaccaagaaaaatcaatccatctgaagatgtaggatctaaggctgttaaggaagagagaagccccaagaagaaagaagctcccagcattagaaggagatctacaagaaataccccagctaaaagtgaaaatgtcgatgtggaaaaccagctttaggaaaatccattttagtgccaaacgaggaactttcgatggtgatgagctctaagaaaaaacttacaaaaaagactgaaagtcaaagccaaaacgttcattgcactccagtatcagaagaacgcacagatgaaatgacacataaagaaacaaatgagcaggaagaaaggatgctcgccacagcttccttcactacagtcatccg

SEQ ID NO: 449992 - DNA, 953 bp, Homo Sapiens
  misc_feature (400)..(400): n is a, c, g, or t
  misc_feature (778)..(778): n is a, c, g, or t
  misc_feature (838)..(838): n is a, c, g, or t
  misc_feature (847)..(847): n is a, c, g, or t
  misc_feature (899)..(899): n is a, c, g, or t
  misc_feature (911)..(911): n is a, c, g, or t
  misc_feature (933)..(933): n is a, c, g, or t
atgccaaccatgtggactccagctgtggtcaccgtgctccgttcgcccatggttctcctacaagtatggtctttgcccctcaatcatatctacttacgcaaccagtcaagcggtgccacgaagtaagaaatctcgtatcctgcgtgagacagcgagatgtctccgacacagtatagttttgccggctgcagtttcttcagctcatccggttcctaagcacataaagaagccagactatgtgacgacaggcattgtaccagactggggagacagcatagaagttaagaatgaagatcagattcaagggcttcatcaggcttgtcagctggcccgccacgtcctcctcttggctgggaagagtttaaaggttgacatgacaactgaagagatagatgctctntgtcatcgggaaatcatcagtcataatgcctatccctcacctctaggctatggaggttttccaaaatctgtttgtacctctgtaaacaacgtgctctgtcatggtattcctgacagtcgacctcttcaggatggagatattatcaacattgatgtcacagtctattacaatggctaccatggagacacctctgaaacatttttggtgggcaatgtggacgaatgtggtaacaacagttagtggaggttgccaggaggtgtagagatgaagcaattgcagcttgcagagcaggggctcccttctctgtaattggaaacacaatcagccacataactcatcagaatggttttcaagtctgtccacattttgtgggacatngaataggatcttactttcatggacatccagaaatttggcatcatgcaaacgacagtgatnctacccatngaggagggcatggcattcactatagagccaatcatcacggagggatcccctnaaatttaaagtncggatgattgcattggactgtngtctccctagaccaatcaaa

SEQ ID NO: 449993 - DNA, 840 bp, Homo Sapiens
  misc_feature (226)..(260): n is a, c, g, or t
ccacgcgtcggaactcagacccctgccctcagctggctgcccatagcatcccactgtcccacgtcccgtggttctgcttcctgctgcatcgtctgccatctgacacaaggcctgtcgtggcctcctggttcactctgctgtctgatcttgggagggtgggcttgagatcccagctctattcttggtataaaggcttctccggatcagtacatgcatgtcacattannnnnnnnnnnnnnnnnnnnnnnnnnnnnnnnnnnagctcgatcagtgtgtgtaggaatgacatacctgggctcaggggaagcaagggggcttagaactttgtggggtattcccaaaaggatggaagttaagactcagagtctcattaccactgccaatgtggttttacgcaggggaggggaccctgctaagctgagacccatagtcctgctcagagttatcccaaagtctgagccaccagccaacacctgacaggggtgagaagtcctcgctgtgttcagagggagccaggaatctacatgggtagatgagatagacacagacctgtctccccgcagccttgttgagagccacactatctgcccatgccaggagccagctgtgtgaccatccaggggtggacgggggaaaaaccaggcaatttcgttcctcggaatcaaccaaatcatgttttcctcttggatggaagtgtcaaaggcagaagggtgtgggagggggacaaggtcagtatttaccaaagtgtatctgattttaaaaattcctttagtctgtaaaactcctagagggagggaggtaactgaattcacttcttttggtggcatcgataaacaccgg

SEQ ID NO: 449994 - DNA, 776 bp, Homo Sapiens
gccatttctgattagaaggttcttccagatgtcccgtaattttcaataaatactgcttcctcggctaccacagactcgggaaatgtctgtgatggtgaaggtctcaggagttgactgagagtttgcctgctgttgatgtggtgcttggggcagggttcccactgtcaaaatacatgttggctgttacaggctggtcttttgtgagaatgaatcctgatgaatcacaatactgagaattcccatcttgtatactgaaagagtcttgagtataatcttggtagatgtctcttggcatgctggcaaaatgtgtttgttcatttacctcttttgtttgagggccataaggatcttcctgtctttcatcttttgaactactagctacaaaatgtacaggctcaaaaacgaggtctcgcatggaatttggaaccggcttgctttttaggaggattttgaccatcacatgttgagaggtggcgtttttgacctttggaaggtttggacagcaccagatcatatgaaggcatctccccaatatcaataccttcagccatttggagaattttttccatcaagcgtgggctgtacctgcagcccaggaagacgtggttggtccaggcggcggagagcgcgaggagctggtcgagggcagccccgggatagctgtgcaggtgccgacagatgaagctgcgccgcagagcccactgccagtcactttcgtggctatagcgccactgctcggacgcgtgggtcgacccacgcgtccgcccacgcgtccg

SEQ ID NO: 449995 - DNA, 1369 bp, Homo Sapiens
  misc_feature (315)..(377): n is a, c, g, or t
gttttgttttctttgtcgtcttactgcgtcgtctgttgcgatcttcgctttcttgctgccgtcctgtgctttgtgcttccgctgtactgtcatctttccctctgtcgctccactatttgatctgtttttgcgtcctatattcttctggcttttcctcgctcctctgctgtccctcttcttcttgttgctgtgcttgttgctggttcttcggtgctttcgtcgttgtggttcccgttgcggtacctcttttcctctgcgctttctcgctcctctctctcgttgtcttgctcggcgttattgttcgtttcgctctgnnnnnnnnnnnnnnnnnnnnnnnnnnnnnnnnnnnnnnnnnnnnnnnnnnnnnnnnnnnnnnntgtatcttctatgtctcgtcttcttgtctttgtgccttctctacttgcttggttctatctattctatcgttctctagtgcttgtgttggtgcatttttgttgctgctccttcttgttttgtggattatgtccttgtctttttgcgttggtcttgtctttgtgtcttgtttcttcggtttcgtttctacgtccttaggtgtttattcactgatctatcttttggtcgtctacctcttgtctctcatggtgtccacttttccatgggctctgaataagatgcctctctagcttctagtattgcttgagtcctcatcctgttcagggtcagtttgctgatgtttctcctgggcagggtcctgtgcagccccacaagcccagcctccggcctcaacatgccccacagcaagccaggaaccccgtccagattgggagtccccagagggaaggtgcccaggtcttgtctctggtgattcagcataccgatgccgtccagcgacctctccttcccgtgctggctctccccagaacccggcactgacaagtgttcagcctggaagggatgctgctcctccagcctctggcttgtcccccatggcactcgaggacacctaagatggaggtctctctgacctcactggcctcagacaacagaacccatgtgcaggtcactcccaaagccaccacaccaggggctgcagtcaggggccaggtggcacccgagggcctcaggagtccgaggttggcagtgctggggatggcagtcacaggcacctagttcacactagttcctaaccacacgtttcatctcgctgatgaggggcccaggccatcggtgccagctgacacatgtggctaatcagtcttatcctggtgcctggatgatcggggcgagggggcaatggccctcgtgcctcagtttcccctctgggatatagctgagttacactacaaaggataatgatacgtgctttctctacaccccaaacgccacc

SEQ ID NO: 449996 - DNA, 580 bp, Homo Sapiens
  misc_feature (508)..(522): n is a, c, g, or t
cttgatttcaatgttctatgtctgtcgtccaatttctgctaaaacatctttacgtctgtctgcatattccagacttaacagaactactgagctgacaagaacatagagctgccgatttatagtacagtctacaaaactcccatccccaaagcggggaccagggcacctccagggacggaatgtacagggagagtggggctctgtacagtgctctgcacacctcaattgctaacaggacaaaaggcccttggacgcagggcttctctgtcccttcgctcgcttctgaagcgcctcgtgagaagcatccctccatggccctgcacgtggccttgatgcctgggacccagttccgtggcccaccctgcctgccacgacccctccccaattcccccacacaaaggggtctgggcaagtgtttattcttctcctgccaccaaagccaggtccacttctaagctgaatgtgcagcctgtgccaccctccacctctgtctccccttccaggccannnnnnnnnnnnnnngtccagggcagcccctgcctgtgacctcaggaaggagagaccaggagcatggccagcc

SEQ ID NO: 449997 - DNA, 420 bp, Homo Sapiens
  misc_feature (304)..(313): n is a, c, g, or t
gtaaattatatattacatgtttattaagagcacaacttttatgtaaaatttacatttaatgaaaaaaatcaaaaatatttacaaaatcttggaagacagatgtgcattgttctaattacaatccaaagtagtaaataacaatcctttaaaactcacatttattagagttgtgtttacaaattcttggttaaagaggcagctacaaagtttatcactatatataagcaagaaccagcttgctaggtacatttcccattgaaaatctactggtctcttttacaccattagtggatttttaaatggnnnnnnnnnntcaatataaactcatatggcttcaaaattgtaacctgtacccaatacttggtatgaagactgtggtaactaagaaagtgcagaagtttaaccatttcactaattccc

SEQ ID NO: 449998 - DNA, 990 bp, Homo Sapiens
tgatcttcaccgagtagtccaagtcctccggccccgggaagggctcaaggggccagttaaagaagccagttgaggaataccagcccggagcagccggcccagaccacgaggacgacgatgaaggagacaccagcatcatagatgagcttgattcctggaaaggtgactgccgaggaggcgtaggacccaatcatcaaggcaataaacgtggaccgaaggtcgccgaacatgttgggcagtgttaatgaggtgaaggtcatacacatcccaccaaagccattcagagccagggcgatgaagatgagcacggagagagcgtttggtttacttgctccgtacgcaatcagcaagcaggaaaccgcgaagcaggcgctgcccagcagcctgagcttcctcgggccatacttgtccatgacgatacccaggggcagggtgatggcactgagcagaaaggagcccacagtgaaggccaaatttagcatctcgtcctgggcctggcagctgagccagccgttcatccagctcacctcctcgtgccccggctctgctgtgccgcccactgtgccattggtgacattctctggctcggtacacaggtaggagtaaaagccctctgacttgagcatgatgagcagcgagccccagcccaggaggactgccgagaagaggaggttctccagcacggccgtgcaggccatccaccagcggcgccgatgggcagtggccagggtgggcgccatggtgcggcgcggcgcggctccggctccggctccggctctgcaccaccgctgccctccgctacgacagagccgccccggccaggcagggagacgtctcccgcagctcactccgaggtaaactcgaggcatggaggcaagaaggggctaacgcatgctcagggccgtggaactagtcctggcctgcagcaggcctgacatcgcctggggccagcatggaacgcagcgtgaggtgggcaggggcagatccgag

SEQ ID NO: 449999 - DNA, 1260 bp, Homo Sapiens
  misc_feature (373)..(393): n is a, c, g, or t
  misc_feature (423)..(444): n is a, c, g, or t
  misc_feature (562)..(562): n is a, c, g, or t
  misc_feature (613)..(613): n is a, c, g, or t
  misc_feature (669)..(669): n is a, c, g, or t
  misc_feature (691)..(691): n is a, c, g, or t
  misc_feature (703)..(703): n is a, c, g, or t
  misc_feature (769)..(769): n is a, c, g, or t
  misc_feature (780)..(780): n is a, c, g, or t
gttttggttatatctctagaacatttcaagtcttttcctttttttctgttcctagctatggggttttagagaagtgggaacaggaaggcctttgtctttttcttctagtttactacattttccttccgtagttcttcagctgtgtggaaacgggcatcccaaggacataggatcatatattgggtagggagggaggaggatttctggaacttttctcaaaggcatttggacccttataagtgggactgaccgccataaccacagtgatctcttcgcttccaccctgcccccccgtgcctctacctccgacagcctaccccgtttttccccaataccacggcttttactaatctgctctctcccgcaaccacgnnnnnnnnnnnnnnnnnnnnntcttccgtttgccccactgccaatgttctnnnnnnnnnnnnnnnnnnnnnntttatcttcccgcccgcccatcacgtgccgcttaccccctcctctcgcgcgcctttacatttgcccacccgcctaccccctcctctttttatctgtctcttctcataacctctccccnttcctccacctttttgtacgccctttatcccctgcccacctcctccttatnttctccgcccacacccccgcgcgccgcggctatattattcacgcagcgccgcgctngttattactcactccgcaccgnggtatgtattanacaccttctatactactcttcacgcccccatcttattttttcccccacgccccccactctcttttntatttatcttntataactcgcccacattacggcgtccgctgctcttattattgtatatcttttaccgccgccgcgcgcccgtcacagatattttgctcgacgatagtacttttgcccgccacgttatcctctcccccctgctcctcccgcgcctttcttgctgccctctcctccaccccactttattttcacttgtgtgttattaccactactcatactcaacagactgcatcccctctcgctcatctttatagcgcggcagcctatatttatatgtagcacgacattttcctcacccacaatttgtgcggtcggtggcgcccatgtatagataaatcaccgcccccgcgcctcactttctccccaacccctttttatatatttttgtctcttggcccgcccgctttgttattccacgccgccccactccaccgccctgtctttctcttgccctgccgcgctcgctttttttctatgtttctcttctctgt

SEQ ID NO: 450000 - DNA, 873 bp, Homo Sapiens
  misc_feature (44)..(44): n is a, c, g, or t
  misc_feature (50)..(50): n is a, c, g, or t
caacctcagcaaaggagcgaacaatggaatgagggttgttctcnttcttntcattctgatgatgatgctttttgagaagggctcccgcactttaaccctcatgctgtcattcaggtcactggacagttcttgctgatccaggatcaggtctgaaatttcttctatgctatttgcatgcatatccaggaggactgttccattaataaggcagctccttagctcaaacaggctgtgcaatgaaagggttgccacataaggcttgctccagcgttctcccccatcttcaacatcttcttcaaacttcagccacctggctgtttccttccactcagcatcttctccttctttcatacagatctcatccagctctgtaaacagctcatgaggcacatgctcttcatcttcctcggtgccaagaatgaactgaacacgctgagatggtgtgtcgtgggccagggcttccaggcccttcctcccccctggctggctcctttgccccgccctcgtctccggtgcttctggccatgagtgcggtgatgccgatggctctgccggccaagcggcatccgaacttctcacatacagagttctgtgaccttccagctcttctttttcatagtgaatgttgagaattgtactggtcccaccctgatccaccacagcttcttcatctggtctctgatagctgaggacgccgtccggctcgttactcccggcggccggcatggcggagccgaactaggtctcccccacgggctccaagccaagcatcagcagcccgcgccctctggtcgggtctgagcagatcactcgaacggcgacccccaccccggagccaacggtcaaccatcaaccgccgccgcctccatagcc

SEQ ID NO: 450001 - DNA, 916 bp, Homo Sapiens
ccattccagagtccagaccagtccctgcccaggctgactgccaggacttggtccaaattgaggccaaggtccaggagaacactcagagatgggtcactgcgaccagacgtggaggaccgcctgcacgcccagcacttttaccctgcaccgctcgattctcagagctccaagccgatgtggacaccaaattgaagaggctgcacaaggctcaggaggccccagggaccaatggcagtctggtgttggcaacgcctggggctggggcaaggcctgagccggacagcctgcaggccaggctgggccagctgcagaggaacctctcagagctgcacatgaccacggcccgcagggaggaggagttgcagtacaccctggaggacatgagggccaccctgacccggcacgtggatgagatcaaggaactgtactccgaatcggacgagactttcgatcagattagcaaggtggagcggcaggtggaggagctgcaggtgaaccacacggcgctccgtgagctgcgcgtgatcctgatggagaagtctctgatcatggaggagaacaaggaggaggtggagcggcagctcctggagctcaacctcacgctgcagcacctgcagggtggccatgccgacctcatcaagtacgtgaaggactgcaattgccagaagctctatttagacctggacgtcatccgggagggccagagggacgccacgcgtgccctggaggagacccaggtgagcctggacgagcggcggcagctggacggctcctccctgcaggccctgcagaacgccgtggacgccgtgtcgctggccgtggacgcgcacaaagcggagggcgagcgggcgcgggcggccacgtcgcggctccggagccaagtgcaggcgctggatgacgaggtgggcgcgctgaa

SEQ ID NO: 450002 - DNA, 834 bp, Homo Sapiens
  misc_feature (425)..(434): n is a, c, g, or t
  misc_feature (789)..(789): n is a, c, g, or t
ctggcctcagcttcttgcgagctgatgttttttaagatctgaagtttgatatatacagtcattaattcagagttaagactgcagaagtagatgaagaaattctggaattccttaatttatttgtggcagcactcagaatgcaaggtttcacaagtgtctccatttttttctcctttgcaattaaaagggctgtttaatattaagctttcacggcttggaagattcctgtgaatatttcaatactgtccagtcttaaagctgcagagaatcgggctttgcagaacactccactgtttttaatggcatgaatttaacagtgtttggcatggtgtcactgcccaacactttcagataactcaactgaagaagttgaccctatcttctgcaaaataacatgagtatatacttgagaaaagcctcaacannnnnnnnnnggctgccatttttagctacctcaaaggagataacagaaaaacaaggagtactgatgatggaagcatctggtccctcttgcagagtgatgaatgattttattggtggcagctgggtggcaggacaatccaggcatccagttatgcctgatccccaataagtgaaatctttgttcattttctttttatacacccgtctgcttcctaaaacctgacaccatttaatggtgcccttggtcaaatctaaatgatcttactttcataattctttgattctagcttgcagagtcaagacgaactctaactcatgggatggacaaactggaagatgtaaaataagtaaggctttctgggccanaaaagcctcttcttacagatccggagaattccggaccggtccagc

SEQ ID NO: 450003 - DNA, 205 bp, Homo Sapiens
gggtgagccattttgcctggcccaaaccaatttctgaagttggtctaaagaaagcaaattcactaccttctgatccccaaaccctctggttctccagtatctacctgtgaaacggcctaacccaggcctgggcatacaggaagtgcacattaaatgcatgctggataagtgcaggggtcctgtctgtcctagggtggggtaggag

SEQ ID NO: 450004 - DNA, 671 bp, Homo Sapiens
ttttccatcagtgcaatctgctttatttgacataaggcatttgggacagtcacgtttgaatggatttctgccttttggaaggggcatgtaatggtttaattcttaaatccacctttgctttaatgccctagcatgtcggactcctcttcccgctctggtcatttcttagcagtcagcaagtattcaaagattaatgtccaagaagaccagtacctttaaacccttcttctggcatacaaacttgcatgacatcatccattgcagcataatctgcaattggttcatcagccttcaataaaatgacagattcaggaatgacgccaagggtgcctagggtggcacagtcatcacttaaaatctttccatcaattgacaaattctggtcaaaaggagcaactgaaaatgcatgcatgatttgattaaaatctggatctttttctccatctggtttagcttcttccttgtcctcctctgtttcagaactactcacattcagttccggagccgaatccttcatcacctttttattatccactactttatggacatagatggtggcttgagtgtattcacgcaggtccctctgctgctgacacaataagccttctctgcattctggacagagtttgggctcagaaatatactgtgtttctgaagggctaatgccctaa

SEQ ID NO: 450005 - DNA, 238 bp, Homo Sapiens
gaatgttgaggtgggtatgtcgctcagcaggacccccacttgggcagacagatggaatggagactttgaaggcatgtgcaatttatgattgtactcttggatctatagcctatatatccagggtatcatccaccaggaaccgacatgcacgttgataccatgtaagccttccttgatgttttggagaaatgaggcattagaaggggcactgaatcctactgcggagtgaagttacaat

SEQ ID NO: 450006 - DNA, 534 bp, Homo Sapiens
  misc_feature (69)..(78): n is a, c, g, or t
ttttttttgaaattttaatgtattaatatatttatctttctaccaatagtcataaagtataattttaannnnnnnnnngcagaagaggcccatgaaagtcacaatgcatccatgccccatgcccagggccacccacatctcgggccacacctgatggaaggttggagtccttctctcagaatagctgggcccagtgtcacaaacactgccccgtgcagggtgctgggacctagagaacatgggtcctaaccagggaaccccagagtcactgcagaccaagttccaagagccctgagctcaccagaacagaggacagccttgggggataagtccctggaaagaagatgagagtgagctgggtcctgaaggatgggccattctaggtgagggaagcctcagtggacacagatgcatgagggagggggtctgcccagtcccggggaggggggcggggcctggcctggcacgagaagatcccagtgcacaagtcagaccaggcgacaaaaccccaggatgatctcagctcccagaggg

SEQ ID NO: 450007 - DNA, 511 bp, Homo Sapiens
  misc_feature (44)..(44): n is a, c, g, or t
  misc_feature (72)..(72): n is a, c, g, or t
  misc_feature (94)..(94): n is a, c, g, or t
  misc_feature (156)..(156): n is a, c, g, or t
tcaattaaggaaagaatctgggggtcccttccttaacggctctnaacctctctcttcgttccctggtctggnactgggtcaagcccctgggggnaatcaagaaagggcccatctgggccccagctgtgtaacagcgagggtgggcagccccctccnactcccactctgcttcccacaaagtcggctcccgaagagctcgaggctgcttctgtttatatgtgcagggcccgggcgggtgaagggtcagagagacggacacaaggagccggcaggagggcggagcgaggatgtcctttcccgggagacaagtcgggaaagcctggctggactgcctcagccccgcgcgcctcctggactcagggttccccgtcctgagctcgggagatgttcagagtcacactgccgcccggtctgccacgcagaggtccaacttgccacccgcgtccctggtacctgagaccaccgacatcctcaggttcctgaccgtggcgcccttctacccagcccagtg

SEQ ID NO: 450008 - DNA, 368 bp, Homo Sapiens
  misc_feature (348)..(348): n is a, c, g, or t
  misc_feature (353)..(353): n is a, c, g, or t
catcatgaagtctttattattgagaataaattaagatggaagccccagcgaaggggggcggggtgaggcaggttgccaatctgtgtccaaagtggggcaacagagtctccacacaggaggagggttctagggtgggcttggagtctggcagggcctggctcaagggggctgggtttggccccagaagtgtggcacaggacagggagggagggcaggggctcctgcctgctgccacagtcttggggagggggaagggctaggaaactccagcagagggagggggttgggacccactatggacagtcctcacacagcccacggatttcaccccgtttccaccacctcctnccctncctggggtccccaca

SEQ ID NO: 450009 - DNA, 418 bp, Homo Sapiens
tagtgtgttgattgagctttatttcagcaaacaaaaaatatttctaagaacttgcataggttctgtcgttagcataccctccctaactcagtttgctcaagaactgtgaattgtcctgccagtggggtgatcagaaatgggacctgcatggtatgaggaccagttatccccatcattgtatgttcactcacaaagacagaacaatcccctccggtgtcacaggcactgttctgtaagatcactttggcattttattgaatactttctggtgaggttctctttccctgcacacaggcttttcttccctaaaggcctctaacctgctggaagatagggaccaagttgagtattttatttcttctgtctacagcatccagcatagttctaattaaatacaattaggcaagtactcaaatcc

SEQ ID NO: 450010 - DNA, 1218 bp, Homo Sapiens
  misc_feature (983)..(983): n is a, c, g, or t
cagaggagaaccagccacccagcaagcaggtgaagccactcttccgccacttccgccggatagactcctgtctgcagacccgggtggccttccggggctctgatgagatcttctgccgtgtatacatgcctgaccactcttatgtgaccatacgcagccgcctttcagcatctgtgcaggacattctgggctctgtgacggagaaacttcaatattcagaggagcccgcggggcgtgaggattccctcatcctggtagctgtgtcctcctctggagagaaggtccttctccagcccactgaggactgtgttttcaccgcactgggcatcaacagccacctgtttgcctgtactcgggacagctatgaggctctggtgcccctccccgaggagatccaggtctcccctggagacacagagatccaccgagtggagcctgaggacgttgccaaccacctaactgccttccactgggagctgttccgatgtgtgcatgagctggagttcgtggactacgtgttccacggggagcgcggccgccgggagacggccaacttggagctgctgctgcagcgctgcagcgaggtcacgcactgggtggccaccgaagtgctgctctgcgaggccccgggcaagcgcgcgcagctgctcaagaagttcatcaagatcgcggccctctgcaagcagaaccaggacctgctgtctttctacgccgtggtcatggggctggacaacgccgctgtcagccgccttcgactcacctgggagaagctgccagggaaacttcaagaactgtgtttcggcaaatttgagaacctgacggacccctgcaggaaccacaaaagctaccgagaagtgatctccaaaatgaagccccctgtgattcccttcgtgcctctgatcctcaaagacctggactttcctgcacgaagggagtaagacccttgtcagatggtttgggtgaacatcgagaagctggcattncagtgggcgaacaagtgaggacaatcccgcaaataccggagcggccctttgactggacatggagggcatccccaaatcacctggagaaccaaggcctatgttccgccagttccaggtcattcggaaaaccaaaagctccctcttcgagctctccttaaaggctggaggcaacaggcagtgaaagtggcagggtccagtcacgaaccgccaattctggggcctggaacttcagcca

SEQ ID NO: 450011 - DNA, 437 bp, Homo Sapiens
gtggagtgtgtgagagagataattcttcaaattccctttagtgcctccaacttctcagtccgctgatttgggaaacaaactggactcaacatttttcaccttccaattctctagaggttctggcttgaccttctttcctttggagcaatcttcctgtgtggggaggaagaaactggcaaaaccacccaagcttagttaacttcccaagtaaccactaggctcaaagaaatttcacctgtcccagccctgtcaaacaggggactacacactgctcctctgtcattccctctctgtgtcctgctgctactatcttcctcactccttaggaaagcacaggctgaacaggaaaatttctattaagatacccaacaaggaggctaccaatgagaaggaataaaatgccactcttggaggcatccctatctctctgaatgaac

SEQ ID NO: 450012 - DNA, 285 bp, Homo Sapiens
acagaggtacataaatgtgataccttcaatgtggaagagaaagaagaattctcattacaaacatgcttttgaatctttcctaactactaaaattcactcatcccttttgaatgaagttctgtagatttgactttgcacagtcataaatactgttattttgtttaaatgttgttaatttggaaccattacattaaaagataatgttgtcctctagttcctctgaaaatattataatttgattttaaagatattttaaaggacagatatcatatcacggacgcgtgg

SEQ ID NO: 450013 - DNA, 344 bp, Homo Sapiens
caagtcaacgagataatttattgaacatacaaggattttaaatgtgcattgtctcattcatacctcaggacaaccctatggtaggtcccatttcttttcccattttacagacaaggaaattgaagttcagagagatgacgtcacacaggcaggttttcacccaagtctcttccttttggctttgaaggtttatggtccttcttcccctgtggttgagcttagtccatttttacaaaactgtttgtgagctggaaatggatatgcatggaaggtcagattcccctgaaggtccattaggcagattgagtgaagggctggagacttagacaccagtataggcaatt

SEQ ID NO: 450014 - DNA, 146 bp, Homo Sapiens
ttttttttagaagccgctgcgtctttaatgacctaacctcagaagtgacacaccatcacttccaacacatctgctgtgtcacacaacaaccctcggtagaaaaagtgtaacgcggcgttgtttttagggaggcctcgtaggcaagg

SEQ ID NO: 450015 - DNA, 552 bp, Homo Sapiens
caagtttttgcggtcactcacaaactctccaatcatcttcttgtccagccgagggttctctcggagccactgagcaacctctgtgttgtccattgggatggtgaggaggcctttctcttgcagaaactgaatccccttctttggtttctgattgaactgctctgtgccagtgattagcagctgcatgagaaaaactagaggtatagaagctactttgcctctaaattagacaaggccagcctggagtcccccatagcccacccccagttggtcagctaaaaagctcctaggatgtggtttttagtgattacagaactaaggctagatcataatggccttagcttcccccatcttcatgtctaattgaattggcttacgagctcttttttactcctttcctgagtgctcaagatacataaaacagttcctcttctctaacttaggatcgggggaaaagtagaagaaagaaactaggtaattcttctctccagttttatatccatccctgacatttgttgatagccagcctgggcaacagagagaatccgtctg

SEQ ID NO: 450016 - DNA, 1671 bp, Homo Sapiens
  misc_feature (38)..(38): n is a, c, g, or t
  misc_feature (50)..(50): n is a, c, g, or t
  misc_feature (526)..(526): n is a, c, g, or t
  misc_feature (593)..(593): n is a, c, g, or t
  misc_feature (698)..(698): n is a, c, g, or t
  misc_feature (773)..(811): n is a, c, g, or t
ttttgagttttaattttacgtggttcttggtggttggnatttagtgcttnttagggtgtatatgtcttttggcgtgtggtttcttgtctttgtccttacatattgacggtggctggccaacacaacaaatatgagacaacgcgggagatggggcttggatttgtttattatttactggttttggccctcctaatcttgtattaggttaaccggacgggtggggccggcccccgcttgttttggtcgcgacgcagacttctcggggagcggctataggtcctattataaaaaaatttttgtgacagaatgggatgaaaagagtgagtagatgcaacgggtatcaccattgctggctatacttatgtactttatgggtgtttctcatggagcgaatcacgccctgtggaggcattcagaacttgggcttcctgctcactttaacctttttatttttaaaaaaccttagttttgagtaaatttgaaggattctattatggcgaaggcagcaggaggtgggtttttcgtntatgtacgtcgtgcaggagttcggttttcttttcccttcagtctgtaggtacccgggcaggaggggntgcgcaggggccgggaaagagatacatagattgtttcgtcgccgtggctctgttactatggggaaatgataagatgtgtttgggttccgctaccaaaattcgtgnctcctgtggttagaggtatttgcagcctgcatttttgttagaacgtgtggtttacgtctccgttaaatatctcannnnnnnnnnnnnnnnnnnnnnnnnnnnnnnnnnnnnnnggtgatgcgtgcgaaatgaacgtacgtgctggaggggtcgctggtgtgtctatttatcacccctcttgacaagggattattctacaagagtgttatcattcgatgacctattttccgcaggtgtggtggaggttggtagcgggagcgcgcctcatatattttctttattgagttcctttcctatcttgttgttgagttctcagttgggctttattgtctttacgcttacgatggtttctttcgtcggtttttgttcccagtgtccagatctgggcctccccgtttgggttgtcgggcatctcatgtgtactttttccttcttggatttctagatttcttgagttcccaagcccctgtgtcctccaggcagcgttacggcctgcggcaggttgtcattcggtccagcctttctcggtcacagggtccctgtccttgggtccaccctgggttgtggttctacatctcccatttggggacgagaaagccacaaaaccattctctattgttcttaagggtacccttgctaattaattccccaaataaaatttttggtgttgatcagctctgtctaccaatgtggtcccctggaccggacagggccttgggttggggaggtgacaggacctgggcagggagggtggtggccaggaagggaggggagttgcatgaggggcatgaggtcagtggatcagcaggttcagcgctgaaaacctgacctctgaggtccctgggaggaaatggcccagggggcaagacctgaggaccccccagtccttactgctgttgcctttacagtggagaccctcccctctgccggtatgccacccaggccgcggtaccgtggtgttgtattgttatta

SEQ ID NO: 450017 - DNA, 645 bp, Homo Sapiens
  misc_feature (495)..(503): n is a, c, g, or t
acattaagaacacaatcttatttaaaaaattcacattttctatacagactgtagccatggattttctttacaccacatttattaaagtatcaataaccagatcctaaaaagagaaggcacagatctgtctctctctggtgaatttctggtgtctaatgaaggaaatgtcaccagctctgcaaattcccatcctccagaaatgaagcaaatcaacacaaatgtgtgtaagcaggagtcatgagatggacatgttatattaaaggatttggattttcctctgccacttataggaatttcaggagaggaggtagctactgaaaatgtttcaaaattccatctgcattcagtctctgtcaaggattcactgttggaaacagtagtatttgaaagctagaatttaggaattccaacatggttctattttctgcattgttttagaaaccagcctttgatctcactgttcttattttagggcttcttgggttttcaattccnnnnnnnnntagtactggtcgttataatttgctttgacgagtctctctgccaggtgatagctgcatgtcagggtcagattctatcccctacttgcgcctgcctcccctgtcccccaacaatgttctgagaaggtgtcaccagggcagtgtc

SEQ ID NO: 450018 - DNA, 472 bp, Homo Sapiens
  misc_feature (385)..(385): n is a, c, g, or t
cgcacttgatccatttttatttcaaaatgtctacaaagttttaattctccattatacaggtaatttttcaaaatctagacattattcaaatgtaagccaaagtccttacacaaatagaatacactcaaagatcaaaaatatacatatctttcagcaaactttgttacataaataagaaaaatatatacagctggtgttttcaaagtacaattatcttaacactgcaaacatgtatagaaggaactaaaataaaaagaaacactacagcaaaggttaaaggaacaacaaattcattttacaacatcatcaattataaagatacatatatcaaatcttaggggaatatatacttcacactgggatcttaacttttacttcactttgnttatttttttagaatactctctggatagggtgaaaatctatccatggacacctattacgaagttacatggtgaagaattccataatc

SEQ ID NO: 450019 - DNA, 358 bp, Homo Sapiens
ttttttttaacttggaacatgaacaacataagtatttatttgaaaaacattttccatttaagtaaaatggcaaattagctagagtagcttcttactgctaattctatttgcactcacagtcacttttattcatcatattcaaagatattgctaccaaaaatgatttcacaaagtatttagaaaaaatatatacagtctctctaatagaaagttaattaaaacaacaaagctaggcaatatcaagctaagaaaggaaaccaattgacatatataaccacaaataaataaatatgtacaaaagattctatgccaacaacagacaaaggaaaatctttacaatggcaagtgaatgggtgac

SEQ ID NO: 450020 - DNA, 130 bp, Homo Sapiens
ccgcccaaagttaagggcctaattttgggtattctgggggctgctttcctggggtggttaaattttaaccaaaacttttgtcaccgttggaagggtttactttgctggaaaactttttaaggacctttgg

SEQ ID NO: 450021 - DNA, 709 bp, Homo Sapiens
ttttaaatgtttacacaatttattttccttaaataataatttgctacaatcctgtcacaaatttaaaaaaatttaacacggtattcacaaaggcagaattctttaggacaatcaaaatgatggtgttcttagaataaattaacatcagattgtgtttatattcagatagtctgatcctctcctttgaaatgcaatggagaccattgtgactgggggtgaatgcacacatttgttcttccatacagggactcattctttatatatactcaacggtaatttgaatcgttaggaatcctgagaaacactcacccctgggcacacacatgtacacagccccacggccaaccctccagaagctgggtttcccatggttcaattactagaagctcttttctcagaaggccaaacattcggaatatttagatgacactgtcccatctccccttgggaaaatcataaggtttcaagtggaggagcttgaagtagcagcaatacatgtaggagattcagtagtcggtgatttccagtccgggtgctgagtgtgccgtaggaggcaagcagaggcaagagacacacctgcttctacaactaagccacagatgaccagaacacactgagaggtaccagtctcagagcctccgccgaaaattcactgaatgcccatacctatgcagtttggcaccagagggaacccgaaaagggcacattc

SEQ ID NO: 450022 - DNA, 871 bp, Homo Sapiens
acaggagtgggcgcccggaataaggacctaaagttgtacggaaagattcgttgtccattcagaaaggctctaattttccccctaaaaaattttatttaattggtttccagtaagtacctttagttaaaagcacaggccacttatttaatgcgggttagaatcaaaaaaacattgaagggggggcaattttattcatccttacccttccccaccaaaatgatttttcttttcatctcattttcattaattttgggaaatcatcagaagatgtgttcgttgagttagggattaatagaattaagctttttgacccttgccaacaccccatgcccagggtgttcaccctccaatacaataagatgccaggaagagtaagttgccttttctgatgccgtaatctgccatcatcttcccatcttccagtctctttccattgcaagtcacaatctgggtctcagggattatacccgtcttagtctcgatcattgctttcacttgtgccactgagctggaccttcgcacttggaggaggtgcctctttgcctcatcacttgactccacaagaaacaagggcagctcctcatcaatgggcttcaccactttcagggtaaggtggatggtcttctctttgtcaatgccataagatgagaggcttctccgtggctttaagatcttggagcccagcaaaagaacctggtcctgcacaggaaccttggtcttagaccggacatgttctttgatttttttcacgctgtcatatgggttggcatcaaaggtcattaaatcccattcctcggaacggacatgcacacagaggcaggaagcattgggagccatctttgcagacaaggggccagaaaccagagacccc

SEQ ID NO: 450023 - DNA, 1253 bp, Homo Sapiens
  misc_feature (980)..(1061): n is a, c, g, or t
ttttttttgagaagcaccaggtttaatattaaaatctttcccttaaaaaaaagtacacagatagaaaaacttaacagcatacaaaatagcatttctgctgtataaatgtgagttaacgtgagtcctaaaaatatttgtaaacctaggtgattatatctttggtaccgtattgagaacccactctccctccttggaccaactctggggatcccggggaagtaaggtgccaacctgcaatgcggggttggtgcccagagggtttgagcttcctgcacccccttcccaaccctccccgtgcgggggcgtcttggctacaaccctgactcccctgggcacctccaatgcccactgggtgtggggacaatgaggatgtcactgctaggtctggggcagtgacaaaaccatacccccatgggagcgctgcctcagggatggggcagctggtgggtgaggggcaaacctccaaaggcgcccacctctcacatccttcttggggtacccatctgaagcttcttgtcttttacaagacataactgtcctcactgtccattctgtcttcgacgcagacctcggcacaggtgctggagtggtgggctgcaggaggtgatctcatttgccctctttgtcccttttgcccaggatacccccggaggtcatcgtgggtagtgaaagaggtcccgtggtcttcccatgtccctggggcagctgctgggggctttccaggacaccggctgtcactctaagtcaaggcctgtgcagctgtgttcttgagacttgctgggggcctggggaaggggcatggttcctgagtccccagagtgtgatgtgtgatctggaatctcccaggagcccagctgacccccaggatggaagtttagggtatatggccttgcttcatctggacaaatgtgcaaccacctggaatactctagaatgttagtgctggcaaggcactcagagttaataagtccgacttattnnnnnnnnnnnnnnnnnnnnnnnnnnnnnnnnnnnnnnnnnnnnnnnnnnnnnnnnnnnnnnnnnnnnnnnnnnnnnnnnnngccatatactggcacacacacgtggccactccacactggcacatttacattctcatcacagatgcggggcccgtctggccttctagactctggtggatggattaagactgagggtgataaagaaaaagccccaggactgatgggcctgaaggacagggacacaggcacttgctatggctgcgtgtgctccaa

SEQ ID NO: 450024 - DNA, 1656 bp, Homo Sapiens
  misc_feature (67)..(75): n is a, c, g, or t
  misc_feature (107)..(122): n is a, c, g, or t
  misc_feature (280)..(280): n is a, c, g, or t
  misc_feature (569)..(650): n is a, c, g, or t
  misc_feature (1302)..(1302): n is a, c, g, or t
  misc_feature (1536)..(1536): n is a, c, g, or t
ggagcgtagtgaaataaagaatttataagaaagtcgcccgggcgggcggggcgtcccccggggggtnnnnnnnnngcgaggaaaatggggggaacaccaccggcccnnnnnnnnnnnnnnnncacccagcccccacaccgggaccaaggactcgtgtaacaaaacgtccccgccatcggtcagagcagcccgcacagtcggattgcgccacagaggatccatggcctcttgccctcgccagacacccgcgagttcatcggggtagaaaaggaggccccgngtctccccaggccctggggcagctgcggggccttccaggacaccgctgtcactctaagtcaagcctggcagctgtgttcttgagactgcgggggcctggggaaggggcatggttcctgagtccccagagtgtgatggtgatctggaatctcccaggagcccagctgacccccaggatggaagtttagggtatatggccttgcttcatcggacaaatgtgcaaccacctggaatactctagaaatgttagtgctggcaaggcactcagagttaataagtccgacttattnnnnnnnnnnnnnnnnnnnnnnnnnnnnnnnnnnnnnnnnnnnnnnnnnnnnnnnnnnnnnnnnnnnnnnnnnnnnnnnnnngccatatactggcacacacacgtggccactccacactggcacatttacattctcatcacagatgcgggcccgtctggccttctagactctggtggatggattaagactgagggtgataaagaaaaagccccaggactgatgggcctgaaggacagggacacaggcacttgctatggctgcgtgtgctccaagtgcctgggcaagggctgcaggctgggggtgtcctgtacttggctcagcctccagcattaattaggctgcctaatggccccagaccagctcgggccagggaacgcagggactggcatcatagggaggagactggctttcttctggatgaggcaacactgctcaaggctaggccctagctcagccagcagccagggaggctagggtctcttccctagctcctgggtggataaaagtgcgaggagagagctatgattccttgaggggtagctggctgaacagaaaaaagttaatttaccacctcagtaactccaagaatcttcccagggagggattcggtctccccacctgtcagccagggagagaatcctagattctgggtcatcaagcctaactttcccatcttacatatgggaaaactgagttccctgggggaacctggctcagagtcagttggcctccntggaggcagagggctggtcacggcccctgcagttttcttgcctcctaagccagccccagggtttggggcacaacacgtcaggagcagaaagcttccagaaggggacagctgataagggcagcctggctgacaggaagcccggtcaggccaggccaggagatgctgggtgctggcagggggggagcttcaggcagggcagggtaggccagccccctacaggaagctatcctctcnttccccgaggcgcagggcaccccgaatccggcaactgttccagctctggctccggtccacctggagctcaagctggggctctggctctggttcgtcctggggctccgggggctgtcacag

SEQ ID NO: 450025 - DNA, 1029 bp, Homo Sapiens
ttttcaagatattttttcttttatttaaaatgttagctatcacaacacatcatacaatgaaatgaagacattagaatcacattgaaacttttaaaaacatctctatatagtcacaaaacatgaaacatgcttcagagatacaaatacagtgtaataccaaaatctcagtacattttcaccatgaaaacaaataggaaaagcacaagactgtcaggagtttccttccttttccgcagtagctgacacaactgcttcaaagcaatgattttttttctttagggactgtatcattgacaggttttacaatttcatttaacactgtgctttgttgagaaataaccacttatttctattttaagggagtcatcatattggaattaaaacacatgtttacaatacatattggcacaatatgaaaaataaacactttttgaattttcaaccccaaacaattgttattaaataaataattattcctcatagtgcatgtcttaatttacctgtcattgcccattgacacaaatgaagctgaataaataatgttaggtagtttattaacgtcttctttcataattctgcattgcactcctttcataagccacagaatttaaagctcttttgcccattagtccaacaaaggaatctgttttatgtcttttgtgagagatctggccatgtccagcatcccgtttgcccattaatccaaagaactgctgaggcttgggtctccgggcgattctctgcagaagatgctcaaagggctccggcagttcctccttgatctggtcgctgtcgtaccagtcggaccagtaattcagatcatcattggctcctatttcttctgcaaacagctgagtggagacaagaaaaaaagactgccaaggccacgaggattttcatgttggattttgcgacggacagtcccgcggggtgctgagtttctctggttcctccgagcgcacgctggtcgctccgcactctcggtagctgccgccgggaaggaggtccgatcccgggaattccggaccc

SEQ ID NO: 450026 - DNA, 800 bp, Homo Sapiens
ttcattaacgctgtgctttgttgagaaattagccacttatttctattttaagggagtcatcatattggaattaaaacacatggtttacaatacatattggcacaatatgaaaaatacacactttttgaattttcaaccctagacaattgttattaaataaataattattcctcatagtgcatgtcttaatttacctgtcattgcccattgacacaaatgaagctgaataaataatgttaggtagtttattaacgtcttctttcataattctgcattgcactcctttcataagccacagaatttaaagctcttttgcccattagtccaacaaaggaatctgttttatgtcttttgtgagagatctggccatgtccataaagagcctttaacagggccacttgtttttcaattgaggaatcagcatcccgtttgcccattaatccaaagaactgctgaggcttgggtctccgggcgattctctgcagaagatgctcaaagggctccggcagttcctccttgatctggtcgctgtcgtaccagtcggaccagtaattcagatcatcattggctcctatttcttctgcaaacagctgagtggagacaagaaaaaagactgccaaggccacgaggattttcatgttggattttgcgacggacagtcccgcggggtgctgagtttctctggttcctccgagcgcacgctggtcgctccgcactctcggtagctgccgccgggaaggaggtccgagcgcgctctttcccgctctcgacgaattcgagctcggccgatttggcctgat

SEQ ID NO: 450027 - DNA, 897 bp, Homo Sapiens
tctatttaaggagtcatcatatggattaaacacatgtttacagtacataatgccacaatatgaaaaataacactgtttgaattttcaaccccaaccaattgttattaaataaataattattcctcatagtgcatgtcttaattttacctgtccattgcccattgacacaaatgaaagctgaatagataatgttaggtagtttattaacgtcttctttcataacttctgcattgcactcctttcataagccacagaatttaaagctcttttgcccattagtccaacaaaggaatctgttttatgtcttttgtgagagatctggccatgtcccataaagagcctttaacagggccacttgtttttcaattgaggaatcagcatcccgtttgcccattaatccaaagaactggtgaggcttgggtctccgggcgattctctgcagaagatgctcaaagggctccggcagttcctccttgatctggtcgctgtcgtaccagtcggaccagtaattcagatcatcattggctcctatttcttctgcaaacagctgagtggagacaagaaaaaagactgccaaggccacgaggattttcatgttggattttgcgacggacagtcccgcggggtgctgagtttctctggttcctccgagcgcacgctggtcgctccgcactctctgtagctgccgccgggaaggaggtccgagcgcgctctttcgcctgctcagtgccttgcggtatttatcccagcctccttgagcctccagacccacgtgacattctccccacgcgactttctgctcaatatttaattagccgcctcctctcctttcgcttgcgtgattgagagtttccgagacggtaactcgtcgatgcccataacatctggtcccccgct

SEQ ID NO: 450028 - DNA, 450 bp, Homo Sapiens
  misc_feature (394)..(394): n is a, c, g, or t
  misc_feature (404)..(404): n is a, c, g, or t
ccatcttgctccttttattatatggtgaagcatccttagtgtgaaattaatggttagatatataaatgcatggcataacatgagaaaatctaggagaaaatatcctcattttaatctaagactatggaattatcaattccaattagacttaatcagcaacttacctttttcaaaaaaagcaaatgcacaaataggcttgataatttaactcttcttaactattaaggctctaggatgtccttaacttttttaaaagatcattttaaaaccaaagcactaatttctatacacagtaaaaacagtacaaatatctgaatttcagatctggcttttgctagatagatcctaaaaatgaagaaaacattttccctttccagatactttaataatttanaatataaatnattgtattaagtcccactgaataaagaatgtgaaagtttttgtatt

SEQ ID NO: 450029 - DNA, 1189 bp, Homo Sapiens
  misc_feature (75)..(83): n is a, c, g, or t
  misc_feature (149)..(179): n is a, c, g, or t
tgaatttataaagaaaaagtttattttcatcacaagaagcacacacactatatacaatacacaccaacagaagtnnnnnnnnngtgcattctgcatcttctactgcaaattcacagtacaaaagatactgcctttaaatatattatttnnnnnnnnnnnnnnnnnnnnnnnnnnnnnnntcatcgatatcttaacgcaattcacgggaacccactggcagcttctggaaaaccaaacaactcatggtgtggagctcctgattggggaagggacagggattggtctgtacctacattttgttgcaaaagagctcaggacactaacagagaggaaaactagggtggtctaggtggtaataaaatctctatgaaagaagagtatgattgtgtgactgggggaatggggcaggtgctgggactctgggtgcagaggctgcctggcctgcgccaccccacgggctgggctagcagacccaagttacgttctttccattggctcctatgggacacagcatgggccaatgcctgcctggcctgcaggaacggccagtgttgtttctagcaaggctccttgggaatagatgtgaacacacaatgtaaaactgcatagcaggataaacacgtatggagtaggacaagctcacaacccaatgctgaccactactgacaagaccaagtatccaatcataacagatgagactttaacagttttgcataaatacatagtatttgtaaactattattaaggcactcaattgtaaaacaataattacagtgtaggaaaagagggaggaagcagctatcttctcatgcagcaaggccgacaggaaggacagtggaggactggtgatctgcttatcgggactcctgtctgagacagtgactgaagccggggccccagcacctatggccaaacaagaagacggcagtctctccagaaccacccagggcggcactggtcacagtttcattccagatcgttaaggtgatttgctctgtggctcaggtgacacagtgtgtctggatgcacatgatcacttgactcggtttctatactcaaatatacagatgcagagtgaactcaaacacacaggcattccactgcagagcagatgataacaaaacaagtggctggggacaggggtcattcaacaaccttcatttggtttgcaatgtctgcaggaatctgg

SEQ ID NO: 450030 - DNA, 630 bp, Homo Sapiens
ttttttttctctgaaaaaaaggtttattgcatatggaaatcaatagatatcttttacaaaaaaaggttagaataaagatctcacatttgtaaaggcacatatgaaacattttatagcaagcacaagggcagtgagaacatcaacaaggtccaatatctaaataagactttataaaaacagataggaaacagtgcaaaaaatactgtcaaagtcagttctatacacctcataactgtgtatacaactggcaagcataagcttatttactgatataaaatagcacatagaatagcatgcatagttttattttaggcttttcatattattaaattgatagggagtctataccaaagtacagttgacatgaatagtgataaaaatcactccccagcttagggaatgtcctataaacatctcacccctccctctgcttacaactacagtttggtagtaaggagactgggcttccatcttgcaaggtggcaagcggccaccacagggggcgaatgtgctctcaggatcccaagtcccaacctggaatgcatttcttacggcaacaacataagagatggtgattaaatgtctgggtcagcccacaaaagccaaccagatctggctatcacagccccc

SEQ ID NO: 450031 - DNA, 534 bp, Homo Sapiens
attatttgtgatcctgatatgtcacatataatagctttgttacctggagtatttgattaacctaaacagtttaagcattttgaattagttggagtttaaatggattacatttggtgtatattgtcttcattgaaaagatattgttggatatgccacatcagagttagcattgacttataaataaataccagaatttaccagagtacacttttctcttcagatgactcaattattaaataaaagaatatttcttatttctgggtcaatataaggtactgacttctgatgcataatcacttaagctatgtgagtttaaactggtatcttttcttagtgggtacccattcaatgtaaggctggtccatgggaatggacatgaagaggatttcacagtatgtagagcagaaggcacgtgaatgtgtttgctttggcttggagcttattaagttttgactacggttaaaataagtcaaatagtaagtggtaaaacacatttttgttagtattggaactttctggagaacataagggcta

SEQ ID NO: 450032 - DNA, 498 bp, Homo Sapiens
  misc_feature (15)..(15): n is a, c, g, or t
  misc_feature (312)..(312): n is a, c, g, or t
ttttctgattaaatnaaatttattcgtgtcttctcaaacatttcagatcaaataatgccattttctaatcttgaaaccagcaagattagaaagagaatgaggccatcctttcactcagactttcccagttactcaagattgtattcaggaacgaagtcaaacccggcctcacttcttaattagaataaactagaatcaggtccattgcataactgctaattgttttgcaccagggagccacaaaggaagctaaaactagcctttctaagttatcctaagtttttgctatctaaccaggcacttctgattttnttttcccttaaaactctaaagtacaggtgttgtatgtctgccgcatctgaaaggctgccccggaaatcagagcctatctagcgggaatgtctgggcagtcacccccatcctgcgcgcagatagcaaagggctgctggcaggtgtcagacacacggtaccgcaacagcagtcccgaggtctgagatt

SEQ ID NO: 450033 - DNA, 364 bp, Homo Sapiens
caggttttgaggtttattaaagtaaagaattagcaaacaatatgcaaaaacaaagttcttaagagttatggctttcaaaagcacaatatagtaaaacctaatacattttcataagtatcaaaataacagaattgaagcatgttgctagaatttcagcttctacaacataaacagaagcacaacaaatacaaataagcagcagacctacagtgcagccactagcttggtcttcattatctgtatatgaaatatctttttaagaaaatgtgggcaggtagatacaaacattctatttccatgattacaatcctcttcgattttaaaataagtgaatttcaaaatacaacttacgccaaccatattt

SEQ ID NO: 450034 - DNA, 453 bp, Homo Sapiens
gccttcttagacgttttttcctaatcacccccaaagacattttaatgccacatatatattgtttatgtactatatgtatatacataaacaatacataagcaatacatctgtggtattaaaattaaaaagaatccaattatgtttaccctcaaaagaacctgtttttgccttcttgggagcaatattgcccctgtgagactgcatgcctataaggtaaggttgtgcttgttaaagacccaagacatgactgggttccacagtctccaaaggaagagggtgggctagtctgtttttattattattttaaaattgtataattggggtctttcttagagttcagaaaaggtatagcttactcttttttaattgtttatttagttgtaagcttggtgattgttttctgatccacattgtgtgtgttcttcaataaaatctttcatttctgcaaaaaaa

SEQ ID NO: 450035 - DNA, 697 bp, Homo Sapiens
  misc_feature (210)..(210): n is a, c, g, or t
  misc_feature (328)..(336): n is a, c, g, or t
tccccttgctttactcctccactttagaatattttccttaaaaatcacctcaaaggactgtgaggaaaggctgtggtacctgaccttgttgaaatcaaggcccggcactgtacctacaggcctgtttacagattattacggtgaactgaatgggtaccgaggcttcaccaaagaggtacttttttgttgttgttgttgttttaggaatanttgtaccaattttaagagcattccccccacctgtccccacacacccaaacaaaatgtggtggtgttgccttcaaaaaagagaagttttgtgtcattaacatgacagaagaactttttnnnnnnnnntaactgtcaactattctatttgcatttaggagactgttcatctatgctagattgtcattttccctccttctcccacagaagtttactggtagtccatgtcatggctcgtagctatccctctaaccataccatggaaatgcaggcacccaatgtgaaaaggagcacttgctgggcatcactgacaccgctcatgttttacacatagttgagtaatcagcatatctagaattatcttgcattgcctaaatcatatgtatatagtgaatgttatataatatacctggcaggtctgttttaatttaattgaataaagatacaaatactttgtttggctggcatatattaaattattatatgaaga

SEQ ID NO: 450036 - DNA, 507 bp, Homo Sapiens
taggcataagtcttcttccagctaattttttgcttttaattctgacctcagcctacatagcaaaataactaaattacactccacttgcccacttgtattcagatgaccctgtgcccatagcaacttctccaagattttgtttcctcatctaaaaagtgtgcacggtaatagtacctgcctcacacagttttgtgttagagaaatgtaggtagagtactctggggccttggccttggttgcccccttccttcagggtgtaccagtgaagtgctcaggctctggagccaagccgtctggattcaaatcctagctggaccacttattatctgtgtgaaataagttgaaataagttattttctctctgtgtctcagttttatcacctgacaaaaagggattattatggtatctacttccttatttaaaaaatgatttttgactcttatttccttctccaagttgttggtagggacgtatatacttcaggaggtgggaggagaggaaggggt

SEQ ID NO: 450037 - DNA, 947 bp, Homo Sapiens
  misc_feature (465)..(523): n is a, c, g, or t
  misc_feature (554)..(554): n is a, c, g, or t
ttttttaaggcagcttttatgacagcaacttgctccatgtagttttggcttatttaaaaactatactaactttggatttttctgttacaagacttttaacaatctgtatttcgtgattgtgaactcgtattcattttacttttccaaaacagacttaacataccattccctcacctaggagtactaccacaataatgctttcatggtgccagggaattacaattgtaattcttttaacctcttatggttcgaaaatagaatgtgaatttcttgagcttgtttatccgacccgaatctccacctccttctcgctctgcgcacctctgagctactttttggttgagtatttcctttcagccgttgtcccttctctgccctcttccccctgtcccccgcttttcccctttctcgtttaccatgttttcttccccgttactttccctgtgcctgtctcttcgagtctcnnnnnnnnnnnnnnnnnnnnnnnnnnnnnnnnnnnnnnnnnnnnnnnnnnnnnnnnnnngcgcgtcccttttacgctttctcccctcccntattttctgtctctctgtttggctaacccggtgtttctgtccgacgtttggctcccccgtgttttccgatgccccgttacgctcttcgtcgctgccgttgttgacttatctcgctgtgtagctccctcttttctcggtccttccccgttcctcttgatgtccgcgttatcacacccttctattcgcccgttgcctgctcttcacctcctttttttcgcccccttgttatgccccaccccgttatccccgccgtcttgcccgcttttctttttcgtgtttgcccgctccccctgcgcctcttcgtttgcccctccgtttcgccccctccctgtgcccgtctctgttttcccccacctttgtttcgcgcctcccggtttgctgttccctccccgc

SEQ ID NO: 450038 - DNA, 294 bp, Homo Sapiens
acacagcttcttaatgttttattcatagcattctttatacatcagaagcttcactgatatttaatttactgcagcatcctgtaggtgaagcacaaaaattacattaaacaaagaaacaaaagcacttttgactttttaaaattatatgtgtatttatatccagttgacaaatagcatcacaattattactgtataaaaaactaaatatcaccatggaagctaaggcctaaattctcattccaattgttcccttttgttgatacctaagagatattaattagattccagtacctc

SEQ ID NO: 450039 - DNA, 550 bp, Homo Sapiens
tttttttgagagttgaaaacaagattgacgtaaccctttattgcaaattctaaagtaaaaagatgtacagtacaaagtaaaattgaaatttcatactataaacttccaatccacttacacattctcatttctcaagcatttctgccatttccgcataaacagaacagggaacaagtcgaggaggtgagggaaggagatacagcaaggggaaaaaattgtcttgaataatcacaaaccccagaagcaagtgaaaggaaagacattttctcgacctgctgtcctgggtgatgagaagcgggggtggttggagcagtgcagtttaaaatggctctcagaatagcagcatttatggtaccatttcagcttccttaagtccaataatactttgcccttccctagcgcctttgcctctgtatctcaaaacgctttacaaaacatttagttaaagcctcacaacacccctgtgaggtaggtcagtattattatccccattttacagatggggaaactgaggcacagagaggttaagtgacttgcccaggccacacag

SEQ ID NO: 450040 - DNA, 1444 bp, Homo Sapiens
  misc_feature (24)..(24): n is a, c, g, or t
  misc_feature (35)..(35): n is a, c, g, or t
taaaaaatctttaaacctgccgangctagtaatgnactgaaatctttagaactttgccctctgggccaatgaaagtaatgtttcctcctacccctaagatatcctatttgtaataatctctggctgtaatgatccactttggaagatttcctttgcatctctaattatttctttttaatggaataaggcataagggggaataaatatattgtaaccaatgttatgtaaacccatatccatacaggccaggaaagccaaatgaagtcatttccagaattctagtgtgaaaaacctatttttgaaaagtggggagatggctttgtgtagaactgggtgggttttctctgcagactaagtctagccatgagcttccagatcctttagttttatcagccttgtgcttaccccattttcataaatgctactttaacagccagtcttcataagtcatggttcctaggttttcctgtcacctcattgtattcatctgtggtaggatattaacgggctcattcaaccaaatgtaatgtgtgcctcagacctatttagcatggttggggggcatcagcaggacaaaccaacaggtactccgcaagtgtactggcacagcaagcccaccaattattagcagctcttcatcagcctgctgtctactcagacgcttgcctactgaagggacctgtccagagatcttctggaatcccaggttgggaatctctgcagaatgtcgtgacagttgtggcccaactagcttctgagtagaaacaaggaagctaccctgagatatagtcagctgcccacctgccatagtatttgctactgaatggccagccttttaacataccatttcagatttgtccttcaacaaaaatataaattgcaagtcataccatttaagggtcttttacaaatatgtctaaattgtgtgtcatttttaagttccaaaggtctactggactaagtactatcagaccagctgtagaacctgatggcgctgatccggggtggaataaccctcagtactggtgtgtagaagatgaattgtaggcaggttttgctgatcagcagcctaaggattgatgggctctcttttggcctctgatcctgagcactatggaggcagcatccagagaatggggacctgagctacataggttctcaatgttaacaacaactctgttcggagtgacatataaggagcaagaaatctacagctggtgtaaaatacctttgccttttctatcccgaaagtaacaaatggcatctgtacatgtaggggtaaaaactcagatgtctactcctccaggccatggacaagaaaaagtacagcagtcagaacagtggaacaagtgatttgcattctcttcttcacgctttcctagatctgccatgggtagcgcagccctcgccctccagacataatgcatcgagcccagtgcaggaa

SEQ ID NO: 450041 - DNA, 820 bp, Homo Sapiens
ccagtatgtgcaagatttcagaggagtggactgaataccattggatgataccggatactttaatacatctacattataataagaagcagctggattttgctctgacagcttcttgaggtagactgtaacagcttgcatgttcatccaaaatcttttgtgttggaatcacattgtgatggatcactgaacacaagctgtgcatttggaagaatctgctctagtctgctgatatttgttcaccctgaagcacaacacagctggagttggattgctggtgaagactttaataattccacttggaaatgacattgtcatatcaccagtgatcttcacaatacacttggtgggatctgctcctttaaagtaggcattaacagattctgtaagggcaactgccacaggtaaggtatcctgatttccaaggctgacagggctgggaccccgtgacacacctactgttggagtattggcagcactcaatgaagcagatgatgagatagaagaagaactttctgcccgggctaatggtgcagcaggaggtgggctggtgttggaagttacaggtgggctgaatggcctgggtatttcattaatcccactgagtttgcctgaagtaagctttggtctggaagcaggcctcggaggtgggacaatggtgcctacagaaagaggagttgtgggcctggctgatgatgatgaagttagtgaagatgaagaagatgaatcaagagatggtccaaatagggggtcccaagcaagtaaatcactggttcctttttcattgggtggagcagatggctttgattttgtaactcctcat

SEQ ID NO: 450042 - DNA, 776 bp, Homo Sapiens
atcctcaccagaccctgacgaccctctgagttcctacatcaatgccaactacatccggggctatggtggggaggagaaggtgtacatcgccactcagggacccatcgtcagcacggtcgccgacttctggcgcatggtgtggcaggagcacacgcccatcattgtcatgatcaccaacatcgaggagatgaacgagaaatgcaccgagtattggccggaggagcaggtggcgtacgacggtgttgagatcactgtgcagaaagtcattcacacggaggattaccggctgcgactcatctccctcaagagtgggactgaggagcgaggcctgaagcattactggttcacatcctgggccgaccagaagaccccagaccgggcccccccactcctgcacctggtgcgggaggtggaggaggcagcccagcaggaggggccccactgtgcccccatcatcgtccactgcagtgcagggattgggaggaccggctgcttcattgccaccagcatctgctgccagcagctgcggcaggagggtgtggtggacatcctgaagaccacgtgccagctccgtcaggacaggggcggcatgatccagacatgcgagcagtaccagtttgtgcaccacgtcatgagcctctacgaaaagcagctgtcccaccagtccccagaatgactgcgcttctcctacaaaggttctctgggcactgcccagcctgagtctcggccctcacccagggccctgcctcgggtcctgggctgctccccggttcctc

SEQ ID NO: 450043 - DNA, 809 bp, Homo Sapiens
caggaagcccatgcactgcagagattctagcacaaagaaaggacatcagctagaagtcatatttttccaaacagatgcccaaagcagtgtacctggaaagacagcctcaatgtaccaggtcatcacccccatagaggaaggtgtcaaacagcatcatggagaccgaagtggtgagattgaagccatcttccttccacaggactctcaaacaggttgtcccactgcactccaatgccctgctcctcaaaaagggcaaagtactcacagccaaacccaaaagccacaggagacagcaggctagcgaagatcttgagtgtgaagcccacgtagtcctgccatgccacacacaggacgtagggcaggtacagcgtgaagtagatgatgcccccacaggctgctgccaggttggctctggagaagagtgtgctaatcaggaagcactgcaggattgtcaccacagcaaacacggacaggaagacaaacaccacgctgggatcactgtagggcagcaggtttcctaacttcaggatgaccactagcaggccagcgctcacaagaagaggaatgaggctactaatgaaccagctaaaccagagtatgctgttgtccaggcccatgatccgcatggtctctttcagccgtgcctccttctcatacacgatgcccttgatgatcacagccactgagtaaatccaggccagcgtcatgaagaggggcattgaccggctcatcacccgcagaaagatgtcatcaacgtaacagggatagggcatctgttgcatatagacaccagttttcttctcggtgcc

SEQ ID NO: 450044 - DNA, 1132 bp, Homo Sapiens
agcggagtaaatggctgtgccgtgcggtgctcccacatcctggcctctcctctccacagtcgcctgtgcccgggcaccccggagctgcaaactgcagagcccaggcaatccgctgggctgtgctgccccgccggcgccggtaggagccgcgctccccgcagcggttgcgctctacccggaggcgctgggcggctgtgggctgcaggcaagcggtcgggtggggagggagggcgcaggcggcgggtgcgcgaggagaaagccccagccctggcagccccactggcccccctcagctgggatgttccccaatggcaccggctcctctccttcctcctctcctagccccagcccgggcagctgcggcgaaggcggcggcagcaggggccccggggccggcgctgcggacggcatggaggagccagggcgaaatgcgtcccagaacgggaccttgagcgagggccagggcagcgccatcctgatctctttcatctactccgtggtgtgcctggtggggctgtgtgggaactctatggtcatctacgtgatcctgcgctatgccaagatgaagacggccaccaacatctacatcctaaatctggccattgctgatgagctgctcatgctcagcgtgcccttcctagtcacctccacgttgttgcgccactggcccttcggtgcgctgctctgccgcctcgtgctcagcgtggacgcggtcaacatgttcaccagcatctactgtctgactgtgctcagcgtggaccgctacgtggccgtggtgcatcccatcaaggcggcccgctaccgccggcccaccgtggccaaggtagtaaacctgggcgtgtgggtgctatcgctgctcgtcatcctgcccatcgtggtcttctctcgcaccgcggccaacagcgacggcacggtggcttgcaacatgctcatgccagagcccgctcaacgctggctggtgggcttcgtgttgtacacatttctcatgggcttcctgctgccccgtgggggctatctgcctgtgctacgtgctcatcattgctaagatgcgcatggtggccctcaaggccggctggcagcagcgcaagcgctcggagcgcaagatcaccttaatggtgatgatggtggtgat

SEQ ID NO: 450045 - DNA, 749 bp, Homo Sapiens
taaggggagggaggggagggctgcttttctgacggagttaaaattgggactgcaactgaaaggaagagtagctgggcaaccccatacagagtttgtggtaccaagggtagaggtgatgtccttactgggatcaacgtcatcagtgcttctgaagagattcttgagatccttataagaagaggggtcaaatcagggtcaatgtcaggacagggctacttgctcctctcttcaatgtgtccaggggactgggcagcagaaggcaccctcaggggtcagcacctcatccttcttcatctcttaaaaatcatcttcgctattttcctcgcttctaaaatcacatttggctcctgaccttggaggctgactctggacattctgctgatattttctcccactatcctgctcaggtggtggtttaagtgctccacagcaaaaacagcagcaacaacagaaacagcaacaagtgagcagagtacacaggatgacaagtgtctaaaaggtaggcgagaatggcctcagtccagcagttttctatatgactgctcaagcttccctccctcaatcctcctggcacccagaaaatgagacaacagaagcatttgtcataaggaaaggaaggtcacccttctttccttattcttaaaggacctggagaattgtgtaccttgaaccaacaactattcagaataaaatagtatctgacgccttcttccaccaaagtgatcatacagatatattcccaatgagcc

SEQ ID NO: 450046 - DNA, 1478 bp, Homo Sapiens
  misc_feature (430)..(430): n is a, c, g, or t
ggcggtattaatcgggcaccacacgactcaaaaaaaggagcgtaatactacgaccgagcgtaagggtgctataaggcgttatcttgactgtattacatggcgcgcacttgaggggtgttttttcctccttccgtccagagcgagtttacacccgccgattctcgtactgtcgaaagcgttacatctgacggggctaaaacagtcggggggtcccaaaaattattggggtatacatttttaaatatgaaggtacggaaagggctttttaccggcacaaaagctcggcatcttctggttttggtgatgacaggggtgtttcttccggcgcttttgtttctcagaggatgggcgtactcgtccatttgtgctgtcaaagagctggtggtagttattcgccctcacgcgagacggggctccgtttgtcgtggantggtgatgctcgttttttcgagatataggtttttatacaggcgcgagcccatgggagattgtgggggtcacctcactggcttcgcgagcgtaggggtttatcgttgcggcccagcgagttcccctataacagcataagcggtacacggggacagaaggggtcctggactgagataaaaggagggcacatactattgttatgctcgctccaagggggcgctaaggaaggccgtttgaaacagaggcgtgtctccgtatgatcgagaaacgggagccgtggggaaggattccctacagagggagccccgggattgagaaggatttctcgtccctcctcttgtgggggtaggtgcacgcattttttcccagaatggccattataggcgacggggctggggtgggtccgcccaggagtaagttgggggggtcttctgattgttaagcgggagttattcaccaatgtttggtctgctgccacttgttgatttttgcatgtgggtgggcttgggtggagccatggaagtttgtgctggtgttgcccgggcaggtgatgcagtgtttctggccaaattcgggctggtaggtgccgacggggccagcggatgcagcgttgggtggtggtgttgtagtggtggccgggggagcagtgcactttagccttgcagtcctggaaggaggtggtgccttcgtgtttggtgagcaaaccccctccacaggggaagcagccggtgcgcccgggctcagggtggtacgtgcccacggggcaggcctggcagggcttgaagccatcggccgagaagaagcctggagaacactggcctccacattccgacacgttgcgggcaccaggcagaccaagcccgtcgctgctggggcacggtgtgcaactgagctggccttccatgtcctggtatgttcctggcatacatgacacacactggccgagctcacctccgaagtgggtgccaggcccacagatcccaaaattccgggccgttggtggggatcgtgattccggttcctcccctttatattaaagcatgaggtgg

SEQ ID NO: 450047 - DNA, 892 bp, Homo Sapiens
tggggttagtcccgaggcggattgacgggatgctagacccgtggccagtcgttcagccaggagccaggcccccaagctgtgatcggagtcgtctccaggtccactctcgtcagccggcccatctgcggcagcacctggcccagctctggcactgccgtcatccccgaggagattccaggacagcaagattacttccagggcagggcagctcgtgaagctggaggtgaggagcttggcagtctggttgtcaatcttacaggaaaccaggtctatctgtctgagcagcgggagctccatacagaaacgcaggacccctccagccaggttgttttccgccaagctgatctcttccaaatggggggatccatccagggcctgggccaggctcagggccccacctgggcccagatggctgaatggtaggtgtaggaccctcaggtgctggggcagctcctgagccagccccagggctgtgggatcccccagggcattgcagccaagcatcaactcctccaggcgcctgcaaagaacgagagactctgccaactgcactcccccggctgagctgatgctattccctgagaggtctatcttcctgagctctggcagcccaggcaggatggtagctaagtgctggacaccagcgtctccaatctggttgtggctcaagtccagctcctctaggctggtggcagccctgagagcctcagaaaggtggcagcaaccgacatcaccgatactgttcctgttcagtctgaggctctgcaggcaggtcatctggcttagtctgtgagtaagcaaggccaaggtggagctgttcagcagaaggtgactgaggtccagcctctttagcatccatttcccctcaagggccctcatcagcgccttggtg

SEQ ID NO: 450048 - DNA, 935 bp, Homo Sapiens
ccagcccaatcttgggttctcgggaacgttcctccccaggtccctctgcccactttcccagggagctccttgtcgcaacagttgggaagcgggaaatgattcgtgggcttgggcaaaccctcaaggcttcctgagacccttgcccctctttggagaacctcactgtgccacgacccacaaagatgatcccctcatcgtcctccttctctgtctcttgaactgtcgctctcctcctcctcctcctcagactccacggttaatatcacagcagctgtgtcctgaaagcccaggcctcgatgtttccccatttgtagcctcagcattcgccacaccatccttcctgcggccagtcttgcggggtcgtggcttgctcttggtgaagcagatgttgtgcttggtggacttaaaggactccagccgccgcttcatgttctgctggaagacctccttgtcctgccgctcctgcgcatcctctgagatgaagtggcgactgcagctggctttgtactacaagtccagcctgctgcaagccccagagggcagcgcctgttgtgaaggcattccagagtgtgcctaccacggcataggtgaggatggcacccaagttgtcaaagaacagcctgctaggcatgaaatagcctgagtccaacacaataggaggcagcaggaagaggaagaaggtgcctggctccagctggtactcagctttcttggccacagccaaaacaattccgccctagcaccaggcccagcaaaatcagcaggcagctctcagggaccagagatgttactttccgagacaggtgaaacacgattttggccagactggccaccaggatccacagggccaccaggtagggcgcctccacctcgtgccactgccagcggaagagctctaagcctgggggaggctcgcccggggactctggcttctg

SEQ ID NO: 450049 - DNA, 1037 bp, Homo Sapiens
tcttggaaaagggattttacccgcatagggggggtgccaacacccggggagtttatgctatccacgttcttccgcagaaaatagggggtattcccaattcctggcttccacaatgaaggaaggtgccatacgcccaagatataagacgcaaggaatgcttctgggaaacgttacatccactgggccaaaaatccccgaattcagcctggtcccaagcggatccagtccgtggtaatcaacaagtaccaaccacagacgtcagagtaataaagaactggtccaagaataaagtggatccgtaacagttccttttcttccagaaagctcttgctgattttccccagtcaggataggttttgtcctgaagcatcatatcagtgaccatccaagctgtgacaaagtcccccatccaggtccctactgcagctaatgttcatgaaacgtgttcatttcggatgcccatatagtctgtaatgatatatgctcccatgttcccatccattagaagaatcgtgttgtatatgtgagaaaatatgaagagaaagagaattgtgctgaagaacattgtcatccacgacccatgatcttctcgaaacatttttaatcggagcaactgaccaaacaaacgctgatggaacagaaatttgccagctattagtcctgtgagaatggcaagtagccatagaagcaccttcaaaatcctccagccaactcctctagggtatttatttgtaacaaatgaaaaacagtttccaacaacaataacattggcttctgtttggctatgagaaactgggtcctccgcaaatattaagaagttaaagaagatcaccaagtaagccacaatcatgcgagaccagggatgctggaaatagtaacgaaagtctttacccattcttcagaactcccagttcgtagtttacccgaagggtcgcgcggggcgcggggcgactgcacacgggattcgcggtcgagcacagccctcggcgcgccggcggcctcgctgggaagcgcggcgagacgggccggcggcgtcg

SEQ ID NO: 450050 - DNA, 1309 bp, Homo Sapiens
ctcagaccttgcaaagcatcaccaaaccagcaagtgacatgcgctatgtctacagtaaagtagaaaaggcggtcctggcaaagcttccggcggtacacagaccgaggatccgctgacagcacagcctcaatggcacgctttgcttcctctgctgactgaaaatatttaaatgacgcctgaccaacatcttgtgaactgagcttgcccaaggtccatctcggcatgaggagtaaaccgcacttctaaagtggccacaggagcctctgtcacccaggcaggaaccatgctgcggggagctccatcagcccttccagcagggcagtgaggggccatgggctgttgtctcttgccctgcttccttgcaggactgctgctccttgccactctttctagcttcttgtctgtacctttctctgaaaagctcttctctgggcaatatgggccaatttgttcttctgccacgctggaactctgatcacgtcttgattccaaaccaaaatccactgctatctccctgtgcataggaaatgcttgctgaattctggctgtgtcactgtgtgtcaggtagttttcttctgaagttctgtcttcaggacatttaggtttcctcttagtgctatggtggggttgtggctcatcacaccctgagaactgtcgctggtcacagctgtcagtcttgctgtcagactgggacacagtgtttggtgtatgttggttattctgtaaattaaagtctgctaaaggctccatcacattttgcggtgagtcatactcagctatgtagggcttgatgtctagtacgggtgtgccatgtatcatgtcaattccagaaaggtatatagctccaccttctaccttttccagcttggccagggtcagtcctattgcattgggacgatgagggctccttgtggaaaaaactccagtctttgcaccattcagcctaggaggctgcacttttgccttacagctcaaatgaccatttttgtgaaaaacaaacaaaatccaaacatgagaaaactgttctaggcccatcaaggaatgttcaggattattaaagatcctctttctaatcctcaaacaggctcgagaatagctacaaatggatggctgtcttggagtaccattcttggccgagaaacaagattccaagtagccgactggctcagttaaaagattccctgtctccagagccggcttaacgcagccgcacggggtcgctgtaggccgaggccccgactcctccaagccgcgcatggctactggttgctgaggtgcccacccgacgcaatcccgggaattccggacc

SEQ ID NO: 450051 - DNA, 767 bp, Homo Sapiens
  misc_feature (236)..(275): n is a, c, g, or t
aagatattcaaacattacttgtttgcataataaccaacactgagacagcaggcatcagagtgccatgaaagtacaacacgactcccacttccatgcttgaagagctttgtgagagctgtgcctgttgaggccaggggacgtgtactgtggactccaggaatgacacaatgttagccggcagacacctcaaagttcctctgatcccaacagactgggaagtggggtgggtgagtggnnnnnnnnnnnnnnnnnnnnnnnnnnnnnnnnnnnnnnnnccaaggggccagaagttgggtcccctggatctgggccacctgttctctatacttcgtctcactgacttgcacatatttcgataggcagatgggtcttaggaagccagagggttgtcatgacagcaagggtaaggcatcatgggaggtttgggagaggtcattgaggaatgtcactagcagttcattgtctttttttcacaaccaggtactatcacatatttcaaacatcacagtggctggaagcaacagggcaggaacagacaggtgtcgtcacttaacctggtctttggggaccttgacatcaagaccgacaggtcaaatctttggtctcagggagaagagtgccagctcacccagaaggcagaacagctaacagccatgcccaggagaggcagcagtgggagtcatgaaggaggacggggtcctgtcccagcgtcccagcccagctacccaagtagaaggtggggcggcatcttctatggctgagtcttg

SEQ ID NO: 450052 - DNA, 1254 bp, Homo Sapiens
ctgccctgacatcacctagcactacctgcgcctcacctgtggcccccgacccgtccaccgtgcgccctgtggcagttttgaaaaagtcgctgtgcatggtcaagtgccactggaaagagaagcaggactacgcgtttgcctgcgagcagatgaagtcgatccggcaggatctgacggtgcagggcatccgcaccgagttcacggtggaggtgtacgagacccatgcccggatcgccttggagaagggtgaccatgaagagtttaaccagtgccagacgcagctcaagtcgctgtacgccgagaacttgcctggcaatgtgggcgagtttactgcctaccgaatcctctactacatcttcaccaagaactcgggagacatcaccacggagctggcatacctcacacgagaactgaaggcagatccttgcgtggcccacgccttggcattaaggacagcctgggccctgggcaactaccaccgctttttccggctctactgccatgcaccctgcatgtctggctacctcgtggacaagtttgcagatcgggagcgcaaggtcgccctcaaggccatgatcaaaaccttccgacctgcgctgccagtcttcctacctgcaaggccgagctggccttcgagggcagaggccgcctgccgggcattcctagagcccctgggcctggcatacacgggccccggaaaatacagatcagactgacagccatcaggctggcgcagactgtcagccattcatgagcacccagcgaggaagggcgggagcagggatgcagccacaagcgcatgcttagcggaaccggaatagacgcagggaccttgcgtggacacattaaactagatgcgacgaagaggactacagagaacggagcaaccaagtccattgccccggtatgtaccaaccgggggaagacaggaacaggacaacatactacagagcgctacaaaaacgaacgcactcagcagggaaatgcaaagggagaatgacgggggcaagcggaaaacgcaagcggaatgtaaggcatgagcctgaaagacacaacagcgggcaagcagacacacccccacaaagacaggcccacaagagaaaacaacacacgtaccgcgacgtgcatccgcgaaacagcagcgccagggaccgccaagcgccggagcccggcaacgagaccgcgcacacacggaccgcggcggcggcaccacaagccaccccacaggcgacaacacgaaagaccaacaaccac

SEQ ID NO: 450053 - DNA, 1068 bp, Homo Sapiens
cgagaacttgcctggcaatgtgggcgagtttactgcctaccgaatcctttactacatcttctccaagaactcgggagacatcaccacggagctggcatacctcacacgagaactgaaggcagatccttgcgtggcccacgccttggcattaaggacagcctgggccctgggcaactaccaccgctttttccggctctactgccatgcaccctgcatgtctggctacctcgtggacaagtttgcagatcgggagcgcaaggtcgccctcaaggccatgatcaaaacgtatgtggtgccaagctcccttctgcctttgctcttcccatccttccgcctcgcaccgcccctcagaccagctcctggccgcaggcctcccccagcccccaacccttgtcctggtccttgcttccccatcatctttctccattcagccctcccctctccagttcctcttgctctccttgttggtcacctctgtgttccgggtcactcctctccctctccccactgttcccagctcactgcctctggggcctcttctccaccccatctgtgtgtctcttcctcctgttctctcctgcctggaccccctagttcactccttgccctgggcttcctcagaaccctgaggtctctgctttctcagcttgtcgctgtgctcccaccatagagaccatctagacagcctctggtctaccaggacaaggcccagtcccactcagctacctttgagagacaccagaaacgcttagaggagacacctgtgttagaggccacactgggcgcggtgccagaggcccctggtcaggccatgcccctgcagtgtccttcgttcactagacattgcgcctggcttgctgtgggtggggatgagttgcttgactcatgtttagacgcatggttctgtctggtgattgaggtgcccaggcgacgctgggcaatgtcaagagaggttttcgcttgtcacaagcaaggggatgctcttggcatctagtgagtggaggccaggatgctgccctgccactgccattgggcctcagagctcagtctgccagtgtggatagaggt

SEQ ID NO: 450054 - DNA, 749 bp, Homo Sapiens
aaatagattctgggctctgctcagagtcaggctgctgctcagcacccaggacggagaggagcagagaagcagcagaagcagccaagagctggagccagaccaggaacctgagccagagctggggttgaagctggagcagcagcaaaagcaacagcagctacagaagttggaacgatgctggtcaccttgggactgctcacctccttcttctcgttcctgtatatggtagctccatccatcaggaagttctttgctggtggagtgtgtagaacaaatgtgcagcttcctggcaaggtagtggtgatcactggcgccaacacgggcattggcaaggagacggccagagagctcgctagccgaggagcccgagtctatattgcctgcagagatgtactgaagggggagtctgctgccagtgaaatccgagtggatacaaagaactcccaggtgctggtgcggaaattggacctatccgacaccaaatctatccgagcctttgctgagggctttctggcagaggaaaagcagctccatattctgatcaacaatgcgggagtaatgatgtgtccatattccaagacagctgatggctttgaaacccacctgggagtcaaccacctgggccacttcctcctcacctacctgctcctggagcagctaaaggtgtctgcccctgcacgggtggttaatgtgtcctcggtggctcagcacattggcaagattcccttccacgacctccagagcgagaa

SEQ ID NO: 450055 - DNA, 900 bp, Homo Sapiens
tatggtaaataggtcaatgacctcagatgtgtactttgcaattaaggatgccatcggagtttatttttggttggattttatacgcagtcggtaaaactggtgtcatgccaacataaatcttaaggttgacaatgatgctaggcatggccattttttgccataccatataacagtaactgatgtgtcatttatggaaagatcaacatgctccatgatatattcttttccacctttttctttcagtataattgcccaacctaaaccaaatattctgagggcctctttggtcttaactggaaggcctgtgtaagggttgacaggtttgagaatgtcagctagtgcggcttttacagatgctatttgttttgtgatatattctttcttccaataaccagcttctttatcctgaactgacagaaagctcatagacatagctatcttctctactgaattaaatttccaatttgatcttgcaggtgaaaaagcagttgagtagattccgatccaaataaaattgtcattggctagatgataaaagcgcctgctcacacatccagtacacagaaggctcacagcatccaagtaggaaaatatcttcagcaagatttctgaaggcattccatccaggaacccagaacagcaggagaaagagctctcccagtgctgtccacctccggcatggcacctcagggcagcagagcctgcagaaagcttgaccctggcccctttctgcacccaaaggccctggcgcgcccccgggccgcgccaccgcccctgctgggcccgcgcagcgtctggaggccgagccagtgctgctgcaagatccgaccgcgtccagtcgccatagagacaaggagttcaccacaggaccgcgccagggctgaaacgaagagtccgctc

SEQ ID NO: 450056 - DNA, 985 bp, Homo Sapiens
gcggtggtttgttgggagagtgataggtgttgctgttgtagcgctggagtgggcggggctagtttgatgggccagggtagttgtgggaagtgcctgttgatgtgtgcagaggactggttacactttgtgaagggtttgtctggggttcgcggtcgctttcgccctgcattgtgtcatgccgtccttttttcgcatgttcatccctactcctggtgttcaggctcctcaccgttgtttcagtgtgaggattgcctgttggcgcaggttaccatcctgtggtggcctttttggtgtgtgagatctctgcttctgatggctctgatcgctatgcgacctcggttgggatacatccttggtcaggtcctcctaggacatgagagctgggttccagctgcgcgtgtgcagttgtttcatccctgtcccggtataatggactactggcacagagatagaaagctgtcgggttcttttgggccgatgtcacagtgagaggtaaaggattccttcttctcccgagtagacgctgtacccttcagctatatctcctttctgaaagtcatttactatctgtgagtagtagatcaatctcagcccttgccctgggtcctgtcggtaccagtacatggcatcgtggttcaaattctgttcacaactcagggtcacattctgtccttcctttctgaacaggtactttggggactgagtgattccaccatccaacggtgtttgctcccaggaaacaaaggaccacacagcagagcacctggttgctcatagtgcaaagggggccttcttggagctccaagcacttgttggaagagtaatgagaaaagagacttggctcgggggcttctcctggcctaatgtgcagagctttgtcagaggctggaatgaagaggtgggaggttcctggagataatcaagacaggcttcctaattttgcagatgaggagacaggacagagagcagagtcattcgcacctcc

SEQ ID NO: 450057 - DNA, 1047 bp, Homo Sapiens
gaagaactgctttcttatagcacaaaactacttactctgatggaccaataatgaagaaagcactaggagctcttttgggggtgtagtggtgcccccacatgaacatgatggacacccttgggtctgcaaggagccagcatcttacttggtcccacgtcctcctatagctctgatggtggctacacaaactgaccctcttgggacaaggacaaaagatgtcattgacgtagtcagtgctaagagcagaaatgcaattctttgttatgaacattatgaaaaccaccttcctatgtttgtaaaatatttaagaaaaaattggcaaacaattaatgcttaatattttggatactatttgtttttctttgtaggaaaaaaaagttgaaagtttctattttctatgaagcctttcagataccaatttagtttatgcagaaaaaaattgaacaaaacagggtaccagcacggaagactttcttaaaacgcaacctgaattgacatgatgaacatgttcgtatgtgtgtttgcttatagcttaatctctttaaaaaatgaacaaaaacaagggaacaaattttaacaatgttttacaattatttaaatcaactaacatgtgtaacttattgtaagtagaggtagaacattaagaccttttttggaagacgagagggatttctcttcctgatgtaaacactgaacactgatgcaaacatgtagtaacaagttttaacaggtgtgtgattattactgcagttacttactagattcttatccccctgtcctgcgagcccctcccttttccatcacttttattgaccccaaggggcaagaacatgtagattcccacagaaacaccccttaatgcagaaacagacactctagcacattgtacaaattactccaaacccatcaattcatccccagtccgtctgatttctaaatagtccacactcttgtgaataacttttaagattcccattcataagcttcacgtatctccctgacagcccagaatcccaggttgcagtctgctccactttcaaatccaag

SEQ ID NO: 450058 - DNA, 1165 bp, Homo Sapiens
attcccgggatctgccacagtagctgactggtcaccctgccacccagtgctcacaccctctggccagtgcctggctatggcccgactgctcaggtctgcaacctgggagctgttcccctggaggggctactgctcccagaaggcaaagggagagctctgcagggacttcgtagaggctctgaaggccgtggtgggcggctcccacgtgtccactgccgcggtggtccgagagcagcacgggcgcgatgagtcggtgcacaggtgcgaacctcctgatgctgtggtgtggccccagaacgtggagcaggtcagccggctggcagccctgtgctatcgccaaggtgtgcccatcatcccattcggcaccggcaccgggcttgagggtggcgtctgtgctgtgcagggcggcgtctgcgttaacctgacgcatatggaccgaatcctggagctgaaccaggaggacttctctgtggtggtggagccaggtgtcacccgcaaagccctcaacgcccacctgcgggacagcggcctctggtttcccgtggacccaggcgcggacgcctctctctgtggcatggcggccaccggggcgtcggggaccaacgcggtccgctacggcaccatgcgggacaacgtgctcaacctggaggtggtgctgcccgacgggcggctgctgcacacggcgggccgaggccggcatttccgcttcggcttctggccagaaatccctcatcacacagcctggtactcaccttgtgtgtccctggggacgtaggaagagtgcagccgggctacaacctcacgggggctcttcgtgggctcccaaggggacgctggggcctcatcacagcccaccaccctgcgcctgcaccctggcccctgaggcccacagtggccgcccaacgtgtgcggttccccagtggccccaggcttgctggtgggacagccactggtacacattcctcccagggtttgcagtgccccgtaaccccccattgaaagttcccggggaatgaaaacccatggatgggatgccctggcaaaacgggtaacagcaaagcttaaaatttgcctttaaaggggggggccaaaaatttttttcttggggagttcccaggggggttccccaacaaggggacctttgggagggaaaccacctttcacc

SEQ ID NO: 450059 - DNA, 753 bp, Homo Sapiens
tcatcattctgctgttaatgttggtatttatcctgaactgacacccaatctgttcctgttagttcttcagcatgtttgaagtcagcagaagcattctttcctgggctttactgcttcctcagaagaatgcacagtatttggaacaaaaccacttttaaccccttcccagccatcctgaatacaaatttctccctttttaataagttcatatatgtctctcgtcaagattgtgaaggattcttcaacatttgtagcatcctttgctgaggtttctatatacttcattccacagtctgctgacagtttttcagcttcttcccttgtaacttgacgttgtgaagctaaatcacatttatgtcccactagcagaaatacaatccgaaatggctgtacatacatttttgcttcttctagccaatctttcacatgttcaaaagatcgtcggttagtaatgtcaaatactaaaaatccaccaactgagttgcggtaataagatcgggttattgatctgaaccgctcctgtcccgccgtgtcccagagctgtagcttgatcctcttgcccggctcgatctccagcaggcgggagaagaagtccacgccgacggtggggtcgcaggcgggggagcgcagcccggggaagcggccctgggtgaagcggtgcaggaggcaggacttgcccacggtggagtccccgatcacgatgaggcggaactggtagatccagatggtctccatcgctcacgtgccccgctg

SEQ ID NO: 450060 - DNA, 841 bp, Homo Sapiens
gctccccgcagggccagccggcccggtttcaaagccgggcttgcggccccaatcactggctcctgttcgcggggacaaggcaggggctgactgggaggacgtcttgtggatggccttgtgcctccttggcggcctccgtcccccgggtcgccaccgccgacctcctcgatgacccacgctgcgcacggtgccctcgtccaggcagtgcggggcgacgccgtacacgcgggggtcagagacagctgcgtggaaactctgcaccccgcacctgctgcagaagctgtgcagcgccgggtgcgtgttggaccgataggtgacgatgctttctgcgccctggagcagcgtgaagcgcgaggccgggacgaggaagtggcggtgctgcttcttcctgcacagcctgcagctgcaatccacgacgcgcagatctgcaggggcccaagaccgcaaagcggaccgcgccgcagtggcagcccccggtgtgatgcacgaggcccgggtactcgaaggtgtccagcaggaccttggcggcgccctcgcagctgaggccccacagtttcctgaacgtctcccagcgctcccgctgtgcgcccaggtccagctccttaggggactcggcgggcgccggcgggtccgggagtggcgcggagggcagcggatctctggagcccgcctcccgggcccgccgccaccggcgcttccgccgcaactttcccagccacctcttggccgccgcgtggctcccgaccccgacttggacccgggggcactgcgcgcggctggcgcccatgaccgcgatggccgcgcaggcggcgggaggatccccgggccgctttcgcctccg

SEQ ID NO: 450061 - DNA, 1002 bp, Homo Sapiens
  misc_feature (110)..(110): n is a, c, g, or t
gtatttgcccctgcgggtcccaagttgcaacccccagggggatgggcaacccccaggaagggagctgagagccaaggcggaccactgggagggaagacaccggcggctgnccccattgccccagggtgcgggcgcccctccccccaggaaagcatcaggactctgcagtgtaggggggcggcccagctgtaggaggcaggccctgtcacaccagagcagctccctgaggttggcagccagtgaggctcaagaccagagatcctgtcccgggtcacccttccatctgagtcgggggctgggcaggctgaggggcaggaggtgggaaggggcagtgagggaggcgagagggtaccgtgagggccaggccgatgctggtcaggctggaggcgacctgctggtgtgtcctcaggaagctccggatgccctgaaggcagtcctctctcgccgcctcctctccctgacacaggtcagcctctgtgctccccagacggctgaaaggagacttcttccacagcacagaaacacgtcctggatggccgccagctcctgccgccggacgtgggacgtacctttcatcgcctgctcatataccaggtcgtaggtgtccagcatggcgtcctccacctgggtggggctgtggagtctccagaacaccacctgcacctgtgcgcagaacgccagggagaagcacaggaagccccctgccatgaggccctgggcctccctcacggtggctgcagcgctcagcacggctcccagagtcaggaggcccaccaggctcaaccccgcagagaaggcccattggtgcacagcctggtacgggttcttctccagggacgctcggcggatgacagcaaagtgggccccgaagtaggtaagagtcaccatggtggccacagagaggcccagcagcaagataaagaagcaggtgaccagcatctggcatttggcaaccctgactcgactccaaggccccatgacggatcccgagaattccggacc

SEQ ID NO: 450062 - DNA, 500 bp, Homo Sapiens
cgagccctgacccaccggcggctgcggcggagccgcgccggcgccccccatgcgccagacggcaggacggcggcgtcggggggcgccatggcctcggcggcggcgggcgaagcggaggaaaccacccggttgcgcaagccgcgcttctcattcgaagagaaccagatcctgatccgcgaggtgcgcgcccactacccgcagctctacggcgcgcagagccgtcgggtgagcgtggcagagcggcggcgcgtgtgggacggcatcgccgccaagatcaacggtatcaccagctggaagcgcacgggccaggaggtgcagaagcgctggaacgacttcaagcgccgcaccaaggagaagctcgctcgcgtgccgcactccacgcagggcgccgggcccgccgcggaggacgctttctccgcggaagaggagaccatttttgccatcctggggccaggtgtggcggcgccgggggacaggtgctggggcggaggaggccccct

SEQ ID NO: 450063 - DNA, 930 bp, Homo Sapiens
  misc_feature (818)..(852): n is a, c, g, or t
catgtgcacaacttacatgaggctttttgaacatctcctcctggccagctggggtgagagcaagtcctcgaaggcactgcctttgagccttgctcagcccatctgaactatcccaactctagaattgactgctttcgaattgtgtgaccttgggaatgttatctggcttcaaccacaatgccctacccccagctcctctcccaaatgatcctagatacagggctgcttccccccgaccctaccccacctcgggacacaggctcatggcctcatggcacttcaccaccagaagtggtgctcagagttcctatttccacatctaaccccctaattcctgggaaagtctgaggcctggtccccccagtgctttccctggctggcctctccacattttcatctgatggtggagtgagatcaggaaaaataggacaggagctttgccttgggggagaagagagttaagtgtggaaaggggtgagttataggaggttaagcagtccaagatttctctctctgtgtaggaggccatttcctgatgtgaggggtctgaacccaattatgatgggacagggttgggcattgacttcccatctcttctctctgtttttctcccactatctgtagcccaaaactcttatggaggactttgatctttagtataggctattggtcagggccataggaactaaccccgatcctcactccaccaggatctaccacatccctctacacactaacacatgctgtggtggagggagttttcccctggggtcaagttgaaggatccttagatcacccttgtgctcctgtggactggnnnnnnnnnnnnnnnnnnnnnnnnnnnnnnnnnnnagagtagtgtgtagtaatctcgtggcgaaccctacgcgcgagagaagcaggcactacgggctccacctctctctcacg

SEQ ID NO: 450064 - DNA, 995 bp, Homo Sapiens
aagtgagcctccagcgtagttatctcactcgaccccccacccccagcctacagttgtggggtcttgctctgtaagcccaagtccagaagcttgttccctgcctggaggaccgccgtggcatgtctatacctcgttggggtcaatcctggtcggcatagattaggaagcccgtaaagaggctgtctgtccagtaaagggtcatagaagagcccgtttctgctcctgagtagaagatctgcaagccagaacttcgtcaccctgcttgagagccaggatggtggagcctgaggccacatcgtggttgccggtgttggcaatcaaaggtccggatgcggtactggccgtttgtgcaccaggccgatggccaggtgcttgttggccagcgtgatgtcgtaggtgaagtagtagatcccaggcacgccgcagacgaacttgccgctggaagcattgtagtggccaccctcgttcatcagaatcttgtcaaacttgatgggcagccgctcccgtgggtagctcttggtcactgccaccgagcaaagctgacttggtatggccactgccacagctgcaggggcctgggaggcctggctcccccgttcttgcccttgggccccttcttgcctggtgtgccatgcttcccgtcgtcgtgtccatcttggcccgtctttgccaggaaagcccattcgtcccatcattcctgagggccctgcgagcaaaggcgccaagcagtgggtcagcagcacaggggagggcacaggccaggagcacccaggggatcatggtggttaccctcgcggctgcccgccacgtccaggggcgtccggagcaaagaagctctcggcggggctccgcgtcccggctttcctcagcggcagcagccgggcagagcgtcggccccaggcatagttttcccatcccgtcatgggcgggagagccttcctcccggtcacgtgggctggcccgcagcgcagcattctctttttagcagctgtttg

SEQ ID NO: 450065 - DNA, 963 bp, Homo Sapiens
ggtacacatcagtttttacctgtacttgttaccccgtaatgtgccttggaagcttcttgttccttcctgagttggctgacctgtgtcctgccttgggtcccggcacttcggcaggagtacaagatctgatactacttggttcatgccacagtggctttcgccttcagttactccacgggcagggttctcgttgtcaatcatggaccttgaaattccaacacaccctcaatgagtttggcagcaaatcggagctgaccctgcaggtccacgaagtcctgcttgggtagcatcacgcctgggctcgagtagatgaccacaggctggcggtactggaggtaggcggtcttgagccaccactcagacagccagttctccgtcttcctggcccgacgctccagccccttctgcaggcgctcccctacacctcctgaggcctgaaactcatccaccagctgcttggtgtgggcccactcctcctcactcacgatgggctgcagcgccttcaggtagtggtccagggactgctggagagggggcacgggcagccgtggcagtgcatcctggtgtgccttgaagcggctggaagccttcatcaaggagaagggcttcaggaagcccagaggcttcaccacggtcctggcagcgaaggctaacatcttcgctgcccgtccgcggacacgcagtccgctccgccccacacaccgggcaaagtccgcgccgccgccgccgcggctggggtcggtgggtccttgctagagccttcgggccaaggtcgctgagttacagccgccagccggtagaggcagccccgcgcccaccctctgggccgagcgggctgcgggcaggcacccggggaggaggactcgcgaggcggggcctgggccggtagcgggccccgggcgggcaacggtgcccgggaggttggctgtggggcgggggcggggcatcgatatcccgggaatt

SEQ ID NO: 450066 - DNA, 868 bp, Homo Sapiens
ccccccagttactccacggggcagggtctccgttgtccaatcagtgaaccgtgaaatcctacacacccctcaatgagtttgccagcaaatcggaggctgacccctgcaggtccacgaagtcctgcttgggtagcatcacgcctgggctcgagtagatgaccacaggctgcggtactggaggtagccgttcttgagcccccaactcagacagccagttctccgtcttcctggcccgacgctccagccccttctgcaggcgctcccttacacctcctgaggcctgaaactcatccaccagctgcttggtgtgggcccactcctcctcactcacgatgggctgcagcgccttcaggtaagtggtccagggactgctggagagggggcacgggcagccgtgtcagtgcatcctggtgtgccttgaagcggctggaagccttcatcaaggagaagggcttcaggaagcccagaggcttcacctgtcagaatctcgcgaagatcgttttgatgagggaaaacttggctggaggacagagactgcctggccgctgaggttacaccacagccctgggatcggtccacggtcctggcagcgaaggctaacatcttcgctgcccgtccgcggacacgcagtccgctccgccccacacaccgggcaaagtccgcgccgccgccgccgcggctggggtcggtgggtccttgctagagccttcgggccaaggtcgctgagttacagccgccagccggtagaggcagccccggcgcccaccctctggccgagcgggctgcgggcaggcacccggggaggagactcgcgagcgggcctgggccgtagcgggccccgggcggcaacggtgcccggagtgctgtg

SEQ ID NO: 450067 - DNA, 1110 bp, Homo Sapiens
agatatatttttcgccaagtgcgccacaaaaagatctgatatcccccaatgaagggggttttccccgtcccatggtgggtaccccatcccaagctccaaaaaaacctgggaagtgggtgtaccccccggttgaattgcccttgggaaggctttcttggttcttgcatgaaggtggctgaccggtgtacctgcctgggggcccgcgcattcggcaggagggacaagattcggatagtacgggttcaatgcaccagtggcttccccccccaggtactcccccgggcagggtctctttgtcaatcatgaccttgaaatccaacacaccctcaatgagtttggcagcaaatcggagctgaccctgcaggtccacgaagtcctgcttgggtagcatcacgcctgggctcgagtagatgaccacaggctggcggtactggaggtaggcggtcttgagccaccactcagacagccagttctccgtcttcctggcccgacgctccagccccttctgcaggcgctcccctacacctcctgaggcctgaaactcatccaccagctgcttggtgtgggcccactcctcctcactcacgatgggctgcagcgccttcaggtagtggtccagggactgctggagagggggcacgggcagccgtggcagtgcatcctggtgtgccttgaagcggctggaagccttcatcaaggagaagggcttcaggaagcccagaggcttcacctgtcagaatctgcgaagatcgttttgatgagggaaaacttggctggaggacagagactgcctggccgctgaggttacaccacagccctgggatcggtccacggtcctggcagcgaaggctaacatcttcgctgcccgtccgcggacacgcagtccgctccgccccacacaccgggcaaagtccgcgccgccgccgccgcggctggggtcggtgggtccttgctagagccttcgggccaaggtcgctgagttacagccgccagccggtagaggcagccccgcgcccaccctctgggccgagcgggctgcgggcaggcacccggggaggaggactcgcgaggcggggcctgggccggtagcgggccccgggcgggcaacgg

SEQ ID NO: 450068 - DNA, 1160 bp, Homo Sapiens
  misc_feature (76)..(99): n is a, c, g, or t
tttctctgtagggggggcgtttgttttgcccttggcccccccaaaacttccgccggtttgagaggtaaacgaattnnnnnnnnnnnnnnnnnnnnnnnnttctttaggggaaatagttccccggtctttttccccgggggcccccaaagtttctttttcccccatagaggggggttcccggtcccccgtgggtcccaatccaagttgaaaaaaaccgggtttgtggttacccccggtgatgttccgtgggaggcttttttggttcttgctaaagttgctgaactgggtccctgcttgggggcccggcattcggcaggagggccaagatctgatagtacctgggtcaatgcccagtggcgttgccccccccaggtactccacgggcgggtctcgttgtcaaatcatgacctttgaaatccaacacaccctcaatgagtttggcagcaaatcggagctgaccctgcaggtccacgaagtcctgcttgggtagcatcacgcctgggctcgagtagatgaccacaggctggcggtactggaggtaggcggtcttgagccaccactcagacagccagttctccgtcttcctggcccgacgctccagccccttctgcaggcgctcccctacacctcctgaggcctgaaactcatccaccagctgcttggtgtgggcccactcctcctcactcacgatgggctgcagcgccttcaggtagtggtccagggactgctggagagggggcacgggcagccgtggcagtgcatcctggtgtgccttgaagcggctggaagccttcatcaaggagaagggcttcaggaagcccagaggcttcaccacggtcctggcagcgaaggctaacatcttcgctgcccgtccgcggacacgcagtccgctccgccccacacaccgggcaaagtccgcgccgccgcggctggggtcggtgggtccttgctagagccttcgggccaaggtcgctgagttacagccgccagccggtagaggcagccccgcgcccaccctctgggccgagcgggctgcgggcaggcacccggggaggaggactcgcgaggcggggcctgggccggtagcgggccccgggcgggcaacggtgcccgggaggttggctgtgggatcccgggaattccgagaccccggtaccagc

SEQ ID NO: 450069 - DNA, 1254 bp, Homo Sapiens
cgtctcccctcctccctactccactcctaccctcctcccatgctggtaccggtccggaatttccgggatcagcagcccagccacagaggagccagcgaacctctcccggcgcctgttctgggggctttctgttccagcgtcaaggatggaggagggggagaggagccccttactgtcccaggaaactgcaggccagaagcccctctctgtgcacaggccacccacctcaggctgcctaggtccagtgcccagggaggaccaggcggaggcctggggctgcagctgctgtcccccggagaccaagcaccaggccttgagtggcactcccaagaaaggaccagccccttccctctccccagggagcagctgcgtcaagtatctgatcttcctctccaacttccccttctccctgctggggctgctggccctggccatcgggctctggggcctggctgtcaaggggtctctgggaagtgatctgggggggcccctgcccacagaccccatgctggggctggcactggccagggctgccgattcccgcacccgagtacgcgacgtaaagccaggagcccgctgcaggacgcggcggagcgccagagctgtggagaatgtggcgagatgtcgtggggcccccgttggccgcctcaaaggtgtcatgcctgggagagagggggggtggcgacgtaacgcgagtcgttgagaatagtattgccgtgtcgctgggatccgacatgccccgggacgggcgggcagcctgccggcgccgcgcggagcccggctgcggccccggccagcatgggcatcacatctgcgcgggcgagcccccgttcacgcccagtcccgcaacaccccattaccggctccaacaccaacgccctccgcaaagccacagaaacccagtccctcgcaccccatgcccaccgccctccgactgccgcccgcaccattcggccccagtctcctccaccacgggtacccgccgcccttccacgcgccccctcgtaggcagcagcgaacgcgcggacacaccgcggccgggcccctcgtcctagcatcgctggagcgcggctcgtgctgctcaatacgtccttagtacctactccgctatctatcttcttcgctctatacatgtctccaacatcctctgtcctctcactccccaccgctgcctctcctctcgtccccgagatcccgcacactatccatcccgcgccgcacgctatggccgagccgcctcactgacgcatcggg

SEQ ID NO: 450070 - DNA, 1028 bp, Homo Sapiens
  misc_feature (20)..(20): n is a, c, g, or t
agttatggaccacatggganagtgcctctaagtgatttgcaagattattcatgcacctaaatagattccgggaagcttccagaaatcacagcttccccatactcctgaagtcaagcagctttactggttcgggcctctcaaaaaaggggctccagttgctggttgacagcattaagatgcacgcagcctgttcaaagaaatgttgaaaacctaacacattcttcagatgtcttttcagaccacaggccctcaaccttccaccagcggtgtcacccccaaacacaatgcattcagatcaccagaaaccagctctttttgttactgcagtatttccaggctgccaggggaggctggactcctggggttgccccctcctgaaatcatttctgaatgcctttctcaggggtttagacattgagtttcacagaatccttccttaggtggcctaaggggcacttctggtggccaagtacagaaagtctgtgccccagaagcagcctggacttctgagtccttttctgggaatgcagacgggaggaaggcatctttccccctggggtctccatggaaacatgggcatccagaagcctgccccaaaacggcttaactcagaaaccctaaaccatcgcatgccacccacctggctatgcaacagttgaagacagtgaggatgcatcaggaaatttgcatggaaaacgcaaacgctaattagggataaactgaatcaatgccagatacagaagtagaaagggcgacctggaagtcagagagtggcctgctctagtgggatagctgcgtcagccccagatccctaacgaatccactagaacccaaggaagcctgcgtggcacatggatctgatgaaaaacaggctccctatcctctcatccttcctgacacaagtaccctctcagatatgtgatctgcaaaaatccatttttaatgcaacaccaaggtcccatgcgaggtcatagctacaggatacttttcatttgatcacgccaccatccattacactgaaatttatc

SEQ ID NO: 450071 - DNA, 1005 bp, Homo Sapiens
cccaccccaggccttagggccacccgcccaggaccccccagccaggccacaggacaggccagggatgcttccccgtggccgcgtttttcttcgcccggtactgactggattcttctgtgatcttgtctctctctccgatgtcatttcctgttctggctgccgacagtcagtttctgctgcagaagcacgttctctatgcagcagccaatgttcacgctgggggtccgtgcgatcctcagcacgctgaccacgtcatacaagccccgcatgttcaagaagacggtgtcattctgcagagcctggtccagcaggctgttgtccgtcttattgatccagtacacgttgggcctggggtagccgtttatggatgtacacgtgaaggtgagctcatcctgggaggggctgtggggggcgctgacgacgggcacgctgaagtttgctgccacatgcagtgtaacctcaacgctcaaaacctcctggaatcccagggattggctcaacaccaggcagtgaaacttctgctcgtcctggggggtgacgttgaacaagcgcagggagaagtcgccccgcagcatgccggccggtgacatcagggctcggttccggtagcggctgtccacgttttccaaggagctgttctgtgggatgtggtaggtcaccacggttttcgactcactggtttgccaatatacgtaaacatcatttaaatcaaaacggcttccttcagggcaagcgcagctgagctccacgtcgctgcctaccatcgctctgacttccttctcctgagtatcagctcgaaggctgctgaagagcaggaagagcagtccaggactgcccagccgcatggtgcgggcggagacctcgggccgcggagacctcggggcgcggagacctcggggcgcggagaacttgggccgcgggagacctcggagaggagcaacctcggggcgcgggagatcggctctaactgcgctcccgcatcccgggaattccggaccggtccag

SEQ ID NO: 450072 - DNA, 1402 bp, Homo Sapiens
gagacgccccccgatgtctatttcagatatggatgcaggtagatattcatattagcatgcgggatgagtgggggtcgctatcgtgccattgtgtgctcatggtgaggttcttttcagcgccatccagcaggcctggaaccgtcatttggtccgatgtatcctaatcctcgactctgacatacctctctggaaacccccagctttctatcctattccagcccttcccaggggaggaaaaggggcacccagacctgccagctaagatctggggtggggggctgagggaacccccaaaatgtattgcttagaaacttggaggcaaaaaggatgggggaggtcccagggggctggcatctctgacccttccccaaggccctgggaagcctcccaggaagctccccgctccctggcagccacctggccatgaagagaatccagaggctgagggatgggcacagtgaccactgggagcctgaagttccccagtcttgctgccggaacattaaagtgcaccccagtgggtgtcaggtggggaggggccctttccccaaccccaaatctctggcatttggccttcaggtgggttgtttcttccacgacccacgtcccttggagcagatgggggagccagtcctgatggatggtgctgatgacatcaaacactttggactcaatgaagacctgggcccagccccagggctaatccagattcccattctgttgtgttcatcttcggcaggggatgggggggcctcttgttcacagggggacagctcgtcaatggacatctggttggtgatgccacttgctgcccgttccttccatttctgcttgttctcctgaatgcgcttgacccaggtggaacgaaagctgaccacatcagggttggggtctcccacttccacatccagagagggctggcgccactgaaagctgggctggtttttagacttggagtcctcatccgccaggggctgaacactcttctctgcccacgtcagtcaagccacagagaatgtgggctcccacaatgaagtcgatgaaccctatctgagactgtgccactagagtggaagtgcggtcacagagtggagaaaagggcaggcccaactctgcctccttgtcaccctgacggaagaattcctccatgagggccttggtccaacggctgtggaccaaccactgcttggttgggtggctgatgtcagcagcatggagcagtagagacagggccttgggcttgtcaatcctctccagctgttgcaaggctgtcttcatggtcttcacttgctggaaatggcaggacatgtctgtggccaacaccatctcaatgaccagggctcggagttctacaaactcatccttggtgaggttgatgaaaatgttcatctcatcatcctgc

SEQ ID NO: 450073 - DNA, 190 bp, Homo Sapiens
ctcggcggcctccttgacgcccgccgcgatctccccgggccccgccaggtccaccgccgcctgctcatccgcggccaccgcggcggcggcgatcaccagcgccacggccaggaggaggaaccgccccgagatccccatgtcgccgaacccagaatccttcggttctatcgaaagcccgcgaccgcgaccg

SEQ ID NO: 450074 - DNA, 1189 bp, Homo Sapiens
  misc_feature (60)..(60): n is a, c, g, or t
  misc_feature (224)..(224): n is a, c, g, or t
  misc_feature (245)..(245): n is a, c, g, or t
  misc_feature (692)..(702): n is a, c, g, or t
aggttatatgctaacctctcacaacactccacgccgtggtcggacttctggtctataganaatccgaggctgagaatttgcgatgccgacggaggaggtttttttgttgactctcgatgtcgggtggaatttcccgtagaccacacccttaggagcacagcagctggccatcagactattatttttcgctgagggggttgaatcggcagcgcttggttgtggtncccgcatcttttgtccctccnttatgttccctcttatgaatgagatgggtgcctggtatgcgcgagcgcccaataatatgataatattgggttatcttcttgaagaatagagttttttcttgtgtacttaacggccccctcgaaatgtgcctgggtacccatcggtgccacctggtggtcagtcgcaggtagctatgttaagtgtgtgagctacgctggtggctggttgggagtagctttgcacacagaaaattggttcccgccgagagtaagatgtctgggggggccgatttatggatgttcatacaatatggcccgtggtgtggttgtgcacggagagtgcgccttgggcccagatgcggttatattatatgctagcgatagggggtgtgttggattaactccgactacacaccttttaggttcttcttcttaaaatgcggttgtcgggggatccaccattttacnnnnnnnnnnnccgacgggtcgccaatattttaacatcccttctgccctggcgagaagcctatctttcgcccacatccaatgtcaacgggttttattcacggttagcccccggcgtatattccccattagcgttgttcattttgcagccttgaatgctattggccttcacaaggtgggcgcagtccatcagcacttcctttgggatgtcttttatattctctcccttatgtaatcgaaggtatacatgagccgaagagagtttgtccacatgaaaccagatatcttcaggccagccatggcttgatcagatcttcattttcatatttatcttttcccatgtaaatagtgtaggcagatgaattaccgctgctgctggtgaagtagaacaccatgatcccgggagcggtgcggtgactccaccgcggagcagcagcgctcaactcacgaagctcaggataccagactcgcggcggccgcctggcccccagaactccccc

SEQ ID NO: 450075 - DNA, 1333 bp, Homo Sapiens
ggagaaaattactccctggggccccagaaagttgtcaacataaggtgggcttgggtttacttggtgctcaaggccaacaactgcccacagggcccccagctggatgaacaccatcaatttctttaaatatgttgatactaagatggaggcctctgctcagaggaagcaaggacgtaaacgctgggacagactgcactgagggtcactacactaacagacccagatgacacgatggaacgtgaatactgaagctgacaatcttctgaaaaatctctttttcaaaacccatacgcctaatcgagaaatcagggacagggaaacattcgcataattacccaccaacatgttcttcttaacagaagtgaagattattttaagaatatgaaaagtgtttcaagacatctgttttcagggatagaccagagcagcagaagtacttttcagagctggttcattttaaagtctatctcaagaacaagggcagcctgctttcacaaggtaccaagacatgttctggcaaaaacattttcactttaagttatatgctgtcaagttcaactattgttatacatatctggatccttttctgtcagcaaaaaaggtacatgtttttttaaaacttgaaaatcaataatttctgggtaggatgaaggtagaattttggttgtattttatacttcagaacacagatgaaaccaaaaggtctgcaattgtctctacattcacatcttttcaaaggtccttttctccttttgctcctgtttacatgaattcatctgaatcattgccatcctgatttgaagacatattgttcaactttcattagtgatgaatagctcctaagttcatccatttccctcttcttcttcatttcttctttgttctctctttgttcatttcctgaatttgggcttttttctcattcctctcttcacgatctctgcattctttctctgctgctaggtctgggaaccgctcgactttggtcttttctaatcggttcaggatctcatttactttcttctccactgtcacaatttttaccttgaatgctattggccttcacaaggtgggcacagtccatcagcacttcctttgggatgtcttctatattctctcccagatatcttcaggccagccatgcttgatcagatcttcattttcatatttatcttttcccatgtaaatagtgtaggcagatgaattaacgctgctgctggtgaagtagaacaccatgatcccgggagcggtgcggtgactccaccgcggagcagcagcgctcaactcacgaagctcaggataccagactcgcggcggccgcctggcccccgct

SEQ ID NO: 450076 - DNA, 581 bp, Homo Sapiens
accaaacgtttaaatttttgccggtgtttggatttggaaggtagaattttggttgtattttatatttcagaacacagaggaaaccaaaaggtctgcaattgtctctacattcacatctttcaaaggtccttttctccttttctccttttacatgaattcatctgaatcattgccatcctgatttgaagacatattttcaactttcattagtgatgaatagctccttgaatgctattggccttcacaaggtgggcacagtccatcagcacttcctttgggatgtcttctatattctctcccttatgtaatcgaaggtatacatgagccgaagagagtttgtccacatgaaaccagatatcttcaggccagccatgcttgatcagatcttcattttcatatttatcttttcccatgtaaatagtgtaggcagatgaattaacgctgctgctggtgaagtagaacaccatgatcccgggagcggtgcggtgactccaccgcggagcagcagcgctcaactcacgaagctcaggataccagactcgcggcggccgcctggcccccagaactcctccgtgcactcc

SEQ ID NO: 450077 - DNA, 1109 bp, Homo Sapiens
tatgaccaggatattgatgacgaagtggcacagagtgcacagcagactgaacttggacacggccctgaggttcttaaggaaggcgcaaggcagcagcacggccgtggcgataatggaccaggacttctgcgacacgggcagccccgggaagctgttgtacatgaggttgccactcaccaccacgtacaggatgcacgtcatcaccagctcgatgatctgcgctacgttcaccactcggccgcccagcgttgggaagcgcggggcgcagcaggcgttggctatggccacgtacgagtcccgcacgcgcaccacctcgccgtcttcattctcctcgtacaggcacgcgatgaggatcttgccggtgtagcagcacacaacggcggcgaagatgatgagaaacaaccccaggtagccgccgtgcaggatggcgtagggtaggcccagcacgaacatgccctggatggcgttggtcacgttccagcctgcctcccacgccgtgattttgggcttgtcgtggcccccgaattcgccaccacctcccacctggtccttggagccggagggcggcagaggagctccgctgcctcgctgataatggatgtctccctcgacgggcgcttcagcgccctcgtccccgcagggctctccctcggctttcaggatgtccatctgcaggccctggcggtgctcaaagtcgaggtcgtcgcaatgcgcgaagcccaccgcctcctcatccgtggccgcctgaaaacccatcctggcgaacatgccgctcatcttggcctgggacttgttggacacggacgtggccacgttggacagcttgctgcggagcaaggtggccatggcggcggtggggacagcggaaaggacagaaggacccgaggatgcggggaacgcgatgcaagaaggcgagggctggggggcgcaaagtcgctatctccgcttgctctccgcgcggcgccccggggctctctggctcatgaccctcgcagctggcgttcgaggctctctcagggctggaccgggcaagctggcagcaggtctggcggagcggcggcggcggcggtggtggctagtgcactgcggagctgccgcggggcgcgagc

SEQ ID NO: 450078 - DNA, 865 bp, Homo Sapiens
  misc_feature (59)..(59): n is a, c, g, or t
gtaattttttgaaggcccaattaggggttaatttccaaactttcccataaagggggtancccttaccagtggaggtggtttgattgcagaaaaccagtccaaattttcgattgttaggaaaaccaaatgttctgaaacattattttcattagaaaaggggaagggtaattttatagtgtgtttgaggtgttgtaatacatctactgataggcccagctgtttaactaaactggctgtctgttccaaaatccatgtggggcttgggttttctgaatgtgcatgctcctgtgttctacaacattctacatatgaacaatgctatcccactatggctcttgctacagtttttgttaaactcagcattattttcacagagtctttcatctttagcttcatcaatctttttctcagctggaactacatgacaaaggtccatatcctcaatggagtccaataaatctacaacatgggacggtggagtgattgatttcagatgtttgagcacatactcttcacactggccaactgcatccagaagattgtttattttattgatcaaagttgaattattattatgaaggtgacaccaggagagcaaagcactcaatgttcctcggagtcgtccatagtttaaaatgacttctgcacctttcttataaccttgattgaagccctgttgaagagtaactgctttgccagcatctattccatctctataaccttctttgactcgtctttgcatgttactctgccattcccgctgcgccaggagcgactcgtctgcttcttcgtcaaacacgtcccctttgtctccagggccctggatcaaggaggctgcttgaacccacgacatcaccgaggcccc

SEQ ID NO: 450079 - DNA, 866 bp, Homo Sapiens
gattccaatcctttctgtgttgtcaatcatatgagaaacaaacaatgtcagttttttccagttgctgaagagatttggtggggtccaggcaggaatttcattatccatggaaagacattgtagagctggcatgtctttgaagcctccaagtatgtgacttcatctagtaacttcagcagctgctgaaaccaactatcctggtactcaaagcgttctccgaaggtgatggagcaaatgatattggaaactgcattgttgatcttgaaatgagggtcaaaaggctgtccgttctcctcttttattgcttcagtgaggtgttgggcctcctcctgaatgcgttcctctaagctcttctttcctaaaccaaagttccttagtgctgtcagagtgaaccttctttgctccttccatgcctggccacttgacataatcaatccatttttcttaaagatatgttctcgcataggggtcacggggcggttcccaaagttttggtccatgtggataagggcttctttgattaagggcaagccagtaataagaactgcagatatgtcaccaagctccaagctaaaaaggttcccatatttcttcacaaacagctgaacctccaggtgcgactgctcgaagtccacaaggaagaagttgccaaggaagggcaggcgccagggccccggcgggtagttctttgggcgccgtcttttgagaaagtcagcagcgagcagaaaggcgacagtgcccagtaggagagtccgaggatggaccactgcccagagggcagccgccagagagcccatcgccgcgagcatggctcagacgtcctcctgctcttctgcggtccaagcaggcggcggtcccatcccgct

SEQ ID NO: 450080 - DNA, 1352 bp, Homo Sapiens
  misc_feature (29)..(29): n is a, c, g, or t
  misc_feature (35)..(35): n is a, c, g, or t
  misc_feature (55)..(55): n is a, c, g, or t
  misc_feature (93)..(93): n is a, c, g, or t
  misc_feature (236)..(259): n is a, c, g, or t
aaaaccgtttacaatgattttagcctaangaaaanccttcctcgggaaaaaaagnagaatgtgtggtggtagtaattttagcccatcaaaaanggaatgtaagtaacccaataaatataatgtgctttctcccatatagacatatttacacttggagtctttggcttatgttattttctaaaaagaactttaaatgatccagccatcattgcacattaaaagaaaataagccagtnnnnnnnnnnnnnnnnnnnnnnnngagatctgctacactggaaacatataaaaaacgaactttactatgaatttgcacagcttttcttttcttcttccttttaagattcatcagctttcattttagaaagggagaaaaatgccacgtagaaagtatgaactcatgcaacatgtggtagctgctctactgaaaccatgagaaaaaaggtggcatgttcactgtacaaacaccaatacgttctcatttcaatctggttcttattaaatataatttatgtggcatgaaatgttgatgctttaatatagtaataaaaactaattcagtcctttttattaagatacacaacttcataaaaaaaatacttttacctctcaaatgtaaaagtctcccaccccccacattaaaatctttctgcacaagtgtaacaggtacaacagctgctggctcaatagatggacaggtttcttcatggatgcactttaaagagtctcacccaactaagatgattccaggtactccaaagctacatcatagcagaaacggtattgctccggggcttccaccatgtttggcttgctgttcctcagtgtctttactgcatggaaaacatcgacaacattttgccgtttcaccatttcaacaacgatgcctatagcacagaacatgccacttcgcccgccaccatttaggcagtggataatcgtccggccttccccttcctcgcattcctcctgccacttttccacctgaagtatcagtttcaagaatgaccttttggatccaggcacttctcgatgagaagcccatcctaggtactgaaactgttgcaccatcagataaccttcctgtggtcttgttagattgcatatcctaaaaatccggttgatcacatcacagtccattgaacaagacatacattccacttggatggggccatatcgtagcatcccttcctctggccagtactgagggcagcccctgggacaagtcgacttcgtttaacatcacaatggaggtacagccataatcatacactaatctccagaagtcttttacagtgtttggcagagggtattgtgtgacgatgaaagcacgcttggttgcctgtagctgtcca

SEQ ID NO: 450081 - DNA, 907 bp, Homo Sapiens
cgttttccttttcaggcgcgtgcagcgccttcagcatctgcacgatgtttacgccggcctcccccgtcgccctgcttctccagaagctgctccatgttagtcgtccctgggccgccgggtctaactggccgcccccacaagggtgcaagaggctgtctggtcgaagagtgcggggaggctgctgatgggggacatggaagacagactctcctgaggggaggtcccccgacaccggaagctgcaggtcctccaggtctggctctgtgtggctgctctcagcttgggagaggaggggattaacggcacccatgggggttccaaagatgtgggtagaagggaggctaaaggtagagccagccagagaaaacacctgagtggtggagatagaagcagaagaggaggggagggtgctggtgaacggggagcggctgaggcggggcagggccgaggtcctgggggccccaggaggctggaggagagaggggtgctgcagacagcccgcagcatcccgccactgtgggagatggggtccttattactggtgtagatgcctgcccctagtaagggggactccaggctcaagctgggcaagctcccagaaggcccaaaggttcgggaggacagacctcccaggccggagctgaccagggaacctccagagaagggtgaggcagcagtggcggtaaagccagccagctgggcactgggcaaggatggggcagctgggcccccagtgccctccttgttccggctgcccttgggacggcctggcccatggcggctcctcttgctggctttgtgcttcttctccttcaggcctgtctcaggggtctcatcagcaggcacaggggtggcactcagtgcgggcatccgtttgtgggtgcctgccgaggccccagaccccgtg

SEQ ID NO: 450082 - DNA, 950 bp, Homo Sapiens
  misc_feature (907)..(907): n is a, c, g, or t
  misc_feature (921)..(921): n is a, c, g, or t
gcaggatccatttatcattcattggtaaaggatatattccttgtcttaccaagtgtacatttaactcttgctgacatgtcagtgtattttattacttttaatgctgtcttaaaatgaacatctttaaagttggacaggaaggtggcatttcttatttattaacatttttaactttaaacatattgtgactcatctagaccttttaataagacgatcaacttcacacttagggaaaaaattaaaatgtgatggccacttctaataattcaggtagttataagggatctggaagaaatccagtctttatgaatatactattagttgggcattaaaaaatcagtatatattttaactttttgtgacatgctaacacattttcagaataattattgcatagtagaatttattactccagaacagaaagaccttacttcatttcaaatgaagttaattaatttacatttctgggtaaaaactggttctataaattaagtagagtagcttctttatgataaagacaattttctgaaaagtgaacaattctgttaaaagaactttattgatgtgtagatttcgcactttatttctgagactgcgttcatgtagttgttccccaatgtttgagtactaagagaacttgagaaaattacttcataaacatatggaaactgaaaatggactctctttgtgacaaagatattcaacagaaaatattgaccctggcattgcaaaacacaggttcgggttccctaaggtcccacagtgtaatgattacaaatatcctagtgtccggtctaggaaagactttctagggagaaggactagtgggggatttttctaaagggttcaagttttaggcttttataaccttaaatttgggcccccgttacggtcttttttaattttngaaccctcaagggngtcttcccctcccctttccgggggtgaac

SEQ ID NO: 450083 - DNA, 521 bp, Homo Sapiens
  misc_feature (199)..(212): n is a, c, g, or t
taagatgaccacaagaagttttacattattatattcagacaaataaccatttagttactctatttcagagcactgaaaaaaacaagtagcaacagaagacagacttacaagggcactaagtctctggtcactcaaggaccaatcaaaggaatgcgctgttaggccagaaaggagtctctgaagcaaatgattggaaggnnnnnnnnnnnnnntctaaggaaatacaagccgaaaagtttccatttacaataaccaagggaaagagggacccgacatgatataaaatcccaaataagagctttccgctgaggcaggtttctgagcatggaaacaacaccggtagggactggaccggaccacagtctgcccaggccccgcctcggcccttctcgccgactccagcatgggaaatactctcatcgtcccggagcaaagatgaaatcaagagcctgccgttcggccgctgcgacgtttggatgccacaaatccaccatgaaaaccacccgtgggccatcctctgc

SEQ ID NO: 450084 - DNA, 1786 bp, Homo Sapiens
  misc_feature (1050)..(1077): n is a, c, g, or t
ggaacaatgcttcccaaggtcaaaagagtcaccgatgcctccgggtccggccattcactgttaactcccgctacacagtggcccttcactgtgacccggtcaggcgtagccacagggtccttccccagcatgcggcacacctcgccatgagacaaaccagattgcgctggcccgttttgtggatccaagtttctggccctgagaactgcgcctgcacagcgctcggcgttcaagcatgggtagatgtcgcctgagtttatggcacaacctcccaacttggttctccctcagagccctccggccccgagcttcccgcatggatcacggctcccaactgtggcgcaagcgccgctacactttccgcgctccttgcagcagctgttgcgaagtcgtccctgcaatggccgcttcgtcctgcttgcagctggaacacctgcagctggcagcagctgttggctccagctgtgccccgcctgttgcctgggccgcacagtcctctcgcagggcctcacgctctcagctgccagtgccgctggccgctcctcgtatgccatggcacatggtagcctcattctcgtccagactgtcccgcagcctgctgaagctctgcctcccggtctcggagctttccttccaggacacagtgcaagcagggcctcatccgaaggaggtggaggcgggggtttgttggtgagccgctccccacagggagctgctgtcaggggaggccccgagtaccactgcccaaaaagccccccagcccacacggcccccctagggaggcctgtgctcttgctggaggaggacccggccactgtctgagtgggagggcccagtagggaccacatcagggctggcccaggcagtgccacctcgcccagagccatgggaaggcaggtgcccagcctggggagctggtggttggctcggcacctccggtgctgtaggtgggcaggctggacagtgagtttcggccagagtcggatagcgtccctgatgggcagccactggcccagccactaaatgccaggggtttgtcagcagctgaannnnnnnnnnnnnnnnnnnnnnnnnnnncagggcccccaaacagctgcgtcaggctgccctggctcccagacagcccggtggcccgaggacccatgaagctaggcagggacggagcccctcgaggtttgggcagcactggcttgaaggctgttgggcggatcaggatcttctccatgttcttctccagctttccagagacagggatgagctttggtggtgggccgcggaggtgggcattgtgtgcccgctgctctcgggcatcctcaacatcactgcttggtctggggggtgactcctgtccggaagtcctcattgatgtaggtgaagctggtgacagggacagccttcctatgggggcacagtctgggcacagcgggctcctgtgcctcatagccaccccgtagcaggccatcctgtctgagcggaagaaggtgggcccaggagggccgtggtggcggggaggagctggccccaccgggacagggccggcctgagataaggctgctcacactacccatgactggagcattgtggggcagtggcagcttcaggagcaggctccagtggcactggcagagtctgcacaatggccatggtggcagaggctcaggcctggccagcggcctcgcaggcgaccccagaccctcacgccttcacaagaacagactgagccgctctccccagcagagccccctcctctgcgtgccatccaaagtcttcgggccgtacagcctgc

SEQ ID NO: 450085 - DNA, 1056 bp, Homo Sapiens
ggggggggagagtggtccccatgtgggggacccccttaggggatgggccccaggaccaggtgcccctttcgccccaaaaggccattggaaagggccgaggtggcccgcccggggggaggctgggggtttgggttcgcacaacttccggttgctttaagggtggggcagggctggacaggggaatttcggcccaggagtggggataggcgtccccgaatggggcagcccctggccccaagccattaaatgccagggggtttgtcagcagctgaagaggaggagaaagaggaggaagaaggaggcagggccccccaaacagctgcgtcaggctgccctggctcccagacagcccggtggcccgaggacccatgaagctaggcagggacggagcccctcgaggtttgggcagcactggcttgaaggctgttgggcggatcaggatcttctccatgttcttctccagctttccagagacagggatgagctttggtggtgggccgcggaggtgggcattgtgtgcccgctgctctcgggcatcctcaacatcactgcttgggctggggggtgactctgtccggaagtcctcattgatgtaggtgaagctggtgacagggacagccttcctagggggcacagctgggcacagcggctcctgtgcctcatagccaccccgtagcaggccatcctgctggcggaagaaggtgggcccaggagggccgtggtggcggggaggagctggccccccgggacagggccggcctgagataaggctgctcacactacccatgactggagcttgtggggcagtggcagcttcaggagcaggctccagtggcactggcagagtctgcacaatggccatggtggcagaggctcaggcctggccagcggcctcgcaggcgacccagcgccacctgcgcctcggctccagttccggccccgctcctgctccagcgcgcccacctcctcgccgcgacaacgccggctccctagcccgctccgaactctaggttccgaactctgggctcccggatcccgggaattccggaccggtcc

SEQ ID NO: 450086 - DNA, 877 bp, Homo Sapiens
  misc_feature (384)..(384): n is a, c, g, or t
  misc_feature (436)..(436): n is a, c, g, or t
  misc_feature (472)..(472): n is a, c, g, or t
ctccaattcgacaggaccagctttcctgttacccgctagtgaagaatggatcaggctggaggtgccaggtttacactcactggcctgatatctgtaaggagttcacatgcccactacccacctcccctacttgctgcagggggagaatttcctgtctgcacaggcctgagctggggatcacataccaccttggaaagcaaagtgaggaaagaaacagagtagcagcagttagaatcccaccaaggggctgctgtcctgctttggatatcaggggaagccttggcacacccttgcatggggggaagtcacggagaggcgagctcttactagctcctcgcattggtctaaactctaacccccctcctccagcttccccgttccccnacccagcttctgggtgaatggtatccagggatgggggagggacaacagcttnctgtgaaaaaggtgttttgtttcccaccccacagcnagggggagagcccgggttcctgagtccaacccagatgggcttctgattccctcatgcacactcatctgtgtgactgcccatctcacaggtggagaaactgagacaggaggtctaagggtctcagatacaggtaagtgcccaggaatctagagtctgggccagcctaaggaaatgcagggaaaagtaagagcagaaggatgactcctcacgcctgggtttagtatcacttttccctgaagagtgagcttacttttggacctcatctggaaaggccaagtggggaagaatgaaagataccggaacggagggtcaagaaggaagtcggggagacagagtgttctctccacttcttcccactgtcacacaaagaccaactaaccttgggttgtttgagccttctactcc

SEQ ID NO: 450087 - DNA, 949 bp, Homo Sapiens
ggcagatcaatgtgattttattcacagacacaaattccatttgtgagaaagaagcactgattacttctttttagaaagatatttactatcaggcatacttagcaaattatttagctatctgaaaagatctgataccaattggtcatatttttatttttaagtaatttatatttttacaggtattcacattatgcaataccacacactgcggtgacaggaagaaaaaaacatttcaaaatacagtgttaaattatctgttcattgcacagtatgaaatatcattaattagcattaaaattattacagtgtatcttatccaactaaaggaaatttcacatccactacagaagaaaaataagcaatattgattgagccataggggacccagttacatagtattaaataatatctgaagctagtttgaaagacatccagacaaaatacttttcaaaaatgaaacccacagcctatagattcaaaatattttacagaaaagaatagctcatgcctgccctaagaggcaacaccacttgtatacaagtgccaagaaataaggagaaagttaggattttagctgaagattctataataaagcctggcatgagaaattttcttcattaatgtcaccgaaagcagtctctgtgttgcacctgaatacactttataatagaataaacatagtaagtttcaaagcaaattgtgtataccttgccttaatagattacacttaatttagtacaatacagcacgtcaagttttacacaatgcaaaatacacttaatacataatttgctttctctgctttgccgttaaagaggccaccgaagagtccattaaacagccagaattttctagttattgaagctgatccctctcttttcctggtgtcaggagaacacaactgaggtgttaccacacagagccctttcccagttaagaccctttcccc

SEQ ID NO: 450088 - DNA, 947 bp, Homo Sapiens
ttgcaaagttgcactaagtccgccaaagccactcctgtcgcaatcaagtgggagaaaccacacacgcctttagctcccgagtcccccataactcatgtaacctgtgtttttctccgccacgtcctcacaaattccgaggtaaaatatcaagaagtcacaaaacatctggtaggccattttccgtcccatcaccgactgggatctcggtctgcgcctggtcaaacatgatggaatcaatctgctgcttcttgatgccatctcttatgtaggtcttggtggcaggcttcagctgcttggagacaatgctcgttgttctcaatgtaccttttgtagatcgctttggctactcgtaaagttttggtatccttcaggttcatctgcctgaatccattgcaggcaaaccagaagtctaaggtatccacgcatttctccgtctccaggaaagttcggaacaggtaagcaccgtcttgatcgcccaataaggagtgtaaggacttggtccaccgggtcagaggggaatccggagatgcccgcccctccggctcccccaacccatcttcgttccgcctggtgttggaagagacaggcatgggtttggtgacctggcccttgcccacccctggctgacacggtggggtctccccttcttcccctggcactgggggccgcggggcatcctcacggaagctgctgctggggtccgggaggcaagtcaccaacatagcgctactcatggtgagggagctcttcccactgagtctgggaatttttcttcttccagttcctctcagcaatcggcgtggtctctctgtctctctcaagtcagcaggggctcatctgaacctcctctcttttacagcagggccttcggcgggcgcctcggccgccgggcggccccgaaatccatcgctctgaggggttatttttatttcccggctctcgggctg

SEQ ID NO: 450089 - DNA, 932 bp, Homo Sapiens
  misc_feature (686)..(712): n is a, c, g, or t
tggactgctggttcccagctccgcttcgtcaccagccagctgcacttggtctggtgctgacattcctccagggtcccattgggagagaaggtccccggggggcagttctgacacagggtgtcctgactctcggtgcctcccttctgcaccctctggcccgggctggaggtggcgtaagcgcggcacgcggcgcagtggtccccgtcctggacgatgcagaagtggcctgggctgcagccacacacggcgttctctgtcctggagcagttccggctcgcgcgcaggcccatggctgggtcacacatttggcactgcagacacttgcttaggccattgaggtgggcaatgtaggtgcctggagggcagggttcacacactgtgcccgtcagctccccgcaggcctccttcacacgataacctggactgcacttggggcagcactcggagcccactgggtactcgtcctccttgcaggacggcagagctggggcgtagcagggggctcccaggaaggtgagatacagcaccagcctcaagacgtcggttttgggggtggatctccagggaggaggcccccagtctccaggaggctccatgcctcaggctcagaccggcagctcgggaacccagctagcaggatgaactccagcagaggaactcagcgccattgctgcggctgtgggccnnnnnnnnnnnnnnnnnnnnnnnnnnntccgcctcggtgtgacaagctgtgcctcagaacccgagcagcaggagagtgggcagcagggggtgtctggcagcagagaggggctcaggcctgctgggtggagcggcgctgggggacacaggtgggccctgcgggaggcaggagctgtccaggcaaagccgaggggaaatcccgggaattccggaccggtaccaactttggctgcgggggcattcgcatg

SEQ ID NO: 450090 - DNA, 1066 bp, Homo Sapiens
  misc_feature (29)..(29): n is a, c, g, or t
  misc_feature (54)..(94): n is a, c, g, or t
gggacttgcccaatttggagcatttgggnttcaactttggggccttcctagctnnnnnnnnnnnnnnnnnnnnnnnnnnnnnnnnnnnnnnnnntatgaattaaatgagccattgtttgggaacttggcacgtttcccggcgcacggtatcatacatgcgctacagagggtagttattactgtggagatgacgatggctcagctggttttgcccctagggggagggggtgcctgtaccccccagcctggctggcatcatgcagaggaccttcgcctggctgttggaccgcgtgcagcacctgggtgcccctgtcacccttcgcgcctcttatctgggagatctacaatgagcaggtctcagccgtcgaaggaactcagcccacaccctgaaccaggcctccagccgaagccatgccctgctcaccctttacatcagccgtcaaactgcccagcagatgccttctgtggaccctggggagccccctgttggtgggaagctgtgctttgtggacctggcaggcagtgagaaggtagcagccacgggatcccgtggggagctgatgcttgaggctaacagcatcaaccgaagcctgctggccctgggtcactgcatctccctgctgctggacccacagcggaagcagagccacatccctttccgggacagcaagctcaccaagtagctggcagactcactgggagggcgcggggtcaccctcatggtggcctgcgtgtccccctcagcccagtgccttcctgagactctcagcaccctgcgatatgcaagccgagctcagcgggtcaccacccgaccacaggcccccaagtctcctgtggcaaaagcagccccagcgtttggagacagagatgctgcatgctccaggaggagaaccgtcgcctgcagttccagctggaccaatatggacttgtcaggcctcagggctcagtggagcccgggtggcctgggcccagcggaacctgtacgggatgctacaggagttcatgctagagaatttgagaaggctcagggagagtaaagaggcatgtgcgactacgccgagactgt

SEQ ID NO: 450091 - DNA, 996 bp, Homo Sapiens
  misc_feature (20)..(20): n is a, c, g, or t
  misc_feature (30)..(30): n is a, c, g, or t
  misc_feature (53)..(54): n is a, c, g, or t
  misc_feature (98)..(98): n is a, c, g, or t
  misc_feature (138)..(138): n is a, c, g, or t
  misc_feature (140)..(140): n is a, c, g, or t
  misc_feature (142)..(142): n is a, c, g, or t
aggttctttaaaaaaaacantctgcccaantttcaaaaaaaatcctctcaaanntcttctttgccggccccttgtaagatgcccaatgaacagcccanggacttgtctggggcaaggtggtgctccccctggcaaggncnanccagtgggcccaggggcactcgacacagtgggcagatgtggcagcaggggcaggagtagaggggctggcagtgcctgcaaaaaggtgcgtcagaggctccatgacatccctacttgtcacccctccaggctgggccgtgagactcacatggcaagggggagctggggccatcaagcagggacacggtggggtcaggccaggaccctgctggtgatggtagcaggcagagaggagacgcctctctagtgcatggacctgctgggccaggatgcgctgctcattctgggccaggtctcggctattctgcagctggctcttttctttcccttgcagtccatttggtccagctggaactgcaggcgacggttctcctcctggagctgcagcatctctgtctccaaacgctggggctgctttgccacaggagacttgggggcctgtggtcgggtggtgacccgctgagctcggcttgcatatcgcagggtgctgagagtctcaggaaggcactgggctgagggggacacgcaggccaccatgagggtgaccccgcgccctcccagtgagtctgccagcaacttggtgagcttgctgtcccggaaagggatgtggctctgcttccgctgtgggtccagcagcagggagatgcagtgacagtttgacggctgatgtaaagggtgagcagggcatggcttcggctggaggcctggttcagggtgtgggctgagttccttcgacggctgagacctgctcattgtagatctccagataagaggcgcgaagggtgacaggggcacccaggtgctgcacgcggtccaacagccaggcgaaggtcctctgcatgatgccagccaggc

SEQ ID NO: 450092 - DNA, 933 bp, Homo Sapiens
agctgggtcctgcttcctcctggtctgtcgatgaggatttttagaccgtggagactgcgctgctctgcgctgcacgtaccctcactctccgtgttctcactaaggtggaaattgccttccctcactactgacgagaccatgtgtaaaagcgtgaccacagatgagtggaagaaagtcttctatgagaagatggaggaggcaatagccggctgacagctgggacctcatcatagaccccaacctcaagcacaatgtgctgagccctggttggaagcagtacctggaattgcatgcttcaggcaggttccactgctcctggtgctggcacacctggcagtcgccctacgtggtcatcctcttccacatgttcctggaccgcgcccagcgggccgggctcggtgcgcatgcggcgtcttcaagcagctgtagctatgagtgcggcacggctgcggcttggacgagtccagcatgctaggaggaagaatcatcgaagtggcctggtggacaaccttctgatcaccagcctgcgcaagacagtgctacggcgaccgtggcggcaagttaaccgaaatccacgtggccaaggccgcccaggacaaacccggagaactccgtatgaaaagtttcttgtgaagcctgcccatgagggacttacgcacaactgtgaaagctcagtgagaaatctttgctcgcacgtcatgagtgctaaccatcttacaccttatactctcccggggtgggcccctagggctctcagcccaaacgtcagcgagggtttcccgtaaccggtgcttcattggttgtgatgccctaccatgggcattatccccctctgattgcttccggctctcgggtgcaacacgtgtccatgctgtctgcagctccagtctttccctggaggcgttctctcttttccacttgtctccgtatatc

SEQ ID NO: 450093 - DNA, 1071 bp, Homo Sapiens
ggatcacaaaagtgtttttttgtgggttgccagggtttttacacctagaagcgtattgtataacttttatcacaagttagccgtttattcgcctttattgggaggccttttataggggtgcgctcccttccagagaagtctgttttagggcctttacccaagccaaagagtatagaggttagaattccagaattcccgggtattgggggcccttggggaacaacttgaaaacctttccattccgttggaaatatccagtttaagttcttccccaggttaagaaagaggaggggtggtgtgtgacttagtaggcaaaagcaaaagaaaagatcagtgccaagttgtttggcagctggataaaacgttacacctgcggcaaaaataagcctccctcataagaaagcccaaagatgtccgggggtcggggggaggaggaaagtgtctctcatctgtcccatcaacgaaaattagtgaaatctgcctcagatgaagtgcaaaggccagtctgcagggatagtttcaacctctccccacgcgatggggctacacatcacctgcccaagctctctcccgacctgctagagcctagagggcggaggccggagaggctgcagccgggagtagcaccgcacatccgggaacgccagcagcgggctgagggctgcataactgatggaaggccgggcgcggtaagagcgtctcggggagtagggcaaggcggccgggcccctcccattccgccttttcttcagcgtcctgcccgcggcactggctgcgggtgccgggccacctgcgagtgtgcggagggattccggacacccgcggcggcgagctgagggagcagtctccacgagaactgaggcggaccctctggcgccatgcgcgccctccccggcctgctgggggcgagggcgcctacgccccggctgcttctcctcctccagtgccttctcgccgccgcgcgcccaagctcggcggacggcagtgccccaggtgtgatgggtacaggggccagggtagggagggcggagggcgcgcgaggctcgggtccccgcgggcagagggcatcgc

SEQ ID NO: 450094 - DNA, 452 bp, Homo Sapiens
tgccccttggggagctctggagacagccacagcagcgcccctggagacccccggctgaagggacagcagcgagaggcctccccacaaggagcctgacagcggctggactgaagactgtgagggagctgagccacagtgcatccaagctgctccaggtagtcccagaaacaagtggaggtggtgggagatgccacgtgagctgggctgagatcctgagtcagcaggcaggtgcagggagacagaaaattaaaatgtgacttttatgttgatgtaaccttctttagagccacaggctggggcttaggcacatttggtaatagaagacatcgcgcttccatccacaagcaaggaaaatacacaaaaatacacataactctcaggaatatcttctattattatctcacacatgaaaaaagatcttcggagatttagaagtagtctgagagtccctc

SEQ ID NO: 450095 - DNA, 838 bp, Homo Sapiens
  misc_feature (686)..(746): n is a, c, g, or t
tgtcaggtccagcgtattctattgccataattctttgagcacttgcttactttctagtcacagccaagatgttccaggcttatcgttgtaatttctctgccacagcgtctggaatcagccattgctccaagggatgcttctttcttttaatagagaatgatgtgtagaagccaagatctgggtgctagatgtgctcattgttcctggagtgtcattgtttctggagtgtcattgttcctggagtggtcattgtttctggagtgtcattgttcctggagtgtcattgtttccagacctctcagtgggacagtcctcaaggagagagagatgtcagagaaccatggaccagggggcaggcagagaggcagcaagtgacggtgagatgagtggcattggcagcagccccgaccatgtgggcagcaaccccacccggcttcttctcagactctcactgaaggtgagggcacgtggagatgtgggaagttccagatgagagcacactgtatgatcccagtggcagttctttagagtgaagacccccaggagagggtaagatgacagagtctctgggtcagaagtgacctcattttcctgtttaagccagttgagaaggagttttctggttttgtagccaaaacatccagacgcagaactctaaggtcgggaggcctttgtgtttggaccannnnnnnnnnnnnnnnnnnnnnnnnnnnnnnnnnnnnnnnnnnnnnnnnnnnnnnnnnnnngctcagtctgagtccaaagcctcaaaagcagggaagctgaccgtgcaggcttcagtctgtggccaaaggccctagagcccccagcaaaccat

SEQ ID NO: 450096 - DNA, 1126 bp, Homo Sapiens
ggttggaccaggaaacacttgttggcattaagttgttgtatcaagtccaggcagaatggatactctgttctggggacaggaacctgttcttcacaagagatcttttcctacagccccttacaccagaagacactctttatgccatagctggtcacaaaatgttatccccacgctgaagttatcaccttcttacaaaagttgcagtagtgagcgaactccttctcagaacatggcacacaataattgccactctctttggagatcaaaggctttgtccctataggttgtcggcaattctcaacacacaaacaggtttcatgccagtagtttcccttaaattccattttgcgggaaccaggcatgatggtcctcttgcagtggaagcacttggaggagcactcgttagaatagcactccgtgcacagcaggcgctcatccttggcagcaaaaggcttttccaccaaagagtgattgcatttggtgcacttgaagcatccttcatgccagtgccggtctttgtaacaaagatccttagaatcagattcaattggttttttgcattcctcgcaatagttagaaaatacacgatcataacatgtaacacagtatggactgtcatcctttagtacatatttcttcccaagaagtgatgctgtgcagtattgacagtaaaagtgagcagttgtcattttggtttgatctttgtcttaaagccgcttcttcctgtgatttaaacagtacgaaaggagaatatatgttgattatttttcctccaatccacatgcatgtcaactccaaaaggaacagaaagtcaccagcaccatctgaagatcccttccaactgcatgcagctttttcaactttgcaggagaaaacagaagggtccctgcatttcctccaagtcttataccgtgtacatgactcctactgggctgcaaaattattggtaccttaagagatggccccctggattgtggcctctatctctcccttcttgggaaattggggaactctgagacataagtttgagtagaatactcaaggtagttccctgctctctggacttgcagtgtggactcagccttccccgctctgcctgcttcctggtgagctgatcccgggaatt

SEQ ID NO: 450097 - DNA, 1659 bp, Homo Sapiens
  misc_feature (51)..(87): n is a, c, g, or t
  misc_feature (1525)..(1525): n is a, c, g, or t
agatgtatacgactcactatagggcgaccggagctcacgcggggcggccgnnnnnnnnnnnnnnnnnnnnnnnnnnnnnnnnnnnnnatcaggccaaatcggccgagctcgaattcgtcgagagcggtcaagcttccagccagaatgtttgagtcactacctctacagattaaagaaggacagttgcttcatgtgtatccagtactttttaatgttggaatcaatgaacagcaaactctggctgaaaggtttggagatgtctctttgcaagaaagtattaatcaggaaaacttcgaacttctacaagaatattacaagatatttatggaaaagatgcctcctgattatatttcacattttcaggaacaaaatgatttaaaagcattgctagaaaatctccttcaaaatatccaatccaaaaaaagaaagaatgtagaaattatgtggctggctgcaacgatttgccgcaaactgaatggtattcgtttcacctgttgtaaaagtgccaaagacaggacatcgatgtcagtgacacttgaacaatgctcaatcttgagagatgagcaccagttacacaaggacttctttatccgagcgctggatttgcatgagaagcagacaaacccagggagcactgaatgaatccgatgatcctgaaacaggctgtctaactgataacaagccaacttctcgacacttctatcctgtcgccttgctgcttgtcagctcacacctgctagttgtgtggcttattttaagtctggcgttactcttagccaaataccaataagtcttatgtcgtattcctttttcttttctacaaatgacaatgaactttaaattcatggggacaatgctgtaatatttttacatttctcaaattcacagaatttaaaaaatgttaaattgtgtttagttgtttttcctaaaatctaaaaaacaaaaagtactatgcattaggtggattatttgctctttgttcatggaaaggtgtttcccactgttaactagctcaagaagaatttttaaattactgtcttggaataagaaaagaacagaatcctgaaagcttgaagttctgaacctcctgtcctcatcccactaaatttattaaagaaattaagatgaaatttgacaaacactgaaaccctgagacaagttctagagatgtgggaggttgcagactttatttccactgtgctaatatcatagatgccatctgtgatagaaattttttttaacctgttttacttctttgctgcaattaactcttttctgtcaagtaactttatggagagaatggtatttatgtttgtaattaaattacctgttgtatctcttgatgggtgattggtttcagaggacttttctatttctttttaacaaggctcttgttcgtgtcttgatgtaccaattcccagcaacttgtgatttttgtactgcggggcacaaagcactctttccttattaaagcttgaaattgggccaggctgttcagagaggccatttttttcttcctgccagncttaatataaatagacgattgacattttttttaaaatctatagggggaattattaaataatgcttatttagaacggtcttagggctataaattcccgggttgagacggaatatggggagtttaaaggcatttgc

SEQ ID NO: 450098 - DNA, 1169 bp, Homo Sapiens
  misc_feature (1123)..(1124): n is a, c, g, or t
ctgattctttcaagtaatgcttaataattgaagaaattccttgaggtgccacaaagttacagtctccttctttcatcaccattccttcaataggcgagcttagggtcctgaattcccgggatgcggctcagggagttgatggtaatagcgtttttgttttttggctttctgtggagtgcaggcccacaccacctcagcagcctgcccggcagtcctcttttcccaggtttgggcgtttagacaacccacctgagtcctcagccttgtcccacacagcaaggtacaagggaccggacgtctgcctcctcagcagcgcagcgcacaagcttcctgtcatcccggcgcccacgatcagcacctgcgccatggcgagagggagcagcgatccgcgctgagtctctgcggcggggccgttcggcccgggctttctggaaaggcggccgaaccggcgctagcgctctttggttccgtgctccctgggccgacctgggccctgagctttcctccggccggcctgcagggggcggaaaggaggcggccggagctgagaggcccctccgtccttgaggagcaaacctggggctgcggagaaccggggctgtctgtcttctcgctttgggggccgggcgccctgcccctcgcccagaaaagcctggaaatggtgtgggctattgttgggagaacccgcctcgcaacagagctgacgttgaccacagcagagaagcagcttaacctatctactgcgataactctcatgcctgttgggatttttggctgttttactattctagatttgaaagtgggaagaagaatttaccggcgataccacgggcaacctttcctctaatgcttgaacgggcactattagcataatagacaacatcttttggaatctgggagacatttttcttagacctgggactttgtgtaaccttcctgaacctcaatttctccatccgggaaaatggaaacaataacgtatacctttcaaacttgtaaagattaaaagacagtttgattccttcaaaaaattcccacattactccttccataaagttcctatgcccagaaacgccttttccgtgatggtccttaagggcacttttaagggatggcaaccccnntggagaaaaggaattgggggggcccattttgccccgtttgtgttt

SEQ ID NO: 450099 - DNA, 1001 bp, Homo Sapiens
  misc_feature (421)..(488): n is a, c, g, or t
  misc_feature (661)..(661): n is a, c, g, or t
ccgtcgtccaccagcccggtgctgctccggtgagtggccgccatccacccgccccgcgctgctccggcgggcatctgcccatccaccaccgcagccatgtggcaacccagcttgcggcgcggagtggggtgcttcaaccagcggcgagcgggagtggcagccgttggcgaccgaggatgaccgcaggctgccaccgggtgctgcaaccgacaagcaattttgctggaaccacggcaacaagtgtggcaaataccaaagaacaagagaaaaaccataggagtatagatatagctagggacggaaaggcaacaagaaagcaacagaagcaagcaacaactaaaagagagaaataaagagctgatttggtgtacccccagtagctagcaaccagcaaaacaaaagaagaagccagaaaacaagnnnnnnnnnnnnnnnnnnnnnnnnnnnnnnnnnnnnnnnnnnnnnnnnnnnnnnnnnnnnnnnnnnnncaccaggacgacaagcgcaggttcacgtgggcgagccgacgagtcgcaatggatatagtaacaaccatagcgggaggacccgggagtgcggactgaggacggaccagatgccgctgggtcgcgttgggcttctataccttcatatattagttaacaaatctgataaaaagctnccaatgacactaacctttcaaaaactctcaattacactcataattagtattcacgaaacccattcccaaacattaccacccatatcatccattcccaaaacacactcccatatttaaaacctcaaatacgattgtcggacgataggagctacacgtttagtttctctctcgttggctggagtttgtttctgttccataaagtttcctccggcaagtagtcgcccgttcgtagtgtgtacccgcgtttgtcggggtcgtccggtgtgccctaggtttgaggtttgtcagtaggggttttgcttgtttgccctttttggtgacagtctgtcttctgtagtgc

SEQ ID NO: 450100 - DNA, 1142 bp, Homo Sapiens
cgagctccggagtgactttcccttcctgtgaaggcaatccggccctattccggtggaggacccttccccctgggttgatcttgaggaacttaagagacggtgttttgactcgactcctttcccctttttcctcccggtaccaaagcggttttgtttgctgtttatactctaccccgtggaaaggcggctagctggctaaagggttttatgcctgggggaggatgagtcgctatttggtcgtgacttgtttctgtttaagaattattattatttaccaaatgaaaatgttgtacttaccagtccaaagtgcggggcttatattgttagaagaccacttaaaatgctcctggattctgacaaatattgcatgagaaatttgcaatcagccgtgaagcatgtttccccttctgaaagtttaacacgtgccgtatctacggctgggatctaacacatcccattcctacagggtaatttcctattgtgttttcaaatactgactaaagtactttaaccaagagttttcaataatcttgtatgtattattgcctatctctatgcaaggtatcaatagttttctacaggttcgggactacactgtttaatatataaccccaatccttggtaccgcactgaccttcagtatttggttgctgaaatcttcaatgatgaaaggggtgcgtatgataattgacacagattagtaaaccgggtccttttcttccctactttcccgtaacatcctgtccccgacccactctctcacctaaaccttgatggagaaccagcacatgcatttttaaagtgggcattgtcttatttcaccttcgcagactattccaacttgggacaggttcatctaaatttaaggctaatattcgctgggggaattggggttttccatccacgtcaagagtccggcccccagtgacccaacagggtgtggccctggacatttgcctacacagttgggccactaaaacactatagacccaacaggtggataacagtctcacctgtgaaaagttgattattaccgccacgaaaagcgaacacacacacggagcggacaacggggcgaccggaaacggagtaaacatgagcggagaatgcgccgagagactgacaagcacacacatctgaaa

SEQ ID NO: 450101 - DNA, 1252 bp, Homo Sapiens
  misc_feature (938)..(987): n is a, c, g, or t
cgatcatgaagtacaacatccttgcaacttgccagtaattggatcttgagtatcagttacctggaagaacttcaattatgttggggtcaaggacatagactgtttgaatggagagctcaggacctctttcaagaaactcattaacattttcttcattgacaaataaccgttcctccaaagaatcgttgtttacaccataataccactctctccaatgtccatggctctctggagattttgccagttctatcactgcattgtttgaagaaatgctaatcacaggttctgtggtactcaatttattctctggagcaaattgcaaaaagaaggaataaactaagtcttgtgcggagaagcgtaatttgtaccagaggggattcaaatctccttgaagactttgcggctggatccgaggcacctgaatgagcagagtcaaggtttctttgtcctgattacacagtaacggaggacacaaaggctccccgctcttggtcccgggaccacccatggcgcaggctgagcgctggccgcccgtgccctccgactcctcgcgtgtttccacactgctatctccgcgcgcactctctcttcccgcagaagaaccccacgccaggctccgggaggacaaacaaggggagcctccgccaccaggtgagttttctcctccaggagatggctcctccacgctgcccggcggtgaccccgcgtgcctgctcaagtcctgctcccccggcttggggacacgctcctctccagctgcggccggcggaggcgccacctccgggtcgcccagggtggtgaccccggagcccgcagccccagccacgcaggtatcgtggcctccgtcctcggcgcgactcctcgcgggtcccgcctccccctcgcgagcggaagcgcaggcctggccgtcagttccggaccggtccgcggactcttcnnnnnnnnnnnnnnnnnnnnnnnnnnnnnnnnnnnnnnnnnnnnnnnnnngcaccactggcagcgtaaccaccagctgccgccgggccttgttgaattgtgccttgccgcggccatcgtccactgggtacgggagcgagagccgcagccggtagtcaggtttcctcgagtcgaggcacagcagctttctcgttacctccagcgccgcctgctcggccgagcgcaacagcggcagttcgatggtgatcaccagctcatggggcacggggctcggggctgagtccctggagcagcggtaatcctggaggtccccgct

SEQ ID NO: 450102 - DNA, 1332 bp, Homo Sapiens
  misc_feature (46)..(46): n is a, c, g, or t
tttgcaaaattttaattttatacttttaatacctttagtttttagnacaacagtaaccagaatcaattttagatacaggtattttttaaccttaatatttaaaagtccaaaattatatagaattaatccaaatcatatagcaaagaattctgaaaactgaatgcacaattggtcacatgatctttaatgacctgcacactaccatcctgcatattggtttcttttatgctgtcgaatccaggtatattgtgaaccgtagttttgttcagtaatgaagataggtgatctccatctgtttctttctcttcagttattactgactcgtttaagttatctttttcctcatttgaacaagtagcacttttttcttttataaattcagattgcatttttgactcaggttgctgagattttccaagtatcatttgaggaacatcaagagactcttgttgaaagcatgtaactaaaccaaagctatctatttgtagtgctttaactgctatagatgaatcagaatcagttgtaggggtgttacaatgttctatatattccttttcagttagatgactttcttccatttactctttcctccctttccttgtagctgatcagagttactacattcttgcaactccaaaagaatggttgtttaccccataataccactctctccaatgtccatggctctctggagattttgccagttctatcactgcattgtttgaagaaatgctaatcacaggttctgtggtactcaatttattctctggagcaaattgcaaaaagaaggaataaactaagtcttgtgcggagaagcgtaatttgtaccagaggggattcaaatctccttgaagactttgcggctggatccgaggcacctgaatgagcagagtcaaggtttctttgtcctgattacacagtaacggaggacacaaaggctccccgctcttggtcccgggaccacccatggcgcaggctgagcgctggccgcccgtgccctccgactcctcgcgtgtttccacactgctatctccgcgcgcactctctcttcccgcagaagaaccccacgccaggctccgggaggacaaacaaggggagcctccgccaccaggtgagttttctcctccaggagatggctcctccacgctgcccggcggtgaccccgcgtgcctgctcaagtcctgctcccccggcttggggacacgctcctctccagctgcggccggcggaggcgccacctccgggtcgcccagggtggtgaccccggagcccgcagccccagccacgcaggtatcgtggcctccgtcatcccgggaattccggaccggtcca

SEQ ID NO: 450103 - DNA, 258 bp, Homo Sapiens
acatcaaacccctccacacgctcgcccgcccgcgcgccggacgcagcaatggccgccctcgccgcctccatggccacctccacggccttcgccgccaagccgcgcctggcccgcccgccggcgcgcctctccgtctcctgctccgcgtccagcggcgacaacaacaccccctccctctccgcctccatcaagaccttctcggcggcgctggcgctctcgtccgtgctcctctcctccgccgccacctccccgccgccg

SEQ ID NO: 450104 - DNA, 999 bp, Homo Sapiens
  misc_feature (30)..(30): n is a, c, g, or t
  misc_feature (916)..(952): n is a, c, g, or t
ttggtatttccaggttgagagggcggttgncccggaggccccgagccccttgcgggaaagttggattgggagccggcgctgggctccgtcgggcacaggccccggatgatgaggtacaccacctcggcccacattgaggatgatgcagatgccagaggcagctagcatgaagacggtgaagacggttttctcggtggggcgggacacgaagcagtccactgtgttggggcaggggtagacgtcgcacttgaccagccgcaccatggcatagccagggtagagcagataaaagacatacatgaagacggcctcaaacaacagccggaacaccacgctgatgacataggtccaccacagtgtccctgagatgtggaccttgtgcctcttcacctcctccaggtgtagggggtccccatggccctcaagccgtagcattttcttctctatgtgttgctggtgagccacgtgcatggccacgaggagagctggggtggaaactaggatgagctgcagggaccacagccgcacatgggagatggggaagaattggtcatagcaaacgctgttgcagccaggctggagtgtgttgcagatgaaggaagatttctcatcaccccacacactctctgcagccaccaccagcaccatgattctgaagatgaagatgaccgagagccatactcggccaatggcagtagaatgccggttcacgccactgagcaaggtgtacaaacctgtccagttcatcctgcctcattcacaccttggggagcgcctatccctgaggccacccagacaggtcccctatggtctcatgtctgtgcagggggagtggtccctgggctccgcgcctgcgtcccaattcatcaccacccccgctctcgacgaattcgagctcggccgatttggcctgatnnnnnnnnnnnnnnnnnnnnnnnnnnnnnnnnnnnnncgccgccaccgcgatgagccccgattcccctatagtgatctatacat

SEQ ID NO: 450105 - DNA, 675 bp, Homo Sapiens
ttccgctgcagcacgtccctgtgctccggcccggcgcgcgggtagaaccacaggagcttgttctgcaccacgcacgggtacgacgccacgcacgccttgctgttggtgtgcaccggggggcctgagggcgggggcctgggggatgaacttgcaggcgccacggccgtcgaagcaccagccgtggtacacgcactgcagccggcccttgtcgtcgatgcggccctccgagagcggcgccaggcggtgcgggcacgcgtcctcgaacacgcgccactcgccggcgccgcggtcgtaccaggccaccacgcggatccccagcaccatcttgccgtgcggcgcgccggggtcgaggtcctccacgggggcgaaggggtaccactggtccagccagtcgaaccgctcctccttctccccagacggcggatcctgctccgtccacggcgactcggacgccacggccgaggctggaagcatccgcgcggccccgttgcggtggcggcgcgcccgtcgccgcgggacgaggcggggcctgacgctcggcgctgggacgccggcggggagcggaagcaatggctgggcctgggcgcgggggaggagtaggcggaggggatccatgtcgccggtggcgtccaacggccgatcgacggcgtgcgtggaaacgggagggcttgagac

SEQ ID NO: 450106 - DNA, 1077 bp, Homo Sapiens
catttatacaaatccatatggtttacagtccagcaatacaaagtcttgcatttttaccaccaaaacaaaggaattggtgaaggccaataaatcttttctcagttttccattcctgtgcctttagtggaacatagttgagatcaaattctggttccgaacaatccaggtttaaagtaggtggtagtttttgataataacaagctaatgtggtaaaagctgcctcgactgcccctgcagctcccagcagatgtcctgttgctcccttagttgaggaaactgcaagggcatatgcatggtctttgacatgggctataaatcataaatgagtctcccacagcatgagctcctgtggtacagctgtggatactgcatgatttgggcccttgagtttatatcgaatgctgacctggcctgctgccatattgaccagaatcttagggacaaaaaatgggctaacctttattgtaaccttttgtctgaaaattcaaagcagtttcagaaacaacttcaagaggaatcattcccatgccaattgcaacaccagtagccacttgatcagcttctgactgaggatgccagccagaatccttcatggctaattctgcagccccaatggccatgatggtgggagaagacatggacttgatatctgatttggacacaaagttttgttcattgaactgaccttcatcactacctcttggcacataagcagcaacactgcaagggatactcttatactcttcaccaaccagtgaaacaattccactctctcctccgataagacgatcccaaaccaggtgagttccaacaccaagaggagtcactaagccaatgcctgtaatgacaactcgcctatgcaatctggatattggcacagttccgaaaaacttccttttacttcttaactgttggcataatcttgaacatagaagacgagtgcttgtaattttcaggaaattttgcaggcagttggacatgattaagattcagatgatcagaaacacattcctgtaacggggctaccccggacacttctccacagtcgggggcgatgatcccgggaattccggaccc

SEQ ID NO: 450107 - DNA, 1520 bp, Homo Sapiens
  misc_feature (388)..(435): n is a, c, g, or t
  misc_feature (520)..(575): n is a, c, g, or t
caggatgtgccagagcccgggcctgtccgtcctgttcctgcccctccaccttccttcctgggcatgcaggagtctgagcaggagttacgcgcccgttctggttgggccggtacacgctgcccacgctgaggcggccctgctgcgcgccgttccgctccccacccggcgggggcgtgtcggagctgcgcaccggcaggtagggcggctccagcgcgcgcggcggcccgtacgcctcgggcggcgggttggcgtagggcgggtaccagcccaggcgtgggtctccgccatgggcctgcgccgcctcgggaccggggtcagggtaggcctgctcgaagccgggggtgccctcgctgtacagactgtgcgagtagcggcggtccaggccgtnnnnnnnnnnnnnnnnnnnnnnnnnnnnnnnnnnnnnnnnnnnnnnnnagaagccctgaggcgggtactcgggcagctcttcgccgccgccgtactcctcgtagcgcgcccggggctggtaggggtagatgannnnnnnnnnnnnnnnnnnnnnnnnnnnnnnnnnnnnnnnnnnnnnnnnnnnnnnntagtacacgaaaccctggtcgtaggtccgcgacgcaggggtcgtagttctcgtactggctgacgaagggcgcctgcagggtaggggaactgctgcagggtaggagggctgctggcggtaggtgcatggcgaaggccgaagccgagaccgaggaggcaggagcccccgtgccgttgctgggagacaggaggtgcagggccagggccatgcccagtgctgtccccgacaggccacctcgcgccagttttcgggcacctggcacaaagccgaatgggtgccagcgcctggccagcgcaccggtgtccgagcccacgcgccccggcaggggcagggacggcgcctgccgacgccgggggctcccgtggctgcgccgctgctgggcctggggcgcgccggccagcagcacccgggagctactctcggagcgctgaggtccggccggcacgtactctgagcccgagttgagcaagctgtacacctgcccgttgttctcccactggatcagctgccgccagcgggcggggtccgagccctgcccgggctgcgcctgctgcccgtgcaccagcacgcacaggcaggcgccccacaccagggcccccagctgccggctgcctcgggccagagccatggtgacccctctgcagaggcctggtggacagagaggctctcaggagtggccccctgggcgtgcttctcttcccacggcctcgaggacaggaaggctccttgcttgccccagctctagctttgtccatgctggccttgtcccgagcgggacggctcctccgatgacagcatttcaaggccaaggggtcagggcagggcaggggcggtgcccagggctgcacgaggctctccgcagggcaccgggcgggcaggaccgcctgtgggccttacatggccagccccgcactggcatgccgctcggctggcgctttccatacgc

SEQ ID NO: 450108 - DNA, 527 bp, Homo Sapiens
ctcttgctttgcttatcatggtgtccaagagctcgcgcggtcccggcatggccgccgccggcagcgaggcggaggaggcgctcctgctgccggagcgcgtcgccggtgacgcgggggcgcctcccggcaacgcgtccgtcctcggcgcggtgttcaacgtgtcgacgagcgtggtgggcgccgggatcatgtcgatcccggcggccatgcgggtgctcggcgtggccccggccctggcgctcatcgtgtgcgtagcgctcctcgccaacgtcgccgtggacttcatgctccggtacacccggggcacgccgtcgtacgcggcgctgatgggcggctcgttcggccgcgccggcgccaagctgctcaacgtcttcatcgccttcaactgcgtcgggaccctcaccgtctacctcataatcatcggggacgtgatgtccggccccgtgggcagcggggaggcgcacgccggggtgctgccggagtggttcggcccgcactgttggaccggcgggactgcggtgctggtg

SEQ ID NO: 450109 - DNA, 869 bp, Homo Sapiens
caggccccgtgcattccctccaggccccccatcacatggtgcagcagcacatacccatccccggagtctggggacttttcatggctccaatcactgcatctgtgctagagtggcttttaaaggctcagactcgaaccactgatccagcaccttggtaatgggagctgtgaggacctcataatatcggggaagctgggctcccaggatgcgcctgccttcagcaggggcttgagggtggagagcgacctcatcctttgcagcaaggagccatgctggaaggccgccatgtccacgggggccgcatccagcagagggtcaatggctaatgccaagcgatgcatgaactcctcatatttgggaaagacctgggcatccttctgggagaactgggcgatctgcttctggttttctgccatgtctgtgcccagcagaaggcacctgggcaccttgctgcctgcaccctcttccagcatgggggtgaaggagtaggggtttcgaagatgaagcctcagcccatgtttcttcagctccagatcagtgtaaatctgcggcctcagcaggctgagcaggtaggacgcgcgggagaacttaaaccctgggatgatctcctcagtgacagctgcacccccgatcacatggcgcctctcgaagacggcggtgttcacccccagtctctgcaggtacgctgcagccaccagtccgttgtgtcctgctcctatcaccaccgcatcatactcaggcttcagacctcccctggcttccgtgttatctcgtctccacgccgggaagggagaggcggccacagccttgcagagacctcggccacttgcagccatttctgccccaggctgggccttgctaggcaggga

SEQ ID NO: 450110 - DNA, 1129 bp, Homo Sapiens
  misc_feature (371)..(391): n is a, c, g, or t
gccttacacaatcttcataaattcactggagtcaggccaaaacaaaaattctgacttaaatatgagttatcttttatgctattgttgatttgtatatcctaacaatagtaaaattcaggtgatgctttcttatttttttgtttctggtgatctaaaaggatatggacactaatgcattatggatagctcaggtgattttactctcaagcatttttttaagtcaaaattctacacatcagtaatagttatactgccatttgaggtcataacctgacccactgacaaagaagcccagtgatataatattattttcatatgcttcttttacacctctccctgctaattaccatcatgttaccatattcttgccnnnnnnnnnnnnnnnnnnnnnccccaagaggttgtaaatggaagtattcttgggaccccgtgaatttccgcagaacttctcttggaggggggctcaagaatgtaaggccccttttgctactttggcacaaaaaaaacaatggaaaaacggtggccaacctgatccgcggatacatctctggagagttccatttaatcccgtgtcaaacacccctctcatgtgtaagggccccctattttcggcggcctaacccacacacggaggaaaatcttccacagaattaccatataaccccggtttgttcggcagtgaacacgttgggagggcaaaaaaagggcccccatggctttccacgagaaaaaacctcatattccaagaggaccacaggggacacaggcagcaagggtcagaggcttggagaaaaaaggtcacaacacacggatagcacaagcgctagcaactcacatatcgcaaacccttaagccgctaaaaaaagcccgggcccccggggatcaaagacaatctcagtccaaaagccccggaaacgcggggataaagcgccccggcgcccacaggcgcctggaaaaatcgggggataaaaacacacaggggggggctaaacactgtggccacagcgtactaaaaacccgtgcccaaagatgtgcgcgctcggcccccaaaagggtgaaaacgaggatatgaccaagccgccgcctaaaaggcatcgggacaacacaccaacattatagttcgattaac

SEQ ID NO: 450111 - DNA, 1060 bp, Homo Sapiens
ttttaaatttttatccacctacttttcccaatccccaatgtgattaaattcagaagaaacagtatctttcaagtaaatggatgcaaaacttccctttcacatccatctcacgtcctttccccctttgtattagtagataattatactatctacagccagaacgatcttcctagacgtgatcatgctatgtgctatgaaaaaaacccttcgatggggacctccactaccgaaatgatgtggtagtactggcagtcgctcccaggtgcagtaactaggaaaaaatggatcaaatgcaaaatacattacagatacgaaagagctgtggaagcgcttaagactagatgtactaaaagtctttgtcttttctacatagctgagactaccaactgttttctttcctggcatcatttgccaattctaggcatggattaaagatcaggctttgtgtggactaaagcactttactggggaaaatcagcaggacttttactgactgcatgatctatcatgatgtactagaatctagaggagccctaaacccaatactgagtgagactagaacttaggggctaggcaaacaagttttcttaacaagccaatactacctctcaatgccaggcttcttcatatcctattctttctcccatttcctctcttgtatttggccacttctatccttttttcccccctcaggacgctgctatttatccttcacgaaatccgtccataaaatctaccaaatacgcaccacagaagctttctacaggcttatctttggcataatttttatttaacaacctcttattttccttgttgtatcctttcttggaagtggagtctttaattatctccagcacataggaagtgacctgagtgctgaataaaaaataagcaatggaatcgctacattaaagatgcttacaaacttttattatcaataaaatctataaattttacacctatcaactcagaacaattcactgggaggagaaaaactattaaaaagcctaacttcaaatgaactcaaactttcctgccaaatcataaatatgaaaagtaa

SEQ ID NO: 450112 - DNA, 831 bp, Homo Sapiens
cccgactagccgacagcatcatgtacagaatgacgccaggctccagaggtcgcaggactcgtcgtagccctgctgcgccagcaggtcgggggcagcgtactgcagcgtgaagcagggcgtctgcatgggcaccccgggactctgcggccgcaaccgcgcgaacccgaagtcgatgattttcaccggggccccgggcgtgtcgtcggcgtacaggatgttctccggcttgaggtcgcggtgcaccacgcccgcctcctcgtgcatgaagctcacggccgacacgaggctgcgcaggatctggcttgcttccgactcgctgaagtgccgcttcttgcggatgtgctccagcagctccccgccccgcagcagctccaggaccaggtacgtgtgcagctggtcgtgatgcacctcgtgagattcaccacgttggggtgtgactggcacaggcgcagggcagccactttgcgctgcgtgttcgcctccatgcctgcgactgaggatcttgacttgcgaactcctggctgtctggcgctggcaggcagcgtggacacacagaaaagctgccctggccagcgcaggctcccgcaggtccagctcgtacatgctggacgaacgggcgaagtcctgcatcaatagcagctcctgggccaccgctggccgacctggacaggtctccagtcaccagggcgcttccaagcccatcggtcatcaccgcgtcgtggtgggtcaacgacgaatggagggtgccaccaaaggagtatccctgacagattcgggggtcccaagttggggggtgccagggggtgagtagacaggctcaagcgaggtgaa

SEQ ID NO: 450113 - DNA, 812 bp, Homo Sapiens
  misc_feature (15)..(15): n is a, c, g, or t
  misc_feature (31)..(31): n is a, c, g, or t
  misc_feature (226)..(226): n is a, c, g, or t
gggagccaacatttnattgaagaagccacanaggctgaaattcaataaacacaagttttatgagtaccttgaagctccagaatgtgctggggaaaggggttgtgatggccaggaggaggatacccttcaaaacgggctgttccctaaccagatagaaatgggaaagggaaaaaattggcagagaaagtctagactctctggcctaccatggagcctaggcccaggnccccaagatcccaccttccccaacccccatgggactggagatttttgtagcttccattggaccatgaggggcatgatgggaggcctgagttagggtgccttttttgtgagcgtctcatttgaattttatcttcactgggtcatagatgtagcagcccacatcgccaatgttcacacctgagagagagagccctatcaccaaaggccctgggtctgtggtgcagggtttcaggcctagagggaacttgagtagggggggccaggatatgcttaaccacaggggaagttgtccacacatacccacagaccatgtacatgccatacttcaggcatgtacatgccatcccagatgtctgggatggggctgcccacctttggggccaaacaggtagccgtagcagggagacgtggcagtaggggactccatcatgctcagcatgactcccagcagtcagggtcttgtggcaacgctggcacctcagacacggtcggtgccgactttctgcctaatgacatcaccttctcagctggtggtggaaagaagtggtaatgcgttccattctaggggtaagagtagaggagaccta

SEQ ID NO: 450114 - DNA, 519 bp, Homo Sapiens
gcaaatcatcagcgctcatgtttatttataaagttacatcctaaaagtggttcgaacaataaatagttataaagaagatctgctgccctaccctctggtgtgaggcctccatatggagtcagcagaggatctgggagggatcctgggaagctctgggatcctggggtctctgccgtctcagtggcgcaacagaagccagcaagcttcccacccttccttgcagcaccagctggcccccagggctgcagtctactcctgacggaggcttcccgtggacccctaggccgcagccccctggcagggctgggaggcacggccacacgactcaaggaccagcccccacagtgcacaggctggccggcccagctgctgggaacctgtcatgccctcgtggctccagtcacctgagctggcacacgggggccacccctgttaggttttcactcactgccatgcacggacgacctcttggaggaactggcccagtcatctcctgagctgtgcatggactggcctcct

SEQ ID NO: 450115 - DNA, 1088 bp, Homo Sapiens
ctgctcgcgaggtcctttcacagggcctgggcactgtttcgagggtgtctcggatgccggtagcacaggctcctctaaagtctctcaggcttgcctgggctggcctggagtccgggactttgtgatatttgtgcctctgtcgctcgtgacttcggcgtcacggagacgtgtatgagggtgacccgaatttggaggggatctcgtgcctgcggggggatcagaggatctcagagaagggcaagcgccggcaatcccatgacccgcttggagtcccccaagccggactgtcccgggaacgtttcggcgagcgccggctcctcccccgccgctctcggaccgcggggccccagtgcgctgcgttcagccacccgggtgggcctctgccgggagcaggcgtggtgcgcggtccagtccgtgtcgcggacatcagtgaccctgacccacaagggcagcccagggcccaaataccgttaacttactgacttacaagcctagcctttaaaatccgagcgaagagagggcgggcgattttgaccaaacgatgtggtttgaggaatcgatgaggtccgcccgccacctaagtcagccttcgctgggcgtttgggagacgggcggtggaacagtcaggggccgggggttttaccagcagttagaccgccgccattgaggggtcaaagccccgaggaacttgagggttcggactcgcagtctctgctcagtggggctgagtggcggagatttgtgcctcgttcccctgggcgcagagagccagatttcggagcgcctttcttttaagcatcgtggagaaaaggtaaaatatgaaataaaatatagtaatataaaataagtcattgcaatgattcccgggaagaaaagtcaataggatggagcgtagtcaacaacaacatacaacaaaaagcttgttaaacccaaaaagcagtaataattaaatattctttctcagtgggaagactaactagaccgtcagtttccaagtaacaagtaatagttccaattagattggagaaactactaaacccggagacagggcgaagtggtaacttctaagaacctcgctgtaggttggg

SEQ ID NO: 450116 - DNA, 214 bp, Homo Sapiens
cttattgtaatgccatacttttaatcatttaaactaaatgtttaatcagaagttatctaatacaaaaactagtcaaaaagcacgtgaaatgtatatactttaaccaagaaattctaaaaattggtttctatagagaaaactggacagaatgacaatgtatgtgacacaaaggtgtttgccacagcattttttatcacagtaaaaaatagtaaaa

SEQ ID NO: 450117 - DNA, 766 bp, Homo Sapiens
cctctgaaatggctttatttccccagtgtgaggaatctgtgagtggtgaggggtctgtggtccctgttaccccaaggaccctgcagcctccagatggataacggcccgggattcatgccttgatcctcccaggctgggactggattctgggaggagccgggcatgctgtggtattgtaaggatgacactcccacaggtggtcctgacagtggcccagagtggacatggggctcacctcaaggacacggccaccaggtgcgggggccgaggaccagatgagccttactctaggagcaaaatcccctgtagtggggcttcatacttgaagtcctgccagcagggctcagatctttggacccaggcaggtcaaggggtggcggcccacctgggggcagcaaggcagagcggctcagggcctcggtcaccacagcccaggactgcggctacactgctggagactcccgcatccagcactttcaggcactgttcgtactcgcggatgtagtcacagctgtttcagtgccacaagtccgaccgttcatgggactgtgcgcatgtcagacgctcggagatcgcatctcaccgcgtatgatccctagcgcgtgccagcagaaagtcctccgttatgcaccgattcccacgttagcgagccttccgcatcggattccattaggaaagagtaaacccgggaagatgctcgaggtgccggggcagtgacggcatgggggagctccggcggtcgcacgtgcacacatatgggtgaggc

SEQ ID NO: 450118 - DNA, 1160 bp, Homo Sapiens
tccacatttgcggggggatttaaagaaaagggtttttgcccggggtttatattttgggaaagccaaccccccccgagaaataggaattccctcctttggaggccccagtcccagtcccggggtttttttaaactttttccggaggccccccaaagcggccagggatccagtttaacccaaccggagagcataagcattttttcccctggacacataaaagcctggggaaatggaggtccattgcttctcccagtggcattttccagtttagatgtacatccttcattttgaggggaaggtctgccagttccagagacatcaactgtagcaggatcttttgtagtagccatgtcaacagtatcagcttccaaaatctcattccgctccaaggaatcagctgtcctaattggattctgttgaccactactatcaggtaagtttgacgaggtttcgtcatatacttctccattatgtttgctgttcaaaacttttccaccgtcaatagcaatataatttctagtctttttggaatttgctaaaagaagtgaatccttatagctgctttctaagctcttcgcttttctgaggcttatgtggagtgtgacattcttccaaatcaggagaaattaggttattaagtgatttagagcccaaaggatagatgcactgcagatcctcacacaaaaagatagattcttgaaaactaattcggtaagtctttaaggcttttaacttgtcccttctctctacaagcagggcaatactcatctgatggaactttagctgaatcaaaattctgccgcgggcactccccttcttggtaccgggtcgatcggaactcctgttccagcttgatctccaccctagttgcaacgttcaacccacgttcccctcggactgctcctcccccactcgcgtctccactaggaaggcggcttccggcttgagtccgcggcaaaagagtcctccttcctgctgcacgctgggcctgaaaggacggtggcgtggcggggaaggtgaagacgtgagcacttccggtcgccctccgcagaggcgtggctgtccgccctgtggccgcagacgcagttgcgactgcggcgacgaggaggggcggggccggtggctgctgagcccgccatgtgtgagtggctgggtttggg

SEQ ID NO: 450119 - DNA, 982 bp, Homo Sapiens
  misc_feature (450)..(512): n is a, c, g, or t
  misc_feature (849)..(849): n is a, c, g, or t
  misc_feature (929)..(929): n is a, c, g, or t
cctggagaaaaattgagttggttccaagggctgtctgtgctcttttgggaatctaagggtaggagtcttacagatctgggtcagttaatgtgcacaaaacgttgtggcatatttactccctttgatacctaaccctggaacttttaggctttcaaagaaagtcaccactgtagtcctagctcatccctggggcatgatggttctgtgaggaccagtccagtcatcctcttgctcctgcaggcttagtcctgcagtctaggaagccatgcaaagaaggtgagagggtcccttctttccattgttcatggcacctgagggattcttcactttgagagcagcttccattcccttagaactcatgggaccaggacttatgcagagaacagtagtgagaaaatacttgtggtcattttcttgattccaggatcttccaaagattatgcaatcagnnnnnnnnnnnnnnnnnnnnnnnnnnnnnnnnnnnnnnnnnnnnnnnnnnnnnnnnnnnnnnnagataggacccaaaattccacttcatctggcctggcatcatccttgcaggctttggatatgtctcccgtgtgcggacctgggaggcagtgagaactaattatttctttgttgcttaacaaaaggcggtgctgtttggcactttcacagactggcttatctccagcaaccactgcagaagacagtgttatcaccattttatagaggagaaaactgagacttagagaggtaaagtaatttgcccaaagttacatatctaggaagcctcagcacaagaattcaaatcctggccatctgattccagagcctgggctctttggccagcacagcctgactgtncactggttgggggaaggggcggtgatgcttttagaaacaggcttcttgagacaccagggcagcttttccagtttccctgncaaacatggggggattgccctgattcagtcctaaaggtgttgacttagtctta

SEQ ID NO: 450120 - DNA, 871 bp, Homo Sapiens
gggacctcgggggagcggggctccgcgtggcaagggcgcagtgtcccccggagagaatttccccgcagaagtggccgagctgccttctcggccggtacgtgagggaagggggcacttgggggcgcaagcatgtgtctgggtgtctacaccgagcagggtgtttgcgcacgtccgggtgtgagtcgtgggagcccgtggcccacaccagcctcctgggctgacgcggaagagagctccttcatcctgcctcagtttccttaggactcagagaaagggagaagaggcagaaggcccctcgcattggcacaagctgtatcccattgcccagggagatcgccaatcacccatcaatatcatctccagccaggctgtgtactctcccagcctgcaaccactggagctttcctatgaggcctgcatgtccctcagcatcaccaacaatggccactctgtccaggtagacttcaatgacagcgatgaccgaaccgtggtgactgggggccccctggaagggccctaccgcctcaagcagtttcacttccactggggcaagaagcacgatgtgggttctgagcacacggtggacggcaagtccttccccagcgagctgcatctggttcactggaatgccaagaagtacagcacttttggggaggcggcctcagcacctgatggcctggctgtggttggtgtttcttggagaccaggagacgagcacccccagcatgaatcgtctgacagatgcgctctacatggtccggttcaagggcaccaaagcccagttcagctgcttcaaccccaaggtgcctcctgcctgccagccggcactacctggaacctacccgggctctctgacgactcccccactaag

SEQ ID NO: 450121 - DNA, 772 bp, Homo Sapiens
gggctcccggagcacaatccaggtgacactctcactgagtgggggagtcgtcagagagcccgggtaggtcccagtagtgccggctggcaggcaggaggcaacttggggttgaagcagctgaactgggctttggtgccccttgaaccggaccatgtagagcgcatctgtcagacgattcatgctggggtgctcgtctcctgtctccaaatgtacaccaaccacagccaggccatcaggtgctgaggccgcctccccgaaagtgctgtacttcttggcattccagtgaaccagatgcagctcgctggggaaggacttgccgtccaccgtgtgctcagaacccacatcgtgcttcttgccccagtggaagtgaaactgcttgaggcggtagggcccttccagggggcccccagtcaccacggttcggtcatcgctgtcattgaagtctacctggacagagtggccattgttggtgatgctgagggacatgcaggcctcataggaaagctccagtggttgcaggctgggagagtacacagcctggctggagatgatattgatgggtgattggcgatctcccatgggcaatgggatacagcttgtgccaatgcgaggggccgtcgtcctggccgtagccccagccgtggtggccggtcatgccgctgccgtccccgcacgccgtgcacctgcccggtcggctcggtccgctcgttcgggctgcggctccggccccgctcgctaccgcggagcagcctcttaaagcagcggatcctta

SEQ ID NO: 450122 - DNA, 1446 bp, Homo Sapiens
  misc_feature (1360)..(1396): n is a, c, g, or t
ggagccgcttagctcctgtcttcctgtccgcagggcagctgaaggggccccagactcaagggtcccatccgagaagcctccagggtgaccaaggagcaaactggctgaaggagggtccccagcaccccccagggaggaagcctcagatggtttggtgtctgctgacatggaagcccttgagaagatggtgccctagtggccggctaggcagatgggcagctcaggcccggaaggaggcctttaccacgcggcccttcagtggctgtggtggccggaagttgttcaccatgtggatcctctcatcgtcctccgaggtaaaaagcaggctccggcacggttccccatctgcactttcagagatgcagatgggctcccggagcacaatccaggtgacactctcactgagtgggggagtcgtcagagagcccgcggtaggatccagtcagtgtccggctggcaggcaggaggcacttggggttgaagcagcctgaactggggctttggtgcccttgaaccggaccatgtagacgcgcatctagtcagacgattcactgactggggtgcatcgtctcctgtcgtgccaatcctacaccaaccccagccaggccatcagctgcctgaggccgcttgggttgaagctgctgtactggtctttgcgttcccttgaaccggaccatgtagctcgcatctgtcagacgattcatgctggggtgctcgtctgctgtctccaaaaacccccatcgcacagccagtccatcaggtggtgaggccgcctcgcgaagagtgctgtacttgttggcattccagtgcaaccagatgcagcggttcggtcatcgctgtcattgaagtctacctggatcagagtggccattgttggtgatgctgagggacatgcaggcctcataggaaagctccagtggttgcaggctgggagagtacacagcctggctggagatgatattgatgggtgattggcgatctcctgggcaatgggatacagcttgtgccaatgcgaggggccttctgcctcttctccctttctctgagtcctaaggaaactgaggcaggatgaaggagctctcttccgcgtcagcccaggaggctggtgtgggccacgggctcccacgactcacacccggacgtgcgcaaacaccctgctcggtgtagacacccagacacatgcttgcgcccccaagtgcccccttccctcacgtaccggccgagaaggcagctcggccacttctgcggggaaattctctccgggggacactgcgcccttgccacgcggagccccgctcccccgaggtccccgctcacctccgctctcgacgaattcgagctcggccgatttggcctgatnnnnnnnnnnnnnnnnnnnnnnnnnnnnnnnnnnnnncgccgcccccgcgtgagctccaagtcgccctatagtgagtctatacatct

SEQ ID NO: 450123 - DNA, 974 bp, Homo Sapiens
ggccgccgtagtttgcgttttacctggtcgcccggcggccatggcggccgttctgaagccggtgctgctgggccttcgagatgcgccggtgcacggcagccccacagggccgggtgcctggactgctagcaagctgggcggcattccggatgctctgcccaccgtggctgcgcccaggcccgtgtgtcagcgctgcgggcagccgctcgctctggtcgtgcaggtgtattgcccgctggaaggctccccgtttcaccgtctgctgcacgtgttcgcgtgcgcctgccccggctgtagcaccggcggtgcgcgcagctggaaggtgttccgctcccagtgcctgcaggtgccagagagagaggcgcaggacgctcagaaacagggaaacagccttgcagctgaggactggtgtgaaggtgctgatgactggggaagtgatactgaggaggggccttcaccacagtttaccttggattttgggaatgatgccagcagtgccaaagacgtagactggactgctcggctccaagacctccgcctgcaggatgctgtcctgggtgctgcccatcctgtgcctcctgggctgccgctcttcctgccctactacatctgtgttgcagatgaggatgattacagggactttgtcaacctggatcatgcccacagccttctgagggactatcagcagagagaaggcattgccatggatcagttgctttcccaaagccttcctaatgatggtgatgaaaaatatgagaagaccataattaaaagtggagatcagacgttatacaaaattcatgaagcgaattgctgcttgtcaggagcagattttgaggtattcctggagttggagagccactcttttgacctggccttaaattcagaagtcaccgagctcccagccttggaacagtgtggaggccaaaggaatttgagttcaggtttatccagcaatggtcagcattctcaga

SEQ ID NO: 450124 - DNA, 909 bp, Homo Sapiens
ccaggagaagacagctggtttcaaatccctgcccccaggcaagtaaaaccctgacttgctcaagacagaagatcttttctcctgtttttcaaaataaacatatatagggatggaccctgtgcattgtggcctgccttggtgtcctagaattggagccagtctttagcttaatgtctgaagtatttatacggccaatatgtgttttcttatgtcagaccaaactgtctttttgaatatcagttcatttcctctcaccgagtgcttttcggtgagaggcaaagagaaagaatgaacaatcaagtattgacagactggcattagcaggacagagccatactagtgacaagggcatcccaaggcacttgcccagagctgcagagttgtgtgtgccatacctgcggctcaaacgggaaggccttctatcccctgagtttctatcagctgaaaatggcaactgctgtctcagtaaaagctctgtcttgactgcagaggctccaaaagcattcacagttgagggggagaaagacagaacagaagaagccaaagataacctgatccctgcctgtctgttggcacctgtcatcctctggcttctgctcccaaaagcaagtctggatgactgagttttgtggacatggcactcccggagacagcagtggccaccatggcacccagagtttgcccaagtactgaatgttttgtgagcaaccatgttccccaagtaggtagccagcgctgcagaaaccaaacagcctcttagctacctgactttaaacagggaatgacctaaggtgttctgcccacaggagttatctatcatctctggcaaacttgacatcatcacttacctcgaaaaaccttgccaaatcactttataaagtcacgcacggatgtcctctcaaccaaccg

SEQ ID NO: 450125 - DNA, 404 bp, Homo Sapiens
ctgaaaacgctggcctaccctacttggggaaacatggtttgcctcaacaaaaaacattcaagtacttgggcaaaactctgggtcccatggtggccactgctgtctccgggagtgcccatgtcccacaaaactcagtcatccagacttgcttttgggagcagaagccagaggatgacaggtgccaacagacaggcagggatcaggttatctttggcttcttctttctgtctttctccccctcaactgtgaatgcttttggagcctctgcagtcaagacagagcttttactgagacagcagttgccattttcagctgatagaaactcaggggatagaaggccttccctttgagccgcaggtatggcacacacaactctgcagctctgggcaagtgccttgggatgc

SEQ ID NO: 450126 - DNA, 1235 bp, Homo Sapiens
  misc_feature (210)..(210): n is a, c, g, or t
gggattcccttaacatatcaattccctgaaagtaactggtgcctccctgaatggctcattggatttatctaaaagaaccttcagccgggccatcaataccccatattttttaaaaaagggtgttgttttattgggcccagagaggtacttttcccctgtgccattcttcgcaaatacctgaagtccacatcagctgttagatctgctgtntcctggggcaattaagacatcatgaagcttgtggtcgcaaaaccctctgaaggtatctgtcttttttccatcatgaccataatcagcaaccagtgcagcacctccagttaatgcaatgcgttgagaaagttcctcgatgataacaccagcatcaggacacacttcaacatgatcccttgtttcgtcatgttgtatgaaggcttctgctggggtggcagaaggtgccaaaacaaacctcagtttatcagaaacctgtggatcaatgtcaacaaatacttctcgccatccctgtggtgttttctgaaatttatgcacaggaagaacatcaaaaaattcatgtgcaagataaaagctgtacccttttggaacatcgtgcagatctcggtaccaggaaattggaatcccagacttagtgacacctttcatatacactggggatccagcatttcgctctaacgggaccttctctttagtcagtgtcaatgcttgaatctcacttaatttttggcttacctctaccagatgtactgaaatgtcacaatttttcagcacagatccaagttgagtgaacaccctcaaaatatctcccacgagggttcccctacctgggcccagttccaccagctggaaagctgtgctttttccagtggccatccattcactaatgaaccatatacctagtagctccccaaagatttgacttatttcaggtgaagtaatgaaatctcctttttcgcctagcatgtcacggtacacataataacccttggctggattagtcaacacctccttcatgtactcggccacagtgatgggaccagtagactttattttgtacataagatgccgcagcatcggcgtcaccgggttttctgcaggctcattcccggagctgaagtatttccctctccaaataaaaggaatggctgcgcgcgccacggcacacaacggccccaaacctgacctcagcagtacactcatgctgaaattcgcaggctagctcgctccgccaggagctggggctt

SEQ ID NO: 450127 - DNA, 1210 bp, Homo Sapiens
ttgtggaagatgtactcgaacggtacgtatcgcgatgcgatactggataaaattagcggagagcgtggttgacagggaattaaagccgagcaggaggaagtggacaaagagatcgcaggtctccttaacaggagagggaaagctgggcgcggtaaacagggatggtgaagagggtgcaaggggagaattggggagcacccgcaatgatgggcactcagagtgacaccgtgatcatagatacggaggggacaaagcggccaaagtagaagagtaagtaacaggaccaagaaatgtttcgaatagaacatggaatcctccagagagacgacagcgcggtatatgcgtgtaaatttgtataagaggacagttcgggggatgacacaagggatttacaaggagagatacgaggcggggattgggcgcaatagcctgctaacccggagtggtgttcggttccgctggaccgttggccatgagtgtgggcgaagatagagcagcggcgtggtaggagaggtggcgcgcattacgaggggttccaagggagggggcaccggcggggccggataggcggtcccgggcagccactgcagcgacagcgggtaatccgagttgcgactgaaggtggaggtaagattgaagaggcggatgcccgggccgtggctcagcaagaagttgttgaggggcgactcctcgtggaggagcgcccagctctggtgcgccaggcgcggcagcggggcggccgacgcgcggaagtctgtgccgtagaagagcagcgcgcgcgtccgcgagtccctcagcgctcggcggttccgggacgccacgcacgcgccgcgcgcacactcgatgcgctccgagtctcccgggaagtgggggaatagccctgggctccaccacagcagtaccggcaagtcccccgcctcctccctccctggccgcggcgtcccagagctgcgcgtcacccccactgcgcccagcgccgagggcggccggaaaaccgcgccatcccacggttcctgccactccgcctccccgccggcctccctctccgctacggacccatggccgctggctgcacagacactgagcacccctagaaggaccaacaccaccctaatggggccggccgccatgtccactccggcagccgggccccctcggcagcaccgaccccgcccagcggatagtcgtgaccggacgaggccctacgcaa

SEQ ID NO: 450128 - DNA, 1669 bp, Homo Sapiens
  misc_feature (151)..(151): n is a, c, g, or t
  misc_feature (218)..(218): n is a, c, g, or t
  misc_feature (265)..(265): n is a, c, g, or t
  misc_feature (287)..(287): n is a, c, g, or t
  misc_feature (316)..(316): n is a, c, g, or t
  misc_feature (364)..(364): n is a, c, g, or t
  misc_feature (522)..(522): n is a, c, g, or t
  misc_feature (1485)..(1542): n is a, c, g, or t
  misc_feature (1583)..(1597): n is a, c, g, or t
ccacagggattttcatgggggaaaatccagcctgggtaatttaagaagtttcccgtacaatggttttccagaaccccattggggggaatggggctgcccctttttttgggttccggaaggaaaagtgttcaaaaaattaacccccgggggntttgaaccaagcaggggtcaagtttttttcccggaaggccccactgtggggccccggctgtgctgancagggagacgggtgtccatagatctgtccctgccctccagaatgttncagggggtcgctgggggccganacactcggaagggaggaggttgtgtgcanccatagcacctgtactgggccccccgtgggagggggctcacagggccncagggtgaagttggcctgggagagcccagcctggggctgctggccagggcgctggaggaagtcacgttccccctcccttatacagaacaaatctgtcgtagccgacatcagagccacactggagggtcaggctctgcccaggggccaggacagggccntgcagggtcaggagggagggcttcctagacacgcctgtggctgggggtcacggggcccacagggaacagggcctggaaccccccactgtggagctgctgtgagtccagggtccgggggagctggtgttctccttccttcatcagaacaaaatggtgatatcccttctgtgagccacatcggagggtcatattcccccctgaggccaccacagggctgggcagggctgagagggtgggtttgttgtagaatcctgtcatcaccagctccagggggtcgctgggctctgaccagcctgcagagctgtaatagtggcagcggtatctccctgcatggtgctgtgtcatggatgggatggagaatctggccttgttcttgggttccagtgggttatttctgtccaagggctctgggcttccctctttatccagttggtactcctgggcctgcaggctcccctgacacctgatggtcacggggcttcccgggctgagtcacagagcctggctcagcccagagggtgggtttggggaggtgccctggcctgcacgtgggtcctggggcccagactcagcccgagacagatcaggaccgtgaggatggggctcatggcgtctcctcccactgccctgctctgcggattggatgagccctcagtgctggcaggacagagagacgcacagggtgtggacactcggaggctggatccttcttgtcatggggttttgttatgtgcaaccacacaggaagtgcaactgccctctcaggagcctggctgtcatacctttagggcatggcggtcgtccctccagccctggagatgcttcagggaaaacccaggtccatgctgcagttagactcagatcagcagagacgcacctgacacctggctgtgtagctcaggttgagctgcgtgtggcagtgagcacagaggagtaatgcagggtctaccatggtggctcatnnnnnnnnnnnnnnnnnnnnnnnnnnnnnnnnnnnnnnnnnnnnnnnnnnnnnnnnnntcagattaccctgggccacatagcaagaccttgtctgtatnnnnnnnnnnnnnnnttagccaggcatggcagctcacatctctagtcccagctactcaggaggctgaggtgggaggaatacttcggc

SEQ ID NO: 450129 - DNA, 905 bp, Homo Sapiens
  misc_feature (93)..(93): n is a, c, g, or t
cgcgggtgccctcgggtgatgtggcgccgggtctgttccgtggtgcagtgggctgtgtgtttcagccgttctgctcggttcatctgtctcctncgccgtgccctcgttcgtgtgccccttccatattcccacctggtgaggtctcctggagggatgtacatgtcccctccctgagttcaccgacggtgctggtctggggctgagtagtggctgggtttgattgtaggctcctgtcaccagccagctccagggggtcactgctctctgagcggcctgcagtgtcgctaccatagtaacagcgataccgccctgcatgttcccaggtgatggatgggatggggaactggcccttcttcacaagctcctgtgggatccgtgtaatccagagtgctgttttcttttctctatatagacggtactcctgggtttcctggctcccctgacacactgagggtgacgggactcccctgggtgatcacagagtctgcgttcagcccagagggtgggcttggggatggtgccctgtctgcacgtgggtccatggggcccaagacatcagcccgagacagatcaggactgtgaggatgggggtcactggcgtctcctcccactgccctgctctgtggatggatgagccctcggtgcatggcagtcgtccctccagccctggagatgcttcagggaagacccaggtccatgctgccaggcagactcagatcagcagagacgcatctcgcatctggctgtgccgtccaggctgagcttgatgtaaatgtgcacaaagaccataatatttttgttttacacaaactccagaaagtagaggcgccataaaaccaatggagtgcccacaagggggtcactcttcttgctttctcctcattcttagattatttgtttcccac

SEQ ID NO: 450130 - DNA, 721 bp, Homo Sapiens; identical to SEQ ID NO: 151486

SEQ ID NO: 450131 - DNA, 1245 bp, Homo Sapiens
  misc_feature (46)..(82): n is a, c, g, or t
agaagaagactctatgggcgcccggagctttacgcggtggcggcgnnnnnnnnnnnnnnnnnnnnnnnnnnnnnnnnnnnnnatcaggccaaatcggccgagctcgaattcgtcgagagcggatctgcacagctggggcccctgggaggagacgccatgatccccaccttcacggctctgctctgcctcgggctgagtctgggccccaggacccacatgcaggcagggcccctccccaaacccaccctctgggctgagccaggctctgtgatcagctgggggaactctgtgaccatctggtgtcaggggaccctggaggctcgggagtaccgtctggataaagaggaaagcccagcaccctgggacagacagaacccactggagcccaagaacaaggccagattctccatcccatccatgacagaggactatgcagggagataccgctgttactatcgcagccctgtaggctggtcacagcccagtgaccccctggagctggtgatgacaggagcctacagtaaacccaccctttcagccctgccgagtcctcttgtgacctcaggaaagagcgtgaccctgctgtgtcagtcacggagcccaatggacactttccttctgatcaaggagcgggcagcccatcccctactgcatctgagatcagagcacggagctcagcagcaccaggctgaattccccatgagtcctgtgacctcagtgcacggggggacctacaggtgcttcagctcacacggcttctcccactacctgctgtcacaccccagtgaccccctggagctcatagtctcaggatccttggaggatcccaggccctcacccacaaggtccgtctcaacagctggccctgaggaccagcccctcatgcctacagggtcagtcccccacagtggtctgagaaggcactgggaggtactgatcggggtcttggttggtctccatcctgcttctctccctcctcttcttcctcctcctcaacactggcgtcaggaaaacaccaggacattggcccagagacaggtgatttccaacgtcctccagggctgccgagccagaagccaagacggggggcctacagagggaggtccagcccaggtgctgacgtccaggagaaaacttcgtgctgcgtgaagggcacacagccgagaacggggtggacatgggccctccggaaacccacgatgaagagcccaggagggacagatccaagcggaaactccgaccatg

SEQ ID NO: 450132 - DNA, 1048 bp, Homo Sapiens
  misc_feature (241)..(241): n is a, c, g, or t
ttgggggttttgggcccccacaagcccctttgcagggatggtgggaaatccaagccttttttctggggtgcgatgtcccagtgttttgcccttaacttcgatgttcggaggatgagaaagagggaggaaggaggaggaggaacccattaggacggacggcccaccaaggatccccgatcacaaccccccaggtgccttcccagacccactttggggatccgacccagtgggggtgaggggnctggtcctcagggcctgcaggtgtggagatgggaccggtgggtggggggctgaaacccatggagggtcctgagaccacgagctccagggggtcactggggagagacagcaggtaggggttggagctgagtgagctgtagcatctgtaggtccccgcgtggggctgaggtcacaggacccatgcggaattcagcctggttctgctgagcttggtgctctgatctcagatgcagtgggggatggcctgctccctccttggtcagaaggaaagtgtggaactgccgccgtgactgacacagcagggtcacgttctttcctggggctactgtggggcccggctgcactgagagggagggtctgtcatagatctgtcctgtgatcaggatgtccagggggtcactgggggccgaccactcggaggagaggttgtgtgcactgtagcatctgtactggcccccgtgggaggggctcacagggcccagggtgaagttggcctgggagagcccagcctggggctgccggccagggcgctggaggaagtcacgttctccctccttatacagaacaaatctgtcgtagccgacatcagagacacactggagggtcaggctctccccgggggccaccataggacctggctgcactgagagtgatggcttcttagaaacacctgggaccaggagctccaggagatcactgggtgaagaccacacatagggagagttcaagtcataaccatagcacctgtgcgaccacctgcgattcgggctcacggggcccacggagaagatcccgggaattccggacc

SEQ ID NO: 450133 - DNA, 373 bp, Homo Sapiens
  misc_feature (171)..(171): n is a, c, g, or t
  misc_feature (266)..(266): n is a, c, g, or t
agctcccaggggctcactggggtgaagacagcaggtaggggtcggaagttgagtgagccgtagcacctgtaaggtccccgcgtgggctgaggtcacaggactcatggggaattcagcctggtacttaggatattcgtgtattgatcttagacggagtggggcatcagcctntcccgccttggtcagaaggaaagtgtggaactgccgccatgactgacacagcagggtcacgttctctcctgaggccactgtggggcatcagcttntcccgccttggtcagaaggaaagtgtggaactgccgccatgactgacacagcagggtcacgttctctcctgaggccactgtggggcctggctgcactgagatgaagg

SEQ ID NO: 450134 - DNA, 669 bp, Homo Sapiens
gccctttggttttgttgtgggtgtgtgttgggttgttgtttgggctgccagagatgccgcccttgtaccagtttccaaagtaggaagtatatcgttacagcgttacgtacatacacataaaccatctgttcggatcaattactttgcatcgttgattgcatacattcacaggaggtagctatgtagattacagagacgtgcatgcaagcagagacccggccctgtgttacacgtagatgctctcttagccggcgagagcgctggtgttgtagacgaggaggacgccgccgccgaggaggccggcgagggtgacggcccagataagaagcccggtcgttccgccggcgtagcggtcaccagattcagaccattcctctggcgtgtagattgggctgtagccgtcgacgttggcgccgtacttgtcaacgaactggtacacgcccttcttgccgaccttcctgccgttggcgtcgatgtcgactgtcaagccgcctccgagtccgaggggcttgtcgaccttgatcttcttgccaccgctgcagacgacggcgaaggaggagccccggcgggagagggaggggacgctcgtcggcgccacaatcggcgaggtgatcatggaggctgccatctcgcgtgcgctctctcaagttctgtctgtctgcgcttgcc

SEQ ID NO: 450135 - DNA, 822 bp, Homo Sapiens
ggcgtgagccaccgcgtccggccaataaatggtttctaattaaaggattgtgacatttaatagccgttgcttgctcttgtcttgctcccttctctctcgaaacttgttaagaaataactcaatattctggcttttccactttaaatgtcatactgaccagcccgtgtatgccagcctcgatctcatcgttttctttaaccggtccaactccctttggcgtcccagtcaagataatatctccttcttccaaggttatgatcttagaaacatagctgatgatgtaggggatggaaaaaatcatggaggatgtctcaccctcctgtctgagttcgccgttgaccttgagccagagcttcagcttgtgagggtcagggatcttctccttgggcacgaacgcgctgaccgggcaggacgccgtgaagctcttcgccagagtccagggcagccccttcttcttgcactcgtcctgcacgtcccgggcggtcatatccaggcacagggcatagccgcccacgtagtccatggccgcagcctcggggactgcgcggcagcgcttgcccatcaccacgcccagctccagctcgtggtgcaggttgcgagtgtacgcgggcatgaggatgggcgagccctcgggcgcgtaggccgtggacggcttcaggaacagcacgggctcgctcaacaccgcgctgcgcatctccctgacgtggtccgcgtagttcctccccacgcagacgatgttctttccccactcccagaagcgggacaatggcctggatgctgccatgattcccatcaagcctcgtgccgaattcgccacccagc

SEQ ID NO: 450136 - DNA, 1016 bp, Homo Sapiens
ttggtcttacccggctgaaggctgacagggcttccaagaacccttgatcccctcttggactcctggcttgcttttggctacagaatcaatcatctggcatctggagatttcccactgggactttctggaggcaggtgaggatggtgaactgggtgaaagaagggagtgacttgccctctgatttctgggcttctagaaattgttggatttggttctgcagcgtgacacgttctactgtttgttcctttagctgcttggttaacttcaccacttgagaggccagcgacatgcaggtctccaccaccaccaggtacctggagcacagggtgtgcccctgccgctcggcgctctgggagggcttttccccagcgtggttctgcatggtgacatttgctccatattcaaccaaggtctgtatgcatccaaggtagccatgctgtgaggctacgtgaacggcactgttgccatcctggtctacttcatccaacgagatgccctgttcttgcataaactgaagaagccacagaagaatcttttcctggccatagcaacctgcgtaatgaataaggcttggaaaatccttagaacaactcagttctgcaatggcttctgtttcgctcaccatccagcgtacgcactccaactgaccattctgatctgtcttcgttttgcgtatcacatcttcggcacagttctgggatcgtcttgagtgatgtgactgaataagatatgtcatcactaaagtcaatttcatccaaatcaaggtattcaggggcttccattattcttccttgcacattttgagtacggtcaaatacttataaattcccggggcgcccggcgcgccggcggctcaggagcgcgaagggactgactgaccgaccgacggaccgcagcggcaggagcagaacagcctcagccgaagtaggcgggcggtggaggcgctgccgcggccccgctacgtcacaatgcggcccggccgcgggcgccctcgtgcggaattcgccacccaggcc

SEQ ID NO: 450137 - DNA, 855 bp, Homo Sapiens
ggggaggctgggttatatgatctctttggctttagggaattactccataccagctctgagatttccagctcagcgatgcccccaggtccctgggagagctgcttctgggtggggggcctcattttgtggctcagcgttggaagttcaggggatgcacctcctaccccacagccaaagtgcgctgacttccagagcgccaacctttttgaaggcaccgatctcaaagtccagtttctcctctttgtcccttcgaatcctagctgtgggcagctagtagaaggaagcagtgacctccaaaactctgggttcaatgccactctgggaaccaaactaattatccatggattcagggttttaggaacaaagccttcctggattgacacatttattagaacccttctgcgtgcaacgaatgctaatgtgattgccgtggactggatttatgggtctacaggagtctacttctcagctgtgaaaaatgtgattaagttgagcctcgagatctcccttttcctcaataaactcctggtgctgggtgtgtcggaatcctcaatccacatcattggtgttagcctgggggcccacgttgggggcatggtgggacagctcttcggaggccagctgggacagatcacaggcctggaccctgctggacctgagtacacgagggcccagtgtggaagagcgcttggatgctggagatgcccctcttcgtgggagccatccacacagacaccgacaattgggtattcggattcccgttggacatgtggactacttcgtcaacggaggccaagaccaagcctggctgcccaccttcttttacgcaggttatagttatctgatctgtgatcc

SEQ ID NO: 450138 - DNA, 144 bp, Homo Sapiens
caaagtcgccgacgctgcggacgaggtcatcacgccgcggggcggtgccgaggaagctggtcgtctggtgcagcgccgacgcggccatttcgctggtggctggggctgcctgcgagctcagtgagatgaactggtggatggtgt

SEQ ID NO: 450139 - DNA, 482 bp, Homo Sapiens
ccatgactgcagacgcctgtactagtctggacagcccaggcagcatcctacggctggctcatcgagcggagctgcgacccagcggtcggtcggtggttcacgcgggtggagctacaagagctagatcggtgctatgtcgcggtcggaccagctaccttgagagtgttttctgccacgagccatcagctcgtcctggcctggtggagagagatcaaagtccaggagtgggtaagctggccggtgaagtggggcgcggaatgggggtcaacaccttatccagcgctcccgttgggtctctgagcgtccaaagtttgggctgagcccacggcagaacgtgaacaccctctggcactgggggcctccgcggtcaacccaaatgccaccggcgtgctgagagacgcaggcggaccgtaacattctggaagggagttaccctccttctgagggaccagggctgggagaagggctggacaaccgaagag

SEQ ID NO: 450140 - DNA, 1019 bp, Homo Sapiens
  misc_feature (97)..(129): n is a, c, g, or t
  misc_feature (153)..(392): n is a, c, g, or t
  misc_feature (716)..(724): n is a, c, g, or t
  misc_feature (856)..(856): n is a, c, g, or t
  misc_feature (898)..(898): n is a, c, g, or t
  misc_feature (992)..(992): n is a, c, g, or t
caagtgtctcaggacgaggatatttggtaggtatccttaaatatatagatgcttaccagtaggtttaatacgaagatttctgaaaggtagcgcaagnnnnnnnnnnnnnnnnnnnnnnnnnnnnnnnnngagacagagtctcactctgtcatnnnnnnnnnnnnnnnnnnnnnnnnnnnnnnnnnnnnnnnnnnnnnnnnnnnnnnnnnnnnnnnnnnnnnnnnnnnnnnnnnnnnnnnnnnnnnnnnnnnnnnnnnnnnnnnnnnnnnnnnnnnnnnnnnnnnnnnnnnnnnnnnnnnnnnnnnnnnnnnnnnnnnnnnnnnnnnnnnnnnnnnnnnnnnnnnnnnnnnnnnnnnnnnnnnnnnnnnnnnnnnnnnnnnnnnnnnnnnnnntgagctactatgcctggtcccaacttcttaaaattaaattttggggaagttcatggagatatttttgacatgtaaaaatagaaaacaaaccatccatagtgtgtgcatatatacacacaaggtttggtttaatatacttgctgtgcactagtcagttttgattcaggttacataagggataaaatatagaaagacattttaaagtttgaaatatgtgctaagtagttagagatttggcagttttgccacatttcaaatgggccaaacattaaaataacttatccatgaatttcaggtttcaagggaggggggatatctgactannnnnnnnngtgtgtgagatttggtctcagctttttggtccatctgaatcctgggaagtccccaactctaccagaccaaaagggtgtctctattttttgttgttacttctctgttcttgatgtaatgagttaagtagatgnaaagaggattaaggtgcaggggaagggctctttaaaagtttnaatgtttccagctttcccttagtccattcatacttgtggaatcttcttcctcttctacttccaaagtagcccaaaacttggggaaagttccaantaatctttggggctcccaagggccaaa

SEQ ID NO: 450141 - DNA, 1031 bp, Homo Sapiens
cactcttgaccacttgaaggggcttctctttgggagtgaaatatatcctgtgtctcgcacggtggtcttccctcccggaaaggctttggtggcagatgttcacagggtgtagggccggctcgtccggtgtgcgttccgcctcatgggataagtaggttgtaggacttggtgaagtggcggccacagaaccttgcagacgaattccttcttggtcttggaaggcagacgtcccccttgtgggcttcttttctggagacagcttggtcacgtcgaggagggcacccagcccacctgcaggggaggcctgggccctccccgcgaccgagcttggccggatcttcttgcgttgctgccaaggccaggttggcaaaatcaaagcgcggcttggtcttgagcgctggaacgctgcctccagcggtgatctcgggcttgggttgaatgacatgagggaaccagggaaaggcgggcagctggaagcgcgcatccaccaagctggacaccgtgcccggcactttggagaaagaagagcgcggcaagtgcatggccgggtagcccagcgtccactgatgcaggtgcacagcgtgcaacgcgctgaaaccatacaggttgggcagatggtccgaaggcactgtgggcaggccgttcactgcctgaaggaaggagtagttggtgagctgcagggaagggtggataggcaccggcgccggcaaggttttgctgcccatttcggtagttgcagtggcttctcaatccggatcttgttccgcagaggtcctggggctgagcacgtctctggggctttagctgaaggggactggggaagccggaggccctggagcccacaggcgcccctggagctctagtgtcccgactcctctcctgccgcggggactccaagcgccggacacgcgggagcgagcgctcagcagccccggatcctgcacgccggggacggtgagcctcgctcgcggctccctcgctgggtctgaaccaggagcagctgagaacgtgccggggagagccgagctccg

SEQ ID NO: 450142 - DNA, 1075 bp, Homo Sapiens
  misc_feature (978)..(1020): n is a, c, g, or t
gggtccggaattcccgggatcagcaggagagggctctactctgagctcctattttccaggctccgggccgcgctcggcgctggcctgctgccccggcgggtccgccggccggaggcgggagtcacaggaagagccctccacaaaaggaggcctcggcggatcaggacagctgcaggtgggtgtgcagactggtgagctgccagcaggggcccagacgcgccaggcctggagatggctggaaactgctcctgggaggcccatcccggcaacaggaacaagatgtgccctggcctgagcgaggccccggaactctacagccggggcttcctgaccatcgagcagatcgcgatgctgccgcctccggccgtcatgaactacatcttcctgctcctctgcctgtgtggcctggtgggcaacgggctggtcctctggtttttcggcttctccatcaagaggaaccccttctccatctacttcctgcacctggccagcgccgatgtgggctacctcttcagcaaggcggtgttctccatcctgaacacggggggcttcctgggcacgtttgccgactacatccgcagcgtgtgccgggtcctggggctctgcatgttccttaccggcgtgagcctcctgccggccgtcagcgccgagcgctgcgcctcggtcatcttccccgcctggtactggcgccggcggccaagcgcctgtcggccgtggtgtgcgccctgctgtgggtcctgtccctcctggtcacctgtctgcacaactacttctgcgtgttcctgggccgcggggccccccggcgcggcctgcaaggccctgggacttcttcctggggatcccccctggtccctggctcgggtgccccgctcctgggggtgcccccgcctgggccctccttcctgccaactggaaagtgcctgggcccccaaacggggccaggggcctctgcccaagctccaacccacccttattccnnnnnnnnnnnnnnnnnnnnnnnnnnnnnnnnnnnnnnnnnnnttctcaacttagggggaatcaacacggggttcccccccttttggggggtctttta

SEQ ID NO: 450143 - DNA, 818 bp, Homo Sapiens
tgtttcaggttatcatgattattatgattataggaggggaagagcagtgctggtcttttagaaagttctcatcatgaatgtgttctggagtgaacatcacttactaacagatgagcagcttgaagttgagtccatccaaacttttagtgttttgtaagggtcagggagccaggggacagtctgtaactcagttgtatattgacaccagagaatgtacaaaagctggtgaaagcttccactttgaatgactgcggatggttgctggtgacggtctttggacagtaagggttttcttcggagttgtaggaggtgaagtcttcctatgggaaatttctggacaaaaatacaaatgaaatgacttgcaggcctcagtttagagtattgttggctttgtctgtcaacaaatggagatttgaacatgggagttcaaggggattttaatgaaattttattaaggagatgagaagcagggagtctgtgttgaaaattcaataaagggcttgttttccatctcagcctggataatctatgttatctctgagtaaagggggtaacaattctaacaacctggcttccttagaagtttccattctcactatagtcaccgaaggcagcagcactcaggcgtttgctgccgtgcctgccctttggtttctgggacggctcgggtcccgtagcgccggcacagctgagattgccaagccgggaagagaccttgctccaggtgtagctgcgttttccccagatcacctgtccttttcccctccgacaaggaagctgtgatttttctctggcctttagaggcaaagtgattccag

SEQ ID NO: 450144 - DNA, 925 bp, Homo Sapiens
ggaaacttttgcagcggctgggtagcagcacgtctcttgctcctcagggccactgccaggcttgccgagtcctgggactgctctcgctccggctgccactctcccgcgctctcctagctccctgcgaagcaggatggccgggaccgtgcgcaccgcgtgcttggtggtggcgatgctgctcagcttggacttcccgggacaggcgcagcccccgccgccgccgccggacgccacctgtcaccaagtccgctccttcttccagagactgcagcccggactcaagtgggtgccagaaactcccgtgccaggatcagatttgcaagtatgtctccctaagggcccaacatgctgctcaagaaagatggaagaaaaataccaactaacagcacgattgaacatggaacagctgcttcagtctgcaagtatggagctcaagttcttaattattcagaatgctgcggttttccaagaggcctttgaaattgttgttcgccatgccaagaactacaccaatgccatgttcaagaacaactacccaagcctgactccacaagcttttgagtttgtgggtgaatttttcacagatgtgtctctctacatcttgggttctgacatcaatgtagatgacatggtcaatgaattgtttgacagcctgtttccagtcatctatacccagctaatgaacccaggcctgcctgattcagccttggacatcaatgagtgcctccgaggagcaagacgtgacctgaaagtatttggggaatttcccccaagctttatttatgaccccaggttttcccaaggtcaccttccaagttcaattagggaatcttttcctttcaaggcttcctggaattcctttgggaaatttggaaagtttgatttcaaacccccaaacctgtgaattccacccctgggaaaggtt

SEQ ID NO: 450145 - DNA, 1283 bp, Homo Sapiens
  misc_feature (17)..(17): n is a, c, g, or t
gggctcgactgtgcttntggttgaacatgtctgtttcatgccgcagctgcgtgtactggcacaggtgctgccggatcatctctaccctctccacctccagccgctctagctccaatgtggtggtcaccatctcttcaaaccatttggactgggcctgtttgtagagatccacacagcgcatgaggtcgtctccagcctgtgtggactttctccgcgccttcttgatgtcctcctctgtcttgttgctcagcttgatctccagctgctgggtcttcatctccagttctctctgccgctctgtgagggctttccgggccttctccaccgaggcatagcggctggcgagctgcttgcgaaggtcggcaatgtggtggtcgcacttcttcatgtctttcttgaagttctcacggaagttcatcaggggcttctccacctcgctgtgaagcttggcagagaacttgaggtgaacttctgcttcgtccgccaggctcttcttcacctgggcccacgcctctcccaaggagccttcctcctgtgaagccaaggagttctgagagagcttagctaagttcttcgcatagtcttcttcaatctttatcctttcccggatgaattctgacatttctttctgcatttgtttgcccttcagctgtttctggagcagtagttcacccccagccacggtgccgttgccttgggggtccttcttatcagcccagaagtagtcgcagtagctccactcggttggtttcagcagctgctgttccggcatcgtgtctgggtgagggaacgtcacacagtttattgtgatggtgttttccttgctctgctttttgcttggcgatgaggatcccaggttctgggaatcaccggtggattttcggacactcatgtgggcagtctctggagggtgcgctggggtccctgatgcgtggtatccattcactgttggaggcagagagctcctgtgagagccagggctggctggaatcccaggagaactgctgggacgttcccaggtggtctcattggtggtcgtgttgacatagtaccgccggccctgaggcgacaggtagctctgccagccaggtggaaggatgaccgtctggctttcttctcccggcggaggggggaccattccaggcttcttatcctaaagccgtgagcaaacgctactcgctggtgttaatgggtggtcgtcagacactcgctttagcagccagatcagacggttttaaggtctcccactctgcatcctctcacaccccaaacccagaagcaat

SEQ ID NO: 450146 - DNA, 1691 bp, Homo Sapiens
caccgttggacagagagggtgggtgtcagggcccgggtgtgggccgatggcgcatggacagtagcgctcggttttgccgcccctcgcattaggaggcgctcgggaggttgtggtgggggtagtggttagtgcagtgccaccaagcccatgggcttcgtttagtggagcaccaagatgtttccggtagccaggttgcccacagaaggagggttttcagattcaaccatgcccatgtgcaggggcgctggtccctggccagggcacataatcaagagaagtgacgcggccatgccgaggtatacgtgtgtgcaagaaaatggacacatagggttcaggagcatcagtaactgactattgagatcatggtcttcttggaaggaataaatgtaaaaatgttgctcagccccacagagttggggtgactccacagggtgaaggcttggaggagtggcgtcttcagaggtttctgccctgcagaggctgaaggtggcatcccataggctttatagagcaaggtcgagaagctccctcttttcatcttctgggaggaaactagatttgtccgcattgatgttcggccttttaagctcctcttcagtaaagcccatgtcccgtttggtcatctggtaatcagtgtccagggtggacttgaagatgagcgggtcatctgtgttgagcgagtagttagcctggtcatttttgagccgaatgactgcatgctccgtgtccggcttccaggcaccagtgaggtagctggaccaggggcagatctcgaagtgcatgttttcctgccgcagcctgttataaagggcctggtcttccagggtgtggtagccgtgtcccagccgctctgtcttgagtatgtccacagcctcttttactacttcggccgagcccacctccccggcgtggacagtacggtgaatgccgctcttcacagcctcctggtaggcctggacatgtccaggcaagaggctgcttcctgggatggtctcatcgtccagccaggtcaatggctaccacggtctgctgctggtacttcttacacagctccaccaccttgggggaccagttgggctgttggtgcatgcagcacaggatggaccgggccttgaccccgaagtctcgctccccctcctgcaggccctggcccactagggccaccacctcgtctggggtgaggtccccttcagcctggttccaggggattggctccactttggagttggccagcaggtgcggactgtaccgcacctccacatacaccacgccctctttggccttcatctctacaaactcataggcgatccttttgatagcctcccggcagcccgcgatagcaggcatgtagtagtcaaacttggccaggaagtctggaagggtgagcggcttgtccatgccaatgacgttcagcagcccctctgctgtgttagctgggagggcgatccctctcctcctgccatagtataagatggtttcaggcttgatggatccgtctaggtggacatgcagttctactttgggcttgtcgaaggcgggcgtctgggccatggtgccctcgtgcgccccggcgctgctccctccgccgccgctcggtgggtctctgccggctcggtggccgctcggctttccctggggccagcggtggccgcggccggccacgctcttcttaacgggccgggccccccgct

SEQ ID NO: 450147 - DNA, 867 bp, Homo Sapiens
  misc_feature (132)..(192): n is a, c, g, or t
  misc_feature (562)..(562): n is a, c, g, or t
ggctccgggctgaggcatttgcttggctgcagcctccttccgacctgcctggcgggacccagtggaccaagccgagccgagccgcggggcccgctccggcccggccatgagcgcggccgcatgatgcgtccnnnnnnnnnnnnnnnnnnnnnnnnnnnnnnnnnnnnnnnnnnnnnnnnnnnnnnnnnnnnnggcgacccgcccgggcctcggatccgatcacataggacagtatgcaccttaagatcctgaagaaacggcacaaaatgttcaagtgatgtttagaaataacttgtgagggtgcgtcagggaaatcatgcagccatcaggacacaggctccgggacgtcgagcatcatcctctcctggctgaaaatgacaactatgactcttcatcgtcctcctcctccgaggctgacgtggctgaccgggtctggttcatccgtgacggctgcggcatgatctgtgctgtcatgacgtggcttctggtcgcctatgcagacttcgtggtgactttcgtcatgctgctgccttccaaagacttctggtactctgtggtcaangggggtcatctttaactgcttggccgtgctttgccctgtcatcccacctgagaaccatgctcaccgaccctggggcagtaaccaaaggaaacgctacgaaagaatacatggagagcttgcagctgaagcccggggaagtcatctacaagtgccccaagtgctgctgtattaaacccgcagcgcgcccaccactgcagtatttgccaaaagatgtatacggacaaatggatcatcactgcccgtgggtgaacaatagtgtaggacgaaaagaatcaacacgattgacgagctcttcactatgtata

SEQ ID NO: 450148 - DNA, 872 bp, Homo Sapiens
cccatttgaacagataaaagtctttattcccctgtatgtttacataagaaagttctttacagacttttttttatacaatacttgtgcagcaatgttcaaatttcacatttttactgcataagatatcttcatgtacaactgtatgctttgtcttcttgggaaggacgcgttaaagacctatgataaacacacatccacatgacaaaggagagtgcaatagggcagagtagaatactcacaggaaaagagtaaattcaggtcactacatcaaagtgtgaaccaagaacgtgtctttaattctagcaactaccaccatttggtaacttctttgcataggttagcattacccaaggagcctccctatcccgtattagtgaaagggaaatctgggagaagcaaaagaggtttcttgttatagatttcctagcactcattctgatttaagaaatctaagcacatccaacttcagaatacattacttaatgtggaaaaagaaaaggctgactttgtgttgataaaattatagcctttagagaggaataaagatagctttgcagtatctggagtgtttcaggaaagcttccattctaaatattcatgtgatagtttttctgttctgccaggcagcctctaatttgcttaacccggcacagctgggcaatcctgtcattttcatccctaagctcaaagttagtggctactgggagcctgataatcttgcagacagagaaggttaaggactctgggaaatcacagaaaaaccttatcaagagagactttattttgggcccaaggtatctatagcatgtatttatttagctgagtgcagatccctccacatcataggctgtcagccccaaagatcccttcat

SEQ ID NO: 450149 - DNA, 1262 bp, Homo Sapiens
  misc_feature (1153)..(1153): n is a, c, g, or t
aaaattctaataatctgtgatagtcttccttgcagttaaagaagaattgcagaaaccatgcaatatacttgggaaagattccaaaaataaattttttattatttctcttttaaggaaatacccctaatgtgccacctgctgctatcaccacaaattaaactcaatctctatgtggacagaggatgatttctgccaatatggaaaagcttttttctcactgtaggcctcaagaaaagttagggtaatgtatttgttattcattcctgacggtacaaagagcttgcagttctcacctctgactaccagtagctttgttgagttttgaaataatacttgacattttccaaaggcaaatctcattctgcaaggagattgtggcaccatcctgtttgactctcagaaacctcttgtaattctgatgtaaaaactgtagaatgaagatgagaaaattctcgcaatgagtggatcatgacaactgtaaattagaacaatcagatttaaaccaattccgcaatcttctatatctttgtaaaagacaaatccttgatgttgtctgtgtgcaaccttttcataaactctggttttatgactagtacaaaccaccaaaaaagccatgtgatcaatagtctgtgtcctgttataacatgctgtggttgagccatcttgtttataaataatagagctctcctgaatttgtgcatagacttcttggttcctggcttttgttttttgtatcaagagattgtgatataaaacagcagaagataaatggaaaccttccattttaacttaacgttgtttctggggtaatgttagaaccttgaaagatgcattcaaagactgtatcttattttgcccttggctattagtgtctcacatatgtgtgtaaatgttttcctaccttctttttgctcagcaaaggcaagcaagtaaaatatatttgctaagtgattagtgatgcacatttggggctagatttttttggtacttttatgtaaagaaaagtggattttgcagtaagggattggcatgagcaggcgtcagaatcacaatcatgattttctacttgaataattacaattcagaaggtatctggataaatagatacatgtctagtgaacaatttgtaacaataacaggtaaggatcagganattcagtattcagtttgtcagatttgccagaatgatgaaagtatttgaacatgtgtgtttgtttcttatataatttgtatgagtggatttgttgactgggaaatctggg

SEQ ID NO: 450150 - DNA, 979 bp, Homo Sapiens
gttttgccccgggttggttgccttttcccaggccctccttgggtttcagcttcacgttccggctgcatggctttttactgtaatgccaccagtttctgggctcttatagtctctgtccttggtttcagtgtttcggcatgtctttgatgcctctccggaacctgacggtatacgcttttcatccagattgacaccttgctttactgtacacactagattcttcataagggattctagttggataaaggaaaggagtatcttcaggaggaaagagatgccagtcgtgttcctttccttgtacctggaatacctagttacaaccataggagtccagatgacagggtgtgttggctcccaaggagccaatccacaatgtactttcctgtccattttcttccaggaaacccgaagtcagaccatttcacatcctggaaaagatctgtcttgtcttcaaatagactgacaaaatatttatagtcagcataagcccagaacttggaatggtcataatctctaaatggtccagaaatactagactggtcacagttccaggtcagaaactcttcgagtgtagcttctacgtaattacatgtagtttcaaactgaggaactgtgctcatgcttttcatccccattctgaatcgtatctgcttgccatgaaggacctgcgaaaggtatttagcattccagtgtcgtgctggccaatcaaacaccatgttacagaagattgcaggttgttgtaaagacatgataatttcttttgctttctctggcttaaaaggtttgacatgttcaccttcctcccctccagccccagccgcaacgatcacaggagtggtcgcctcggagcctgctgccatggctaccgcaaggcgggttctgccggaacccaaggcggagcggagctggggtggggtcagagtaggggccaaactccgagacccgaagctgcaccacaggaaggagccccggcgactcc

SEQ ID NO: 450151 - DNA, 1401 bp, Homo Sapiens
agcgggagtgaggcgcgagccgggagcccggggctctgcaggcgcaggcggcgcggggacaggagcaggttacccggccgcccgagcgctcgcaccccgctgaaagaaacgcaggcggcccgccggctctgcctggtccgctacccgaccagctcccggctcggggctcagagctaggggcttacgccaagcggagcccggggaggggtgcccacctccctccgccggcatcccaagcctcggccgggaactccgggggtagatgacggtggacagcagcatgagcagtgggtactgcagcctggacgaggaactggaagactgcttcttcactgctaagactacctttttcagaaatgcgcagagcaaacatctttcaaagaatgtctgtaaacctgtggaggagacacagcgcccgcccacactgcaggagatcaagcagaagatcgacagctacaacacgcgagagaagaactgcctgggcatgaaactgagtgaagacggcacctacacgggtttcatcaaagtgcatctgaaactccggcgggctgtgacggtgccgtgcgtgggatccggccccagtcgatctatgatgccatcaaggaggtgaacctggcggctaccacggacaagcggacatccgttctacctgcccctagatgccatcaagcagctgcacatcagcagcaccaccaccgtcagtgaggtcatccagggctgctcaagaagttcatggttgtggacaatccccagaagtttgcactttttaagcggatacacaaggacggacaagtgctcttccagaaactctccattgctgaccgcccctctacctgcgcctgcttgctgggcctgacacggaggtcctcagctttgtgctaaaggagaatgaaactggagaggtagagtgggatgccttctccatccctgaacttcagaacttcctaacaatcctggaaaaagaggagcaggacaaaatccaacaagtgcaaaagaagtatgacaagtttaggcagaaactggaggaggccttaagagaatcccagggcaaacctgggtaaccggtcctgcttcctctcctcctggtgcattcagatttatatgaattattaattattattttgcaacagacactttttctcaggacatctctggcaggtgcatttgtgcctgcccagcagttccagctgtggcaaaagtctcttccatggacaagtgttgcacggggggttcagcctgtggccgcacccagggctgtggcccaacaacagaattctggccaagatcaaaactcatggggaaaccaaccagtgacgatctctctagaacggcaagctttaccgagcaaaatagggcctctctcgggacaaaaggaacccacagcgccggaaggcgggcgaa

SEQ ID NO: 450152 - DNA, 860 bp, Homo Sapiens
  misc_feature (367)..(386): n is a, c, g, or t
tggatagtatctacagttgcattgtagatactggatacttggattggctggtgcaccctgttgtgagactcactggagttgaagagatgaccactggaaaatatccctaagcagtagctgcaattccacccccaccttggagagccaaaaccctcttcgttttcactctcctgtcctggtcttaggctacttaaagcagcctttagacatagggaaaaattgaaagcctctcttttaagaaaagcattaggtacttctggaatagagagttcaagaaattaggagaaaaatgaacttttgaagctttttctttccctttttgtttacttcattctcttactcagttttaaaatgctggtaatggtcnnnnnnnnnnnnnnnnnnnnctgggggatttaatgctttggaaaagatctcatggttttatctccaagggaggaaattaatttgatgccatggaaattagttttctagtcgtatgccttgaatgagtgaagaatttctttttcatgggtggtactaaatttggggaaagctatagaaactttcatctgggaagcttacacttttcctcttttttgaaaatttggtgagagacttggatattttattattttctgtgaaaagagtggtaatttgttgtacaggtctaatattggatccctttttgggaagtattggaaaggaatctgagtattaagcagaattacctctggatggcatgtattctcaggacactgtcaccagtgaaaacccgtttatttaagaagcttgtggtttcccaaagtgttgaatttgattttccacaaaatgggcatgttgttaacctttattaacctttaaggctattccttaagatg

SEQ ID NO: 450153 - DNA, 847 bp, Homo Sapiens
cagagctcttagcagccagatggactcagttcccagtgaaaggacagggatggcaagatcttttagcatttaggggatgcctttgttagtaaccgttcacaatgggcagctcccggctgagggtctttgaccctcatttggagaggaaagattccgccgcggcgctctcagaccgagagctgcccttgcctaccttcgatgtgccttatttcaaatacatcgacgaggaggatgaggacgatgaatggagcagccgctcgcagtcttccaccgaggatgactcagtggactctctgctctctgacagatatgtggtggtgtccgggaccccggagaagattttggagcaccttttgaatgacttgcacctggaagaagtccaggacaaagaaacagagaccctcctggatgacttccttctcacgtacactgtcttcatgacaactgatgacttgtgccaggctctgttaaggcactattctgctaagaagtatcaaggcaaagaggaaaactcagatgttccgcgtaggaaacgtaaagtcttgcatcttgtttcccagtggattgctctgtacaaagactggttacctgaagatgaacattcaaaaatgtttttaaagaccatatataggaatgtactggatgatgtttatgaatatccaatacttgaaaaagaattgaaagaatttcaaaagaatacttggaatgcacggtcgtcacactgtagatgaatattcaccacaagaaaggaataaagcccttttccaccaattcagcttaaggagaaacggctcagcatagaggaactgtgactgaaacggaggaagtgaggatgggtgaagtgagg

SEQ ID NO: 450154 - DNA, 893 bp, Homo Sapiens
agcggggggttgcggaaggtaactggggacgtcgcaggctgtgcagctttcgcgaggcaccgctttggcgcccggaccgaggaagaagatgcaagccagccccatccgtatcccaactgttagcaatgacatcgactgggatttctgcttccatatgtcacagcaaaccgagatcccagctcaccagcaaacagatgagttgtatcccactggtgggtgtggagagagtgaagaggaaactaaagctaaagagaaggagaaggccatagactgtatgtctcatcccaaagagaaattagcccaatcccagaagaaagtagctcagctgattaaggaaaaaatgaatactcaagcaaacaaggagctgattcgatgtgtcatcctttctcggattatttttggggaccatcactggaaatgtgcacgagctctggccaacctagcttatggctacttgacactgagaggcctcccagttcaggccaagaaacatgctacatcagccaagaatacactgttgacctggaaggcaaatacgacctcaaataaggagaaagaggaaatcctggaagctctggtcaagctgtactacactctgggcgtggcctggctcctgcagaaccgtggcagagaagcctatttcaacctgcagaaggcagagagaaacatgaaggagcttgaaagaattatatacaggaggtgttgtgaattacaagtctctgagaacgacctaacacttgcttgggcagagcctccttggcatccacagactgaacctagctctggcatactttgaaaaggcaattggcgatgttattgctgccaagggtgataggacgtcagatctgatcagcctgtacgaggaagctgctcagatagagcagctgaggagg

SEQ ID NO: 450155 - DNA, 1355 bp, Homo Sapiens
  misc_feature (45)..(45): n is a, c, g, or t
  misc_feature (150)..(158): n is a, c, g, or t
cccttttcctggtaatgaaagccatggagtccttaaccaaaaagnctaagcagaattgttagatcttttggtttctgtcataatgtactattggactttcaggtagatatagtacattaatatgaaatactttgaaatacaccatctttnnnnnnnnnggcacttacacaaaaatcatgtaacactaggtaggatgttgaaatgactggtatgcaatattttttaaagccttcatttttggtcagcataagtttcctttaattatttttctgtttccagttggacttcactttgaggcttaacatagcaaagtgagtataaagttctacaatttagtcattgtggatttcaagtcatttatgatgaaaatggaaatgtgtagtttacttaagaaaattttcttcttctgtaacatctaactcgtcatcctcatcatcttctgcttgttgatcctttcttagtcgacaagtggatacctgtcctgttccagatacacacttagctgacagtgatctctgaagaggtgactttgaatttgctcttacaatatctaaacgagatgaataatctggtgcatacagagaatttcggaaaacctctaaatcttcatcttcatcaatgttttgtatattctggtaggcagcagtgtagacctctaaagctttgccgtgaaataacatttcgattgtgataaattcagaaaatatagtctttatatccttcattttctgcctttcaaagttgttaatagtttcctccagatgacgacttgttcggctagcatccattgcagctctctgtaattccgtttctgcctgtgaaataacatgtcgatcagatgggtttcgctgacgtgttctttctaactgagttaattgcttagcttctcgattccttgctgtgagtgttgctttgaggtcatcccgtttcattttcacaatggtcccataagttttcaagggttcaactactttggcttcaagtctttcaacctctgcttgtcgataatcctgaagtttggcaaactcatctgcaaagttcatcaggcccagctttaaatgcggggtctctgtagcagcatacgcgttaatttcattcaccaggaggtctgctttgtctctcagcctggcagttttccgcacataggcagcgaagatttggcacagttctccaaaatgcttctccacatttgagacagctgtttgcagttgtttcgtttgagcgttccggttttccagggtgcgcctcatcatgctgcctcgcgcacggccggggaccttgcgggggcccaaggacggggattccaaggcgcctgggcgcgcgctggggcgcaagcagccgccgggagcctgaaa

SEQ ID NO: 450156 - DNA, 685 bp, Homo Sapiens
cctgggtagaaatcagtgttccagtctggctcagggctgtgtggactggatagcgaaagctcccctttcctgtgcagatgcctccctcggggagcctcaggaccatggagaagcggtgccacaaaacggtccacatttctgaactggacatatccctgattaggctagccttcccctgctcagtgaggagctgcaacagaaggataaggaggccatcatagaatccacaactacctggtggagtcaaccgaacctctgcaggggcagacaaggcatgtgtggctgcagccatccattccatgggctggaggtcaaaggtcaccccttgctgaccaagctgtcccaatagacaggctgctgcactcacaagagagacgacatgcgaatgggtaaagagagtagcaacgtcgctgcctagcttctccattccacaaggcaggttttggagccgagagacaagaagggagaggaagtagagtgtcacttcagtagactcttcccatctactacttttaccttgccctgaatcaacataaacagggattccaagccaggggctcctgccccagaagacggcacaggccctcactgacaaggcagcaggagtatagaaccttgagaaggtgcaggcacaggatgggatgctgcaggctagagattgagggatggcctgagctggctgctg

SEQ ID NO: 450157 - DNA, 970 bp, Homo Sapiens
cctctcttgttttgctcttcttgctcggtcctctttgtttcttctccttgctcttgggtatcgtctcctgtgtcctttggtctcctggtttccctggtgtctgctctctctaggttcctgtcgtccttttcctattctttgctggctgcaatgatttgcttcttgttctttctgctggtttgaccatggcatcagtcatcagtagagtccaatctcggatcttgtccatccattgcttggcactctgttccatcctgggcgcaagaagttatacacacgtttgctggtcttgagatctaaagaaagccttggtcaacttgtgtgtctttggggctcccatgctggggccatcagggatgaccatttctacttcagccagatcaatgtggcctttacagcttgtgtccgtcaccctgagtcatagtagcgcatgctagatgttttgttacatccaatactaaccacggggcttccaacctttcagcaaagcccctcttttataaagtgttccctcaaaggacctgttttcatcattcttggatgtatactgggctatagagcgtggctgctcttcgctccactccattggatggggagatgctggaattctgttcctcccccatgctgctgtctgggagatgtagcagagacctcttctgataggaaggtaggttggtagacacaattcctggggatctcgacaggtgtctttgggagcgatctgttcttggttcttctttaaggtccacggataccctttcccacagctgctgccacttctcaggggcttggttcaatttgtgctccaatttttcaatttcactgaaaaggctggtgagagcatcaggctgagtacagctgacatcatcatagcatggccacactgttctcctctggctccgtggcccagcttctccagccaggtcagagtcttcggaggggaagtgcttgggggttagcatcatccagg

SEQ ID NO: 450158 - DNA, 1217 bp, Homo Sapiens
  misc_feature (872)..(872): n is a, c, g, or t
tctccttagcgcatgtggcaatctttgtcacaagatttagctatggagaagaactgcaggtcctttgtgggagctgtcattgttggtacatacaatgtcgtggttgtgattgtgcttaccaaactgctggtggcaatgcttcataaaagctttcagttgatagcaaatcatgaagacaaagaatggaagttgctcgagcaaaattatggcttagctactttgatgacaaatgtacgttacctccacctttcaacatcattccctcaccaaagactatctgctatatgattagtagcctcagtaagtggatttgctctcatacatcaaaaggcaaggtcaaacggcaaaacagtttaaaggaatggaggaatttgaaacagaagagagatgaaaactatcaaaaagtgatgtgctgcctagtgcatcgttacttgacttccatgagacagaagatgcaaagtacagatcaggcaactgtggaaaatctaaacgaactgcgccaagatctgtcaaaattccgaaatgaaataagggatttacttggctttcggacttctaaatatgctatgttttatccaagaaattaaccattttctaaatcatggagcgaataattttcaataacagatccaaaagactatattgcataacttgcaatgaaattaatgagatatatattgaaataaagaattatgtaaaagccattctttaaaatatttatagcataaatatatgttatgtaaagtgtgtatatagaattagttttttaaaccttctgttagtggctttttgcagaagcaaaacagattaagtagatagattttgttagcatgctgcttggttttcttacttagtgctttaaaatgtttttntttatgtttaagaggggcagttataaatggacacattgcccagaatgttttgtaaaatgaagaccagcaaatgtaggctgatctccttcacaggatacacttgaaatatagaagttatgttttaaatatctctgttttaggagttcacatatagttcagcatttattgtttaggagtataattttattttatctaaaataatagtctattttttcttttgtattttgttataatcttaaggcaacaaaggaaaaaaccctgaatatttgaatctatttatgtcttttcaattttaaattgcacttcagtttttgttattgaaatatatttacttttacatggtta

SEQ ID NO: 450159 - DNA, 1299 bp, Homo Sapiens
  misc_feature (20)..(20): n is a, c, g, or t
  misc_feature (43)..(43): n is a, c, g, or t
  misc_feature (53)..(53): n is a, c, g, or t
aacaagtgccacggtggggncggtggtgctggctgtgtgcggntgtgcctggnaagtggctgccagggatagcaggggactgctcccttcctgcggcgggcaggtggagttgctgagcagcttcgtcattaggagagagatgcccactaccttaaaaatcagaagctttttggcttctggaagctttggcaccatgttgggggctggatgcaggaggcaggggcagggctgggtttctgcaatctgaacctttctcaatatgttcctcaaccgcctggcttgggggtggagaggctgttcttctccttggtccttagctctgggagttggcgtcctgaggagaaccgaattctggacagggagccctggctggggtgggtgcaggtatgatggggaggggcaggaaagagggcagagggaagcatccccttggattttgggtccctggtgaacagatagggtcttgggtcatctccagctgaccccttgatggggacagaattgcttgagcactgtccccccacaatgcagctcctgtggcctctcttctctgaaggggcctccctgggagggaaggcagtaatgagctccggttcctgaagaggcagctgagggtgtggcccggacgggaggtcctgcagggcaccttggcatctcccctctcctccagcagctgggagtgtgggcagcactggattggggcctgggacatggaccctggggtgagaggctggttctttgggtatgaatgtcagtttttgtttacaatttctcaccacccacaccaaagtcctaccactgcctgacaaaagcagagagaggggtgtgtgtgtactcgcatgtgttggcaggaccaaggcagggaggtaggataaaagggggaggaaggagagagtagccagggaatggtggtcctcagggctggggctgccccgccacgtccttgtccttcgtgggagtgggttggtacatgggctgctgctgctcctccatgtcctcattagcctcctctgtccctgagccccgctccacctcggggtacacgaccacacacatcttctggctcaccagggttagcagctcaatgaagtcactgaaacacttgggcttgtgttgccagtaaacacccaggaaatagacaggcactcctgtcagcatgatggccaggccaatgccacacaccaccggctctgaccacaggctgaagaccagcaggaaggcccagaacagcaagtagatgcctcgtgccgaattcgccacccaggcctcgctaccttaaaccgtggagttactgccgtt

SEQ ID NO: 450160 - DNA, 909 bp, Homo Sapiens
ttcccgggatctgaggcgtttgttgcagctacctgcacttctagatgctccccaggttcatcctgtgtcgtctcccccacctaccagtcatcttcttgtgagccctgggcttaggagtcaccatggcaactgaagagttcatcatccgcatccccccataccactatatccatgtgctggaccagaacagcaacgtgtcccgtgtggaggtcgggccaaagacctacatccggcaggacaatgagagggtactgtttgcccccatgcgcatggtgaccgtccccccacgtcactactgcacagtggccaaccctgtgtctcgggatgcccagggcttggtgctgtttgatgtcacagggcaagttcggcttcgccacgctgacctcgagatccggctggcccaggaccccttccccctgtacccaggggaggtgctggaaaaggacatcacacccctgcaggtggttctgcccaacactgccctccatctaaaggcgctgcttgattttgaggataaagatggagacaaggtggtggcaggagatgagtggcttttcgagggacctggcacgtacatcccccggaaggaagtggaggtcgtggagatcattcaggccaccatcatcaggcagaaccaggctctgcggctcagggcccgcaaggagtgctgggaccgggacggcaaggagagggtgacaggggacgaatggctggtcagcacagtaggggcgtacctcccagcggtgtttgaggaggttctggatttggtggaccgccgtcatccttacggaaaagacagcctgcactccggggctcggggacttccgggacttcagggagtgtcccgcgcactggggaggagtggctgggtaacaggtgccggaccacaaaggcccgttgcgaatgtca

SEQ ID NO: 450161 - DNA, 1138 bp, Homo Sapiens
  misc_feature (192)..(216): n is a, c, g, or t
aaatggggggaaagggtagaaaatgtgggggaacaggtgatacattgtcggtaagagggaagggaaaaaaggaaggaggtgtggatgatacaaaggtggaacacacaaagacttatgggggggccaaaattggatattataggcccaaacaggtaccgaaacagggatgggagggaaacaacgacagggatnnnnnnnnnnnnnnnnnnnnnnnnnaaaaagggaaggagcgcccggagggagcctcctgggtgaaacattctagccacatgggccatcagtgtacgtgccgctgttaaccaggcactccctcccacagatgcggcggggacactcccctgaaatccccggaagttccggccgagccccgaggtgcagggctgtcttttccgtaaggatgacggcgtccaccaattccagaacctcttcaaacaccgctgggaggtacgcccgtactgtggtgaccagccattcttcccctgtcacccttctccttgccgtcccggtcccagcactccttgcgggaccctgagccgcagagcctggttctgcctgatgatggtggcctgaatgatctccacgacctccacttccttccgggggatgtacgtgccaggtccctcgaaaagccactcatctcctgccaccaccttgtctccatctttatcctcaaaatcaagcagcgcctttagatggagggcagtgttgggcagaaccacctgcaggggtgtgatgtccttttccagcacctcccctgggtacagggggaaggggtcctgggccagccggatctcgaggtcagcgtggcgaagccgaacttgccctgtgacatcaaacagcaccaagccctgggcatcccgagacacagggttggccactgtgcagtagtgacgtggggggacggtcaccatgcgcatgggggcaaacagtaccctctcattgtcctgccggatgtaggtctttggcccgacctccacacgggacacgttgctgttctggtccagcacatggatatagtggtatggggggatgcggatgatgaactcttcagttgccatggtgactcctaagcccagggctcacaagaagatgaatctagaagtgcaggtagctgcaacatcccgggaattccggaccg

SEQ ID NO: 450162 - DNA, 853 bp, Homo Sapiens
  misc_feature (590)..(615): n is a, c, g, or t
gtcctgttgaggtgtgccttgtgtgggtgtgtatgtggctattttttgtcgtgtgtaggtgtccagcatgttttctgctcgggggggtggtccgcagcattgttctttgtgtttctggtgcgctcgtgttctgtgcagtttttttgccggttcgtttgtgtggttgtgatcactccccgcttttttggtgcgcctctttgtctaagtggtgtttggagagtgtctgttcgcccgtttggacgggtccttgtgtttactttctgtcgtcggtcaggcggttcgggttgtgggtggccgcacgtttttgttggtcgccctgctctcggttgattgttttaggcggtgtcgccgttctcccgtgtgctgctccgtagtgtgatccgacgtgtttgctacctctcgttcgtgcgagtctgtttttgtgtaactgactctcgtggctcctgttgcgccttggtgcttgttaatagtcgggtggtctctccttttttgggcgccacctcgttgggtgcacaagagacatctgtgagttgtcgtgcggctacttttggcccctctccgggggtaatctttttagggcgccccccccnnnnnnnnnnnnnnnnnnnnnnnnnnacggcttaaagagttttaatagctgctccaggtacaccctgaagaggtgagggaggagaagggaggactggtggcagctaatgctagctgatgggaaagatactggctaaggggctcagggctgcccaaccaggctctcgggtggggaaatcactgtcaaagtggaaatgcatcttttaataataagggcgaggactatgctaagaagtgccatcttcacagaaactttttcatgccg

SEQ ID NO: 450163 - DNA, 797 bp, Homo Sapiens
ctggtgaggtgggacttcaatgccttttagagtttacatgtcttttcctccccacggcttctcttatcctccccgatctcagagcactggtgcatttccagtcgatccagcaggtctggcttctctcacatatgcagtaagggttaggggagaaggtcccagctcctcttgtctctagcagagtgtaaactggctctgctgaggaggtggctgtgcttttattccttctcctgagaactgtttatatattaaggagcttcacagcctccaacataaggaaagcaggcctcaaacttcttcatgggaaacagatggcttctcttttttaattgaatgaactagaagaagttcattgttattcatcaacttcaaagagactatatgaggccccttggccaggactacagagcagtattttttaatcagaaattatagccaaaaagaagagaccagaacacatgggtctccagcgtaccaggatttgtgaaggcctgacgttcgtagaatgaaatctatgtggagatgatttaaaagaacggtttcactgctaaaatcctttcgaaatgagttcctttaagttcttcagtaactaaatcctccagacacggacagccgagagaatctagtcctatacaataacaccctctaacagagatcgctaaaggaagatactagtagattgaatatcatgcaataaatacagtggtcacatacatgtatctgaaccatactgaatggactctctgcagcaaattcctccaaaccgataataagtatgtatcggactggagtggcta

SEQ ID NO: 450164 - DNA, 1025 bp, Homo Sapiens
  misc_feature (22)..(22): n is a, c, g, or t
  misc_feature (205)..(205): n is a, c, g, or t
  misc_feature (482)..(537): n is a, c, g, or t
cttccaggagccaccccaggcntggccgatgtgccacaggtaggagcatgtcctctgcgtggcctctgcactggaagagcttcaaggccttttcctccagggctgaggggatttgtgtttcgcctctgtttgtttttgtgtacttctgtttggcgaaactttcaagcacgcagagcaacgttctgatagatagtgcagagaggantgcgcagcatcctggagccgaaagttacaaggaagagaccaaaaccggtaaagtcacggatgttgtggcccgaacctaagcatggtggtgtatgccagtagtccagaaattcaagattaccagtgtgctatggcaccactacactccgtcctgagcaacagacaaagaccttgtctctgctgtgtctccagatcatgtgcatggctgcatgcagtctagggttctccaccaacaggcagatccacaatgccctgctacaatccagatttccgaaacnnnnnnnnnnnnnnnnnnnnnnnnnnnnnnnnnnnnnnnnnnnnnnnnnnnnnnnnaagtctatatagtccggcgtgatcattaaaggaattccttgtgttcaaagagcagtgcttgaaaaccaagctcatttgtgcctgcagaaatgccagcctctggggtagaagaaatgtcatactttgatcatcttccacactgctctgggcatactccgtcacaaactacgttgtgtgaatctgaggactgctttagaaatgagttcccaaattgctcaagaaatagttcaggctgtaattctgaaaagccttctgctcactcaggtccagtgatcacctctgaggagtgagattagagcagcgaagagacttccaattcttactttatacacttctgtattgtttgaacctgaaggacttgaaagagaaccaaaaggaggggtagcattcccagcagctagcactttcatccaatgccagggctttcacttggccaaattattttcaaagatactgcctgaccgaagcacttcgctctaatcgctccg

SEQ ID NO: 450165 - DNA, 2478 bp, Homo Sapiens
  misc_feature (185)..(303): n is a, c, g, or t
  misc_feature (333)..(381): n is a, c, g, or t
  misc_feature (941)..(953): n is a, c, g, or t
aaaaaccccccttgaggaaggcccaaggccaaggttaggttcaaggccctgttattcccccagccactttggggagggttaaggttgccacggatccccctgaggtcagggagttttcgggacccagcctgggccaaacatggaaaaacccccatctctagctaaaaaataccaaaaattagccnnnnnnnnnnnnnnnnnnnnnnnnnnnnnnnnnnnnnnnnnnnnnnnnnnnnnnnnnnnnnnnnnnnnnnnnnnnnnnnnnnnnnnnnnnnnnnnnnnnnnnnnnnnnnnnnnnnnnnnccctgggtaacagagcaagactctgtctcnnnnnnnnnnnnnnnnnnnnnnnnnnnnnnnnnnnnnnnnnnnnnnnnncacatgagaaggtggctaacagtaaaacctttgttcagcagtttatcttactacatggttatttttgtagactcttggtatcttttatcctaagacacccacttcttgatttcatgcagcgccacatgaactatatattatacataaagaagaacaaaaaagggaatgcaggttataaccattggccctttaattgaagagtctaaaaactagaggtctgtaacagaatactaatcctgcagaacaagggacagaaaagtcaggcgaggcaagcttgtcttcgtaacctgggctctcaattggggtgctctcttacatttcaattgaatatctgtttttaaacctcccttcaacagtcagggtgtctgtctattttgtggcttcccaaaattctaactgccaaattaatggccatcttatcatgttttcccatggctatcaggaggatatagcatttttatagatttactacttggtcaagaatctacgcatcggatgtattcttttcttcttctttacttgatgcattcaaaagcaaccactggatttttttcaatgtnnnnnnnnnnnnntagatacccatgccaaaattcatgggtgtaaacagccaacagagccaaacttacaaagaaaatgaaagacttgtttctggacagtggttttattggtaaagatataagacatattggctctattaaaaactcaggtaataaagcactaagcttgatttttgtattgctacagtctctttcttctaaggggaagaaaatctccccaagaataggatgctacctgaggaattatgccgaataaagaaaaggaatggatggtcggcagtgaaattttcttcgggcatcaacatgcagaaagttgcgatgcctgctgtggcagctgccgcctctgttccctcttcattcacttccacaaatgacttgtggacaatttttgatataaaaatatctctggctcctgacatgccagacagatcagccttgctactgttaaagagatcctgcacacctaggcgggcgaggtcggagttgagagtgtaactctcttccagtttgaacctgggcaagctgacattaacttcaatgaaatcgagattctcaggtttagtccactcatgcaacttttccaaagtcaactgttcctcaatcttcttcaggcccgtggactcgtcctcaatgtcatccggcagcaggatgaccatgctgagctcctcgccttggtaaggcagttccagcacacggcacttaaggtcctcgatgtagccatatgcaaatttttccttctgatacatcattttcacagtttttctgtctttcttattcaatctgaatggtgcattcgtcgtggcttctttcatgaatttatccttccagtttcccttgaaatagatggcatttactagcacaagtttggtcatgttatcaaccatgcccgaagccaacagttccggaatttttccttctgtctgtcctttgacccactggtttatggtcttccttgcatcttcagaggcatgctgaaaatccacactggccaggtcagcaccatatgttttctgagtcgaaaccaagaactcaggaaggaaattgtaagttttctctccatataatctattagcaagtttcagaatataagacgctccacgtttgttgatatcagcattcagactctggaatcttgaatgaacctcttcaaccgtgttgaaatggaaagtcttggacagctgtgctgccgtgttacctctggtccccagaaaaaccatggccatagcagatgaaatgctgaagggagagatgaagatgtttccagccggattgttctcactcaacgccaggaacaggtccaaggcgaagcgggtgtttgctgagctcagctgctccatggtgaaaaccgacaggccgccgaggcacgctccgggctccgagctgggtgcgaggtcaggaaggaggcaccgagggccgctgctcttatagcaggcggaagtgtcacccgggccagcagccgcgggcggggcggcggcccttcccggtgactgcgtaggagtccgagctcccgaggtcgcctaagtgcaagcagaagtgagcg

SEQ ID NO: 450166 - DNA, 489 bp, Homo Sapiens
gatttctcttaaattcgtaactctgttaactgcaccttcatttccagaaaccttatctttaacaaatctctacactattcatacttagcacaatttccaatcattgaagacattttagttttaccttacagtcagtacaaagcagctgtgttaaattcattccataagatcaaaactatactgtgtccttaccctcaatatttagctcaaaacaaatgtggcagaaggagagtgtttctttgtctgttcccagtttacaaacactgcaaatgttgtcatcattcaaatcaatgtttacaaactgctcctcttcgttcatagtgcccctattaagaaacagaaaaggaaagttacacaatttcatgaacctgcctttggggtagttccctttactgggaacttctaggaaataaggatgctgttcagctcatttaaagcaaaagctccatcaaacaagcatcgccatacttgcactccaacattgcactt

SEQ ID NO: 450167 - DNA, 788 bp, Homo Sapiens
gtggaccccccaggcgcaaggcattcccggaaacacggccggccgggctaacggggcacgccgaattcgccggcctgggaggccaaagaagggaacccctggacgagcccttcatcaggagaccacctgagcaggagcgctgtccagccgctggtgggctcatcgaagaacatgactggagggttgttcaccagctccagcgcgatggccaggcgcttgcgctgaccacctgacaggctcccggtccgcgtgttggcgcaagacagcaagcccagcgctgtcagtatctccttgaccatttcccttctgccttcatccttctcctgaagcttcagatgtgccgacaccatcatggcctcctgcacagtgagatgcggcagcagcatgtcatcctgcatgatgtagcaggacaccttccggaagcagcgcaggtcccggggcaggccgttgatgaggacggcccccttcatgcccgtctccctgtatccagccaggatgttcatcagcgtggacttcccggccccggaaggacccataatggccaccaactcaccactattgaacttcccggaaattcctttcaggagggtcttgtatcctttcttcctccaccagggtccttcaggaaccgaataggaaaggtccctgaattcaatgttcacagctgccctccgaggcaaggaggagaagcgctgggcttccgtgaggttattatctacttttttcagatgtccattcagccctcgtgccgattctaccacccggcctcgctacctagcctatcgttg

SEQ ID NO: 450168 - DNA, 1848 bp, Homo Sapiens
  misc_feature (1044)..(1058): n is a, c, g, or t
ttatcctccgggggtgtggaataaccacctttttttggttgcaaatgttgcggctttaggggctgaccagagaaatgggataggctgcttatttccaaaaagtgtcactggaatggctaggaaaaaagcagtgtgaaaattgagcccgggactaccaaaaccaggccacagactccccccctccaaaggctggggccactggagctctgacaggacctgttgccaaggaagctggaagtcctgaaaatccaggtgatccaaaactggaagctgcagggtttttgaatgaaaaatgatgcagccgaatgtgacttcaggcttcccaaatccaaaagctggagcagaagtagagataccctgaactggtagaggctgcagctccaaatgctggggaactcccaaaaccaagcagggcttccaggaagaggcagcagcaaatccagagtttgttttaaaactaaagttctgagcattatcactgctgctgttattgactggaaagcctggcgacataaatgttgctgcttgactgctgccaaatccaaatgcaggtgctgcttgatttactccatcctttacatcagagagcaaagctactttagttgatatatttagacttttcagttcatttaccctgttcctccattgatttattaaacgttggacagaatttagctgaaaacggaagacagaaaaataacagttcaatattgtatgtttaagttagtttcttcaataaaaacttcacatacttctttgccaaaatcacaaaaggtttatgtaacagttttatggcccatgacttgcaaaatttgcattgacttggcctatttgtcaaagatatgccagctccagttccctctcccgttcaactccttgtatcatctggttagtatcacaagtacctggcagcacgtagttagttatatttggatgggcggtgaatacatgtactagttgaaatgcatgatcatgactgtagaaacagaaaaatacagcatttaaactgcttccttcaggtactcaacttattctagtcaagannnnnnnnnnnnnnngatatttgatatatgaggatgttaatctgtattacagactgtatcttatttaactttgtttttctagcattcatcactggatgggtacctaacagatgttcaataaatatctgtcaaatgataaaagggtttcatttctgggattgactgttgggtaatttataataaaaatagtaatattcctaattattaaagtaaaaatatattatcattttaataaccaaccaaattcaatgaaaataatatagaaaagaaaaatagcctactcctgaaaaaagatcatagacctcatcggttttgccaaaacacaagccacgataaagaaagcagtaattaagagctcatctgttattgcagtagattaataggaaacaaacttacataactctgtaagttattgctggttaagaagttatggtattcaagcctcaattcctctggtgaaatgtctgtaaaacctgaagtgaggaatcaatcggaatctttaaaataaatgccaataattttgatagtaaagctagaggtgctaaacaagaaaatatctaatgttgattagaaaattttcataaccatgaggaagaaacttaaagcctacactctacttaatgtttaataaagtgtaaaattacagtaaaatatagttggttattctgatctttaaatggggaagattttctaaagataagtggcgtagaatgaacaacaaacacaggagaaagatttgactacatttatattcaaacttttattttaaaaattctgccagaaacatcccgagaattccggaccg

SEQ ID NO: 450169 - DNA, 1172 bp, Homo Sapiens
gccgggggaaaattggaagccggggatttccaaaatccagcccccagaatgtgccacctccaaaaggctgggggccactgggagttttaacaggaccttgttgccaaggaaagctggaaatccctgaaaattccaggtgatcccaaaactggaaagctgcagggctttgaaaaggaaaatgatgcagcccgatgtgacttcaggcttcccaaatccaaaaagctggagcagaagtagagatacctgaactggtagaggctgcagctccaaatgctggggaactccccgaaaccagcaggggtttccagaagaggcagcagcaaatccagagtttgttttaaaactaaagttctgagcattatcactgctgctgttattgactggaaagcctggcgacataaatgttgctgcttgactgctgccaaatccaaatgcaggtgctgcttgatttactccatcctttacatcagagagcaaagctactttagttgatatatttagacttttcagttcatttaccctgttcctccattgatttattaaacgttggacagaatttagataactctgtaagttattgctggttaagaagttatggtattcaagcctcaattcctctggtgaaatgtctgtaaaacctgaaatattaggtttctttttcactggtgaataaacagaaaacatccactgccctgatgattcccaaacctccatatcttttacaattccttccagaagtttcttttcatctttctgctcatcaggactaagtgaagcaaatgggttctcagacaatccaaagccttccttcctgttagttgaagctccagaatcaaaagaactgaaatatggcttttcttgatctctgctgcccccccatggtgtggatttggagaaactggatggctggatgacattggaatatctctggctagttgtattccatccacgtctattattacctgaaggctgctgctgcggttgctgccgtcctcctcctgcacccctagcaccgggatgttcgttccagcaccgatctccaaagcggcaccggccttgaaggaagaattgacaaatggccattgcgacggcgtcgctgacggagggcgtcttcagtctgcaccgttcgatgcctgttactgggcagagagccctaaggcaacctcggcgcc

SEQ ID NO: 450170 - DNA, 1037 bp, Homo Sapiens
  misc_feature (1018)..(1018): n is a, c, g, or t
tttaaaccgttgggaccagaaatttaggcggaaattaataaggtttcttttttccattggggaattaacccggaaaaccttccccctggccctgatgatttcccaaacctccaatatctttttacaatccctcccagaaagtttctttttcatcttttctgctcatcagggactaagtgaagcaaatgggttctcagacaatccaaagcctttctttcctgttagttgaagctccagaatcaaaagaactgaaatatggcttttcttgatctctgctgcccccccatggtgtggatttggagaaactggatggctggatgacattggaatatctctggctagttgtattccatccacgtctattattacctacaaggtagtttcgataggtacttccgatttaaaaactcagtttcgcacaagcatccaggcccaaacccaggtcctcagaagctcaataaaaacggaccacatgaataatatgtagataaaaccctcggtttaaaaacgttgtgcagggcccagtagggccggcaaggccgcgacgcgggcacgttggggtcaccagcagcgggaaacacgcgggacgcccggtccccgccggcggacccttcccggctcggttaccgcggaggattcagaggagagtcacctgaaggctgctgctgcggttgctgccgtcctcctcctgcacccctagcaccgggatgttcgttccagcaccgatctccaaagcggcaccggccttgaaggaagaattgacaaatggccattgcgacggcgtcgctgacggagggcgtcttcagtctgcaccgttcgatgcctgttactgggcagagagccctaaggcaacctcggcgcccggccgggctactgtgacgtcatcttctcgcgcctgggaaggcctttttccgcctctcacccggcagtgccatgagacgcatggacttgagccaataggacttgagaagagcggaccgctctgacgctttgagtgtgtcctgggaaggagggatgnatcccgggaattccggacc

SEQ ID NO: 450171 - DNA, 919 bp, Homo Sapiens
  misc_feature (61)..(61): n is a, c, g, or t
gggcttttaaccgccggtcgcgccggcccgcatcaactctcccgctatatgcactacactntactagctgagacgcttatggatcaggccacatcgggcgagctcgaattcgtcgagagcggtgggaatggccatttgtcaattcttccttcaaggccggtgccgctttggagatcggtgctggaacgaacatcccggtgctaggggtgctggaggaggacggcagcaaccgcagcagcagccttcaggtaataatagacgtggatggaatacaactagccagagatattccaatgtcatccagccatccagtttctccaaatccacaccatgggggggcagcagagatcaagaaaagccatatttcagttcttttgattctggagcttcaactaacaggaaggaaggctttggattgtctgagaacccatttgcttcacttagtcctgatgagcagaaagatgaaaagaaacttctggaaggaattgtaaaagatatggaggtttgggaatcatcagggcagtggatgttttctgtttattcaccaggtgaaaaagaaacctaagtatttcaggttttacagacatttcaccagaggaattgaggcttgaataccataacttcttaaccagcaataacttacagagttatctaaattctgtccaacgtttaataaatcaatggaggaacagggtaaatgaactgaaaagtctaaatatatcaactaaagtagctttgctctctgatgtaaaggatggagtacatcaagcagcacctgcatttggatttggcagcagtcaagcagcaacatttatgtgggcaggctttccagtcaataacagcagcagtgatcatgctcagaactttaggttttagaacaaactctggatttggtgctgctcttctggaagccctgttg

SEQ ID NO: 450172 - DNA, 845 bp, Homo Sapiens
  misc_feature (651)..(651): n is a, c, g, or t
  misc_feature (682)..(682): n is a, c, g, or t
ctgggtgacctagaggttacgaaatggaacgaacatcccggtgctataggtgcaggaggaggacggcagcaaccgcagcagcagccttcaggtaataatagacgtggatggaatacaactagccagagatattccaatgtcatccagccatccagtttctccaaatccacaccatgggggggcagcagagatcaagaaaagccatatttcagttcttttgattctggagcttcaactaacaggaaggaaggctttggattgtctgagaacccatttgcttcacttagtcctgatgagcagaaagatgaaaagaaacttctggaaggaattgtaaaagatatggaggtttgggaatcatcagggcagtggatgttttctgtttattcaccagtgaaaaagaaacctaatatttcaggtaactgaaaaattgtgcatttttaaagtatgttctaaaactattattttctaaaaccaaaagaatgccaaataaagaaatcaactaccaacttagctacaactaggagagtttgggcattgtttaaagtattcgggtattctagccaaacttcataatttagggattaacggttggagaatatagtctatttaagacatatagttcttgggagtaaaactatttaaataaagccncaggaagagactctacgttcgttgtttgccntgtatgtacaactgttggaacctcttagcttcctgttgtgaatagaagagtcatcctgcctgtcattaaggccttggctgcctggttctgttctttcttgcctgtctttccttctaagaatagtagtgttgagacctgttcgttccatttcgtacactctaga

SEQ ID NO: 450173 - DNA, 1294 bp, Homo Sapiens
cttcaatgtttattattttcgtattttttcacttaatactacataaaatctaagatctcagctcttggaatacagaaaaatagtttcaaagtgtattttagcaaaacaatttataatgaaattagcatttgtgaattaagcatgtcaacattactgtgttgcttgttaggcacactgcttatttgtacagctttatcagtcagttccatcatttcaatattttggcccaccacaccactttgaaacatgtaatgaagggcaagttttataataaaaaagacaacttggcattactcaacgggaagtcagtacatgttttttgcaaggagaacaacataactgtttaatgatgctgtcttcaatatacgtacctaattctgtttatgcaacttctcaccaggtaattgttttttatggtcagttttgcttttctttgtccccctagtcaagggagagtttgttagtgttgttatctggaaatttccttcatgtcgaataaaaccaactagattgactcataatataggtgttttctctagtaccatttacacagaagacaaaggtccccaagacattatggcagatcattaaaactttcacagatatagataccaaagaggcataagcttttacaaaagtaaaaaagatgtgcctgtctatatacatatgcgcgcacacacacacgcacacaaaattaggtccacaaggtatgagaggttgtttttagagatactggtttctggatccaactgaatgagaaatatcaactagatattgtttaaatatcaactagatccagcaacttaggatctacctggaataattcgttggtgggaaaattctagggctcaggcagcacagaattagggggaaatgagaagcctccaaaagagagtttccaaagttaggtgaagtctgaggagtcaacaggtgattctagaactaaagcaaatgaaagtgcaaccaacaaatcacagtaaggggctagaggcatgacaatcgaatgaattctcagctgattcctgagacaggaaagggaaagaagagatactcaagcattagaccatggactaagaattgcagctctgaccaaactgtcctgcaggaacctttcagacaggcagaactaataagtgtgccatccctacaaccctgaacatttctctttccttgatgaagcagagaatagtctcatccctaaaaacagaaagtcctgtggaaagatgcaagttcaacaggagatgtactgtcttagacagacttctttgttaggatgtgattttctgatttgcgc

SEQ ID NO: 450174 - DNA, 1182 bp, Homo Sapiens
  misc_feature (338)..(365): n is a, c, g, or t
ctgggggcgagggtcttcggaacgtagcgctggctgcggccccgcccgcctacccacccgcccgtccggcagccggctcccgccgcctccgcgctctgtctggggccagccacctggcgggccgctccggtgcgcctgcccgcgcttttcactgacaggcgctgttccccacagccagcgccgcccgccacgtcccagctctcggccaacggagctgcgcggcgggtgacctttccgagcccagcgcgatgacggctccttgctcccagccggcgcagcttcctggacgccgccagctcgggctggtgccgttcccgccgacgacgccgcggacgccnnnnnnnnnnnnnnnnnnnnnnnnnnnngccgccgtggcgccggcgcgcggctgggagagcggagacctggagttgtttgacttagtggagcgaggtgcagctcaacttctaccagttcctcggggtgcagcaggatgcatcatctgcagacatcagaaaagcatatcgtaagctttcactaactttacatccagacaagaataaagactgacaatgcagaaactcagtttagacacattggtggccatttatgaagttttaacacggctgatgaacgaaggcagaggtatgatgcatattcctgatcaatggacttccagattggcgacagcctgtattctactacaggcgggtgacgaaccaatgagcaatgctgagctggcattactcttgttcattattctcacagtgggtcattcatgctgtggatttggtcaatctacctggaaaaaaccaactggatgaactactaagtagaaacaacagagagaaacagaaacacaaagactggcagcaagagtgtggatgtatcaaaactcggtgcttcagaaaaaaatgaaagattgctgatgaaaccacagtggcatgatttgcttccatgcaaactggggatttggttttgccttacactaaaagcattacctcacctcatccaggatgctgggcagttttatgctaaatatcaagaaacaagattgacaggaccaaggaagatgcactgactagaactgaacttgaaacacttcaaaaacagaagaaagtttaaaaaccaaaacctgaattccctgtatacacacctttagaaacttacattatattccagtcttatgatcatggaacttcc

SEQ ID NO: 450175 - DNA, 1002 bp, Homo Sapiens
  misc_feature (416)..(427): n is a, c, g, or t
cgttttgtttgtcatatcactcgggacgcattttgccggcgccatacgctggcgtggtggcgcaccactgtcgcctcggtaggtattatcttccgcggggagttagttcgggtgggggcgtcgggccagttgtgccggccgccgagagtgtgtggggtttcctgctagcgggccgcaggtgcggcgagtttttctgtcctcgcgtcgcgtgtgtgtagaaggcgcggcgcgcgctctgtcgttcgtgatattgatagtgtgccgctctgtgttggggggccccgtcttgtcttaggacgaaagtgggtgcgtgtgcgatcgaattgtggcgcccgctccggcgggaggaatatattttctggtggcccgccgccccgttcttgtttgtgtggctaggatggaggggttgtgtctgnnnnnnnnnnnncggcttttaaagcatttaataagtcaaaatcaaataaaagtgatttttaaaaagaataaatttacatatggtacataagcaagacagctgaagggtttctaaaatagaaacctggtgcatatggccccaaaacaccacatgctttgattacactcaggaagcatgagttgcctatttgggtgagaaaatcccatgttacagtgcgatcactgggcacgttttggagtaattccagccactgctatgtaagtgtttttaattcaggggtgtcttctacgttttcatcttctgaatatcttgtgacggtgcaggtttgagcaaaactggcatgaaatgagagctgttttagatgaagattgcaagatggatggcttggcccacagtggcagtgggttgggggtggaatgtggacaattaggaaaaaggcatgtcattctatctggctcctggagaggcagatagtcctgggggctttggtgtcacagttcccaaagcaggttggccagaccataggcttacattgtggtgagcttgccttttaaattaattctccagatgccaggtcgagagggatg

SEQ ID NO: 450176 - DNA, 445 bp, Homo Sapiens
  misc_feature (403)..(403): n is a, c, g, or t
  misc_feature (422)..(422): n is a, c, g, or t
ggcttttaaagcatttaataagtcaaaatcaaataaaagtgatttttaaaaagaataaatttacatatggtacataagcaagacagctgaaggtttctaaaatagaaacctggtgcatatggccccaaaacaccacatgctttgattacactcaggaagcatgagttgcctatttgggtgagaaaatcccatgttacagtgcgatcactgggcacgttttgggagtaattccagccactgctatgtaagtgtttttaattcaggggtgtcttctacgttttcatcttctgaatatcttgtgacgggtgcaggtttgaggcaaaactgggcatggaaatgaggagctgttttaggatggaaggattgccaagatgggatgggcttgggcccacagtgggcagtngggttggggggtgggattnttgggacatttaggggaaaaggg

SEQ ID NO: 450177 - DNA, 1017 bp, Homo Sapiens
  misc_feature (72)..(119): n is a, c, g, or t
ggggggagactccaagacagcagctccgaggtcggcgggggtcagggtggccatggaggagccccctgtgcnnnnnnnnnnnnnnnnnnnnnnnnnnnnnnnnnnnnnnnnnnnnnnnnttgggcccgagggggcgctgggcaagagccccttccagctgaccgccgaggacgtgtatgacatctcctacctgttgggccgcgagcttatggccctgggcagcgacccccgggtgacgcagctgcagttcaaagtcgtccgcgtcctggagatgctggaggcgctggtgaatgagggcagcctggcgctggaggagctgaagatggagagggaccacctcaggaaggaggtggaggggctgcggagacagagccctccggccagcggggaggtgaacctggggcccaacaaaatggtggttgacctgacagatcccaacccgaccccgcttcactctgcaggagctcaagggatgtgctgcaggaacgcaacaaactcaagtcgcagctcctggtggtgcaggaagagctgcagtggtacaagagtggcctgattccaaccaaggagaaagggccccaggagagaacgaaggagacacacacgattgctggtgggttcacttagttgcccaaagaactgcctggcagtgaaccccagggacgggagcaacgaaccactccttcatcaaaagggccttgtcctcttctccggatccgggggaaaacaagaaccttagaatcccaaggggcacctaacgttaaaggggctaatggggctccctgtgacttcccttacgaaaggaacacaaacgcctttccgaaagacatgtgcccctgggcctaaaatcccacaccgcttccccggagtgtgccacacacccagataacaccacacttatagtggcgccttgtgtgctcttttcatgtgcccccccttttccagagcgcgacatgttgagcacgtgctcagcgaaacacaccacatgtctccccccttggggcatctcactttgtcccc

SEQ ID NO: 450178 - DNA, 1559 bp, Homo Sapiens
  misc_feature (1236)..(1248): n is a, c, g, or t
ggagatctggattcgtaaattagggttatatgttaacacgtttggcactaggtacacccatacatgaagtgctattcagcaacgcctaaaagtttcatataaaggggatatttcttggatccgacacctaattgtggataatattaatcccaaatatgggtgaaagtagcacattccctgggggttgatttagtattacctattaagaatttatttggaagagtggccacaccctgtgtttgaaagtactttaagacgaacagtctgtaaattggacccttgaatatgactcaaaggaagcttaaaggccccttagtggatgcttggcattatttgccaaataattgaacatgaatcttccctcaagtagatagcacatggtagtatttaaatatacggttaagcgcttaaatagtgcttcagaggggtagacttttactctaatacgcctgcaggacgagcttcacctcgcttccctttacagctaagcatgtgcctgagttggcaagtgcagcagcattcctctggccctacctctccagagcaactcctgccatgtgagtgtttagtattcagcaggcaaatgctgtaagccaaggggcttcaagcttgcttggatttaaaatcaaggtctaattctaatgggaaaacacctagtaaagcatccccaaagtacacctgaagataccatctattccatctaatgtgatcatttgagctgcgtgcttcatcaacttagtattgcattggtataccaacaacaaacgcgtgttgcagcaacttctgtcacagggatgattgtgctttgaggaggagcatagctctctcgtaaggtagaggcagggttacttaaggaaaacacgttctggccactcgagccagtgtttggagtgttcagagccaacactcgatcacctgtgttcactactcatctgcttgaccttgggttaagtttctaaagtaaagcttcctatagtaaacatgtttgttaggttgtgctttttccaagagtggctaacaatgcaatatgcagctctctctatgtaaacacacagttagcttgttaagaaatatgttcccaatgttggcctttcaaatattcttaatgcaaatagtaggaaatgattattaaagatgatttgcttcactataaattcagttgctttacaactgagaccaagtaatattctaattatttaggtccaatagttttttgagacatatttctttgtatcnnnnnnnnnnnnnaaccccacaatgaagccttaagtctaccacactggcccggttaaggtagcttaagttggtatctttatcggtatcttcagttgctcacttacgtgaaggctacattgcctgattaaggtgtgaaatgaacactcttcttcctttttgcctttgagcgcattggcgtatcttgagagtagtgggatggagcatcagaaagatagacttctacgtcatcaggcacttcttccaagaagtttgagggcacaaggcctttctgcccattcagctccccataataaaatcctcgtgccgaattcgccacccaggcc

SEQ ID NO: 450179 - DNA, 887 bp, Homo Sapiens
gtggaccggtccggaattttcggattgaggacaggcctggctgtgttcccagcatggtgtctgttgcaggtggccggactgtgccatgctgctccagacccaaggtggcagctctcactgcggggaccctgctacttctgacagccatcggggcggcatcctgggccattgtggctgttctcctcaggagtgaccaggagccgctgtacccagtgcaggtcagctctgcggacgctcggctcatggtctttgacaagacggaagggacgtggcggctgctgtgctcctcgcgctccaacgccagggtagccggactcagctgcgaggagatgggcttcctcagggcactgacccactccgagctggacgtgcgaacggcgggcgccaatggcacgtcgggcttcttctgtgtggacgaggggaggctgccccacacccagaggctgctggaggtcatctccgtgtgtgattgccccagaggccgtttcttggccgccatctgccaagactgtggccgcaggaagctgcccgtggaccgcatcgtgggaggccgggacaccagcttgggccggtggccgtggcaagtcagccttcgctatgatggagcacacctctgtgggggatccctgctctccggggactgggtgctgacagccgcccactgcttcccggagcggaaccgggtcctgtcccgatggcgagtgtttgccggtgccgtggcccaggcctctccccacggtctgcagctgggggtgcaggctgtggtctaccacgggggctatcttccctttcgggaccccaacagcgaggagaacagcaacgatattgccctggtccacctctccagtccctgccctcacagaatacatccagcctgtgtgcctcca

SEQ ID NO: 450180 - DNA, 1116 bp, Homo Sapiens
  misc_feature (165)..(205): n is a, c, g, or t
  misc_feature (252)..(265): n is a, c, g, or t
cggcgcgtattttgtgagggggttaagggggggcggtacggaggggagtgtggcgtatagggtttggagaatagcgatggggggtaattgggattgtgaaaggagaaacgggggaagcgggggatagtgggcgacaagcgcaagaacacggggggagtggctacnnnnnnnnnnnnnnnnnnnnnnnnnnnnnnnnnnnnnnnnncctgttggtatacgcgaatccgagacaccctccagactgacggaacnnnnnnnnnnnnnncttgtaaccgggggcaacgggcaaacccttggccatcggggacagggacccgtttccgctccgggaagcagtgggcggctgtcagcacccagtccccgggagagcagggatcccccacagaggtgtgctccatcatagcgaaggctgacttgccacggccaccggcccaagctggtgtcccggcctcccacgatgcggtccacgggcagcttcctgcggccacagtctgtgggacaagggtcagcagggggcggcgacaggggactggagcccaggtccccagagcccaggcttggccctgccctagggggtctgaaagtacatggccccatcctggggagcttgaggggacgtggcctccccaagggcctaaaggagagggttctgagttttaggatctcaccttggcagatggcggccaagaaacggcctctggggcaatcacacacggagatgacctccagcagcctctgggtgtggggcagcctcccctcgtccacacagaagaagcccgacgtgccattggcgcccgccgttcgcacgtccagctcggagtgggtcagtgccctgaggaagcccatctcctcgcagctgagtccggctaccctggcgttggagcgcgaggagcacagcagccgccacgtcccttccgtcttgtcaaagaccatgagccgagcgtccgcagagctgacctgcactgggtacagcggctcctggtcactcctgaggagaacagccacaatggcccaggatgccgccccgatggctgtcagaagtagcagggtccccgcagtgagagctgccaccttggatctggagcagcatggcacagatcccgagaattccggacc

SEQ ID NO: 450181 - DNA, 446 bp, Homo Sapiens
gcgagtgagtgagcgagccagtctttcttctgaaaccatgtgcgatgtccgcctccctactagctgcagccggagaccaagacggccaccaccaccagggggaaccaaggtcagccgagatgaacacgggtggcctgctggacccttccccggcagccctcggcccgacccctcttcccgcgacgtctccggcgctcgtgttctacgaagacgattaccggtactactacgatgacgacagttgcctccaggaggaccaggagggcgaccacgacgcctatcaactcctagaggacgaggacgaagacgtcgccgccaccgggtcgcttgctgacaggctacgtgatctcgtccgtcagaggctggccgaggttaacgcctccagcgcggtcgtcgcggggctcggcctcgtcgggagcgccgtcggcgcctacttcctctggccc

SEQ ID NO: 450182 - DNA, 1530 bp, Homo Sapiens
taatgaaccttgtttgcactttacctggctggggcccggggggggcaaaagggaatggttgtagaaaaggtttttggaagggaccgaggacgggcagaaagggggaaggaaaggggaaaagggtgggtggggtgttaggcattttgtacacaaatgtttatttctcaattaaacattccctttaaacacaaggaatgagttctaaatcttcataaagatgaattaaaaatgaaatccctccagtatagtgtatataatcactgtgttcttggtcactactggcatttactgtttaacatcaaaaacaaagacaggttatttaaaaatcatgctactggatttctagctcttcctctatgaccagttctacactgatctgcaatgtttaaaagtttacatcaccaaatcaaagcaagtttaaggtgtgaagtagctgtgcattaaacacaaaataaacaataaaattataagatatagtcaagttcataacgaatataggtgttcttatcatcgttgtagattcttgggtaatgtgctatgagagcgtcctgggaaccaatgtagatggagttgtaaattttccaatatacatctctgactttccgggctgggtgaaacagaccctgtaaacaatattgcaacattctacatggtccaatagcaactctcaggccctctagggctcccataactgcctgaattacatgaggagatgtctcaaacacattgggccatacatagttcaacaagtgattcagcgaatcttcacaaccaaatccataaaccccaagtgacatgtgctgtaccactgcactagccgtctgtctgtgtacaaggtctctatccattaaagcatcttcaagtaacggtgttacggcataaatgtagtcttttcccatttcaccaatatattcaaacaagaaggaaagcgattttaacactccattttgaacattcagttcaggaactctgtattcattcattaaggcagggagtactgtaaagggtgaacatgtttctgcaacaatagctattgctacagtggtacaaactctgttctgcctttcttgaactttgaggttgttcagaagtgtagccaatacatcatgagggccaatggcctttgcaatataaccaaatgtgttgactgtggctctacgaatagcctttttgtgggcttttaagagctctaaaagctcaaagcaaatcctcatccactctcttgcagatacatattcagctcccctgtcagcaatacgaccaacaagatcaatacaattctcttgtactttttcatgtctgttctttaagatgggggtgagtctaggcagcagatctttaattggtggagtcatcttatgcatacctatgacatttacaatggccttcagtgctccaagaatgctgcccaatacttcagggtactcttcacccaaatactcatacaatacaacacccaagtgtcccatcaatttttcctcttgacaagtcttcatgacaacagcagttcgagaaatcagtcagctgcct

SEQ ID NO: 450183 - DNA, 616 bp, Homo Sapiens
cacactggaggaagtcaagtttatcttattggagtgaattgggcatgtagaataaaatccagcattcactcagcacacagccccactgaccctattgttcatccccctccaatttattgttgtatttcccagctgcccacagagcttcccctgcaatattgtggacacccaggcaaatgaaaatgccaatcttctcccatccctgtcttgctgtattaggcatgtgctcagctctgaaagatttctttgggggtcttgcctttccctaagaacatctaggggaaggtttgtctcacctcttgtttccaagtgggagggttgagaataatagctcttgtcacttccctttgccttgttatggggaatatttagtgctgcagcctgggtgtgggggcaatatcttggatgtgataatgttgcttcctgcatcagtgaacatggtattgattgtaagctgtcaacctttctgcatgcttttcagggtcccagaaggctaactactgcagggaaggtaatgcatcaggcagggacacatatgctctattaactaacactgcaatctaagcttgatcacttgcttttaacacatcttggctcactggctcccaattttttc

SEQ ID NO: 450184 - DNA, 601 bp, Homo Sapiens
  misc_feature (14)..(14): n is a, c, g, or t
  misc_feature (169)..(279): n is a, c, g, or t
acttagtgtggttncatataggagcttctccatagccggctatgaggcactaaaatgaggaaatatggtttccaaacttcgcaaatacttatagtccagccacaggggatatactgataaactcagctcaaatgtcacctcctcagagatgctttctcaaccacccttnnnnnnnnnnnnnnnnnnnnnnnnnnnnnnnnnnnnnnnnnnnnnnnnnnnnnnnnnnnnnnnnnnnnnnnnnnnnnnnnnnnnnnnnnnnnnnnnnnnnnnnnnnnnnnnaaatgtgtaaggaagtcaggcacagcacttgcccacaggaagcttataagatgagcggcatgccattgggagtttgaatgatatatggagatccaaacagggcatcagaggactgctcagaggagtcagggaattaagaaaaaattgggagccagtgagccaagatgtgttaaaagcaagtgatcaagcttagattgcagtgttagttaatagagcatatgtgtccctgcctgatgcattaccttccctgagctgattttatcagtatatcccctgtggctggactataagtatttgcgaagtttggaaaccatatcctcat

SEQ ID NO: 450185 - DNA, 872 bp, Homo Sapiens
tctgcttctgtgatggcctcatgtggtgtccctgtcgtccgcgtgctgtggtgccctttcctggctactttgatgtgttgacatcctcccttcttctcttacgctggcgttagctccccatcgttccgatgtgctgttccctcgtggcccttagtggttggaggtgagggtggagggactgttggggcgttggtatttggcgtgataggggttgtgggggccgtgctgcgacgccctgacggccgcccggtgccgcccgcctatcccctttgcaagtcggctcagacctccgggccgccgaaggccaggttgtcgcgcaccattagcgtcttgcggaggtcgcggtccaccagggggcgctgcatgcgccacttgtgcgcctcctgcaggcccggctcgaagtagtagatgcaggcgccgaagcccaccagaatgaggaccgagatgaccaagtagaccggcacgaaccagtccaggaagtgcggcatcgcggcggccttggctcacgccctgcagatgccagttccgggggctctgtgctgagcacaccgcctcagcctgagcagctcagcgttggcccgtggactcattcgcagctgctgtccccagagacactgccatctgcggccgccctgggtgcactcactgtaaaagcagtcaattggcagggcctgctggtgtgcagcggtagtcccagctactcaggaggctgaagcaggagggctgcttgaggccaggagtttacgacccacctgggcaacatggccagatccccatggtggcactcgcctgtagttccagctactcaggaggccctctgccgaattcgccacccaggcctcgctaccttaaaaccgcgatagttactggcc

SEQ ID NO: 450186 - DNA, 756 bp, Homo Sapiens
tgggtctcccatgcccgctgaggccaagcgcccccggcagggcccacatcaggtccacctttcgacggttctgctgtgactgaccccattcccagtgggcttggcctggtgaggcaatggtggcccactgacagccacaggtcagggccatgctaaggggaatgtcagcatcggacagcctccctcccaaggcagccacccaaccacatgcggtcgagttaggaagggccctggtcacccctctaagcctgcagctcactgctggcccctccctgtcaaatggctaaaggagatgagctggggctgggggtgccctggtgattcctagggggaaggggtgagcctgcgcatcccttctgagaaagcgggagtcacagccctgaggttttgagtggagacacgcatggagattcttggccctgtctgctggtgcgcatccctttctgcacacaggagtccaccgtgcgtgagcgttaggtacagccctctgtccctcctgccctctctgcaccttcccacccctccttcactctcagatacatgtgagaaacagccctgctctgtcagcctagatggggctcatccccagcctcctgcccacaagctccatggagtcatctctgctctcatagacagggtggctcactccaggtctttgcccagagtaaaagctcactcctgcctccccgaaaccctctttctggagactcccagtcagcgccccaaggcctagcctccttaggagagggctgcagc

SEQ ID NO: 450187 - DNA, 1309 bp, Homo Sapiens
ggaatttcccgtaggtaacactgggatgtctttcccaggacaccaaagcaaaatattggagtcatgaaagcagaaccatttttccatccacagcatttcggatgtagacacagtaatgaccggagtctgccattcccacgtgcgcaatcacagcaaaaagctcatactgccctccagactgctcctcagcatcacaagactctcgcttcattggaaggatctggctgaaatccaagctctggggggaagtacagggagtggcagatctttctcgtctgtgaattcctgatggagaatcgccatgaggtggattggtcagggtctggggcaaattggtcaggtttcaggaccctgtttcccgcgggtcttcttcccacagttctcacagaagcacttgcttttgcttgataactccctgggctggaagaagcagtgcagggcgtcctccagtgtcttccaggggctttgagtccacatcaaaaagagaaagtgggagggtgagcatgctgctgtttctgctactctccatggcacagtcaacgcaaatcaaggagtccttcacccggatcatatacagggcctgcagtctctccaccaagtgcacatcagtgatctggtccttaatcaggttccagagtttgaggtacagttgggcagcatcatgttggacaaacaagggcacgttgcacttctgcaggcagtaggccagctccaggggccgcactgctttctgccggctgtcctgcatcttctccagcagcagaagcatctggaaagggacgcttctcctctgctcgtcagctcccctgggcaccgtgatcctcttcaatatcctggtgaagtccacattcattacgaacacctgaatcaaggagttaaggcagcaggtctgtccaatgttgtgtaaaccaaccaggccatgagggtagtcccaggccctgggacgctctctgggctgctctctcttcatgttgctgtcttcttccttcttttcttcaagatctgccggggactgcgaggactcagccaggatggactgacagatttgcctcaggagcccaaacgccttgctcattcgtgatcactccaaaacccccaggccgcagctgcctggcccgcgttcaggacagcacgacttcacttccaggaagcgcttatgtgagccaggcacgatggaatctctcaagcgccatgcaagcgtccagcctccgctgctgagttccacgtcgggactgagccggggaccgagctgggaccgaagttccgctccgggcccgccttggtctggccccgcgctcgcagcaccccg

SEQ ID NO: 450188 - DNA, 1033 bp, Homo Sapiens
ggttcaccccaccccaaatttgggggccctttccttgtgggcccaagggagatttcgcccccattggagggctcgaagacccccccgggaaggaggaatggctttctcatttggggaggaccaggggggatgttcgttccaggcaacggcaagaggcggggccccagggcggtcgaatggtgaaggcccgcggtaagtaggggccacccaaggcccaagtgggtttcccttgcagccaccaggagtcgccaggtgtcggagggtccctcaggctgggtgaccatgctctgcaggtctgtcaggtcgtgaaagcccaggtccaggggagacgaggttgggccagtgattagcggtgacgtagagactttccaaggggcctagaagtttgttgtggcctaaccccaagtgctgcaggccggcgggtgggtgggcacacagacactccatgctgctgatctcattgccgtagagctccagcaccttgagtgtggggggcagattggtggcatccacctccttgattcgattggcgctcagtaccaactcctccagctttagaaatttcaggaggtctttatccaccagggtgaccttcttgtctattacccgcagggaccggaagtaggagtagaagaaggtgtctgtgatcgtcagcgggttccggatggccaattctctcaggaaactgtcttctgcattcgagttgttcagcagagcccagggggagtggcggctgcggaccaggcccagcagggcctccaccgtctcctctccggggctcaccacatcctcctctctggggacaagctccctccaagttcgccaagtttgaggaagaaagcgcgacttattccagctgccggcaccgcacgggaactcgcgcagacacagcttccgcaagtgctcgcgcacggccgcgctcacggtcccggtcccgggccgctgagtcccaggcccggcctcagactcggactcggactcggactcgtacgacgcctccatggcccgggccgcgttgcccggtaaccccgct

SEQ ID NO: 450189 - DNA, 932 bp, Homo Sapiens
  misc_feature (30)..(30): n is a, c, g, or t
cttgaatcaaaagccacaggaggtagaccncaaatactctggtttcccataactcatacaaagctggcaaaggaggagggaaattcagaagactgggatctttctgtttacacatcaacagcaacaggaagaggaacacaggcaggccaaacatgatgagaaacacaccaggtactcctccaaactccaagtcctttgcccggatgggggtcacttcaaaggttctcactgccagttcttttgcaacgtatttttcttccttagaatctatttcttttaatttgacttcttctcttcttggacgaaggctatactgtgttgctatgtaactgctttcttgtgacaaattgaattttgtcctgtgtatttttatgaggtgcgtcatttctcgtcaatagtgctcaggctccccattatatctgctgatgctatgttccagatgggcttcagaatcagcggagtcaatttaacttccacttccctccttgcttccttaatgtcggcctggtgggaagcagaagcagatcggcgggcacttttaggtgctcgaccgggggatcgggagcgtgaccttgatcgactccctcggcgtctggaaggggaactggaagttgagccacctttcctttgcctaaaggaagttaaaggcttaatatcattctctttcaattcaagctctgttccatctttatactttacagtgtaaagctgggaggtgctgtcgtggctcagaatttctacttcataataaagtgaactcccaggccatcgacctcttaccacttcaccatcggcgaaatttcctaccattggcactttatcgtataaagaacctgcgccaggtgtccggcggtgacacaggacggctaccacggagaatagtcgcacagcaagcccggcaggatccttaacatcccagaccgtacagcctg

SEQ ID NO: 450190 - DNA, 802 bp, Homo Sapiens
cggtcacacacggctggcgtctccccatcgggcgccccgcgatgccacgccaggcaggagttcctgctgcagtccccgccacgcgctgggctcctacaggggccctcccgggcttgcagcccctcggggataaccagctcagggttctgagaagaggtgtggccgcacggctcccgcacgaggggtctggtcccggcgctgtgccgggtccccgggccggggctcaccccgaggctgcagccccgggagcccccgcctgggggagtcgtcctaccgcccgccgctccacgcaggtcccccttttgagtggggcggctcccagctcggtcctcttcgaggggcctcggctcctcgggcctcttctcccgggccccggaggcaccctgggcatcggccttggggagtcctccctgcccagccttctgggctggagcctccatcctggggcgcagagttctggttgtaggattcctgccctccgtttctcagtggcaggccgacactccgggtcctcctggctccattcactgccattgtccatgtcttctgagaggtgtgaggtgagactcacctgacagctgagagcctggccgggagatccacgctgcagaggccaatgctggacttcccctcccctcttcaaccaggtaacggtggtgctctcaaggctggcagcctcattctctggaggcggcccgcacgggtcacctggtccccgccccgcatgcagcgcggagccgtcctcccgccacctccgggccgccgcggcactgagggtcccgggccacagcaagcgcaggcg

SEQ ID NO: 450191 - DNA, 705 bp, Homo Sapiens
tggcaggagggctgctggttcctgaggatggggtgatggggttggcgatgaggccattggcattgatggcagccatgtgctgcatctgcacggcagccatggtggccatggggctgaggtaggcactgtgagccgctaccaggctcgcctgctgctgcatcagggcctgggtgtaggcgctgtaggctccaaactggagggcgatggggctgaacatgcccaactgggtggccacctgctgcatgcggcggagacctcgctccttctcagtgtcagcaaacttcaccaccaggctggacgaggcacctggcagggtccggctgctgtgaagggtgttgatggccgcctgggcctcagcgtgggtctggaacttcacgaaggcgcagcctttgctggtgccatctggcccccggagcacagtgcactcgtcgatggtcccgaagggctcaaacatcttccggacgtcctcatctgtctgctgcttccctagcatccccacaaagagcttccggtcttctgggtggtagggcacaggaggagggcatgttcagggcctcctggctgccttcccagcccttcttccgcccttccctggagctcctaacactacttctgctacccttagggtccaatggctgtaggggctgatggttggggaatggggtatagttgcagagggtgctcatcccagctctgagggactcg

SEQ ID NO: 450192 - DNA, 1002 bp, Homo Sapiens
gcaactccaaaacaccaaacttgagtgtttccagcgagccacatgacatcagtgtttcagcatccacaaagactgttgggcattctgagcacagcatcatcacttccaaggaactgtttaaatttggtaccaatgcgttgcagactatcaccaagaaagctgactgcctcagttagttatttctccggaagctttctgtgtgaattgtctgaaacagcctagaaaacacatgaaaagtaaacactgcagaggacccgtcggtgtcagacagcatctgattgacgtggcagcgccaggcttcctcttcatcatcatattccacgggctgaaaggcggctatgatggcagaaagaaatggtgacggcagaggcgacgtctgtacttctggaaaaccatcttgctcttcttcatcttgactagacagtccggagaaatccgcttcttcttcttcacatctttcatctagctctttcagagctaaggtaacatcctcttcacagactgactcggggtaactttcaggagctagaggctctggcatttcagtttcttctaaatcaagaattccttgacacacaagagattcctgctgttcttgaattatataggatccttcatcttcaaaggttgtaacatgttcctcctttaatactggaagttgtatcctcgaggcagccggctgttagcattatctagagaagcctccaaagttggggtctcatccctgatttgaagcacttcctctgttgcgatgctgccagtggaatcttcagactggagaagtaagtcaggatggtctggtattgtttcatcagtggcagaatcactgtttaacatctgtgtgcgtgagagtatctggcttgctgtaagtgccgcttcttcttccgaggactcatctgtatcctcctgattggtgaggttcaggctgggggtgttactagagcactggtactcctggagggaaggagtgtgcccacgaagggggatgacataagtcctgta

SEQ ID NO: 450193 - DNA, 718 bp, Homo Sapiens
caccccggcggctttaatcatgacaggatagccaattctcctggcgtgttccttcaggcactggtctgattggtcctcaccatgataaccctccacaacaggtagctccagcagcagccattatggatttggatgtgctcttgtatacccatgtctctaattgcagatggaggagggcctataaagaataattccttcttgcttacaaagttcagcaaattccatgttttctgaaagaaaaccgcatcctggatggatagcctgtgcagcagaggtcttggccacttgaatgattttctccatagataggtagctctgctgggagggagcggggccgatggaatatgcttcatctgccatatctacatgcatggaatttctgtcagcctcactataaaccgccacagtctgtacacccagttttttggctgtgcgcatcaccctgcaggcaatttctcctctgtttgcaatgaggaccttggtaatgtttcttcctgtggctgttgtgtacttcatggttctttgcctccacacccatgtcctcggcggcaggagcaggctcgggagacgatgccaccggttcctctccgccgccaccagcagcaccgacaccgcagaggccgccgccatgtccctggagcccggcccctccgtgactccccagtacagaggcagctgcgtcccacacgccaacccgttcctccactacgaagcctcg

SEQ ID NO: 450194 - DNA, 996 bp, Homo Sapiens
  misc_feature (161)..(161): n is a, c, g, or t
  misc_feature (911)..(947): n is a, c, g, or t
ccagcccaccagctacaggcatgaggactcgcggccggagcggcagcctggaaaaataaaagggccatgggtaaatagccccccccggggtttcacagatctttctgcagtgggtgttagctcccgcctacatttctatacgacagattccttcgtgatcncagtctagggttcgaaatgtcaatgctttcccgttcctgatgataaggattatcaggattgaaggcttgtgagtcctcttgaacactgggtctggtttcattattcagtcttccagcgcctgggttgctccgtggtccactgtgtggtctttttgtggtagttggaacaatttttcttaccacttctcttctttccctctggatttcttttggataggttggtttaagccagaaaataggaaggtcaccgcagagttctaacaccttagaactcaagaagctgttgtccttcacaggctgatctacagccacccagataagagaattttcttcatatttgactggcatgatcttgccttccagtttggaggagatgctctgtttggtcacggcgcccacctcaggaatacgagccttcacttgcgctttaatgtagcacttctctcctccagcaaaacgaattcctgtgatgccattctggaaatcattaactgcaattgcttcttcagctccacttcccattttaaaggtctccaagttgttcccagcgtctatttccattgacccatcttgtaatttcccattgatactcatggtgtaatggacattgtaaatgtgactgtcgctccccttccagaagtagaaggccccgatggccccaaagagcagcagcacagctcccgaaatgaggaccacggctccccccttccgctgctcgacgaattcgagctcggccgatttggcctgatnnnnnnnnnnnnnnnnnnnnnnnnnnnnnnnnnnnnncgccgccccgcggtggagctccattcgccctatatgatctatacattcc

SEQ ID NO: 450195 - DNA, 692 bp, Homo Sapiens
tgttccacaaagcatcaagcttaacgctcaagcactatacatacctgtccttcatggaaaaatctgacagatacccatatgtccacaattaaatcagttacgtagattataatgccaagaactgacatcataaaattctgtttagtatatttcattacgaatgactatagcttttcgttatctacttttttctccctcacaaaaagggaaaaaaagccaacatatattagtataccctttggtatagcattgaattttaatttctactccctaaatctatttagaagaaagaataaatattatgaaatgggaacactaaccactaaagtgactaattttgacttttcttttctaaatctctaatctaggtccaatgttacaagggctttaatcaatcttctgtttcacaatgatcttcattacagatgacaagacttgtcaaatataaaaagccatctttgactcaaagtcccttctggaaaaatcttcatcttgtgaatattttacttcttcttcactgtctcccaaatcacaagactcttccagattaaaatgtctctcgcccacttggatccactcgcctgtctaggacacaaacccgtgaggcaccagcccccgtgacagaggcacgattccagcttcgcctcacgccacctcacgcctcgcgccagccttcccaccactgcccgcgc

SEQ ID NO: 450196 - DNA, 761 bp, Homo Sapiens
  misc_feature (742)..(742): n is a, c, g, or t
gtttcattaactcacaaagccttttggacattaatatttattattttgttttgtatacacattacccagcatctctttgtataagagactttaggaaaatgagtttctccccagcaagtagccatattccagagaacagccttgaccagagatgtggagaaccaggggtataactaagggaagacatgtcaagcccttaagcaaattcttcttctccagatgtctctagcataataaacccagggaacactttaggccatgggtgtatgttctataaagttcgggacagttaaattccaggcctttcatcccccttccttcctgtgatggagtagattggggacagggttgaggggaacaagtgacatgaatgacctatttgcacagtttggaagcctcctgtctttatttatattgagatgtcagacaaaccaaagctccatccttgttggacctgctgcttctccccagccctgaactgataaagcctcagagttggagtgcctggctctctggtggggtgaccattagatgaagggacttgtacagtggccagtttaaaggtccacctttgaccatctaaacccaccttgttcagtgtcctctgaggacatcctcatcaggaaagcagtgttgagactcttcattgctgactgggcttctccctttcttactcacactgaccattaggaatttaagaaggaaatgtgtaacagactacagtcaagtgtctgctacattntcaagcatgagcaatccct

SEQ ID NO: 450197 - DNA, 1228 bp, Homo Sapiens
tctacgggaacatggggcctttaggttttctcatggggttccctggagattaatgcctgattgcagtgatgatgcacgtcctcctggggccagtcccacgggggtgcgccatgtacatcgctggtgcgtgagcggaatacacgggcatgaatgcagcttggtcgcttgtcttcacacaggcatagcgtggtgctcacagaggcccccacccatcctccagtggccagcctgaggagaccagaggcctcgcaccccctaggcactgagatccagccacaatgtgtgcgagacaccagcgtctgtcccctgcgaagctggggcacaggagtagcctgggcgtccccagcaggcatgtagcagaaggcccgaggagcctgcacagccagctcctggaaccgtacaaacttctgtcgtccctcatcccactggtagatctgggtgaaggagaaatcactgcccagtgccaggtagcggcggccacccacaaggaagggctgcagggccagcgagccccgggagggcagggcctgcacctccgagaagcgggtaccctcccagcgcaggatcttggagtcgccaatgtagcggctgaggcacaggtagctgtcgcggccggcacgaaagtgtttcacagcttgggcatcaggcacctgggtcacctcaccctgggccacaaactgcttctgggtgcgactccactgatagatgacgggtgcctgggagctgctggacacaatcagccgtggcttgccctcgccagtccacaaactccaggtcggtgtcacggtgccaggggtgcagtgcctggtgggagtagaagccattctggtaccagcggtagaggctggtggcgcctgccttggagctgtcagccacggcaaagtaccagtcaccgtcgatgcggaaggcttctaggtcgttaggcttgcgcacgcgctgcagggtcaatgtcttgcagcctggtgaagcgcgtggtgttgggatcccagtggtaaatgtaagagccgccaaacagctggcgccacgaccacgtacagctggctgtccaccaccatcggcttgcagtgcactgcagagggggctgggattctatcatagtctcgaagctgccgctcaacatagtcccacttcaggatggtgcaggcactgactcctggctgggccagagccaaatagaggtcactggagtagaggaagggctcagccgacactgctgggaaggccaggg

SEQ ID NO: 450198 - DNA, 1104 bp, Homo Sapiens
  misc_feature (58)..(58): n is a, c, g, or t
  misc_feature (60)..(69): n is a, c, g, or t
taagggtattacttgaccagtggtttcttttaaaggtatcaaaagatgtcctaaaaanannnnnnnnnnaaacccttctttggaattctctccgaatttccagaaagattattctggcaattcattccttccacccccatcaaaatttttcctttgaaaaatttacaactggcaactcacataagatttaatcaacttacttaaataagggaggggcttctcaataatgtttccccactagtttactaagaaattcagtgatactcagtgccagtaattaagtggtacatatcataaccattcatacttggacgcaggtgcgtcacacccagaaaagattttatacatttataagcttgtgctttcacactttataagcaacacaggttagtttccacttcagttttcatttttagtgagtaccgtgcatgttgcatgagggacggtcatcaaacagtctctcttacgcagacttcagtgtttcgtcagagccgaaaaagaaacagccttctctttttctctatgaagattctctccactttgggaaaacaatcttctatgcaatgaaggtcttgtggaactatgtaaacaaatcatacaactgaatagaattttagaggtcaatcaggaactagaagaaaaccatggtgtggatgagcccagcagttcccttccccacaacgtctgcctccaggtgacccttcaacagcacacaggcagcacgaacttcacactcagcaatctgctcttcctatttccccctttcaaacaggagacttatttttctctgtaataaagcaagtagtatttcaggggatctggcagagggaggctcaggaccttctggcgtaggaagttcactggggggtctggctttgtttccggcggggtcttctcttcttcttccctccgttcctcttccaagtcttcacagctgttgtcatctgaggggttggaaatccgactggcaaagatttctttgtccacaaagacaatcgtttccattcgacggcggcgagctctccttcgatcccgggaattccggaccgtgcccaacgaataaggaaaggtgggcccgcgcggcgtccatccggctggtcggcg

SEQ ID NO: 450199 - DNA, 530 bp, Homo Sapiens
  misc_feature (450)..(450): n is a, c, g, or t
gggcaggacgcgcgctgcagactctgctaacaccagatagtggaaagaaaccatgtgctgaaatgtttgacgacactgatggtttgcatttcttctgaggccctgaagaagtatcaagtgggctttgacattgcggtggtgagagcgacccctcctcacctggagaactgggaaatgtggattctcagggaccgcgctgttcacgagctccaggctgtgctgctggccctggtcctggggcgctgagccgcatctgcaatagcacacttgcccggccacctgctgccgtgagcctttgctgctgaagcccctggggtcgcctctacctgatgaggatgtgcacccccattagggggactgctcatggcccttgcaagtgatgtttgggacagcgatggcatttgcgcccataccccggatcacctgggagcacagagaggtgcacctggntgcagtttcatgagccagacatctacaactactcagccttgctgctgagcgaggacaaggacaactagtacataggtgac

SEQ ID NO: 450200 - DNA, 918 bp, Homo Sapiens
  misc_feature (619)..(619): n is a, c, g, or t
agagcccttgaaacccctgcagtcaggacagacgtcccaggcgagcagaggccctgcgtgaggatggggcggcggggccagatggtgtcctgagtatccatcctccctggtggctgaggacacgctgaccagcgtggggtcaggagcatggcccctggaaagcaaagatttctgaagacgtctttctagaaatgactggaaagtttcaagaggcataagatacagcatttcttctgaggccctgaagaagtatcaattgggctttgacattgcggtggtgagagcgacccctcctcacctggagaactgggaaatgtggattctcagggaccgcgctgttcacgagctccaggctgtgctgctggccctggtcctggggcgctgagccgcatctgcaatagcacacttgcccggccacctgctgccgtgagcctttgctgctgaagcccctgtggtcgcctctacctgatgaggatgtgcacccccattagggggctgctcatggcccttgcagtgatgtttgggacagcgatggcatttgcacccataccccggatcacctgggagcacagagaggtgcacctggtgcagtttcatgagccagacatctacaactacntcagccttgctgctgagcgaaggacaaggacaccttgtacataggtgcccgggaggcggtcttcgctgtggaacgcactcaacatctccgagaagcagcatgaggtgtattggaagggtctcagaaagacaaggaaaacgcaaatggtgcagaaaacaggggagaccaaacacgaacagagtggctcaactacatccaggggggcggcaggcaatcaagaggccgatacggatacgtgagtggggaccaaggcatccaagcgggcctggtgacacccgaacataacatcttaaatacgg

SEQ ID NO: 450201 - DNA, 777 bp, Homo Sapiens
ctcataaacaaaggtttttgctacaatgattggttaagatttgctcccgttttgtaagccaacatctagggcacataatctaagttgtctgtcttctttctctctctgcttccccctccaactgttctttccctcttactttttcaaatatagctaattgggggatgaagtggtggacacaggcacagggggcctagaagaagaagatttcgctatgtatctgggtgttgtgggttggttgtattctgtctccctgcccctcacgaaattcatatattgacgcattaatctttaatagttcagaatgtgatggtatttggagataaggtctttaaagaggtaatcaagttaaaattaggttattagggtgttcctttttccaatatgactactgtccttataagaagaggaaatttggaaacaaatacagagggaagacgtgagaagacacagagagaatatggccaatggcaagccaaagggaaagtcctggaacagattcttcctcaaggccctcaggaaccaatcctgctgacatcttggtcttggatggttagcctccagagcacattaaaaacatttcatcttttgcagcactgactttaccactctttatgctgttgacttgcaggcatcagtgtctattggtggatatcaattttagtccatatggtcaaagataggtgatagattgttttaaaatcctttctggctctttgtgtccatctgtcatatggagtcaggactagaaaatcgcccaggatccttgcagtccac

SEQ ID NO: 450202 - DNA, 1286 bp, Homo Sapiens
agcggagagtgcgcgacgcttttggcgacccgacctctggctaacctacccccggagccatggcctctgctggggtggcagccgggcgacaggcggaggatgtattgccgccaacgtccgaccagccgctgcctgacaccaagccgctgccgcctcctcagccgccgccggtccctgcgcctcaaccgcagcagtcgccggcgccacggcctcagtcacctgcccgcgcgagggaggaagagaactactcctttttacctttggttcacaacatcatcaaatgcatggacaaggacagcccggaggtccaccaggacctgaacgccctcaaaagcaagttccaggagatgcgcaagctcatcagcaccatgcccggcatccacctgagccccgaacagcagcagcagcagctgcagagcctccgggagcaagtcaggaccaagaatgagcttctgcaaaagtacaagagcctctgcatgttcgaaatccccaaggagtagagtgaggctgacttccttagaaagagggggaagccaatggcctgtctccccactaccatccccaaacgctccttggggcgtggttcctgtggaccccagctcagctcgtcaagctgcaggggcggggctcctgtgctgctgcgcgcgcttcgcctgtgcgggagccagcgcagagcttggctgcgccgggggttcctcgtgtagatccatatgtctagatgcataataactggagtgcctgctggtggaagtcagaatgctcctggaggctgcagagggggtggaggactctcccctgcctcttggggaaggggccatctgctgcgcccgggcccactgacagatctgaagagcacagtaggaagggagtgcgggtccccattcttatgcattcccgttccccatcttcttctccatcgcacaggccacaataaggattcaagagttgtacccaagtgttacaccatttgttacctgtataagcaatgcaacgcgttcatttgaacaccaattgtcgccatatagcaactactacctagcgacctacacattaaatgtccatgccagctctaatattgtgcacatttgcacaattcggtgtacgacagacaatggatctatacaacgggccgcagaagaggggtgtgaccattattatcgccactagaaacagtgtatgggagtcccacttgtaataggttgatgagttccaccgtaaaaggcgaaaacctcacgatatgacgcgggcattaatcacgttaatagctcctatttaaggcctacccc

SEQ ID NO: 450203 - DNA, 864 bp, Homo Sapiens
  misc_feature (528)..(528): n is a, c, g, or t
  misc_feature (531)..(531): n is a, c, g, or t
ttcggggatacccaaaaattgtgccgggtctgtgtgggaaagtctttcttacaaaccaggggcgtttcacaggcattaccaaggggttacctcccagtgagtgggtttttgggtggtggttctggttcccggccaggaatccccaggacctctgggaattctgtttcccaaaatagggccctttggtagaaaaatggtaccccattccatgtccgtgctataacttggaggccccccccatgagctttaacactccaaagggaatggtgtggattaagaggggagctgttagaccaacggcccccaagtcttctcaaaaaacgctttgatgtgtggaaaaaggggggacgagttttcccacggcttcatgctttgttccacatttgggcccctgcggggcctagttacacgtgtctaagaaacccataaaagacagttcgacggggattgacaagggcaaccgcaagttcgcatagacagcgctttatccacttgttgatctaaggatggttttgttccgagtgcctnggnatcaggccagaaccagatcagtttttattggttgtagttcaattaggcatgttaaggtccccctgggttagggagatttcagccgtgagtgtgcagtgtgtgcatgcacactcgggggatatctcattgggatgcagagaggtgagagcagctcttcagaagcgctggcaaaagaagaatgtgtattgaaaccatgacgggttagaagctcctaactccacttccagggctgccttcagaaatcctttctcttgaccatggccatcaacacaagggcgctgaccagcacagcatacagggtggccttccctagcaggatctcatagaggatcc

SEQ ID NO: 450204 - DNA, 854 bp, Homo Sapiens
caacacacaattttttattcggtttagcctatttcgtacttgggggttgggagctcaatcttcagggaaacagaataaagagagaagtattcatgtaagtaggagatgagaagcagagtgagaatcacttttaggaacacagattgggagcaggtacaggagaatcctgggtgaggatgaagaatgacctgggatggttttggagctagcctctggaatcctttttcttgaccatggccatcagcacgatggcactgaccagcacggcatacaaggtggccttccctagcaagatctcatagaggatggtggcagacaggaccccttgctggtaggactcggaggtgaagccacagtctgctctaccccaggcctcggcgctgacgatctgggtgacgggtttggccctatcctgggtccactcgtcattctccgagagcccgtagaactggacttgacagcggaagtggttgcgggggttctgccagaaggtggccgagaccctcaggcggctgctcaggcagtatctggagtcattgagggcgggctgctccttgaggggctgcgggtctgtgctgaccccactgtgcacctccttcccattcacccaccagctcagctccacgtggtcggggtagaagcctgtggccaggcataccagtgtggccttttgggtgtgggagatctctgcttctgatggctcaaacacagcgacctcgggtgggaacacgtttttcaggtcctcgagcactgtcagccgggtgcctgggccaaaatactgcgtatctgtgctcacagcctggaggcccaggacaaaaaccggtgctgcccgctctgctgtcccagactccccc

SEQ ID NO: 450205 - DNA, 133 bp, Homo Sapiens
ccatcagtagcagcggcagccgcacatcagcagcttgctctgttccatccggcagcaatggcggccaccaccaccatggcgctctcctcccccgcgatcaagctcgccggagcctcctacgccctcggcggcg

SEQ ID NO: 450206 - DNA, 1318 bp, Homo Sapiens
ccaatccagaccagtcaagcctcacaggttggaagggcctccctggactctcactcccttctcttcctttagcttcttctggaagagagtcccaaatcatctccaatccagtaaacttgcccccctgcatagaagggagggcatctttttattctgagcctctggatcacagtccccttccctgtctcagacattcccctctatgacttggatccatccatggagaacccttggatcccaatcccaaaggcaagatgcagggaagccagaagatcttctccacacccgcactgggcgtgggtgggctgcctggggcagggcaagcagaagcactgagtgaagaggaggcaggaggatggcaggcgagtgccttgaagcagacatgaggtagtcacgttgttagagaaggatgcagagtttgaacccaggcaggagaacaagatgacatagtctgggagaggtgtgagagatagcagaggaaggaaaacacggagagaggaaaggaaagagtatctgggagcaggagaagggcactggtgctgggagagcgaggtgactgggagacagaacactagagcagccaggggcaaggaaggaggggaagagtgagagaaagcggattttcaaaaccaggcacttcccagattacaaaattaaatgcagagttgctcggaggggagccagggccaccctctctatttgggcaataaggagctgggaggtgatgcagctgaaatgccaggcattcagagcctgcttgcacccaacccagccagacaggagaatgggctgggactgtctttgtcagacaggcattggagacactctcagagtgtgtaataaaaggctgggcgatggaggtgggggcccacagggctggggactgaccactgtgggggcaccgttctgacctggaggaccaatcaggctgtagtgcccactgcctggccacggtttcccagctcaacataccagtacgcatacatgcacttcacacatgtgcacatcacatgtagctatgtctcgtatgtctttcacatgtcacatgtgtatcacaaagagtatggggggagtgaataatccatgttttcctctcaaaacagccaaagcaacttaggaagctccgaagggcttgatgatgtatctacaggccacacatgtgaacatacacggccacaggtatcgcatcctatgtgatccatacctgcctgccccaaaccacatccctctgggaagagctaggcagaaggaggcagccgctctcgacgaattcgagctcggccgaggccctgatccgataacttcgtataatgtattg

SEQ ID NO: 450207 - DNA, 437 bp, Homo Sapiens
  misc_feature (25)..(25): n is a, c, g, or t
  misc_feature (32)..(32): n is a, c, g, or t
aaagggctgggaactgtctttgtcnaaaacangcaatggaagaaaactctcaagaatgtgtaaaaaaaggctgggcgatggaggtgggggcccacagggctggggactgaaccactgtggggcaccgttctgacctggaggaccaatcaggctgtagtgaccactgcctgggccacggtttcccagctcaacaaccagtacgcatacatgcacttcacacatgtgcacatcacatgtagctatgtctcgtatgtctttcacatgtcacatgtgtatcacaaagagtatggggggagtgaataatccatgttttcctctcccctcagccaaagcaacttaggaagctccaaagggcttgatgatgtatctacaggcacacatgtggacatacacggccacaggtatcgcatcctatgtgatccatacctgcctgcccc

SEQ ID NO: 450208 - DNA, 832 bp, Homo Sapiens
tccccatgtcgcagatatattgtccacacttcatgtgatgaggcaaatgaactatttctttgtatcattgggttcttgtttgctttctcgtgctgtttctgctttggactgtaggaatttaaaacactgttggttaagcacctctacaaattcagattcaaaatcctggtcactgtaccaggctccaccagtcacagaccggtctggctgcaggttatagagcatatacaccttcttttttgaggctgctacagacttaacagctttgataagctttttactttccagattcttcagaattttgttgatttctgttaatggcaaattacttttatagcggatatctctgctccatattcctttatttcctgcatcctctatgatttgatatactagtttttcttggttatcggatcccttcattttaccagcattctgagagtcctttattctatataaaaggcccgtattgctccttaagagatccaactgacccatagacaacaacctattgatggctactgcccgctgctgggcttctatatgaggcatttcattctgaattacttggtctgtgattccatgagggaactggtgacataattctataatcctgttttctatttcgaccggatccgcgtcaggcggctgcaccttcaccttcacctccgccatgagggcgcagttcctgacgcctggggggaaagatgcacggagcagcccggtagcaagccggggaacccgggtaaccagtggaggatagcgctctgctgaggccgaggggccttcttcccgctctcgacgaattcgagctcggccgatttggcctgat

SEQ ID NO: 450209 - DNA, 1146 bp, Homo Sapiens
  misc_feature (160)..(160): n is a, c, g, or t
  misc_feature (313)..(322): n is a, c, g, or t
caaccagggtacaaaagaatggtttaaaagaaaatgaggaatgttcctttccccttttaaggggagttttaaatttattggaattccaaagcccccaaggggatagaagttttacaaatgtaaatggaggaaaaaaattttccacatgtcccaaaatagnccaggtaagtggttatttgaaatagcattgctgaaatctttttaaaaaggaaaaaatgagaaacattctaaatactcatcaatacagaacaaacgtgaataaaggataagaaaaacatttctatttctctgtgggcttcagggcaaatagagnnnnnnnnnncctttagattaattccagattagctgacaataaggagataataaagttctctccctgatttacacaaactcccttaaagacagcaccctgattggaataatgatcataatcatcggtaccttgaacagccgttaggataaaggagatgaaatatagagtgcatttgcttacagtggttcagtgcatgttactttccttctcttcagctcacctgtcccaaggccaacacttgagcttctgcctgagcccactcaccacttcagggattagctaactcctgtggtcctacacccagatctcttggcataaagtgcaggatttcacctcttctgtcttcctcatcacccagaggggttgtggagtgggggacctgtggggccacaatatcaggggagtggaatctgaccatttctcaagccctggaagcccatcttctaaaagggaaggtgctcagggttctttagggagggtgagggatggaacctcattccaatcctgccacttacctgggggggtgacttaggctctgtgagcctgagcttagtcatctgtgaaatgggactgaccataccatctttacagagctgttctgaagggtaaatgagaaaacctcttgagagtatatagcatggagtgggacttcaattgccctttaaatgctgagacatagaagtgggggttggctgagcctcacggctaaggcaggcattgtgaaaagtcatttttcattgtttctctcctaatgagaacacagacatccatataagggaagtaaatctctctctgatatgttttgaattcaaggttttaaagacagaatgttc

SEQ ID NO: 450210 - DNA, 798 bp, Homo Sapiens
agggcagcgatgcggagttgggttggagcagtgtgtgggtggatgtatgggtgtagcagcgttgtgatgtgggagtgagaggggccgtgacgagttgaggatgcgttgggttgagtgggatttattaatgataatgatagtagtgaggaaggaagtgcgcgagagctggggcacgcgtgttggtgagtttgcgaagagggtggctggtacgttctggttgtgcgtgtgttagagaggaggagctggtcatgctggtttttagtagaggacgggagtgggggtatctcgttctcgtgaggaaagtgcgtggggagagagtgggaattaggtcggagtttgcagagctgatgaagttggacacacctttctttaaatgctagactattgctaggaagcgaatgaagtcaagcatcagaaagaagatgtatgagaaatgcatgaaagtcagagaaaagggatgtagtggaattagctgctaatctttcccccctatattcaaagaccatccaaaactggtctttcatacagatataaaatgactataaagagagggaatttgaaaccatacccatctggaatccttcagtgatgcttttgtaatagttctgattctcttgccgataaggtcaaagttaaagatgtaggaagtggaagggaatgaagacgtttagttttaaatgtacaagtaaggcacatataagccacattataatctgtcatgaaggatataggaaaggacaagaatcatacatggtacagtagaacaagcaattatattgactggaaaagtgtgcaccc

SEQ ID NO: 450211 - DNA, 1286 bp, Homo Sapiens
ccccggaacaacacaaccttccatttccaggtacggggttctgagcagggccaggagaccattccaccgggttgtcagcaatattgaaaatgggaccaaaccagagggagttttccacagttcccggtttcctcaccagcagaagccagagcccgcggcagtgcccaagtggttttcatcacgtctatgagctttgcaatcgctttgcagtcgcctcacttcctggtctccctctgctgcttctcactgcaccggcatctcccatgtttgcactggctgtcccctctgcctggaatgctctttgcccagttatcccactgtcttctttgcatctggcacacagtagatgctcaataaatgcctgtggaatgaatgagtggggaggatgcagtgcagggggcagatgagggctaggcggtttgccctgggccctcacactcgtagcggagctaggctgggacacccagggtgggggaccagacctccccgggtgggaatgacaggatgtccatggaggctgagtgtgaaagcaccacggtctcacccctgtcctgttccatcccaacaggctgtggtgaggagagggggaggcaggggaagcgggaggcctggcctccaggcagcaggctatagccacatgagtgaccaccagcagctcaggtaactgagcacatgtcacgggtaggcctgggaagcgcaggtctcagctgaatgacctgggtggaaatccgactccagagccgtggtgggtcacaccatgcagaatgaaccagtgatggagaaggaaccacagtcctcaggaagagtgagggtgcacctccagacagcccatgtgagggcaaccgcagaaagtctgaaaagaggtgaaccccacctttggtgtcacatgtgcagtgtggtgtgacagggaggggctcgctgggcttcagccccggcactctccacttgacctcagcagctccaggtagagtggggagaactcagcgtctccttctagaacaggttccaggatccatcacccagacactcactgcaccggagtgagcgcgaccatcatgtccatgctcgtggtctttctcttgctgtggggtgaggcctcctggggtctgggtccctggggcgggagggggcgggaacaggagccttacgggggctgtctccgcaggtgtcacgtgtggcgcggatgtccggggtgtgaaggcagcgggcgcagctcggcggcgccggaggagccctctgcgcccaggaacaagacagggaagatgaatcccgggaattccggaccg

SEQ ID NO: 450212 - DNA, 927 bp, Homo Sapiens
agcggagccctagcagctcgcgatgtgcttcagcagagcagacgctgcggataactacccttttggaacatgtcaacagaggaaactttttcctcacttccatcccccgaatttgattgggaacaagtttgtccctcttaggggatcaccccacagagggcctgggtgttatttttcagatggatatggcttggcatacgacttatctaagatcccaaccagtataaaaggatatactttgggagccagaacagctgtgaggtttaagccaatacagaaggaaatgacacctcatgcaggcaggtaccagaaagtaagtcctcagcaggaaaaacacaaacaaaattttgctccatttaatgtcttggtgcctcgatttaagaactacccaaaggacacttactatcccagccctggtgcatacaacccagagaagaagccaccgccaaaaattgcctggccaatgaaatttggatctccagactgggctcaggttccatgtctacagaaaagaaccctaaaagctgagctgtccacagacaaagactttagaaagcatcggaaccgtgtggcctacctaagcctgtattataattgagcggctgtaactaccttcacgtgctcctcttatacacagactctccaggactgaggacagagctgctcttcttcttctacgttactgtggccctcttgtctggcagcctggagcccagggagggacaggggcttatagctgctgtatgagaacataaagactagtgcacagtgctatctccatctaccgacttgtggtgtacacgtgcatgtctggggtctgtgggtttctgttgggtgctgagttgggtgatttcattttaggtgaacatatttgtgggcccctgttctctagttctaattcccaggagccaatttatatattctacc

SEQ ID NO: 450213 - DNA, 479 bp, Homo Sapiens
  misc_feature (11)..(11): n is a, c, g, or t
agccaatacanaaggaaatgacacctcatgcaggcaggtaccagaaagtaagtcctcggcaggaaaaacacaaacaaaattttgctccatttaatgtcttggtgcctcgatttaagaactacccaaaggacacttactatcccagccttggtgcatctggccaatgaaatttggatctccagactgggctcaggttccatgtctacagaaaagaaccctaaaagctgagctgtccacagacaaagactttagaaagcatcggaaccgtgtggcctacctaagcctgtattataattgagcggctgtaactaccttcacgtgctcctcttatacacagactctccaggactgaggacagagctgctcttcttcttctacgttactgtggccctcttgtctggcagcctggagcccagggagggacaggggcttatagctgctgtatgagaacataaagactagtgcacagtgctatctcc

SEQ ID NO: 450214 - DNA, 826 bp, Homo Sapiens
  misc_feature (312)..(312): n is a, c, g, or t
gcgcgcagccgcgcagcggtgggaggactgcggggctcttgaggccagctgcagagcttgtggaggccatggggcgcgtcgtcgcggagctcgtctcctcgctgctggggttgtggctgttgctgtgcaggctgcggatgccccgagggcgccgagctgcgtgctccgccagataaaatcgcgattattggagccggaattggtggcacttcagcagcctattacctgcggcagaaatttgggaaagatgtgaagatagacctgtttgaaagagaagaggtcgggggccgcctggctaccatgatggtgcangggcaagaatacgaggcaggaggttctgtcatccatcctttaaatctgcacatgaaacgttttgtcaaagacctgggtctctctgctgttcaggcctctggtggcctactggggatatataatggagagactctggtatttgaggagagcaactggttcataattaacgtgattaaattagtttggcgctatggatttcaattcctccgtatgcacatgtgggtagaggacgtgttagacaagttcatgaggatctaccgctaccagtctcatgactatgccttcagtagtgtcgaaaaattacttcatgctctaggaggagatgacttccttggaatgcttaatcgaacacttcttgaaaccttgcaaaaggccggcttttctgagaagttcctcaatgaacatgattgctcctgttatgagggtcaattatggccaaagcacggacatcaatgcctttgtgtgggcggtgtccactgtcctgttctgattctggcctttggcgcagtagcag

SEQ ID NO: 450215 - DNA, 1189 bp, Homo Sapiens
  misc_feature (968)..(968): n is a, c, g, or t
  misc_feature (1028)..(1028): n is a, c, g, or t
  misc_feature (1109)..(1109): n is a, c, g, or t
  misc_feature (1126)..(1126): n is a, c, g, or t
  misc_feature (1144)..(1144): n is a, c, g, or t
tgcttgcttatttgcagacccggcctcctgggtgctccccagtgacccatctttccaccccaccacctccaagtcctgtctatgtctgcttccacacagccctgtccccagggcaccagccttctgtccctcacagcagtgccatcgcgggcattaggagtcttcgttatgttgtatccttgtgagttcttgactaccatgcccaagtttcccccactggcaatggttcctctcttggaggtacagtggaaaccagagagatgacagatgttgagtcctcagtgtctcagaggcagcaattcttgctggacacctgcacatgctcagcacagaggctggtacttcggaggcactaaccacttgatgagtaaatcaatggcataaagccccattccaagttatggggtcttttgacaggcccctttcatcctctttctctttgtataaacctcatgtttcagaacaaaattacagtctaagttcatttgcccccagccttgcccaaggatccccgggctgtgctgacccctaggcatagggcaaacgggctgttcccaagcagcaggcacctcagtgccctcagttatccagggcaaggggcctggctgcccctgctcctccccatgatgcaggggctttctaagccaggctgcacacagggcagggttggcttcttggcccattccctctgtgcccccttctccttctgactggctctcaccctggagatccccagaggatctgaccagagccaggtggactgtggccctgagatggagctggctgcaggcttacaagcacctctggggacatccagaggggagggtcagtaagcacaacggagctagggagacttcagatggactcaaacccagagcaataatactctcacaccaccccacagctaaggcactcatgttccccagtagatcaagccagaagctttgcaagaagggagtggaacgagngctgcctatccaaggtccatctaccacgcagaacttggtcatgcaagtacatttggaaantctggtcttggcccgtcccccattggcctggtctacacagccaaaaattcagattagattagatgttttgcaggcattctnttaggcaaagcaatttnccttaccccgttcctttncccttagaagttgccttaggcttcctgattgggtttggtttttgg

SEQ ID NO: 450216 - DNA, 857 bp, Homo Sapiens
tttaatctacgacagggtttttatatgtttttaggtatgaatcacaattgaaaaagttggcttttgacccaaggctacttcaattatcttctaacaagtcgaccaattctgaaacgtgaagaatggaataggtgaaattcatcaaatgttatgtcatcttttcttttcttggcccatctataatattatgtaaagtaaggttaaaaagagagaaaggcatagaggcgggagagagcaagattcccaatgaaattcatacactgtccatggaggaggctctctgttccctttctttccaagtggaacacgtgactcaaatcaggaaggaagtttggcaaatggaagatgagaatacttgagccttccattcttgaagaactcaggcatgtggtaataaaacccaagccagacatgcagattttcaagaagtcaaaggatgttctagccttttaaaaatgttagcagttttcaaaatcacctgaacatccaagtaggatccacccaggagagatctttaatggagtgaccctcacactctataaaactgacaggggcaacgaattgaacctgacttaacaaaacacatcctggtattcataagtctctgttaggaagtccgtggaggtaggtgggagccggaagttagggctcagctggaaaataaattaggactggccacaaatgcaaccatttctgcattacccatgaataaatattaggaaatggaagtcctaagaatgactcttaaactgaatcctcactgaaaatgtaacacaagcaaatgattctctttacttccttaaactaattctcttatatacatttaaaacatttgttcaaaattgctgtacatacaa

SEQ ID NO: 450217 - DNA, 957 bp, Homo Sapiens
  misc_feature (26)..(26): n is a, c, g, or t
acgtgccctcatgaaaagactccccnggcacaggtatgggttcccaaaggggtaaaaatacagtttaaaaaccgtgaagatcccagcctcgcctcttctagacagcccaccgcccaggaatctctggaatactgggattcaaacacatttgtttgctgtagcccagcacccagacaagagggccgttcatcccaatgcatgaaaggagtctgcttttttaaaaaagaaatattttatggagcccaagggagccgttgagatctttaggaaaaaacccatgatgctggaagagcaggtcctgggctaaggatgcaccctgaaccccaacagggcaaatgataaaggaaggtggcaggcaggccctcggctacgacagccaccggatcgggaagaacaaacatgccacgcaagaaacaaggagctttggtcaggcaggaagatctgtttccagctgctggagagcaggcataccagaagctagaaggattctctacaaaacagctggattgggggtcacagaactactcaaggagaggcagcagcaccccctccagagaacaacacaacttggttctttctccaacttaaccggacagacaaaactgagcaaaccgctagtgtagaaagagcatatgcattacacagttgccgtgaaagcagtactgaaacataccttgtctcgccactaaacagaaccgcaggtacacactcacacacgccaactacagctccagttgttgcgttcacaatatctcaccgtacaccatcagcatcttgtgtgtgcatcatcagccaaagccccgatcctcctacctgattgctgcttggaaccagagctgtttccaaaaggaaggggtggtggccctcctgctgggtcctgtgtcccagctctgaccccagagccacagaaccctggtcacactgacttcaaattccccagggatcctggctcatgag

SEQ ID NO: 450218 - DNA, 968 bp, Homo Sapiens
  misc_feature (189)..(189): n is a, c, g, or t
cctactcaagggaggcctcagctccctcccttcctgggtgggaccacagctgagccagagactctttggttagaaactaagattggtctgaatgaggaggaggatgaggcagcgctgtatcctctgggagctggggctgtcactgggcgcgggggtgaagacatcgtcggttcctggggacggagtctnccttgctccgcatcatgatgcccccatcgtcgtcctcgtcctcctcagccacctttgcaggatcccggctcaaccctaagactttgcccttcagctcctcattcaccaggtccacagactcgggtgactgcggggaagccgggtcgatggtgatgacaggcaggtcctccttcggctcataggccagtgggtctgagccgatgcgggcccgagacatggtgggtgagtccagcttgtgggctggcaccgtcaggtagttgttgatcttctgctccagctgccgggccttctgcctccggagcagcatctggttccaggcttcctcgtaggggtctgccaccagcgtgtgtctgttgtaggaccgcagccgctgcctggtcttctgcaagttgttcctcaggattttgcggatctcctcctccttgtccttggacagtgctggcaggatgcgctcggaaggcagggacttggggtggatgttctgcatggagacggtggagacggcagaggggatcttgcccatgcccccgctctccaccagctcgatggcctgcttcatctccatcttgtggtagaaggcaatgagctggggctccttggagcgctcgccagctatcagacacttcttcacatatttcttattaaaccggttgagcttgtccttccagtggtggtgaccgtagtggccacagatgtcttcgatgcctgtcagaaggtggtccaggaactgaaaggggcccagggccaagtcaagcctcgctgtggggcgccttccctac

SEQ ID NO: 450219 - DNA, 1146 bp, Homo Sapiens
tttgggaaccaaccagttaaggagccccaccccggccagagaaacccgtggggaaggggttggaccagccaggcccccaattgagggaggggttaatttgggaattttaaggaggggatttagaaggcagagccctcgttcaccccaaggggttttccaaaaattttttaaaaaccaggaggcgccctctggtgcaacccatccttatataggagtggggaccaaccaaaacttaaaaagggcagcaacattctggagccacggccagtccttcccctagcagcttcccctgaggggcccagtggtccccgtgggagcacagttcgaaaagctctgagtcacgtcactgtcaccgtagaaaccacccctgctccaggcagagacactcagagatgccctcagcccgcagctctgagtaaggacaggttgggtggtggccagggtgacagagctggcaggaggagtgtgagaccttggtgggtcagcagtccctcccccagccatgtgcctggtaccccttggtttgtcccctgataaagcagggcctactcaagggaggcctcagctccctcccttcctgggtgggaccacagctgagccagagactctttggttagaaactaagattggtctgaatgaggaggaggatgaggcagagggaggagcctccgaggccctagtccaggtccgggagaagcctggatctagggaggggcagggccggcctcaccagccccagcagttctgccaaatggattggggaggcagctctggtggggaggatgcttcccgggaggcggcaggggaggagctgtgctggggtgggggctgtgggcccagctgccatgcggtagggggaggggcagggccaatccgggtcaggaagggcaaggggagcccccagcagcccctgctctggtggaagagtctgtgaggggacaggcgctgcctgctggccctggcgttactgccccttggggaagaacggttctccctccccaggctcagggtgtgggcctgggtcactgaggcagcgctgtatcctctgggagctggggctgtcactgggcgcgggggtgaagacatcgtcggttcctggggacgaagtccctcgtgccgaattcgccacccaggcctcgcgtccta

SEQ ID NO: 450220 - DNA, 1085 bp, Homo Sapiens
  misc_feature (97)..(97): n is a, c, g, or t
  misc_feature (734)..(826): n is a, c, g, or t
ccaagtatggaaggcccagtcccagcagtttgcccattacatgacgtgagggcctctccccagggattgcttgaacatcctcttgaggtctaccttnctctttgcagtagggacacgtttgctcttttcccacgatgcaccagccacggatgcagaactcgtggaagacatgattgcaggacagcctatacgtgttctcaatgatcccctcttcactgacgtccacaaagatctgctgcccacacacagcacacacactgtctgaaagatgttttggtaggcatgcccgactcgctgtagaatcctatggtagatgccaatgtaagtctgcacacatttctgcaaagtcccgttccagaactccatagtagaggccatagaagagaagggagatgccaaagtccatggcatcttctggtttgatcttgaataataagttaagaccaaagagggtaaacatgacagccatgtagccaacaatgccagtggcatagctgattttatagattagcaggaaccacttataaaccaaccttggggttgtctgtactagaggttttcgggtggctcggaaggtaacaaaggctgtgacagcagagaacaagatccagatcactaggaacctccaccagtgcagcttcactgtgaaatagaggggaacaacccacatctgaaagagggtcaccattttcttcagaataggttgtaaaaatctgccgggcacggtggctcannnnnnnnnnnnnnnnnnnnnnnnnnnnnnnnnnnnnnnnnnnnnnnnnnnnnnnnnnnnnnnnnnnnnnnnnnnnnnnnnnnnnnnnnnnnnattgtaggagcgtgggtgcctctgcttccactgcaccaggagcagctgggccaccaccaaggttgcgatgaggatgaggaccatttcagcatgcatagcttcatggccacggtgcttggcatgcatgcgtgcgtgctcgaccctccattgctcttctggagagagatctgacatatcaacctcatccagctcccgttccccagcagcaccacctccaacctccacctccaccactgccgccatcttcacggctcgcccc

SEQ ID NO: 450221 - DNA, 1508 bp, Homo Sapiens
  misc_feature (302)..(302): n is a, c, g, or t
  misc_feature (391)..(391): n is a, c, g, or t
atgggccctttttatttcttggggtgagccaccaagccctggccccacgggggggagttatcccatggtgccggaattttttccagttgtccccaaaaccaaaattttcaaaggaaattgggaggccccccaaggcttccccttgttgggcccagtccactggattaagggttcccattggcctccaaccaaccctatagcttctgggacagggggaggccagagttcagacgccaaccacctgtccctgtgtccccagacagtgggggaagggagggacacctggggccctcagtgctcancccgtggcacaggcctgagtacgttagctcttctatactaagtgcaccaggcttgagcccccacacaggggaagaagggagtgggtggnctgaggccttcagctacctgggagcccagcagtgttctcggccagagatgagaaggctcctttaaaccaaaaatgtcatggctctgcccccaccctgcttaggcagggagggtgaagcctggaggggggcaattcctatgctccacaataaaaaaaggttttttaaatatattcatcaaaatagttttcttttaaaaagccccccactgctgacagccccactggctggctctccatcatatccctccccagtccgacacagccggaggggtcctgagtggcccaagcgcccctttgagtctttcccacccaggaggtctttgtgggcagggaggagagtgccctgaggtccatggcgtgtggggtggtttttccactgatgctcttcatcactattccaggcccaggatgtagttgatgccttggactacaccaatgatgacaggctgccaggctaccaagtatcgaagccagtccagcagttgcccatacatgacgtgaggcctctcccagggattgctgaacatcctcttgaggtctaccttctctttgcagtagggacacgtttgcttctttcccacgatgcaccagccacggatgcagaactcgtggaagacatgattgcaggacagcctatacgtgttctcaatgatcccctcttcactgacgtccacaaagatctgctgcccacacacagcacacacactgtctgaaagatgtttggtaggcatgcccgactcgctgtagaaccctatggtagatgccatgtagtctgcacacatttctgcaaagtcccgttccagaactccatagtagaggccatagaagagaagggagatgccaaagtccatggcatcttctggtttgatcattgtaggagcgtgggtgcctctgcttccactgcaccaggagcagctgggccaccaccaaggttgcgatgaggatgaggaccatttcagcatgcatagcttcatggccacggtgcttggcatgcatgcgtgcgtgctcgaccctccattgctcttctggagagagatctgacatatcaacctcatccagctcccgttccccagcagcaccacctccaacctccacctccaccactgccgccatcttc

SEQ ID NO: 450222 - DNA, 1058 bp, Homo Sapiens
cgctgcagcaggcggggcacccggactggcggcttcgctggcgcaaggtcggtccggcggccaggacctggaaggctgcgaggccctgcgaggtcgaggttcggagtttgctggtcccaggcccggcccgaggtaagaaagagccgcctccccgcacggccggaggacccgggcgccccgagttcgacttctcagcctccgtccggacgggaaacggagcacggagatgttcctgaggtctctttcctgggaagcgcagccccgatttcccgcccctgtcccttagcaggtcggcgaccatccgagcgctgggcatcggcccacgcgtacagaaggcgctcaataaatgctcactagtgaatcagtaaaataaatcggcagcaaagagagacgagacgcatgctgatcttcaggtgttggggacatcagggacgcgaacatttattgagctcttattgtataccgcgtcggccagcatttgtgtccatttcacacatgaggaataagaggcccagagaggtgaagtgacttccttaaggccacacagatagtaagtggccgagacgaatttgaaaccaggggtgtcctgtttgaacttggtgccaaatagagtaactcggactccagttggaggggttcgggagaaccatagaagaggaagggccgtgtcttccgtggacaggccaccggagccgccagctgtttggaactgagctactgcagaaagggaagtggagagtaagggccaggccccgtgggggcagatggccggcagaagggctgaatctgcgctgggcaactgagtgtgctttgtgtgctgctaattggcggagacagtgtcctgggactaggggctcgtctacaggaggctcacattagcccccagtttccagcttcaggtgtgaaccagacccccgtggtagactgccgcaaggtgtgtggcctgaatgtctctgaccgctgtgacttcatccggaccaaccctgactgccacagtgatggggggtacctggactacctggaaggcatcttctgccacttccctccaggctcctcct

SEQ ID NO: 450223 - DNA, 969 bp, Homo Sapiens
ggaagagtaggggcccggacgctgcagcaggcggggcacccggactggcggcttcgctggcgcaaggtcggtccggcggccaggacctggaaggctgcgaggccctgcgaggtcgaggttcggagtttgctggtcccaggcccggcccgaggtaagaaagagccgcctccccgcacggccggaggacccgggcgccccgagttcgacttctcagcctccgtccggacgggaaacggagcacggagatgttcctgaggtctctttcctgggaagcgcagccccgatttcccgcccctgtcccttagcaggtctggcgaccatccgagcgctgggcatcggcccacgcgtacagaaggcgctcaataaatgctcactagtgaatcagtaaaataaatcggcagcaaagagagacgagacgcatgctgatcttcaggtgttggggacatcagggacgcgaacatttattgagctcttattgtataccgcgtcggccagcatttgtgtccatttcacacatgaggaataagaggcccagagaggtgaacgtgacttccttaaggccacacagatagtaagtggccgagacgaatttgaaaccacggggtgtcctgctttgaacttggtgccaaatagagtaactcggactccagttggacggggttcgggaggaaccatagaagcaggaagggccgtgtcttccgtgggacaggccaccgggagccgccagctgtttggaactgagctactgcagaaactggccgtgcacgagtaaggggccaggtcccggtggggtgcagattgagccgcgcagcaagggctgaaatctggcgctgggacattggagtgtgctatcgatctgctggctacatggcggagcacacagggtctggggcactaaggggctcgtctacaggaagactcacattagaccccagattacccagctatcaagtttgcacacaaacccag

SEQ ID NO: 450224 - DNA, 1043 bp, Homo Sapiens
cttggcagtgggggcaggaaaaggagatccctctccccgttccccgtgggtaaatccacggggccagaagaatccccgggggcccccatgaaccccatccaaggcccaggtaaacccagagccccatgccagggtgaccctgccacggaaagagcatgaggaaggtcaggaaccacagccccccatgtagaaaacgatgtccctgaagaagggcctggaggcagccatgaaggggtgtaggatggtaatgcctccggccaccactgtggtaaccagcacgccagcgccaaacagtgccccaagggccaggccggctgtgtgcgggtcagagaaggccaccagggcactgaagatgtcaggtgcaccattcccaaatgcccaggaaggtgacgcctgccacgttgtgggagagcttcagtgtggtagaaatggccgacaagttggggcagaaaaacttggctgcggtgactcccagaatcagaaacaggtagagcagcccaggaaacgtagagagtgacagccagagggaggaggctgggagggaagtggcagaagatgccttccaggtagtccaggtaccccccatcactgtggcagtcagggttggtccggatgaagtcacagcggtcagagacattcaggccacacacttgcggcagtctaccacgggggtctggttcacacctgaagctggaaactgggggctaatgtgagctcctgtagacgagcccctagtcccagacactgtctccgccattagcagcacacaaagcacactcagtgcccagcgcagattcagccttctgccggccatctgcccccacggggcctggcccttactctccacttccctttctgcagtagctcagttccaaacagctggcggctccggtggcctcgggccgggcctgggaccagcaaactccgaacctcgacctcgcagggcctcgcagccttccaggtccctggccgccggaccgaccttgcgccagcgaagccgccagtccgggtgccccgcctgctgatcccgggaattccggacc

SEQ ID NO: 450225 - DNA, 793 bp, Homo Sapiens
accatgtaagaataacttttaagtgtctttgtaagttcttcctctcttcctattctgatgttgagaaggggtctattttccagagaaagttaagcaggacttgacaatttgggagtttgggtcagatttgcttggagtttgtaaaaatttatactgggaggagttcccacaatctcccctgatggctagaaacagtaatatttactaggttccttactgtgtctacgccaatgttctgggcacagcagggaaaaataaacagtagtagagatggcctctgtttatgaagagcccaactaataatcaagggcataaaagacataaaaataacaattacaaaggtacatactgatacagtggaaaccagaagtcagtgtgcaagaaaacatgacagtatttggagccaattggggtgatcttccagcacttccagaagcagccacagtgacgtcttctatttacctctaattcaatttctttttctccaagaggttagtagaaatggaaattctgaaaacacagaaattttcctcactgggaaagtgacctaaatcaatgctgcctaagcttgttgactccaggtttatattcctatttgagatagtattcaagtttcatgagaaaacatgttttcaagacatgattttaggaaatcaaatacaagattcacttgaaagttggtagcacttaatgaaaaaccaaggtttcccatgaaattactgaaccttccattttgattaaacagattggggctgatctaggacaagaagttcttaaatattgtccaaatccc

SEQ ID NO: 450226 - DNA, 767 bp, Homo Sapiens
tataggtttttaaacacttccccccaagtaaatgaatgaaaaaaagacagcaacaatagagatgatataataagccaggcatggatgaccttatagcacctgtatttatacagaaccaccaggaggatagtcatgacaacaatgacactgatcatgatggcagcattcagaattgagtgcagggctctctggcccacagtctcggtatcttctgtgaatggggtatagattagctgcccatccttccgggtataaaagctgactgacttaatggtagccacgaccaccaccatgcagagagtcacagggacaaagagcatgatcacatgcttggcgccatatttcaatgtcagctcctcatcttcttcctcatcttgctccaccacctgccgggagttaccctggggtcgtccattagataatggctcagggtggccaaggctccgtctgtcgttgtgctcctgccgttctctattgtcattagtattgctcaggtggttgtcctcagacatctgtgcattctggaagtaggacaacggtgcaggtaactctgtcattggagcaactgtatagaaatactgtttcacagaaaacaaagcctcttgaggttctttctttcatgtgttctcctccaggccaagctgtctaaggaccgcaaaggctgttgtcacttgcaggctcccagattaggtatacgcttccccgccgccccgctgccgccgcggctcgtagctcaggttccttccagaccagccgctgttttgttt

SEQ ID NO: 450227 - DNA, 1043 bp, Homo Sapiens
  misc_feature (34)..(34): n is a, c, g, or t
  misc_feature (581)..(612): n is a, c, g, or t
gggaacgaaaggggagagacccatcttcaccctntattttttggaatttatttagaaaaattttattgagagattctaaaaagtataagaaactaacaaatttttaccactgcattcatgttggctttttgagcacatagctctaagtggggggatggcggggatgcctcaaaaggggagaggaaggactctccttggcctgggaataggtgtgcctatgggaaccataggagcaagagtcaagagttcttcagaaaactgcctttaagtcaggacaaaggaacaaaacatttgcaaattaagcaccaaaaagatcaagtaatttacttgccattttcataaacaaaataattagtcccctctctcatcttttctctatcatgtcttttgtataaagacatttctttctggaactgcgtgctgtctagacaaagccacgtcatctgatgagaagcagactttgctcagcaacattgagaaaaaacagatctacttcttttccatttcttagcctgtgtcaactgctgaatgctgaaatctaaccccagagcctcactttgccatttcatacagtttgaatnnnnnnnnnnnnnnnnnnnnnnnnnnnnnnnnctttgactcccccattaaaaagtttattctctaattctataaatatcaagaaggcagatgtgttttattttattttacattaggaagaaaaaaccacaatctcaaagcaagcacccgggttttacttcagtttacaataatttaatgtgcctgagaatttttgtgcaaatacatgtcatctttcattaaaaatatgcatagcgcactttggaaaaagttggtttagttgtcaccaacttttcttacaaaaaaagtttacatatataaatatacaacattccctaattcctattgattgcacttctggcttaaccccttccagcctccaaggaatttttaaaaacatgcaattatgtttgtattccttggctactgtacttattcagacgaaatattctaaaaacaagttttcttggtttcaatttactcac

SEQ ID NO: 450228 - DNA, 1519 bp, Homo Sapiens
tttcacaggggaaagactggctttgtaattataattttttccttatttattttacttaaaactggtagagtctaagtattatatgaagtgcccatgattctgtcagtaaatttgaacatatttttattagttaatgtcagtttaagttgtccttttgtttgtttctatttttaaggtgaattttaatttctatctgaaatcagttaagataccttgagaaaaactgcagtgagaggagataaatatcctttttcaggaggaactgatatctctggctaaatatttgtccttttattatggtttctaaatcagttattttcttcagctttaatttcataaaattaaaaaactattttaaaaattcctgtagttgttggaataattaaaaattctggtgcagtggtggtataccaatctttagaattcttaagtattctaatgtttcaagttgagatcatgcttgggaaaatcatgtcatagcatttatgttattttcagatgccattttttaccctggaaagaagtcataatgttcatcataaccctagcagcctggatagtgagctaaacaaacccttcaaagattaaattttaatcaagtagaccgggaatacaaaagacaagtccttccttcccttccccccacctttacaaatcttactggaagggtgttcagaaattaaaatctgtgtttgctaagacttcattctgttgggggttttaagaagtaatatatgtaacataaaatatatgtaaacgattgcagttttttttggacgtttttccatgcatcagtaagttgtctgacagtagccaaatgtaacttgcagaaaattattgaaaattatattcagaataatagcaatcaggcctggatgttctttattaaactcttttcaggcagtaaatttaacacaaaaatgtcattttctaaagtccttttgctaaaactgttgactatggaaaacaacaaaaaggaattttttagtctgctgctattattaacatttattatctgtatcttttggctcaggaaatgacttcacctattttttccataagccgacctttaacagagtcacttaattgggctgcttaaacggatgttctgggagaaaattataatatttagtatttgtacaaaatatcaaaaagtattttgacaagtttctttttaagatagttcctaaagccttaccctggctagaggtgttttgtacaaattatatataagccagcctgatctaccaacatgccacagagaatcacaatcaacagtgtggggaaagtcagggcagtggaagtggatgcactctttttattttgaaggcttaaaccaaattgtcttggaattaaagctgtatttctgcagctttcggtacagagaaaaagaggaaagtgaagctgtgtcagttttaacattagctatatcaacatgtttaagaaagatagatgaagtcatttgcataaaggtacagcattgaaatactatgttgtgtctgttttacatttttgcatt

SEQ ID NO: 450229 - DNA, 857 bp, Homo Sapiens
caaccaaagcactgtcttttggctctgaagataacatcttggcagaaaatgttccatgtagaagactgtcccactttgttgagagggaattcatagagaccactgagaaaagatttgggaaattccaaacatgctgttgctgcccgaacaggtcctcctccagggtatagctgaataatggagccaaaacctcccattcgttccatcattgcacccagcaccaagcctgcacacgtttccatcacaatcattttgttgccagcacggatatttcccaacgtcaacatctgggctagtgtatcgtatctcatgtggttaatttttccaggttctcttgcataatacataattgaaagaatacgggtggatggcttcacaacagtaatgatggcttcatatttgtttttcttctttttaatatatttatcttgggcaaattctgtcttgtctcggaatgttgtactattttcaattaactgctgaactatttcctgcagtaggctcttccctcttcttcttgggctgtagacttcctccactggtcacttcaaatgcagttccataactatggccaatgacgttatccaggtagaaccactgtttttcgaaagttactttttttctccgctggacttgtacatgctttaaacacatcttcacgtttcagcaccacgaagtcgccgtcgcggatgcggtggtctccgggatgctgtggctgtgggcccggctgctcacctgagccctccatgacgctcagccggtcgccgtgctccacggcgtcccgcccctcctcctcggttgtcgccaccgccagcctcacttcccacaacctggcgcactaggagccctccgaccgg

SEQ ID NO: 450230 - DNA, 493 bp, Homo Sapiens; identical to SEQ ID NO: 142410

SEQ ID NO: 450231 - DNA, 992 bp, Homo Sapiens
  misc_feature (118)..(118): n is a, c, g, or t
aaaagtacatgtaaattagtccagtttacagagtatagcagccaacagtggtttataagtggaaacaatcttcctaccctaaaaaataaggtattatctttgagtgtgaaaggtagangtcaccaactcctgagtaatgacaatgaggttctctacaggatttatgctgctgagcctagaattattcctcagacatctctgtgtctcctttggaatcaggctgctgcaagctggttgtctgacagtcagttttgcaaagtggttgaggaaactgcagactatgtggaatgtgcctgttcacacatgtctgtgtatgctgtctatgctcggactgacaacttgtcttcatacaatgaagccttcttcacttctggatttatatgtatctcaggtctttgcttggctgttctttcccatatcttctgtgccaggtactccatgtttgcagctaaacttctgactcacatgatggcagccagcttaggtacacagattctgtttctggcgtctgcatacgcaagtccccaactcgctgaggagagctgttcagctatggctgctgtcacacattacctgtatctttgccagtttagctggatgctcattcagtctgtgaatttctggtacgtgctggtgatgaatgatgagcacacagagaggcgatatctgctgtttttccttctgagttggggactaccagcttttgtggtgattctcctcatagttattttcgaaaggaatctatcatcagagcatgtcacagatctatggactcattcatggtgacctgtgttttattccaaacgtctatgctgctttgttcactgcagctcttgttcctttgacgtgcctcgtggtggtgttcgtgggtgttcatccatgcctaccaggtgaagccacagtggaaagcatatgatgatgtcttcagaggaaggacaatgctgcagatattccactgattttatatctctttgctctgatttccgtgacat

SEQ ID NO: 450232 - DNA, 1061 bp, Homo Sapiens
cagaggtatgtgaaaaaacccacttgtagcttgctgggaagatgtcatcttcaacttagcttgtcacttcccagaagacagctcttcacagtgttcattttattatttgtctggcattaggtatcagaaaataagcttaaatgagtctaaccattaaatgtaaatagatctctgcctgcactggaatcttttatccttttcttcctcagttgaagtaaaagcagctgatcttactgtttgttcaaattcttcaccagccttgagcatggaaatacatattttcagggcatcttaagggcttttgagataaactctcctgacttggcatttgtccttattcaattatcacaagactaatttgcacatgatccttttgcctgatttgaatctcacttctctgggatggcagcacatcccttgccctgatgctttgacttacaccctagacagagttgttttgtgcttactgactcctcttttgtgtccctgtgcaacctcttagagctcaccctgtccaacagtgctccgatttgagttatagacttgcagctgggggagatgccttaaggggtattgcttatttgtttgcgccattaggatattgctgagtcagacagtcatagttccctctcatttgctctgggactagggtttccagagggttgggcacagttttgtattggctcttttgttctcttttccttagcctcttcggtgatctttggtctgatagggctatgtggctgagcggaagggtgagagggaggagatgcaggatgcccacgtcatcctgaacgacatcaccgaggagtgtaggcccccatcgtccctcattactcgggtttcatattttgctgtttttgatggacatggaggaattcgagcctcaaaatttgctgcacagaatttgcatcaaaacttaatcagaaaatttcctaaaggagatgtaatcagtgtagagaaaaccgtgaagagatgccttttggacactttcaagcatactgatgaagagttccttaaacaagcttccagccagaagcctgcctggaaagatgggtccc

SEQ ID NO: 450233 - DNA, 1108 bp, Homo Sapiens
  misc_feature (214)..(214): n is a, c, g, or t
ctgaccagaggacccctcctacgagcgcatcctgggattgtagttgtctcatctttttccctttcccccatttcaacacagatgtataggtgttggactgtctttaagttttgaatccatggcatcaggtaaggcagaaaaatctgctagtcgctagccctgagaagtactgcgaggaaatgtggagcagttttctctggttcatttgagtatntattttactacctgaagtacaatctaactttttaaggcagatttttatttcctttgaaataataggactttaaaataggttcaagatattattcattgcagtatgagttgccactggattgacgcaaagttttgagtttatttcagtaacctacataggtgtcctggtgggatggattctgaaacttaagtcttacatattttttgtgggctcaccaagtgttctgctgtgtttcaggatcagggggacctttgctttttgatgatctcccacccgctagcagtggcgattcaggttctcttgccacatcaatatccaagatggtaaagactgaagggaaaggagcaaagagaaaaacctccgaggaagagaagaatggcagtgaagagcttgtggaaaagaaagtttgtaaagcctcttcggtgatctttggtctgaagggctatgtggctgagcggaagggtgagagggaggagatgcaggatgcccacgtcatcctgaacgacatcaccgaggagtgtaggcccccatcgtccctcattactcgggtttcatattttgctgtttttgatggacatggaggaattcgagcctcaaaattgctgccagaattgcatcaaaactttaatcagaaaatttcctaaaggagatgtaatcagtgtagagaaaccgtgaagagatgcctttggcactttcaagctactgatgaagagttcttaaacagcttccggcagaaacctgccggaagatggtccctgcccttggtgctggtggtgaacacttttttttgccaccccggaaggggccctgggtgggtatggggggcaaatgggttctcccgaagaggatccacctgaagggggggcaccggggcccgggggtggcgcagagccg

SEQ ID NO: 450234 - DNA, 756 bp, Homo Sapiens
cagtgcccccggacaatgacccgcagtcctccggccacgtttcccgccgagagccaagattcgctagttcatcatggccggatatctaggaaggaaaaactcactggagctgagcttgtaggagagaagagcatttgactcctatatctgcatcagatgctccctctagaggaaaccgagaatcaagcagccttgattcgggaaaccggatagtctttactgtcattggaaatattggcgggttgtcgttaatgtccttcacctccacttccacatggaaaacctgcagcggcctgtccacgatcacctccacgtggatgctacattccgcgctccgcccgcacagctcctcccggtcgatccgagaattcacaaacaaaatgccattctgcagatttacctccagaaggtccccgtgtctttggacgccacccggaacaggcgcggcaccagctcctccagctccagccccaggtcctgcgcgatgcggcccacgaaggtgccgtgtttggcctcctcggggacggagtagcggagctggccgctccccacctcccaggctgcgaggagcagaagcgagagcagccgtgtccaggcccctcggccccttctgatagaagacgccattaccaatcctcaatgttttgatcaaattacgaagagcatgttttgcaaaaatttaaatattctagtctctgttaaagtcctgctgcttctcttattcctccgcttctcctcggccgattaccccccggg

SEQ ID NO: 450235 - DNA, 708 bp, Homo Sapiens
cggtctaacgatttccgtcaaataagcccaaagaccttctaccagctcggtcatcaggtggtttttcagagcaacggatttcatctgggtcaagtctgtaagtgagcagggcgttctccccgatatttgcatcggaggcgccttctagtggtaaccgagagtcaagcggcctggattccgcgatggacaggttcttttgtgttgctgggaacaccggtgggttgtcgttagtgtccttcccctccacgtccacatggaaaacctgcagcggcctgtctacgatcacctccaggtggatgctgcactccgcgctccgccggcacagctcctcccggtcgatccgagaattcacaaacaaaatgccattctgcagatttacctccagaaggtctccgcggcccttggacgccacccggaacaggcgcggcaccagctccgccagctccagtcccaggtcctgcgcgatgcggcccacgaaggtgccgtgtttggcctcctcggagaccgagtagtggagctgaccgttccctgcctcccaggctgcgaggagaagaagtaagagcagcagacgccgggattcctggccgcttccccaggaaaactccatctttagtgcacagtattttgttctgattaaatatcgtttctcaaagtcaagggaaatcttttaatcggtcagtcaagtgcagctgcatcctccatatttca

SEQ ID NO: 450236 - DNA, 191 bp, Homo Sapiens
ctgcacgggggcggggcggcaccagctccccggcacgaagggctccgcccacgggttcagcctcccgccgttgctgccggtcaccacctccatggttgcctgtagtactgtatcgcttcctcctctcttcccctctcggtctcgagctcactcgtgctgctgcggtgtggactggtggagcgggatggaat

SEQ ID NO: 450237 - DNA, 787 bp, Homo Sapiens
tgtgactcctatgatgatgcctgagagagaacagggagaggcaggagtccctgggctggaggtcaccgtctcctccacaagctggggtttccccactgtgcttttgtacctgattctttgtggacacattcgatgtcactaccagggtgtacaatcaccgaccttgaccatccctctgggacaccctgtgcggcacttccggcacatctcaggagaatcttcttcccggaaggtgccttcttcgcactgacacactgtgtttctggtcgtggtgcagggacttagctccacttcacctgaatcacacctggtgcagcgcaagcagaaaaggaggtcattccagtgagtgctatagtcctgtccatatttgcaggagatgcaatctctaccgtcttctgagatatggtgtccaggtggacacaatccctctgaggggctggacctcttttgttgtggggccgctctctgctggggagctaggtcttgttgggtgatcagagcagactcagctgagaccaacagcaggaccgcggcgacaacgagcacaagggtcttggggacccggagcccaggcctggctccccgcgcctccctgggtcctgggccgtgccttttccgggcccccgaagcggccggggcgttctgtccccgttgttccatggcggtagggaacgctcttatagtctctcaggcccgtgggtttcagcccttaaagtagatcgggcatcgtcggtgtattttgtgggcgcagagattgcggggttctccggccgcgtgctgatttatg

SEQ ID NO: 450238 - DNA, 1056 bp, Homo Sapiens
agcggattgtgggcgactcggctaatggcgtcggcgagtcttaggggcctggggagctggcgctgaagcttcttgccaggttggctggtgacacccggtgtggctgggccccgcggcagcggagggacctgcccgccttgtgggtttctcggccagagtcggcggagcctagcgggacggtgcgactgcggggggcgcctccgagaaaagccagaggtgttgcggggaagctgctgggggacgctcgagcaggctccgggttcgcaagcccatggcccaagagagcgggctgctgaaggaccagagacaccgggagggagctgcctgtggccctaaggagctgaccgtgccagagcttgtttgtacctctcggaaattggctgggaccttggaggatcatgtccggcaccagcagccccgaggcggtgaagaagctgctggagaatatgcagagcgacttgcgcgccttgtcactggagtgcaagaagaaattcccacctgtcaaagaggctgctgaatcaggaattataccaagttaaaacaattgctgcacgaaacactgaaattttggcagcactgaaagagaacagctcagaggttgtacagccttttttaatgggttgtggaaccaaggaagcgaacgatcactcagctatgtttggctgctattcagagactcatgtcacatgaagtcgtgtctgagactgcagctggaaatataattaacatgctttggcagctaatggagaatagtcttgaagaacttaagctacttcaaacagttcttgttcttttaacaaccaatacagtagttcatgatgaggcactttctaaggcaatcgttctttgttttcgactacacttcacaaaagataatattacaaataatacagctgctgctacagtgcgacaagttgttactgtcgttttgagaggatggttgctgaagatgaacgacaccgagcatattatagaacaaccagtactggtacaaggcaaatagaaccagaagatctgtcagtaacctcaaaccttgttgctaaaggatgccatatc

SEQ ID NO: 450239 - DNA, 1128 bp, Homo Sapiens
  misc_feature (66)..(66): n is a, c, g, or t
  misc_feature (84)..(84): n is a, c, g, or t
  misc_feature (106)..(106): n is a, c, g, or t
  misc_feature (120)..(120): n is a, c, g, or t
  misc_feature (129)..(129): n is a, c, g, or t
  misc_feature (147)..(147): n is a, c, g, or t
  misc_feature (185)..(185): n is a, c, g, or t
  misc_feature (388)..(682): n is a, c, g, or t
ccttcctgctccaaaaacactttgtccctaaattgtcaataagcaatgctttagggaaaaattaanggtgacttcatgctctanaatgtcttccctactgtctttncctcctcgaagccnggccctggnagtgtctagcgcacagtnagcgcttaggaactgtttagagcatgaatagatgaagnccaactgcatctcagtaaaaggaacattttctaattatttgagttattcacaggaagatggggtgccagtgagcaccctgtcaccgggggagtgtacactacaggaacaggaaagatgcagaggttgtggattgtggactccctaatgacacaaaccatggataagttatgctggaatcacctggagtactggttgctatttnnnnnnnnnnnnnnnnnnnnnnnnnnnnnnnnnnnnnnnnnnnnnnnnnnnnnnnnnnnnnnnnnnnnnnnnnnnnnnnnnnnnnnnnnnnnnnnnnnnnnnnnnnnnnnnnnnnnnnnnnnnnnnnnnnnnnnnnnnnnnnnnnnnnnnnnnnnnnnnnnnnnnnnnnnnnnnnnnnnnnnnnnnnnnnnnnnnnnnnnnnnnnnnnnnnnnnnnnnnnnnnnnnnnnnnnnnnnnnnnnnnnnnnnnnnnnnnnnnnnnnnnnnnnnnnnnnnnnnnnnnnnnnnnnnnnnnnctggttgctattaataatacagattcctcgactcaggagactctgatgctgcaagtctgggacagtccagttgtctgaatttggaacagcatccccaggtaacttggaagcacacccatgttttgggacgactgaacttggtgacctctgaagccatttgcaatcaggttttgtgtgtgaaggcccttcttcaactgtgaagtgctgtccacaagtcttggctccggatgttaccaggcccccgagactggggaactgaagattcaggctagggctacagctcctcggactctgggaggttacggacccagccctgggccactctgttgaagctgggtctgagacggaggagttccaagccactgaggggctccgggatgaagggggtgcctggcctgggaaaattgccccccacaaggggtcctccaaatggcaccggggtcttg

SEQ ID NO: 450240 - DNA, 1667 bp, Homo Sapiens
tgcactaattcaagtctatgcagaaggggtagagactaatggaaccagctgtctggaacctgggacaggagcttggggagacagcccttcaccttgccgtccgaactgcagatcagacatctctccatttggttgacttccttgtacaaaactgtgggaacctggataagcagacggccctgggaaacacagttctacactactgtagtatgtacagtaaacctgagtgtttgaagcttttgctcaggagcaagcccactgtggatatagttaaccaggctggagaaactgccctagacatagcaaagagactaaaagctacccagtgtgaagatctgctttcccaggctaaatctggaaagttcaatccacacgtccacgtagaatatgagtggaatcttcgacaggaggagatagatgagagcgatgatgatctggatgacaaaccaagccctgtcaagaaagagcgctcacccagacctcagagcttctgccactcctccagcatcttccccccaggacaagctggcactgccaggattcagcactccaagggacaaacagcggctctcctatggagccttcaccaaccagatcttcgtttccacaagcacagactcgcccacatcaccaaccacggaggctccccctctgcctcctaggaacgccgggaaaggtccaactggcccaccttcaacactccctctaagcacccagacctctagtggcagctccaccctatccaagaagaggcctcctcccccaccacccggacacaagagaaccctatccgaccctcccagctcacctacctcgtgggctccccctctgcgtcgtaggttcgcttggaaaggtaacgatgggggtccatcctcttcaagtaagactaccaacaagtttgagggactatcccacgcagtcgagcaccagttctgcaaagactgcccttggcccaagagttcttcctatactacctcagaaagtggcactaaggaaaacagatcatctctccctagacaaagccaccatcccgcccgaaatctttcagaaatcatcacagttggcagagttgccacaaaagccaccacctggagacctgcccccaaagcccacagaactggcccccaagccccaaatgggagatttgccgcctaagccaggagaactgccccccaaaccacagctgggggacctgccacccaaaccccaactctcagacttacctcccaaaccacagatgaaggacctgccccccaaaccacagctgggagacctgctagcaaaatcccagactggagatgtctcacccaaggctcagcaaccctctgaggtcacactgaagtcacacccattggatctatccccaaatgtgcagtccagagacgccatccaaaagcaagcatctgaagactccaacgacctcacgcctactctgccagagacgcccgtaccactgcccagaaaaatcaatacggggaacaaataaagtgaggcgagtgaagaccattttatgactgccaggcagacaaccgatgacgagctcacattcatcgagggagaagtgattatcgtcacaggggaaagaggaccaggagtggtggattggccacatcgacaggacagcctgaaaggaaggggggtctttccagtgtcctttgttcatatcc

SEQ ID NO: 450241 - DNA, 1214 bp, Homo Sapiens
gaagaattcatcatcaggtagtaaagcatgaccaggatcttcagaacaaagatggttttttggggggctttgtcagatgtagattctcgaatgttcaagattgaagtcaggatgcgaatggcttctgcttcttgggcttcatccaagccagtgtcattctcaaatagtttgcccagtaaatccatttgttggatgtgagcctgtgagaggacttgatagtgattgttcaaatatgcatgccagatctcagagaccttggtgtacaatgtgtctgccaggtccaactttttaaggtcatagaatatattagccaggtggaagtagcctcctgaagtcctaatgtcctctgttccaaatgcacaactggcaaaataaatatcattggccagatgataacgggcctcttcatagtttttcttagctatatagagaagtcccagattccgatgcagtaaagagtgggtggcattactacagtcagttgatttgaggactgtccactgggcttggaatagatattcttcagcctgaacgattcggcccagaccaaggctggcctcggccaacagcaggtaagcaggcacaagctctacggagctcaggccatacagcttcacacggaagcgaagggactgcaaagctgctggtacagcatcttcgtgtttcccttcaaagaggtatttctgggctatggtgtagcagaattcaatcaaatacttctgccgctgctgcagctgctgcaggccatgctgccgttcttcctctgaattgtagaagggcatggaagtgcgcagtggaatcaagagctgacatattttctcatggatgctgtcccagtcagccttctgatgtaccacgccacagtaataagtgactgtgcaggccgcgcacacccgctcggctggggcttcgcacacctcacagcagagtctgcgccccttggggactgccagtgggtagatcacattcatggtgcagccagcagtgctggtctctaagacggttgcccagcaaggatacgctgaacccccggcgtcacgtgacgatcgcggggctgcgtacttgccagcatttacaagggcagagggcgtcgggacgtgactcgactaacatctgggtgtattgctgaagttggaaaaggggaagaaagaaagcccaagcagcacaaacccacaagtcccacgggtcaaatggccgagaaacgactcccaagg

SEQ ID NO: 450242 - DNA, 538 bp, Homo Sapiens
  misc_feature (95)..(106): n is a, c, g, or t
  misc_feature (435)..(435): n is a, c, g, or t
  misc_feature (514)..(514): n is a, c, g, or t
  misc_feature (519)..(519): n is a, c, g, or t
ctggcctgaccctgtcctgtcagctgggtttacataccagtcccattcttccttttcaatacctacccccaaatcttctcctaaccaccatctgnnnnnnnnnnnnataaagcattttttgctttaaaagcatcctgaccccaatttctttgagctcacgggccttttgctgaaggtctctcagggtgtagtggtgtggctctctggacttaacgtcactctcagaggtcagaaccttggagatcagaactgattctcaccaggtgtgagaggtgtggtagcagattgcaatgctctgcacctcttccttgcaagtgagcaacttcaggctctctgggcagaggctggcccactgtagtttgcagacatgctctccagatggttttactaagtcccctctccctgataagggaatcctgctgggaccagcggcanccctggggtgtgggaagaggttaaaaaggactttggcacagggatccacccaagttcatggctgttaggagccaggggnttccntaggaccccaggggctttt

SEQ ID NO: 450243 - DNA, 664 bp, Homo Sapiens
  misc_feature (521)..(521): n is a, c, g, or t
  misc_feature (567)..(567): n is a, c, g, or t
  misc_feature (584)..(584): n is a, c, g, or t
  misc_feature (603)..(603): n is a, c, g, or t
  misc_feature (621)..(621): n is a, c, g, or t
  misc_feature (651)..(651): n is a, c, g, or t
attcccaacacacagggaccagcttctttcctaactcacttaggctcttcgtgctgctctggcaactaacacccttggctgcaggggcttggacactgcccttagtcactgacaattgtgtgaaggctgctgtcgttaacttcacttgatcaccttaggctcctgtgaagtggtgagcaattcaaacaaattcctgtcgtcaaatcatatggagaaattgcactgcagagaaatctttaaaagcaattacctaatactgcagattgctgaactgtacccacacccaagactgagcattggatcaatccagaatatacatcaggtgttctgcaatgtctgcctaaaaccatgactctggcctcctccagctgttgctacatctcactatgggtttcctgtgacattttgagcaagtatgcctcctgtgactggggttcttacactccagaatgggatgaggaaggcacgttaagtgggcttttaaaatggaatattcccggggccctttcagttcggttttntagggtcaagaatctggaatttttcaacctgttttaggaaggttcngggtttttaatgggttngttggggctggcacattgnaggaaaccgtttcaggcngagttggccaacaaagggtttccacagtgnaggaaagggaagc

SEQ ID NO: 450244 - DNA, 752 bp, Homo Sapiens
ttgggaagtgcatacagttcctgctcctggtgtctactctgaagagcacagagtagacgtttgtctgccatttcaccggcagtaagatcagcagctgctggtgagcaaagaggtagtagtgggtcactggactggtgggcgccggggccgcgcgctagatggagaggtcagcggcgaacccagctccatggcctagtctcgtcagaccgagcgcggaccctgccggcctccgttctcttccgcttgtctcaggtaaagcgcagatccctccgccgcagcgtgcgctcccggtagcgctgcgatcagcttttcggcaatacccggatggaagtgtaatggccgccatcagggactcgcaggcaatgggtactacgacaggtattccccgtcagcgggactgcccagaccttttaggatgtcagaacttctagagggccacccagcaggcaaatggcgagtttgtggaccgtcagggtcccccaaacaggtccagggatccgcctcttgtgagaggaagcgcgagttaaatagtcccggccattcagcgcttccgcttaacttgccgcaaagtttttctggagaagtcggggtttttttgccgagcgcttttgccgactgctagagcttacccttactttcttaacctggggttgttttacttccgggctttttgaactctacactctcctcacattctaggagctgggtgggagtaggagacggtgtgcctccgcgctccccgcgggcagccg

SEQ ID NO: 450245 - DNA, 822 bp, Homo Sapiens
  misc_feature (56)..(56): n is a, c, g, or t
tgagaataccccttgagattcccacattgggaggggtaaatgttccccaagggatnttaccggaaacaaaatattcccaatccacctttttttggcttggggcttttggctgttcatttatccccacacccccaacacaacccggcccgaacttgcaatcccaggtgcctcctgaacgggagacgcccaaggctggagaagggtgttaaaatgcttttacccacggtgggctccctggcaccaaatgagcaaggtactctgcattagatttctggatattgattgattttgaggttgttgctgatgtctaccaaatatttttccattgagaacctcagttaattctgtgagaaaatcataatgctctctgtggattgctatgattatgatgtcagacttcttggctgcttctgaatagctcaagacttctgcaccactgggcagtagggtggtcttctgggggtttcgacttccaaaaaccacagaataaccacactggagcattttcaatcccagtgatcttccaaaatcaccagttccaaaaatacatacagtctcttgcttttctgaagaattcatagtaagaggaagtgcatctatacaagttttctccataacaactcgcaagtcgaccactttcagatgctagggctctcacacctcgcccggcagtgaaaattagatgaattcctgcatctcaaaacagttcttgagacctgagggagaggcgcttccaaggaggaagcgtccagcgccaacggtgcgcgccgcgggccgggcgggtagagggaagtttcgccgcgcctgcagctcagcgctccc

SEQ ID NO: 450246 - DNA, 1062 bp, Homo Sapiens
ccacaccaacatggtgcaataaataaagtgtcaagtagtaagtcagtgtcaagcaggagagctgcaggctggcagacaggcagggactgagaaagagaagcctccagccacccaccatatttgctcagtgggctcaagcgggtcgcaagtctgtcttgtgcactggagttgggtgtttggcccctgatgtccacatgagcactccccgcaggggctcagcccctcacaccagcgccagagcctgctcggtggggcagaagcagggcaacatggtgcccacagcgtccacgatggctgccaggtgctcgtcctgcgcctgaggcccacagagctgcatgaagtctgccagacgcagcaagtattcaaggttgtggccggagaagccccggcaggccaggatctgcgtggcaatggcctcttcaggcgcagggcccaggtaaccagggttctgtggggtggccacataggccaatgccttcagtggttggtcaggagcatcttggggatagaaggtgacctccttggtatcgtagccaccaagcactgcctctcgcacattcaggtacttcagggccttgcttacctgctccccttgcacttggtatgccacgccccaagtgcagccctcatgatcttcaaggagcgtcaccacacggccaggcatcttgtcgctgccccgatggaaggtgtctccctgccagaaacggcggctgtagccgcgcacgaagcccacacggctgtcgctgtaggcgaagtcgggcctccacaccagggagccgtacccgaaaatccacagcgcttgagggtcgccgtcgtttcgggggaactgagcggacggcgtaggggactgcgaggtgggcggggtgttcggggctgcagactcctgcttcatggtgcctggcacagggataggcccaggcggcctccggggctggtctccggcgtgggcacggaaagaccgacggacgcacacacctggcctggcaccgctcggtagctccagctgagcgccccccatggaggcgccctttaaaccttccctcgtgccgaattcgccaccca

SEQ ID NO: 450247 - DNA, 878 bp, Homo Sapiens
agggtgctgaggccgagccctgatgatggacggccaggcgtccagcatgcctgcagctgaatcttgagcatttccatgggacaggtcaccacgacctggcacatcccagccccacacccggcaagcatctccatcttcaggttccgctgcatcccatcttccatgagcagccgccggaaaaagtcgttggccgccagcttgatggccttctctggagtgaccagagtgaggttcactgcagcccctcggtacatggccgaagaagccctccgcccgagccgtcttcgatcaggcagtcgatgcattcctttgtaacatggctttcccatgctggttgctgcaggcgagtgcttggccaagtcgatggggaacacgcaggtcacccccacgagccctgctacacctccattgatgagtttggctgtgatgctcagatcctggtgggtcattctgcaggggctggggatcccaggacacaaggctgctggctccttggggtagccgctgttggggctgtctgggggaagaagtggaagcttccttggctctggccccgtagcagtgtggacagagcacgggttttgagtgcagcctggcccgagccaccttcccggcaagtgacgacctccttgggctgcggcttcctccctgacaacttgcctgcaagcgagtcgacgttcatctcagttgttgaggcactcacgggccaggcttcactcgactcttctcactgcctactcagttccttctcaaagcaagcccgtggatatatccaaggaactggcttcattgcttttaaaaattctgtccagctttaactggctagaataggggtcctcgtccttgtcatatgctgtccagaatgaagtccaagtcca

SEQ ID NO: 450248 - DNA, 1124 bp, Homo Sapiens
  misc_feature (986)..(986): n is a, c, g, or t
agcgggagattcctgcaggttcgagaaagcatgagatgctcccagaatcctggattggacttcattctggagagcatatgacaaggacgaggacccctattctagccagttaaagctggacagaatttttaaaagcaatgaagccagttccttggatatatccacgggctttgctttgagaaggaactgagtaggcagtgagaagagtcgagtgaagcctggcccgtgagtgcctcaacaactgagatgaacgtcgactcgcttgcaggcaagttgtcactcagcagcgatctgaactatatcctgggttccagaaaaggcagaggttcttaccgaaagcaggggaggaagccgcagcccaaggaggtcgtcacttgccgggaaggtggctcgggccaggctgcactcaaaacccgtgctctgtccacactgctacggggccagagccaaggaagcttccacttcttcccccagacagccccaacagcggctaccccaaggagccagcagccttgtgtcctgggatccccagcccctgcagaatgacccaccaggatctgagcatcacagccaaactcatcaatggaggtgtagcagggctcgtgggggtgacctgcgtgttccccatcgacttggccaagactcgcctgcagaaccagcatgggaaagccatgtacaaaggaatgatcgactgcctgatgaagacggctcgggcggagggcttcttcggcatgtaccgaggggctgcagtgaacctcactctggtcactccagagaagggccatcaagctggcggccaacgactttttccggcggctgctcatggaagatgggatgcagcggaacctgaagatggagatgcttgccgggtgtggggctgggatgtgccagggtcgttggtgacctgtcccatggaaatgctccagattcagctgcaggatgctggcacgcctgggccgtccatcattcgggggtcggccttaagnacccttccacctccaggtcctaaccaaattgggttccggctttcacccccaaagggggcccccttctgccaccccctcatttggcctggggaagattgcttcccacctcccagggccctggcctgggggctcttacac

SEQ ID NO: 450249 - DNA, 893 bp, Homo Sapiens
gtggaccatctccaatgcacgagcatgagggaagtgtcagattgtgccccttatcgtgggacccatccacccagaaatgtacatgttgtttcctataaccctgggctgtatgaaggcttcgtggaagtggcactgtcccttgtagtttctggttttgaccatgacatagtttctaagtcaagctgccataggtcatccaggcgagcaccacacattccacctttgacatacattttaggacttccagaatcttttttgcaatatataacagctgtgtgggattctcttggagaaggcacaacccctttagtcactggaatgctccaacccactacaccagagccatgctgtagctccaactcataaaaatcatttaaatatctgggaacattattgtttgaatcttcgctttcgtttgccaggccaccaaacaaatagcatttgttaccatataaagagaagctatgtccaagccgaggacaaggaggtaaaccagaaggagggggatggggtttcacttttttccataaccaacgacttgcttgtaactcatataactcattgctgtatcttccatattcaaccattcccccaaatactaatattctggtaccatcacagacaaatccatgggcagcacagcctggagggatatctcctctaacagctggcagaaaccactgattcgtagccgtgttgtagacgtgcagctcatccgcgatgccctcatttccccctccaaagatgatcatcagctcccggatggccaccgctcggtgtccgtgccgggcgcgggggaccggccccgtgaaggaagaaactcgcctccagttgaggaggctgggagccgccatcttcccaaccccatcccgggaatccggaccggtaccagc

SEQ ID NO: 450250 - DNA, 867 bp, Homo Sapiens
  misc_feature (196)..(258): n is a, c, g, or t
gggttctcctggggtcgtgtcggtggcgttgtctcgaggttcgggggctacccttgccctttgtccgcttcgctttcttcccgcgctcagtgtcggtctgtcgttcttctgctcctatcgcgtcgtgcgtgtgacgtgccagctgtccagtccgcgcctctgtgcctgtcgcgcctccttgttgattgttgacggnnnnnnnnnnnnnnnnnnnnnnnnnnnnnnnnnnnnnnnnnnnnnnnnnnnnnnnnnnnnnnnatgtctgttatgtgagtcgggagttgtgatttgctagggtgtgcgtcgattctgttgctgttgtctccggtactcgctagtcggcggcacagctggggactgagggtgcgtggttgcgtgtggacaggcttggagccgtttcttgcctggagactggcgtgacttcactgtctgtggaacgtcccctcgtcttatcatcttcagagttttccgtggtacagttggctgggctgggcgggatgggagagctggaggtggttgaggtgggcgtgctgctggactggttgaagatctcatccgtccatgtggctgtggctggggggggaggtggcgaccagcgcctgtggaatgtcctcgaggtccaggtcatcgtagagaaactcgttctcctcgaagtacggggtcctgggatgagtcaacatagtactcaacgtcgttcttgatcttgcggatggcgtcaacgaggatggagtcattgtccagcatgcgcaggatggtctctagcatgcgcacgtggtagcggtgcttctcgatgtgccgtttcaagccctcaatccaggtcctgcttctgctggcgagcccaggccaggctcaggggctgcagagcac

SEQ ID NO: 450251 - DNA, 829 bp, Homo Sapiens
tcggaatacgtctgtgaggagccattctgtgttcttccggctttcagtcttccatatcagtgaattttctcttctcgtaattctgaacgaggttggaagctgtgatctgagaagcctgccccttctcccaacactgaaagtcattcagtcctttctgccctgtttgaaataagcccctctccatctcgtctagcctggctaccagggctgaagtgtcttcgttgtaagcattctgtgaggagtccatgatgcggcgaaaacgtccgataaaagtctgcagcagagactgggaaatgtctgcattctcgggactgtcaaaatgcaggagctgggagccaaacccgtagaaatggggccccattttgtggaggtccaccacattgggatctgcactgaacacagtcctccaaccctcttggtagatcttggggagttccacagaaaggatccgtcgcttgttgtcaaaaagtccttttgccagccacaagggtagttcaagcttggaaccctgtgggaccgcgttgtcagtctcggcgcctgcgctccgctccaggaagaaagcgccaaggcgaggcatggcggtctccgtgcgcaccggcagcttctcgtgggacatcaggatgtcgtccaaagaaagaaagttctcctcaggccccagcgcacccgactccactcggaaataagcctctgacatggcggccacttgagcttctccgcttccactcgcgtgattcggaggagcctcaggagttaggggtgtacaagacggggaagcggagactgggcaggatggttggggtcaggaaagtggattgaaactcgttttccc

SEQ ID NO: 450252 - DNA, 1433 bp, Homo Sapiens
  misc_feature (131)..(153): n is a, c, g, or t
caccccacccttttgtggggggttttctggccggttcgtttccagggaaaccacttccctttccctttggggcagggaaacccattttcccttgggaaaagatttttcaaccattcctttttccccccttnnnnnnnnnnnnnnnnnnnnnnncccctttttttaaagcccacacggagattttttaaatgtgtcgaattttgtggggaaaagagagccagaaagctctgaaagaacagtggaagagatgtgaaggacatttcaagcaagtaatgaagacacattcatgcaaccccacccggggaggggtctgtagttcgggagtttccgttaatccaatgcttaaagtgagttcaccgggcaaatgaacccaaggtgttgggacatgcgttaggccagaaccgactttggaaggacgagagaaagcacagagaacaccaccttgatgtgggggctgattttggcactgccgttggtgaggaggcccagcggggccctgtgctcccccaagtgaggtatggaaggtcagagctagtagtgtttcccaaggcaagaacctgagcctctgctaagtgaccgcagcgtcaggttttttcagtgttattcttccaggccaagagagacctcagtcaaatcttcagaaatcccattcacggcaaagctacagtgccacatagcttgagcttctctgggaggtccatgctatacccagcacatcacctgccaggacagggctgcaggagcccatgtgcttcttctgaggagggcactggggtcctcccagccctgagagccccgtcagtactgtgcccacagcacagctttgcatcctttgtccacactgacaacgtgcgagccagagggcgaccacgccaccgcattgatggatgagctgtgctgctttgaaagaaccttttccactttccctgtgagcacactccagatatacagagagccctcagcagagcctgccgccacgtaactgccatcagggctgaagacaactctggtccagtcagagccgcacttgaacccaggtgcactgaatgtctgcttgatagcatttgttcggagatcaataacttttagcaagtcatcacgggagcagctcaggagctcagtcctttctgggtttaagtccagggcagtaatctttcccaacagctccatctctcgaactatgctctctgatcgaatgtcccagaaacgaattttcttgtcgaaatgtccactcattacacattgctctgtgcagacaatatcattgcaactggatcctgcaaacactgtctttatgcagactttgctgcgtagatcccagagtttgagagtccggtcgtgacttcctgagacatccgcgcatttccagcaggaacttagcagacagcactttcccagtcccttacatcccagaccggtaccgcctgcgtatt

SEQ ID NO: 450253 - DNA, 763 bp, Homo Sapiens
  misc_feature (558)..(597): n is a, c, g, or t
catacaccaaatgttccaccacaatactcaagaaaatgagatatcccccataagaaccactcttatcttctacttccatacttagattttctccttaaaactttaaacagctcagcatggcaatagaagatgtctgcctgaagtgggtccatattgttcccaagtgtgcctgcacgtgtgtttacgtgtgtaaatgttttacccaatgtcctttatggtgggtcccctggatgattactttactcccatgttgcttccagctaaattagatttgaatagtattactgcattttaatagaagatataaacctcttttattctgaatactttgctattatgatagtaaaatgaattaataggaattaaattgctaacatggattaaaatagcttttaccattgtagaattttaaaaaagtcaaacaaaagaaatatttattattataacacacgttactatggagagtatttttaacttccagaactaaaaataatatttggtatttacagaactattttatattcatattgcatctaacccctaattgcttattttctnnnnnnnnnnnnnnnnnnnnnnnnnnnnnnnnnnnnnnnncagcctatattcaaacatatactaacagttaaatgagaaaatgcaataaaatgcagagttgaaagtttgaaagaactgagggtgtcaagaatgtaatttctattcaaaaccttttttttgacgacactatcacaaacacactttaataaccatggcattccaccag

SEQ ID NO: 450254 - DNA, 779 bp, Homo Sapiens
ctgatccaggtgaacactcattctggaaactgatcgctttacccaaagttggccttatagccttcgtcatcaactcactcagctcgtgttttggcttcctcgatcctactctgtctctctttgttttggagaagttcaatttaccagctggatatgtgggactagtattcctgggtatggcactgtcctatgccatctcttcaccactatttggtctcctaagtgataaaaggccacctctaaggaaatggcttctggtgtttggcaacttaatcacagccgggtgctacatgctcttaggggcctgtcccaatcttggcatattaaaagtcagctctggtctgctggtgctgatattagttgtaagtggtcctctctgctggtaatgagtataattccaactttcccggaaattctcagttgtgcacatgaaaatgggtttgaagagggattaagtacattgggacttgtatcaggtctttttagtgcaatgtggtcaattggtgcttttatgggaccaacgctgggtggatttctgtatgagaaaattggttttgaatgggcagcagctatacaaggtctatgggctctgataagtggattagccatgggcttgttttatctactggaatattcaaggagaaaaaggtctaaaatctcaaaacatcctcagcacagaggaggaacgaactactctcttgcctaatgaaacctagtccgatggatcctggattgatacaaggttgagaaatgaatgctcctggccttaaacatcaccg

SEQ ID NO: 450255 - DNA, 896 bp, Homo Sapiens
tgcgatggtaacattgacccagcttttggaatttgagcgtgagttctcgttatcttggagtgcttttccaagaggtttagatcttccgctggggtgcggatggggtccgcatccggggggattcccacctggatgcagtcagtaaccaccatcggatcaatgtcaaatgtgtcgttggccgggtccacgtggcctcggtggtagtaccgctggcagagagcaagccctgagccattggtccaagggtcacccccaccacggacatacgcataccggcccagtgacacgtcaggcaacgccaggtactggtccacagcatggaagatggcctggtacagctgctcccgcgtgtaggctgcgaaggtgtcatccgctccgtccgagtagcccagcaggaagaggtgtcggaaggcgatggtgttctcttcccggaatgtcacagccagctgattactgagcccaaacaggatgagctgcaccgtgaccaccaggatcttgaccacttgcagcatcagcttgcagggcttgcggcccttggctcgaaacttgtcgcagggactcatgaaaaagtatttgagacgacggcgaaggtcttcctcttctgggggtgtcggaggggccggtgaaggccccgcctgggtcccatacccggggttgggggtcagaagccgctcggtctctgagccgcgcggacccgccggggctgtcatgctggggcgggagcgcgggacgcaggcgggtacggcggggcagcctgggtccgatcgcccgccgctgtcactgcgacctcgctccctcgcggcgcggcttcaaaccctccggcatcagctgatctgtgcctcggtcacgtgacccggtagcccagagcccctcacgtgaccgcctctggtcccgcc

SEQ ID NO: 450256 - DNA, 948 bp, Homo Sapiens
atggataagggagacccgctgggcaggacacagagactcgtgtaatccgactttcgctggtgagtacaagaagatccggcaactgcgctgtttcccatcaaggtatccgtagatacacaccacaccaggatctgacagctgtgcaacgtcagaagaaagcatgttggtgatgccctggaaaaatctctttggctgatattcagtttccatttcacattgtctggttcaatggtccaagaacacttggtctaatgcaattgatggggctctggcttctccgggtggtaaatcgggtcgttgggctgggaatagggcttggaggcaatccgttgctacttacaaaactttgcaaggatggcgaaaaacactgcttcccaattccccgagtgggtgacggtgctggtgacacaggaatgaaatcgatgcgcttgggggaggcggatttctccacgtcgttgtcactcaggctgaaactttcctcccaggagtggcttatctgcattgcggtctgcacctcccgttcgtggaccgtctctcggttgatcaagtccatgccctcttcttgtttgatctggtgcaagcggctgctgtgcatgcggacaggggaggccggcagcagcaggccgtggcggctcgggaacgttgtgctgttccgcctggcgctcggcgcctcggcctggaacaccggcgaagtgtcactgaggccgtggatcaggggggcgctgttagacctcctgaggcccccgccgccgccgctgccaccgccctccgccgggctcccgcccgtacccggaggcagctccaggtctagctccatcttctcctgagccatgtcgggggcagggaggcgggggaggtgctcagtcagggacctaggattcccattccccgcagtccagggccgccgccgctgccgccgccaccgagaatctgtcagcggctcgcccc

SEQ ID NO: 450257 - DNA, 937 bp, Homo Sapiens
  misc_feature (730)..(738): n is a, c, g, or t
gggggccccccaacagccctcttccaggccttgtatccagtaagaaaagaaaattgcattaattggggaggggtttatcctggggtcaagggctcagggagatcattctttttattgccaaggaccaagaaacaaagtgtagaaatgctatacacaatggtcatgagctacaaggtaggaatggggtgcaggggagacgtggtaacacacagcactattctgaacgaactccagctctccattctaacacttgaaccaaggaaagacagcagtcctttttcactaagcctgcaacagaatgcaaatgtgacttggtttatcagctcccacaggacaggcagcgcaaaaggctattgtaagctggttttgggagcccccagctcaaacagagagtggatgctgaaggtggtccctggccgccactggtggctggtccccggcttgctaggtcctgggcatgtctcgattctcaatgatcagcttgtcagttgaatacagttggccaatgtggacctgtcgacgaattactccaaggtctctcttggctttattcactagggtttgaatttctacaggatcctttacatttttattttctctgaaggcatctcttatcctcctgacagcatatgttctgtaattgtaggcgctgaaacgcttgctctctctcagcatcgcccggtacagagataacacttgtgcgcgactggaggctgccattttggaaagnnnnnnnnntaaacgggtcctcttcgccgaggtcccaagtacgacccaacccacgaaactccagcctgtgcggaaaccacgaacgaaataaaatgctgcggctcggctttgccagcgggccgggcctaagcctaagcgggcagccctgcggatcgcggacggcgccaggcgtccccctcgtgccgaattaacaccagtctcgtactag

SEQ ID NO: 450258 - DNA, 1103 bp, Homo Sapiens
gcatctttaacatggaagtacttcttactgatgattacattttttaaaatcatgcctaccagcccatctaagccaaattcaaacaccactctgcattaaatgaagctgcagcaggaaagctgagcacatagcacccaactgatcggaaagaaacgtaccatgtttaataaaattccagattcctgtggtcgttgtccataaaaatgctttgcagtgttggatatatggtttgcaaaagcaaagcaaatcctccacagttccgtatctgactgatgacaaccatggtacctcttggccactaagcagcagagacttagaacgttcatcgttttgattactgtctttgacacatggtcattagactgggttcataaactgctggctcttcacttgcataaagattttccataatgtctattacatcagacacatttaaatgtttaattaataaatcaatctcttctttattgtcacttccagtgctcatgtactccattactgttgctctttctggagagtctaggaaagaaaacacaaaatatttggtttacgatatttgtatttgcattcaagaccccatgggaaactgacatacaaggattggcaacaggattttatatgcttttgttcagaaaacgagggttctgtgtcaactgtgtgtatgaattcacgttggcagtgcagagttgaaagggacgtaagataacctttagtccagctcactttgcagagggaaacctgagatccagagagcttactcttactcacagagtcagtggtatcagctacaggcactgaaaacaaactttcactaaacctacacacgaatcaagagcagctcagaaatctttgaagaccttaggctaccggctctttagggcttccaaccttacacaacccagctattcccccgaagtggcaccctccctgcaagaatcgctatggcttttttatgcctctggtgactttaaagaaaaataacctcttcactgaatgcaggagctaacttggcaaataaaactcaggccctggaagccagaagctggaaaaatggatttcaatatacacaaatttgatggcaatgggtcaagtttcaggaaata

SEQ ID NO: 450259 - DNA, 822 bp, Homo Sapiens
  misc_feature (65)..(127): n is a, c, g, or t
ggcaattccgacgaggcggggttgcacctggcgcttggcgcccgcacctctgcccgcctcggagnnnnnnnnnnnnnnnnnnnnnnnnnnnnnnnnnnnnnnnnnnnnnnnnnnnnnnnnnnnnnnncctcgagcgccgccaccggccgccatggcctctctgggggacctggtgcgcgcctggcacctgggcgcgcaggctgtggatcgtggggactgggcccgcgccttgcacctcttctcgggcgtcccggcgccgtccgccaggagctgtgcttcaacgcgggctgcgtgcacctgctggcctggggacccctgaggccgcgctgcgggcatttgaccaagccgtgaccaaggacacctgcatggcggttggcttcttccagcgaggagtggccaacttccagctggcaaaggttccaggaggctctgtctgacttctggctggccctggagcagctgaggggccacgctgccatcgactacacgcagctgggcctgcggttcaagctgcaagcctgggaggtgctacacaatgtggcgtcggcacagtgccagctggggctctggacagagggcggccaggagcctaagggaggccatgtccaagtggccggaggggtccctgaaatggcctggactcagccctggagcaagtgcagagacggggctcaactgccgtcacggcaggtcccccaggggcgaggtcttccgggcccaacggtggcacctgaagcactggagcccgggattcctgggcaggccaaggggtggctctgcaagcccgacgaccaggctggggcgatcgcctcagagcaaagg

SEQ ID NO: 450260 - DNA, 1455 bp, Homo Sapiens
tgtctagttcttccgggaagggttacggcattggtttgttttgtttgttttcggagaacctgtgatggctccagttcatgatgcttattgagttgtaatgctattggcatatccaggcacttgcctggactagcaaagttttatgcaataagttcatgtttttatggtgccaggatggaaagacaggaccttcaagctgagttcccaggattctacacactcagaatctcagatcttcctccagatcaactcctccagttgctcagtagagtcaatgaattctgccccagtggttgtcacttctggcttggcctggaggtacaaagggaggccagtgtgatggatgtttctgaactaattcaacatccttaaatgtctcctttagaatttccttctgaacaaggctacaccagttatcaaagtcttgtttcttctttgcagaaaaatccctatgcaactgaaggatccaggtttaggatgttcattcgctgtggggactgcaggcaatggaaagtctggtcattaaccgttccattctcttcagtgtcaacaaaggtctgggttgtatgagggtccaagaagatgagctcgtcacctaagaatcctatgaaataatacgcgttatttggttttcctcctaatgcccctaaagactgtggcatcttaaaacactctttgaatgcatcaacatagacaggattgatttggtttatgcccaggcgaaggggcacaatgagcagcaggggtttccaggctgagcagtaggcagaggtgcccttactctggtttgaagcagttaaagaatcgggaggcctgtcaccagctgtgtcagcactcaagggaaggacacggcacatttttttgatatcttcaatgaccactgtgttatccattgaaacataaacagccaaggaattccattcgtcaaataaagcaagtttttttaacacctgtgcaactgtatttggtccaaaccattctccaattgatttcccttctcctacatcccatttgtgccatttgatggatagagtagcgacgatcttttctatctaagaagctctgtaggatgcgttggtattctttgggttgttctttgttgtttctcccagctccagtcccttcccaagtgtctacagataagggcttgagccagcatcatctgtccacagcgtagcatacatccccaaccagcatctgatgaagggcccgttccaccaattggtgaaaatttccttctgtatgtaaaccatagacgagcacttatatcagacaacagcttagatttttctgtctttaaggagatgctgcttccctaagatccataccagctcatcttgtatctggatattcttctacggtagtcagtgaaaatacgtaatctgatcttcatacttggatccaactgactccattctccagctgtcatcctgggccaattccaccggcaacttg

SEQ ID NO: 450261 - DNA, 1691 bp, Homo Sapiens
  misc_feature (42)..(42): n is a, c, g, or t
  misc_feature (55)..(55): n is a, c, g, or t
  misc_feature (102)..(102): n is a, c, g, or t
  misc_feature (149)..(149): n is a, c, g, or t
  misc_feature (246)..(246): n is a, c, g, or t
  misc_feature (340)..(340): n is a, c, g, or t
  misc_feature (342)..(342): n is a, c, g, or t
  misc_feature (346)..(346): n is a, c, g, or t
  misc_feature (365)..(365): n is a, c, g, or t
  misc_feature (373)..(373): n is a, c, g, or t
  misc_feature (408)..(408): n is a, c, g, or t
  misc_feature (416)..(416): n is a, c, g, or t
  misc_feature (615)..(615): n is a, c, g, or t
  misc_feature (1012)..(1025): n is a, c, g, or t
  misc_feature (1098)..(1110): n is a, c, g, or t
agtatgtttattatgggtttgacttatatgatgacacggcgngccaggggaaggngtttaactataatgtgtgattgaacggtcggagggtggtgtgaggtntaagtgatgcgatgaacaagtggtgggggggcggggtggtgcgttgnagaaaacgaaccagaatcggggtatcattcatttaacaccagaagggttggtggtgtgcgggatcggagtcgacagggcgtaagaatcaaaagcgangggccgaagacgtagtttgtaaatcaccgcaccgcggacgcgagcgagggttgcggcatgagtcggaagcggccgagcgagcaagcgtacgctncntcanccgtacctgcacgtacttngttacgantcagatgatacggagggtgataaccgtcgctcatngatcacgngcgcgactgtgtgtcgcgctcgtcaaagagcgggagagagacgacggtgggaggagctgcggaagccgtccgagaaacgagtcgatgctgttgggttgagtgtagtgactataggaagtaatgaagtggtggtgatcaacagacgggcggtgtcagcgaggatatagtaaagtgagtagcagatagtcaagagctcgtntgttgtgtgtgcgaggtgagtagagagaggatgcactcaagatacaaaatgagggtagtgggatggcgacggcggggtgcgtgacaacgaaagcggtgtgcacatgcgagcgagcgcggcgataagaatatcatacagtagggtagggataggagacgaagagagtgaaccggagaatgggtgttcttgcagggcggcggcgtggggtagggtgaataaagagtcaatcgggggcgggcgtggcgtcataacacggggactacggcagacttcatacggaggcagttgatggtgagttgcacagtgcaggtagggtcagtgtgcgagatggagagctacgggcacaacaaaaaggggtgcgaagaggggggaataagctatggggcggtggggcgtnnnnnnnnnnnnnnactcgaggcagcgtaacagggagacgggggaattacacgggcggaggcacagcgggtggtgaaagcgggcgcnnnnnnnnnnnnnaccgtatatctcctccactggggtaggaggggacgtgaagtagacacgaggatacggaaccgggtggagacgggagggatgggggggtatcagaggagggagcgtcagatctgggatgggagaggtacgatatggggagaacataacttggggatgcgggggcccaggggtgaacgcgggtgggcgagagcacacgtgtgcggggcagccaataggcgccattgacacggggatgcgccgcagagtgttcacgaccagcgccaggtgccgcaggtccggctcactctgctgcaggctgtggtggagcttgagcactgagaggtcaaagagggagctagaggccacggccgggggtgcctgtgccaccgctgtgtggccaggatctagccaccaggagtcgactgccagaggttccttctcctcctcctcctcccgtttccgcttcagacccttgctcagcatcttgctcactagcggccaatcagaacgaagaggtagccacccacaaccaatcaggaaacggcggcggcagcatcgcttgttggctgtcctccggaaacccgcgcctgggtcgcgagacg

SEQ ID NO: 450262 - DNA, 1020 bp, Homo Sapiens
gttggcttcagggtcttccctctcctttgatgttatgcgacggcgttcaaatcctgccggtctgaaccttctcgttgcgcaagcatcgaatccagtcagcgtagagaaaagttcctggtagtacgttgtggtccccccgccgcaccaacaacctcctcgcgctccataggcgccggtagaagtgatctgcggcatggcccgatgagccactcaaagagcgggcccgctcgccgccggctgctgggatccggttcaagctcgccaagacgcgccgcatcggggagtcccaggccggctccccacccgtgttatccacctgcggccccgacgccgtcgcaggggccccggacgactggacggccgctaagtgttgcgcggtgcacagcagggccgaggtctccaccacccggaccggcgcggcgggcacctccaccaggcgcgcgggcggcgcggaagcgggcaccaggcgcgccgacggggtctgcagggagcgcgcggcgggcgaggcctccagcagctctgcgggccccaggtggccgtatggctctcgccgggctgcgtccgggacggccgccaccgccgccccaccgggtagcgcgtcccccaggtcgtcggccgtcgactccaccctcgattcctccgagttctcgctaggcagcgtctgcgtcctcagcgctgccatgcgggatacaacacttcgcagctgctttcgtatcttcctggacctcaagggcagggccaggaccgacccgctgtgtggctggggcttgcgccggcgcctcggccgcccgcgcctcaacggccctgcactggcctggagcccatccatggccagaccacaccagtcttccccgcccggccggccggggccgaagctaaagcggttcctgaatgcagcggctgcggtgcactctgggaagggggcgcggcctccagccacctcggggttgccacgcccatcattcttctattcggcccctcccgctctctttcattaaatgtttggcttcaagctgtagc

SEQ ID NO: 450263 - DNA, 1003 bp, Homo Sapiens
ctttatgtagatgttttggttgttcatattcttttttgtatttttccattaatccccttccaatctgggttctccaggtagatattcatgtcacatttacatgtagctttgtgcgttatggcaaataccaggtactcatgtagttctttcaggggagtatacatcacccagagggttttgggggttgatgaggatgagtcctttgaccttcacaccctcagagtgagcttctctcagggccatctccagcttctccactgtgagctggaaggggcgtgtgtctagccccagtgacctcactgtccaggtagacataggccagccggatgttgccatagagacacacgtgctgtgtgatagcgccatagtaaggggtggggatcaggaaagcctccccggcctcacacagcaccgtggccagagcagagaagagcgaggcaccaccattcaggacaaccacattctctggtctgaggggtactgggctcttgcagtagaaagacaggaacttggccacttcctcccggaggaacagatgtcccctccagtgagcatactgcagcagggatggctccaccctctgcatgtcgcgctgactcagccgccaggacagcaggtcaaagcagagtttgttctcactggtgcccaagttaatgatgccactggggttcttgtcctcatcatactcatccatgtggtaggtcctgtagccctcctcagctgaatcccagaaccatttaatcattcttcctctagaggacaggtaggaggtattagaggagatcatggcaggatcacccactccacggagctctggcagcttctggtccagttttctggagcattctccttccagatcttccccatggctactgcccaggtcctgcatgcaggtggggcccagacaggtggtgggagccctgaagtccttttgaggaagggtgaacatctccagctctcccgacagcccaggtccgaggaagggcagcacagtgggcggaag

SEQ ID NO: 450264 - DNA, 1518 bp, Homo Sapiens
  misc_feature (560)..(572): n is a, c, g, or t
  misc_feature (959)..(972): n is a, c, g, or t
tccgcctagagggaaccccccccgggcggggcaaatggatttatttttgaatgaggggttttttgacttccaaaaccggtaagaatcccaaacccagggaggggcaaaggttcattaaccccaacagttaatttccccaaaagggtgggccaaatttaccagaggggttgggcctgggaaggggttaattggaatgggtgtctgggccctcccctttttgcttatgactggcccattgaacttagaggacccttggccttttcccaggaccactacttttttgtaaaggggggagaataatccttacatacatcacagagcagtttggagaatcaaaacagagacagaagcactttggaacctggatgagcctgtaagatcggaggaaccaggagaacttggctattaaggtgacagagtggtcccgagggctctggaatccctgcagctgaagtttatactggtgaatctacaggggccccgccttccctctttgctgatttcttaggaaaatcaccctcgtcctcaagttgaagaccactgagcccaatttctaggtnnnnnnnnnnnnngagaagcctgaacttggtgtagctacgatactaatactgatttgaatcccaaatagaagcctggtggtgggggtgaggtcctgtcgcaggctcatgcaacagggaacttcagggacacaagcacgaacacttcctccttttgaaactcaggaggccctaaagggcacagtcagaaattccaaccagcgtcacgatctttgagtctcaggaagggattagctactggatttaaactcatcaccaagtttaaagtgatgtctggtgaatcacaaaaaaatgttctttcctcttacatcatcatgggtagttcccatacattcatccgtgcaaaatatctcaatattcaaagtgcatcaaatcggatagacttttgcaatagaaatattnnnnnnnnnnnnnncctctctataaaattaattgtgctttctttttagaaatcataaaccataaatggtttgtattcataaatcttttaaatatatatttgagagctatcaagtggtcgaagattattttatatttttctatctagttttgagtcagcctcccattcttggcctgccacgtgtagaaactacgtggttccagaagcttagctctaaatattctaaattctgattttcacacttgccttcagctaaccagaaagcagtttgttgtttttcaggcaatctcttctcgtcattaaccagcacttctgacacactcagttcagttcagcaggctatgaaatttgttgggcatataaataactggaactttcaacagggtggttttgaaactagagcattaaccaataaatgacaaacccacaaggacagtgcattgtgtcacatagaagatctggaaagtacagctgtaaactataatctccagtctctgagttagcacctttccacgttagtctcttacctttttccctattccaaaccaaacacctcagcga

SEQ ID NO: 450265 - DNA, 890 bp, Homo Sapiens
  misc_feature (450)..(450): n is a, c, g, or t
  misc_feature (452)..(452): n is a, c, g, or t
  misc_feature (458)..(458): n is a, c, g, or t
  misc_feature (472)..(472): n is a, c, g, or t
gtttcacccaacattcggtaatgcaagatctgttgccataccacacagatggctttccaattcctaccacaggtagttattcttctcttagcacaggaatcttgttcaaacacaagtgttgaatatcaatttgaagtctttcaaacactgaatttttctttctgtgttttccatccaccttgaatcttgtggtcaccttttccactaggatgaagtgaactttttcagcatcttttaaggcaatatcaacccaatgagataattttccctttcccgctccaaactcaacaaagcatcttcttggaccaagtaactttaaattttcaatgttacctaaaatagaagcctgctgtttcaggtgcttggttgcagaatcgccatttttagggtcattaagtgcatcgtgtaatgctggatgggacataatatgatctttaagtgttaggaaantnttccanaagcccctgtccanccttgcttttctcaatttcttaattaacttttccaactgctcttcagatagagaagaaattggaactaattgttcaggtatttctgtttcatctcttaagcctgcattaatatcttgaatatagaaatcaggttttggtttctctcttgagttacattttttcaaatgctttgctagttgatcttcatatactgtgtgttttggatctaaaggacacaggattcttttccgagcatcttcttcctccatggctccagcgtgttcaccacaaaatcttttccctgcggccaccaccatcctgcagaaccgtttcttcttttccacatagtaaccgcatctaccctcagctggaaaaccaggcgcgtgcggcgacgtcgcggaggtcgccataattctagggctcgcttccggtgtcccc

SEQ ID NO: 450266 - DNA, 808 bp, Homo Sapiens
agcgggggcgccggccccggccgctgcggtcggtccgctggttggtcgggcgcttggtccggcagttggtcggtgggccagtggcccgtcgctcgcttctgggctctcatgtttgaaggtgggatgggacacgggagcggcccgcacacctgagccggcctgtgagaggagcctcggccccgtacccagtaagaagaggaggaggccaggcaggcaaacaggagtcatggcttctgatgctagtcatgcgctggaagctgccctggagcaaatggacgggatcattgcaggcactaaaacaggtgcagatcttagtgatggtacttgtgagcctggactggcttccccggcctcctacatgaaccccttcccggtgctccatctcatcgaggacttgaggctggccttggagatgctggagcttcctctggagagagcagccctcctgagccagatccctggcccaaacagctgcctacataaaggaatggtttgacgagagcttgtcccaggtaaaccaccacagtgctgctagtaatgaaacctaccaggaacgcttggcacgtctagaaggggataaggagtccctcatattgcaggtgagtgtcctcacagaccaagtagaagcccagggagaaaagattcgagacctggaagtgtgtctggaaggacaccaggtgaaactcaatgctgctgaagagatgcttcaacaggagctgctaagccggacatctcttgagacccagaagctcgatctgatgactgaagtgtctgagctgaagctcaagctggttggcatggagaagga

SEQ ID NO: 450267 - DNA, 1012 bp, Homo Sapiens
  misc_feature (83)..(83): n is a, c, g, or t
ccaccccttgtgagttttcccttcccccaaggccctagctccccaaggttttccggcccatttttttccacccagcatccttntggttcttattgggggcattcctttcagcaggccctttacaaaacttccaatttggtttgggcaatcactgatggagagaggttggacagtttgggctggcggatagtgctgcccatagtcctggcttccctggatgtacttctccctctggtcattatctaaacgcaggtgttctgtgtgctgcttctgccgatctttccgcctccactgggcaggggcattccttttcgtccacttgttgctggctggcccagtggaaagtacatcagactgcagcttagggaagaagcccggctcatatttcccttgtccaatcttcatgtcaagtaaatgtgggtgaattgcagtatggtcaatttttgccagacgcagctcaattgctttctctgcttcatccacagtggtacacttctggtacatggatgtacggagagtaggtgtccgaacattcaacagcctgatcttgtcaactcgggaatcaaatacccggagtacagggtctttatcatcatcatcatgacacattattttgttgtcaatgaaagatgcaaacatctgggtctccaggaatcttgagaggaagggcaggtagggctcaggctgatctgacagaaaagatgctttatcaaagttttgcatttgctccctgttggtaaaccaggattccttatcctggctgggttggatgacaaacacctcataatctgcaaacatctgagtgaaacgatttgcaaaaacttcccggatctgaatgtttagctggtaaatcctgagttcttcttcatcacactgaactttgagatccttattgctgctggggtcttcacgcacttccaacttttccaggctcaccccagttctcttgaccaagcctcgtgccgaattcgccacccaggcctcgctacctaagagaccgttatagtactgg

SEQ ID NO: 450268 - DNA, 1037 bp, Homo Sapiens
  misc_feature (129)..(223): n is a, c, g, or t
ggcctgggtggcgaattcggcacgagggcgctctcggctagctgcagcggcggcggcgcggaggggaaggcatccaggatgcggtgcggggcggcccggtgcccccccgccccgtcacggcagccgcgnnnnnnnnnnnnnnnnnnnnnnnnnnnnnnnnnnnnnnnnnnnnnnnnnnnnnnnnnnnnnnnnnnnnnnnnnnnnnnnnnnnnnnnnnnnnnnncccgggttgcgggggctcggtgccgctccgcactgcccggccggtctcggccccggcgccatgagtggcggcggcggcggagggggctcggcgcccagtcgcttcgccgactactttgtcatctgcggactggacacggagaccgggctggagccggacgagctgtcggcattatgccagtacatacaggcttctaaagccagggatggtgccagccctttcatttcaagtacgactgaaggagaaaattttgagcttcttaaggagaatgaaactattgcccggctgcaagccttggtcaagagaactggggtgagcctggaaaagttggaagtgcgtgaagaccccagcagcaataaggatctcaaagttcagtgtgatgaagaagaactcaggatttaccagctaaacattcagatccgggaagtttttgcaaatcgtttcactcagatgtttgcagattatgaggtgtttgtcatcccacccagccaggataaggaatcctggtttaccaacagggagctaatgcaaaactttgataaagcatctttttctgtcagattagccctgagccctacctgccccttcctcctcaagatttcctggaagacccagatggtttgcatcttttcttggacaaccaaaataatggggtcctgatgatgatgataaaggacccggtactcccggggattttgattctcgaagttgaaaagaacccggttttttaatggtcggaaaaccttattcccccaaaattcccctggaaccaaaactgtccccctggggggattgaaccccaagaaggcatttg

SEQ ID NO: 450269 - DNA, 927 bp, Homo Sapiens
ctgacagaaaaagatgctttatcaaagttttgcatttgctccctgttgtaaaccaggattccttatcctggctgggttggatgacaaacacctcataatctgcaaacatctgagtgaaacgatttgcaaaaacttcccggatctgaatgtttagctggtaaatcctgagttcttcttcatcacactgaactttgagatcccttattgctgctggggtcttcacgcacttccagcttttccaggctcaccccagttctcttgaccaaggcttgcagccgggcaatagtttcattctccttaagaagctcgtaggaatgcaaaggggagccagcaatgttcccattcctcttgtccgagacaagctcagaggcccgcagcctcttcagcttggaggcactctcactgctaatgaagattccctttagggggaattcctgatgccatgtagaatctcagagacttcctggacatactcctatttgttgggtaacttgtggcaagtcctctggcaactcaatgaagtggttgtcaatgtccacaaagcagaggttagcctcttgaggcagctccagctttgaccggtcatccaggccattggaatgcaaacccatcaggtatggaacaggagcatctaagaaatgcaggagagaagctgggagaatagggacatagacatgctgccactggaaaggaaacatgagagctgtaatcgtctccgccacagtcatcagtctctggtaatgctgtgagtagagcaggatttgaaactccagaagggcacaagtaaaaagctgaaacacattctccaccccgagcagttcaaaaacctctttgacaggaaagtcaaataggggaagctcattggtacttggtctctggcagattattggcccctcgtccgaattcgccacccaggcctcgctactt

SEQ ID NO: 450270 - DNA, 832 bp, Homo Sapiens
  misc_feature (152)..(170): n is a, c, g, or t
tcagtcaccatgacagagttaggtatttactacataatcagtaaaagctccagaggtggctgcacagaactcctgtgcatctgagaaacaccttctagtcaggggagggttccctggggaatgattccacaaattatgctgcattatagggnnnnnnnnnnnnnnnnnnnactggtgcatccattcacttggacacgcttgcacacatacatgcatgtacattagcatggctaacaacacaagcacatatgcacactcctttatagacacacatgctcacttataagagtagacccaggggacccagacaactgcatttcgtccgagtcaagctagtcaactctctctgtgtgactctcactgtggagagctgctgtccgggagagctggctgtgcagacgctcaatttctgcatctttcagggccacctgttcttgcagctgggcgacttcagccttagtggcctttagcttccattcatactgattcctttcattttccaactcttccactttgattttgaggtgcctgagctcttgcagtaactcctctgctttttctgcttctcctcctgctctctctgctccttctccatgccaaccagcttgagcttcagctcagacacttcagtcatcagatcgagcttctgggtctcaagagatgtgcggcttagcagctcccgacagctcgtccggctccagcccggtctccgtgtccagtccgcagatgacaaagtagtcggcgaagcgactgggcgccgagccccctccgccgccgccgccactcatggcgccggggccgagaccggccgggcagtgcgtagcggcaccga

SEQ ID NO: 450271 - DNA, 1106 bp, Homo Sapiens
tcccacggagctacagcttccaaagagggcagccctagaaactaacgcaggaagctccaggaaggcaacttgaaactgccctcaagagcctgaactttttcctcaaagtgtatccctggaatgtaaattagacaccccccccgttcgttctcgaagcctccccccacttttttctaaaagtggagaaaagaaaatagaacgaatgggcactaactcgctcatttgtgcccccctcccaaaaagttgccttaaaaattgatttaaaaaaaacagaacgggcaatgcgaaaacgctgagtccgcagcgcggggcgaaagagcgggcttctcttgttttaattaaaatcttatcactgcagttgctcttcgaggcagcattggaaggatttctgcccctccaagcttcctttccagggtacgtaatgcctagccgggctcggggggctgcagagagagggtgcgggggcccccaggacagtcctgctggcgtggtccgcactccctgcgcccccggtcaggtaggtcggccgcgggcagctcacggctactcaacccagaaaggattttgctgaaagcgcaaaataaaagtaccaagtctgggggattggggctcccttccccctacggccgccgtggccagccaagcactttttgggcttggcggctacttcctctgagctcaacagattttatttttttcccggtctcgccctccctggagggggctgcggcggatggaaggcgagagaggcccccagccaagaggtttttaatattacactttaaataggttttcagaaggctccgttggagaaatgctaataggcctgaaatgtcacgaatccgagacgggattccagttctgccgctcatctcgatctaatgcctctctttctagctcctgatttctttcgctcggccggtgggggccgaacggagacggggagcgcccacagcaaagaggggctcttggggaggggcgcgctgtgcgaagcgccgcagcccgggcctgggccgagcggggggcgcgccccgctccgcgtttctataggaaccccttttagaagattagagactcacccgctgcctgccgccgcggcctctcca

SEQ ID NO: 450272 - DNA, 1646 bp, Homo Sapiens
  misc_feature (16)..(16): n is a, c, g, or t
  misc_feature (34)..(34): n is a, c, g, or t
  misc_feature (46)..(46): n is a, c, g, or t
  misc_feature (52)..(52): n is a, c, g, or t
  misc_feature (96)..(96): n is a, c, g, or t
  misc_feature (114)..(114): n is a, c, g, or t
  misc_feature (172)..(172): n is a, c, g, or t
  misc_feature (253)..(253): n is a, c, g, or t
ccaacaaagaaaaagnaatttttaatccagcttncctgttggaacngcacgnaaaagctttggctgaattttccaaggccagtctttccagcctanccctctgtccaaagtcantcgcctgcctcccaagattggaaacagtctgtgtccaaaacattgaagttgttcccangaatatgctcctaaagcatcagtcacagcgagaggtatgctcctttgactttcacaggggaggtcactcatgtcttctgtngtctttttcgtggttgttggcaaacattctggtgacattaaggaagggttcaagaaatatccacaggcctcttcacccttgtctggcagagtcctaccactggtttctgttgttgtggtagaatcaaaagaaaggatatccataacagggggagtagagatctgcaaatcgattacctcaagctttggattaatctcaaaagatgaagaaaaaaatcttctacagtctcaactttttcctcatggggatgtggtgttcttgggtagatatcaagaagatgtggtggtgaatcagaatgtaatcttttgagatttcttttggtaagacctttacgatgcgattcatcaaagttagtcctccataataagacctgtgtgtctgcacctcctgatgcaaatagctctccaccttttgaaaatgaaacagtaaagacaggtcccgtatgtccttgaagtgtatagatgagccttccttctaagaggtccagaatcttaagggtaccatctgaagaagctgtgatgagatagttacccgaaggatggaatgatatgcaattaactccaccgctgtgaacttggtaatgctgtagtaatttgttcactcttacatcccagactttcacagtttgatcagaacctgctgaagctatgcatgtaccactagggttaaagtccacaaaatttgcaaatcccacggaatctgagaagttattaccccattgcttatttgtggtatcccaaattttaatagttttatcctcactacatgacacaattagtcttccatcgggtgaaaatttggcacagcgtacccagtgtgtatgtcgatacaaggaatacaggaagcgctggcgatacatgctccatacttttatggatttgtcttcagaagctgtagctagaaactggccatcagctgaaaagtctacacttcgaactggagctgtatgagctttaaattctgagaattttcctctccaagttgcttgccgttggggctgaggtccaaggaggtgatcgcagctttgtggcctttgaaataacgctccagaacggggtcctcctggaaaggaaagttgtcaagttttgaaagccgccgcagacctcgaattctggcggctgggatccacgctgccacttccccggagtccggcttgggaatggccacccaggcggcggcttggctgggcggcggggccgggcagcagcccacccacgggcgcggcgcccagtcctgctacagggagacgccggcgccagctctccccgcagagcccgcaaaacgctctgttcgcgcttcccagagtccagcgcatcgcaggaaccgcggcccctttgaaatgcacgttcccgggccccgcccgctggcccaaggcaggcaggtgcgagatgcg

SEQ ID NO: 450273 - DNA, 882 bp, Homo Sapiens
cccgccccctttttgtggtcgttgtttttgttggtaggttccatgtgggttaccacttaaacgtaatatagtcgacatattgtataatattatgcgtccgtgcatatacatagccaccgatagcatttcacatacgagcatgctttctcgagccatgttcgtacatgaacatggacatacacatattcttaggaacaaataagaaagataaatggagaaggaaaacccaaagcaatgtcagagttgacaaaactgcaatggcactttatatatggcctgtcgtgagtgagctgtttaggccttgccggactcctcgcagcccggtggcttgaaggcgatgaagctgacgcactgcacctgacgcatgttgtcgaatccgatgatgcggacataggcgtcagggtactccttcttgacctcctccacctcgttgatcacctgcgtggcgtcggtgcatccgaacataggcagcttccacattgtccagtaccggccatcgtagtacccaggggatgcgttgtgctcacggaagatgaacccaaccttgctgaactcgaggcaaggcacccacttggagcggatcaggtagtcgacctgcttaaggagggcctccgtgctgagcggtggcaagtaggacagggtctcgaacttcttgatgccctcgatgggccacacctgcatgcacctgatccttccaccgttgctgacgctgccgaggctagcgccgttggagcggcggctgacggggaggccggcggtggacttgagcccctggaaaggagcgacggaggtggccgacgaggccatcacggtgggggccatggctgtactatgtaggtatatagcttgctaggaggaggcaatcccgggaattccggaccc

SEQ ID NO: 450274 - DNA, 1143 bp, Homo Sapiens
  misc_feature (205)..(215): n is a, c, g, or t
  misc_feature (453)..(453): n is a, c, g, or t
ctctcccgggtgtatggaaatatttttccgaaaaagctctatactttcaatgagagggagaaaatttttttcaagggcggcaaagcgatatgccaggcttgtttttgccaaccatttattcccgttttaaagaatttttaattatttccccttaaggagcttttaaattcttctataagggaaagtttgctcccaatttagtttnnnnnnnnnnngaaaaggtaaaggtttcctttcacaaaaggatcccccaaggctatgccagttttttccccagtcaacggacggtttaaaaaagggacgggcccagggcctaggctgtataaatacgggctcactattagggacccacttttgaccaaagaaagactgggtacgcggtaaagtttggggcccctcgaggggatactttagagcggcccgccccatatggagagtggtttattttttacntattgccaaaagatgtttctcattagttaattgccgggaatacatagtcgacagattgtataaatatattatgtgcatgtgcatatacatagccaccgattgcattcacatacgagcatgctttctcgagacatgttggtacatgaacatggacatacacatattcttaggaacaaacaagaaagataaatggagaaggaaaacccaaagcaatgtcagagttgacaaaaccgcaatggcactttatatgtggcccgtggtgagtgagctgtttaggccttgccggactcctcgcagcccggtggcttgaaggcgatgaagctgacgcactgcacctggcgcatgttgtcgaatccgatgatgcggacgtacgcgtcagggtactccttcttgacctcttccacctcgttgatcacctgtgtggcgtcggtgcacccgaacataggcagcttccacattgtccagtaccggccatcgtagtacccaggggatgcgttgtgctcacggaagatgaacccaaccttgctgaactcgaggcaaggcacccatttggagcggatcaggtagtcgacctgcttgaggagggcctccgtgctgagcggtggcaggtaggacagggtctcgaacttcttgatgccctcgatgggccacacctgcatgcacctgatcccgggaattccggaccggtcc

SEQ ID NO: 450275 - DNA, 1088 bp, Homo Sapiens
ggcctgggtggcgattccggcacgaggagttttggctgcggcagcggcggcggcggccggagcgggccatggacgcgctcaagtcggcggggcgggcgctgatccggagccccagcttggccaagcagagctgggggggcggtggccggcacctcaagctgcctgagaactggacagacacgcgggagacgctgctggaggggatgctgttcagcctcaagtacctgggcatgacgctagtggagcagcccaagggtgaggagctgtcggccgccgccatcaagaggatcgtggctacagctaaggccagtgggaagaagctgcagaaggtgactctgaaggtgtcgccacggggaattatcctgacagacaacctcaccaaccagctcattgagaacgtgtccatatacaggatctcctattgcacagcagacaagatgcacgacaaggtgtttgcatacatcgcccagagccagcacaaccagagcctcgagtgccacgccttcctctgcaccaagcggaagatggcacaggctgttaccctcaccgtagcccaggccttcaaagtcgcctttgagttttggcaggtgtccaaggaagagaaagagaagagggacaaagccagccaagagggaggggacgtcctgggggccctgcaagactgcaccccccccttgaagagcttggtcgccactgggaacctgctggacttagaggagacggctaaggccccgctgtccacggtcagcgccaacaccaccaacatggacgaggtgccgcggccacaagccttgaggtggcagcagtgttgtctgggagctggatgatggcctggatgaacgcgtttcgaggcttgcccaagtctcggacaaaccctcaggtctggacaactggcctgacaggcccaggacatgcattacgcccagtgcctctcgcctgtcgactgggacaaggctgacagcagcggcacagagcaggatgactcttcagcttctgagggcccgggggcagtggacacaagcggcctgacacgtgatgggccaaagccacctgtgggggggagccattttgggccgctgcacctctcc

SEQ ID NO: 450276 - DNA, 894 bp, Homo Sapiens
cagtgccaaaataaaaaagggcctaaatatctttaaataagttggtcattctcaaagatattctggagcaaaatgcaggaattaaacatctataaattcttcttcacttctgtttatagtgtagtaatttatcatctaacccatagtggtctatcaattgagtaaggcttagtttcttgttctcttcagacacagctgactgcaactcataaagcaagagctggctacagcttctccacttctttattaacaactgtaactgagacagatcattctttgatctatacattttgactagttttagcctccgaagaaggtcttctttctcctgaacctgcttcaccaatttggctttttcagcgtttaatctttgtttaggaagcttctcactcacaaactcattttggagagcactgcatgatccagaatcaagtgactgagattcacagacattgagattcttcaaagtatttttcaaatttgtattttcttcaaattcactgtctatatgtttaaaactttcttgaaattccaaacagttttcctctgtggaagatgctggtttctctgaaaaggtctgatcattttcttcactctctactttaagacgtttcaccacattgtaagaggaattaaatgaaaatcttgttttccttaatctttctctaagtgttgcactcataggttgttttcgggaactatttgtatagggagatgatggattcgcagaggcctgaggagtgctaggtaaaaccacagctgagtctgacggactttccatcttgaaagtgaaatcttggtttttctctgcggccgtaaatcgatcctgtggcaggggcggggccgtgcggtaggcggaaaagatgcgcaattggccagattgcctgacgcgcg

SEQ ID NO: 450277 - DNA, 1689 bp, Homo Sapiens
  misc_feature (1385)..(1385): n is a, c, g, or t
  misc_feature (1456)..(1456): n is a, c, g, or t
  misc_feature (1678)..(1678): n is a, c, g, or t
catattttctctgcccggcgtctaatcgttcgttacactttatacgaagcgaggcctgggtggcgaattcggcacgagggccggggacacccggttgggctctgctgctcccttctgggttccgaggcccaagcccttggcagtgtttgtgagtggaagggaggtcacgctatcgtccgcggccccagcagccctgtgccctcgttggatcccgcgacgcggctcctttaagagcctcgcgggtcgcccgccgctaggtcgctccccggccatgcgggcgctgcgggccggcctgaccctggcgttgggcgcggggctgggtgcggtcgtcgagggctggcggagaagacgagaggacacactggcaactctctggactgccgcgccggtatttcccgcgctgtacgtggcggcgggtctttgacttcccctcgtccgcgtaaggggagactaccagatttgtgcggagtatgctcccaaaccccgcccgcctcggggccggcgagcttagcagttagatgccggcgcacggggtggcagcgacgccgggttcccttccgccccgcacccacgcccgcattcaaccttatcgaacaagttgcaacagagaggtaataccaaaattcagtttttttcttatcccgcctcttcgggcgcgcactgtttcggtcccctttttggccctcccccactccctattttatccttgccgctaatattatccatccgccataagcctgcttttaacaccctgccgcacatcccgcttagcctccgttacggcctaacgctattggttttattccctatacctagccgaatgcccactttggtttgtccctggcctacacaatagtgtcctcacccggtccgtccgagtctcgcgccaatggaggaactcaagttacgatccgacgctggagctaatactatccgttttatcagtgtgtcagtgacgaaccgtcgtatatgacgccgctcacttactgtttaccgtcgatgtcagcactgacgccgagataggcaccggggacacagttagatatttctacctgtcccgtgtgcacctgcgctttttctactctttactgttatagttccggtcattccacctatcttgcgcattgtgatacaatatatcatactattcaccgcgccagcgatttgagatcgtttccaaacaaccatgccacgcgctctctcctttatttttttgtagggcgctcctaactctctcccgcgcgttttttcttacccccatatcttgcgtcccctccttttattagctcggatttatctccccgatcctcccattcgaaagctttacccgtctcttacccccccaatctgtcaagtgtccatgatatccatcctttcgtgtcganatatgccttggcgcgctcgtgactacatagtacctccatataccgggcgtcatacgcacgggaccatttgntttttcccgtaaccgatgatatagttattggggggcaccccaggggagcccccacttttttccggcgccaatctcgccgccgttaaatgccgccgcctttctttatgcttttttgtctcgactttcagcgtcgggtgttgtggcgctaacgtgaatgcctgggccaatctcatcctcccggccaatatcgccctaagccgaaaatttctctatgtatccccnctaggcctcgt

SEQ ID NO: 450278 - DNA, 864 bp, Homo Sapiens
gggctgctgggcgccacgtttccggagtccggccgcccggtttccgttgttacccccggacttaggccttcccccggggtgtagtagctgccatgcagccacatctggcccacaatgctatgggtcacagatagctgtaattttgtagggcagccagtgacttcttcgagggattgctgattaactgttgatccagatcctacctgcccagagttattataacccccaggcaaatacctctccatcagatgttagcaccaaagaatggtaagacccacaggcaacttcaatgacttgtttgtttgacagattagtagagatatgacagggcactaaaccatgattagttgtcccattgcccagctggctataagcattatgaccccaggtaaagacttctccttctgttgttgcaaggacaatatgtggaccactcccatagctgaggcaggctatttttttgccatttaaagaatccagtctccgaggttcaatggtgctctggacgtcacctaacccctaacagccacagcagtttgtgccaagcacaaaaatctcatcatttactgtagtgtataaaacttcattgccagcactgccaaagacacaagcctgacgaattaactgtagttcttcttcagaacaaagggaaaaaattggccactttcccacatctaacatcttcaaagatgacagagtagcctgtactggctcctcgcaggccggagccttgtccgctccgcctcctgggtagcggttactgcacggtcaggggcccggcgccgcgacgagttggcgcctcctcctgaaacggcccggcctcggcgggatgcgctcgggtgcccggccgagacggaaacgaag

SEQ ID NO: 450279 - DNA, 825 bp, Homo Sapiens
agcgggcgccgggcccctgaccgtgcagtaaccgctacccaggaggcggagcggacaatgctccggcctgcgaggagtcacattaactttgctctagaagacaactttacaaggatctaaaaggaacaggattaaagatgactgaatactgggttccagaaatttaaaacaatcagcttagcaaatcatatattcttctgtggagctgagaattgatgtccgctcttccccgtgatttggaactttccaatcccagagaaaagttgacaaagggactgcccaggactgagtccatatggaagaagaacttcctcttttctctggagacagtggcaagccagtacaggctactctgtcatctttgaagatgttagatgtgggaaagtggccaattttttccctttgttctgaagaagaactacagttaattcgtcaggcttgtgtctttggcagtgctggcaatgaagttttatacactacagtaaatgatgagatttttgtgcttggcacaaactgctgtggctgtttggggttaggtgacgtccagagcaccattgaacctcggagactggattctttaaatggcaaaaaaatagcctgcctcagctatgggagtggtccacatattgtccttgcaacaacagaaggagaagtctttacctggggtcataatgcttatagccagctgggcaatgggacaactaatcatggtttagtgccctgtcatatctctaactaatctgtcaaacaaacaagtcattgaagttgcctgtgggtcttaccattctttggtgctaacatctgatggagaggtatttgcctggg

SEQ ID NO: 450280 - DNA, 1194 bp, Homo Sapiens
  misc_feature (72)..(72): n is a, c, g, or t
  misc_feature (85)..(85): n is a, c, g, or t
  misc_feature (216)..(216): n is a, c, g, or t
ggagaaatgtgttctatcagggtttagaccaagaggagatgaaagaaatgtgctcttcaactaaaggcactngtcagcggccacntacagccattctctaggcctgtgagcaagcagggtgctgttttgatagaagcctacaaggtctgagcagacctcacttgtcctctcaccaggtttaaatacaataaataaatcttaatgcatggtggtttngtcctcctgggttcctatgaagaggctaccttttaggatcactatggaggtgatactccctgtccccaacccagccttttcagtgtcctccatggggaaggtaccagaatagctccaggccttggagaagcaattgctcattgtggattgtaaggggagcccctaaatatccccttccctggtctgtgcctggagctcctctgccccatgtgtcagagtcacgggcacctcagatcttggtcacatagttgttggggaacaggccctgcttgcctcgtagtcgacccgtccaccagccagaaggatcttctttgataatatcaataatgtcattggcattaaagctgagttcgtctgtgtcctgagcgtcataaggcatacatagccttgcaactgtggcacctgaggcttgggcttgggctggggcttgggtctgccccctgctgggggaggccgactggttgtttgtctcctgacccctgcagctccctggtccgggaccttgaggaaatccaggctctctggcgtctgtgacactcggtctgaactggtagactgctgccgaggcaagggcgggcgggccatggaggtgtacaggcttttctgattggacctctggcttccaggagcatggggatatggcacatactggtttctgatgactccgttctgatggtatcctgggggaggaggggcagctctcactgggtagttggcattttgagtcccactggaataacctgtattttgggtagtgttccttctggtaggacgggagttcttgggcagtccaggtccgatgctgacctgcagcactttgttactgggcttgaggacagccaggtccccaaacccttggtggaactgcacttgccgggagccccccgcactccaggggccccagttttcctttttcaacttcagttcaagcgtattgctgaatttcagaggtagttgcttctgggtcttctcctcgta

SEQ ID NO: 450281 - DNA, 1173 bp, Homo Sapiens
aggtcgagaaaggggctctatttgttaatcgtgtcagagcaaggggatggccgggccagagttcagacgcgcgggtgaccttcttcccggggcgccagggacaaattgttggccaacttgtaacctgagtggccctgggagcttggtgagggggccgccccgaaggcccattgggtttctcaggggtagtttcccagccccattcgagggcggttctgggcaatggcccaggggcctgggaggcgatgccgatgcggcccatgtccagggtttgcatggctatcttgaagcccatccctggctccccccaggatgctgtccttggggatgcgacagtcctcaaagatgaggttgcccgtggatgagccccggatgcccagcttgtcttctttcttccccaacgtgagcccaggcgttggcatggggaccaggaaggcactgatgcccttgttttgcagggctctgtccgtgctggcaaagaccacggcagccgaagcctcccaggcattggtgatccaggctttggttccattcagaacccatgagtcgccctcggcccgggcggtggtggacgcagctcctgcatcactgccgttccctggttcgctgagggcaaagcagccaattttgtcaccactggtgaaaggcgtgacccacgcctgcttctgctccttggagccaaacttcaagatgggccccaggtagagagagttgttgacactcatgatgactccggtggaggcgcagccacggctgatctcctccatggcgatggcgtaggccaggtaatcgaggccagcaccgccaagctcctcgggcacgtccatggccagaagcccaagcccgcccatcttcttcacctgagccgctgggaagagatgttccttatccacctgggctgcaatgggaaacaactccttctcggcaaagtcccggcatgtctggagcaacatctggtgtgtctcgggcagttccacagactggtagatggtgtgtaactgccgccaggccctaggacagagagctctgcgggcagggcccgaggcccgggcgagcagcgcggcggccatgggcgacagacacagtcccaggcttcgcgacctcccgctgcgagcgcgctgttccggagtgctggggggcgggacccgggacagaggccatcccgggaattcc

SEQ ID NO: 450282 - DNA, 1161 bp, Homo Sapiens
cgttgaactccttccgggcgtactgagcgaattggcaccgtgtttgtgcccagagcaccgccccttcttgggggctttttgcattcttcattcccggtcgtttgtcacatcacggacagcccgtgaatactcatccgatgtcgaactgttcttgcacgatacctagccagttgatggaccaggtttcgggccagctctctcccttcaccaggtgtttctgggaggctgaacttggggaccagtcaagtgcaaaggaaagtgcatggggaggatctttgttgttccgcagcacacagcaaaccaccaccgtcttggtctggatgttcacaaacttatagcggtgcccctcacggatgaagtggaggtcgtatgggtttctcggtggagggcttggcacagtcacattcacaggaagcctggttttctccacaatgttgcggatggtgtgttcgccctcttgcatctgaagttccaggggacttcgggtgctaaatctgcccttgcactggaatggaaggctaatgcttgtcgttggctccggtgattcataactaatgaggtcacgggcattttgccgttttcccagcttgctgatggaattgacgcttcccaatctttttgaagattgtgttgagtcgtgacttttccttgaatgtctttgcataaaggatttctgcctgccccattagagtgagttcatccccagtacacagggtgatgttgtaaacttcagtgtcttcattgcattcacctgaagcaaccttcacgttgaatgtgatatcctccatgacgtacacgcgttcaggaaatgccttagccacctcctccacactgttgaaatattgcactggctcctttatatctcggtcttgttccagcagcttgaattgccctgcataatgtacccggaatctctatctttggcccaatgacatagtgaccctcctccaagctgtggtcagtgatggtggtccatctggcggcaggaatgaatcagcagatagtcattttcccgcagcccttctacgcactcatccgttgtccaggcgcgcgatctggggcagccggtaagtgctgaccaggaggtcgagcggcacggccaccgagctccacttcacatctttgaggctgcagcccagcgagggcgccgggtccatcttc

SEQ ID NO: 450283 - DNA, 717 bp, Homo Sapiens
  misc_feature (41)..(41): n is a, c, g, or t
cttctcccctctcttcccccatccatatctccgacacaccnggcgtggtgccggctccggaattccctggatccgcgcgccacagtcgctgcagttcgctccactctggtggccccgccgccctgcggggatcccgggggtcggcgggctgctcggacttggcgcggggccggcccggcctctctcttcctcggtggggcctagacggtcggggcaccgggaacatggagccctctccagccgctgggggcttggagaccactcgcctggtgagcccccgggaccgcggtggcgccggaggcagcctgcgtttgaagagtctcttcacagagccctcagagcccctccctgaggagtccaaacctgtggagatgcccttccaccactgccacagggacccccttccgccgccgggccttacccctgagaggctgcatgcacggaggcagctatatgctgcctgtgccgtttgctttgtcttcatggctggggaggtggtcggcgggtatctggcacacagcctggccatcatgaccgatgcagcccacttgctggcggatgtgggcagcatgatgggcagcctcttctccctctggctctccacccgtccagccacccgcaccatgacctttggctggcaccgttcagagactctgggggctttggcctctgtggtctccctctggatggtcactggcatcctcctgtacctggcct

SEQ ID NO: 450284 - DNA, 1190 bp, Homo Sapiens
ttggggggggtttccctgggcaagggcgcaggcccatgggggcccattttccggggtggaataattggcttagacctggccaaggtggccagctgggaagaatccaaacccggggattagaaacccgggatgagggtttccagcccagggagggttttcaggggtcaggggtggagtcgatggcccaggtgtgcagaggccaacatggtaagtgaggtaaggggcccccaggtgcagctcaggggtgccccggactcttggcaccgacaacagcgtatcccgcacaggttggaaccccacattgcggggggtaccttccatgaggattcgaagaacgtctcggagggtgggagcggtggatccaagggcacagatggagaagaggaaggtgctgatggggtcggctgccttgtattgaggcttgaagtagatgaggatggaggcagccagtgccccaaaggctctgcaggaggtcccccagcacgtgcacaaatgccgcccggacgctggtgttccccaggggcaggggctctttcaggccccgtcctccagcggtgcatactctgctccccctagtcccgtggctgtgtggtggcccagcctggtgcagcacaaaggccatttctgaacggtgccagcctaaggtcatggttcgggtggtctggacggtgtggagagccagagggagaagaggctgcccatcatgctgcccacatccgccagcaagtgggctgcatcggtcatgatggccaggtctgtgtgccagatacccgccgaccacctccccagccatgaagacaaagctaaacggcacaggcagcatatagctgcctccgtgcatgcagcctctcaggggtaaggcccggcggcggaagggggtccctgtggcagtggtggaagggcatctccacaggtttggactcctcagggaggggctctgagggctctgtgaagagactcttcaaacgcaggctgcctccggcgccaccgcggtcccgggggctcaccaggcgagtggtctccaagcaccccagcggctggagagggctccatgttcccggtgccaccgaccgtctaggccaccacacgaggaagagagaggccgggccaggccaccagcgccaagtcacgagcagcccgcacgacccaccgggatcccacgcagggcggcggggccacacagagtggag

SEQ ID NO: 450285 - DNA, 965 bp, Homo Sapiens
gcagcctcccctaaaaattctgggcgggaaaagcccaaaaaatcatgggctaccggaaaaaccccggggggttggtaacgtttttggctttttggggctccaaaccgggtgtaaattacatttcggggcaccagactaaaaaccctttttctccttcgttttcccttaattaggcttcctggcaggggcttgtaattttgtaagaccctttctcccggcctttaaatgctaaaacccacattttcccattttttccgtgagtacatactatgtgtcaggcacaatgattctacatgtcactaagtatacagagatcattaagacacagtcatcattcctaagcagcccacatttaactgggtacacaaaaattgttgtttaattcttaacaactacttgatggtagacttaagtatttgactccaagtcccgtgctctttttacattccaacaattgcctcttgaatctgctggaaacgaaaagaatggaaacagctcctggagagaatacttgggaactccagagtttgcccattcattccttcattccctcttaaactcctgcataaaggccactgccctgtgcccacgacggtgcttataccgagagcgtcaaagatacaggaatcacagtcttgaccttcattattcccatttgaatgctgtgtcccaggccccttattgtctcacagtatttaccacaactaccgtatgggctaatcctacatctctattttacagatttacaatctcagagtggtaaagtctccttaggccaaggtggctcagcggattccacaccagtcatcacaggctgagcgtcacagtacaaagcaggagcggcagggaggccgattccgcggggaaaccactccccagctcttcctaggccttgcaaatccacccctcctatgtaagatcccagccggccgctctgcatccggagaattccggaccggtccagc

SEQ ID NO: 450286 - DNA, 1164 bp, Homo Sapiens
  misc_feature (13)..(13): n is a, c, g, or t
  misc_feature (25)..(25): n is a, c, g, or t
  misc_feature (40)..(40): n is a, c, g, or t
acccctctctccngggcccttcaanggctaaaaacccacntttccaattcctttccctgagtacatacctatgtgtcagggcacaatgattcctacatgtcacctaagaatacagagatcattaaagacacagtcatcattccctaagcagccccacatttaactgggtacacaaaaattgttgtttaattcttaacaactacttgatggtagacttaagtatttgactccaagtcccgtgctctttttacattccaacaattgcctcttgaatcttttcatcacattagagcagagagagtaaatttaagccaaaattaataagctaacacttcttcagcacctactgttaccaggtaccggttttcattgcctacagttttatcttattgaatccttaaccattttgcagaagagaaaacaggcttagatgtaatgacttgcccaaggtccacagctgctaaattgcactcaaggttggaactccagagcctgtggacacttaaatgtctacaaggagtccttgggctagtgagggcttcccagggagggcccatgactgttctgctcattgtatcacattggcctagcacaggtgaggggcacttagtatattttaattagatcaatgaataaattaatgaatttaccaacctgctggaaacgaaaagaatggaaacagctcctggagagaatacttgggaactccagagtttgcccattcattccttcattccctcttaaactcctgcataaaggccactgccctgtgcccacgacggtgcttataccgagagcgtcaaagatacaggaatcacagtcttgaccttcattattcccatttgaatgctgtgtcccaggccccttattgtctcacagtatttaccacaactaccgtatgggctaatcctacatctctattttacagatttacaatctcagagtggtaaagtctccttaggccaaggtggctcagcggattccacaccagtcatcacaggctgagcgtcacagtacaaagcaggagcggcagggaggccgattccgcggggaaaccactccccagctattctaggccttgcaaatccacccctcctatctaagatcccagccggccgctctgcagccatatccgccgtagcgtcccacgctgcctggcccgct

SEQ ID NO: 450287 - DNA, 724 bp, Homo Sapiens
gccttggcatgcagcagaatcagggtgtctcaaggtctgagggccccaaggcctcccagaatgacagtaacactgagcagggaagccccaagcgtggggatgttaggagttggttggccagggaagagcacgtggtctgcagtcggtcagcctgggcttggccccacctctatcactagctgcctgagtgattctgggcaagtaatcttgacctctctagacctcagtttcctcaaccataaaatggagacggccctgacactcttagcaggactgccggagcagggtgacagcccccagtgtcctgtgggtgtttacactcaccctatgaccaagccacggtgtagccacacttcccagcattatctgggtctgtctttcccaccattctggcctctggtaccaccagggcttcctccacagctcatcgctcccctttccagtggccatttctgccaatgtcaccacccatgcccagcacaggccggatgcccagtaggcgctcaaggaatgcttgatgacacaatgtacgaatgcaaataccctggcccccaccctctaggcccctgcggggcacatgccatgggatatacttgcacatacgtagacagtccccaacactggactgccccacccctgccccgagctacctggacctcagtgggacaaggcagaggctgatgaggcgctgggcaggcgagcctgggcaggagcaggggctggg

SEQ ID NO: 450288 - DNA, 1135 bp, Homo Sapiens
  misc_feature (985)..(1053): n is a, c, g, or t
gggccgcgccggaatatttcaaacacggggtgaggacaaccgcatcacccagcactaatagaatttcgcttgatgacccttgcatctttgtgccagggactactgccttctactccaccgtcagtgccccgagtgctgtgcctattaaggtccactgggggcgtgatgtcagccgccctccggcacttggagaggtgagcgcggcagtccgcgcagccggtgactgggggactgggtttggagtaggacctgcggcgtgctcgagactccgacttcggtcttgcggcgcgctcgcgcccgcgggccatgccccactgactctaagtgggcactgccccggctccgggagggcgagaccgagcgccggccatgggaagcttccagctggaagactttgcggcgggctggatcggaggtgcagccagtgtcatcgtcggccaccctctggacacagtcaagactcgcctgcaggctggcgttggctacggaaacaccctcagctgcatccgcgtggtgtacaggagggagagtatgttcggcttcttcaagggcatgtccttccccctcgccagcattgccgtctacaactccgtggtgtttggggtcttcagtaacacgcagcggttcctcagccagcaccgctgcggggagccagagggcagtcctccccgcacgctgtcagacctgctcctggccagcatggtggccggcgtggtctctgtcgggctgggagggcccgtggacctcatcaagatccggttgcagatgcagacacaaccgttttccgggacggagcaattttcttgggggggaccggacctcctatgggatggcccggaaaagtccactccaacctggaggggggttttttcaacacctttcaacggcgcccctgaactggcccttcccacaacccccgccaagcaagggtccttacaccggtgaacacacgggataccttcaccgaattccccgccagccacannnnnnnnnnnnnnnnnnnnnnnnnnnnnnnnnnnnnnnnnnnnnnnnnnnnnnnnnnnnnnnnnnnnntcacaatcccacccccatcgtcccggcccacctctcctccttccccgctcacacgtccgccgcccttattttcccccccttc

SEQ ID NO: 450289 - DNA, 927 bp, Homo Sapiens
catgttccgacaggaactctaggaagcaacgaaggccttgtcagaaagacgccaaaccagcagctggtgcacaaagatgtccagcattttcccgggccatgagtgtgttgtagaagataaaggcctccacaaataaggcatttgacaacattaacttggttaaggacacaggaagtgaactgatggtgaaacataagatatctgccacacccaacagcccaaagaagaaatacatggtgaaatgatgccagcccaggagttgattccagtgaccttgtttatagtcatataacatcagatggggccctccaggaataaactgctccccagccatgccagttaaagccatgccaactattgtaattccctccgaaatttccaatcgatagaataatgttttggaaccaagatagcaggttcgcttttgctttttgcagatatacttcagaatactctttgtacaccaccaaagaccaataataaaaaagaaggttccagggagggcatgacctctgaaattccccatgatctttgggtgtttaaatcccattttcccttctgagtcattggtcatccttggtctcagtagatcaggcacgttagaactgtggcagaagagataagaatgaagcagccaaaattgagcctttgcttcttaggtaatgctgaaaagtttccaacttggtctgtttactcaacactttatttttcccactttgccagcttaaaatcagacagcggctgggcttttgttgttgctgtttctgttcttttgatcccagagccccatgaaaattaaaccgtgtgttggatgggatctggccacgtctcgcattgggtggggggaggaatttttaaacttgggtccctagtcgcttctttgggaaaacgaataaataataagtggcgagaaggagaggacgtggg

SEQ ID NO: 450290 - DNA, 1065 bp, Homo Sapiens
aagttttttaacccacacccggggttaattgaaaagccataatttcctttccccagcggatggaccaatgggttctctgcggtaatgccacccaaaaggcatatgggggggaaccaaaaatatttttcatgatccatcagatccccatgcaggacttcccctggggggatacaggacaaatcccatctgaaagacccagctcccctgaagcagaatgagacttgaccgcaatagctccagaagtacattgttccgaacaaggaactctaggaaggcaacgaggcctgtcagaaagacgaccaaaaccagcagctggtgcacaaagatgtccagcatttcccggccatgagtgtggttgtagaagataaaggcctccacaaataaggcatttgacaacattaacttggttaaggacacaggaagtgaactgatggtgaaacataagatatctgccacacccaacagcccaaagaagaaatacatggtgaaatgatgccagcccaggagttgattccagtgaccttgtttatagtcatataacatcagatggggccctccaggaataaactgctccccagccatgccagttaaagccatgccaactattgtaattccctccaaaatttccaatcgatagaataatgttttggaaccaagatagcaggttcgcttttgctttttgcagatatacttcagaatactctttgtacaccaccaaagaccaataataaaaaagaaggttccagggagggcatgacctctgaaattccccatgatccaacttggtctgtttactcaacactttatttttcccactttgccagcttaaaatcagacagcggctgggcttttgttgttgctgtttctgttcttttgatcccagagccccatgaaaattaaaccgtgtgttggatgggatctggccacgtctcgcattgggtggggggaggaatttttaaacttgggtccctagtcgcttctttgggaaaacgaataaataataagtggcgagaaggagaggacgtgggggacgtgctcggctgacatcccgggaattccggaccg

SEQ ID NO: 450291 - DNA, 797 bp, Homo Sapiens
agcggggcggcttagagcccacctcgccgaatttgaaaaggcggccccggagaggcgtgggcaccccccacacatttccagctcgcacccgggctccgatcgctcgccccgctcctctcgctctgctcctggccggggctgcgggttcggtccgggcgccggtgcgctcctgccggtcctcgtgcccgggactccgggtccccgcgggctgctgcgcacgatgaagctggccctgctcctgccctgggcgtgttgctgcctctgcgggtcggcgctggccactggctttctctatcccttctcggccgcagctctgcagcagcacggctaccccgagcccggcgccggctcccctggcagcggctacgcgagccgccggcactggtgccatcacacagtgacacggacggtgtcctgccaggtgcagaatggctcggagacggtggtccagcgcgtgtaccagagctgccggtggccggggccctgcgccaacctcgtaagttacaggactctgatcagacccacctacagagtgtcctaccggacggtgacggtgctggagtggagatgctgccctggcttcaccgggagcaacctgtgatgaggaatgcatgaactgcacccgggctcagtgacatgagtgagcgactgaccacactggagggccaaggtcctccttgctagaagcaggcagaacgggcctccagcccggacaacgacctgccagcccgcgagagcactccggcgaacctggaattgaggacttcctccccgaagccatccctcttgctacaacc

SEQ ID NO: 450292 - DNA, 1035 bp, Homo Sapiens
  misc_feature (671)..(671): n is a, c, g, or t
  misc_feature (777)..(831): n is a, c, g, or t
  misc_feature (940)..(979): n is a, c, g, or t
  misc_feature (1019)..(1019): n is a, c, g, or t
aaaaggtccatttcggggaggacagtgaaaagggggggattctcttactactcaaataacttgaaaaattactgcattcagccacatgcatttaaatcacgcataaacaagccaaaattactcagaatcaatacagtggcaacacaatctagggaatattgttggcagattagagagagataatgttgcttcatctcattaggctttcaaattttgctttcacctctaatgatatgttcatctagatttctacatatcgttcaaatgatctgaagccacatttcacataaatttcagacttgattctttttttccattcagaattgactgcaaaaccatatattgtatctacattcaaggagaggttgattttagctaacaataatgcaaaatattttcaaatgtgaatgtctgcctttccaatatacacactgtcaccttcttgccagaatgattaaccattttagctgcagttgtaaggacactgagtgttttgagaattttaaagggaaaaatctggaacccaaataatatacatagcagcattacatttggacaattacatttcaaaggtgttttaaattacgagtacacttaaagggtgtttctcttcatttttgtaaaattaactactaagccaaaattagttttaaaaaatcttactctatgtnaaagtgagtaaccatatcccagacttttttctttcattaagttcaattttctgttatcagttttgcttaaatcaaggtacatatgcatttcctcttgggaaagcannnnnnnnnnnnnnnnnnnnnnnnnnnnnnnnnnnnnnnnnnnnnnnnnnnnnnnatatctacacacacatatgtacacatacatatattttaaaggtgttctgttatctttatttgcaaagtagacaaatggcaatattattctttaaagccactaaagattnnnnnnnnnnnnnnnnnnnnnnnnnnnnnnnnnnnnnnnngctgaactcttgatttgtaatgagaacgaaccttaactcntcattttagtattttg

SEQ ID NO: 450293 - DNA, 938 bp, Homo Sapiens
aaagcagatggtttgttaagagttcttactgtcccatgtcaaaaaatcggcacacagggaaatgttaattttggaggccgtccacaacttccaggttcccatcctgcgacttggtcagcgggtggaataatctcaagaatcaaatcatactccttcccaaagcctggccacagaaagtcctcccctgcccaagggaaccggcaagagagtactgtgtcattcaatccgtatgagccagaacttgcaccctgggctgcagacaaaggcccccagagagaagccctacccatggacacagaggtgtacgagagcccctacgcggaccccgaggagatcaggcccaaggaggtttacctggaccgaaagctgctgacgctggaagacaaagaactgggctctggtaattttggaactgtgaaaaagggctactaccaaatgaaaaaagttgtgaaaaccgtggctgtgaaaatactgaaaaacgaggccaatgaccccgctcttaaagatgagttattagcagaagcaaatggtcatgcagcagctggacaacccgtacatcgtgcggatgatcgggatatgcgaggccgagtcctggatgctgggttatggagatggcagaacttggtcccctcaataagtatttgcagcaagaacagacatgtcaaggataagaacatcatagaactggttcatcaggtttccatgggcatgaagtacttggaggagagcaatttgtgcacagagatctggctgcaagaaacgtgtttgctagttacccaacattacgccaagatcagtgatttcggactttccaaagcactgcgtgctgatgaaaaactactacaaggcccaggaaccatggacagtggcctggcaaagtgggtacgctccggaatgcatcaattactacaagttcttccaggcagaagccgagtctg

SEQ ID NO: 450294 - DNA, 1140 bp, Homo Sapiens
cttgtttccagtcccttcagaaattatggtggagatacacacatacacattaatggaataaacactcttccctcctctcccttggggctccttcccccaaagaggtccattgtccacaagtactcatttgtgggactcaatatgttcccagccacaacaagagcattacattagaataggagctaacatgtgggaatcagcatatgtttagaattacatcttacacactgaaaaatgcactggaagagcagccattattgacagagacggtcctggctaatagatctgcctagttttaggctgcttaggggaacaggggtcctggaataagaagccccaccccctcctatgaagagaggaaagctggagacaaaaagaggaagcaagagatgaattgcaaaaaactaatcagattgcaacctcaaggtaacattttgcataataagttctaacaatgttttcttgtttatatcagcctcctcctcttagcctggcttactaggctggtgtttaattccaatgcttctgggttaatttattcaactttattatccttactatagtagcctcccctagcgttctcccctacctctcaaaggtctcatctaagtgtgtataaagctgttaaatagaggagaggaatcaggatgaactgcacagcattttcttaaggcctgtgggttctggagcctatgcttcagcaactgaagctgaactgtgtggttgttgctaacattggtgtatccaccagtaagcctcagaaataaaactttactgatatctttgaatcccatgtgtgtccttccctgaatgcattgctttgtcacccagaggtaacagctatccagcattcagtgcttatcatccccatgtctttctttattggttttctaaatttggaatatccctggagacaactttggcaactgaagctaaactgtgatggttgttgacctctgatgtgctactttttaatcaagaacttattttccctctttctctctcagctcccacaggcccattctggtgactcatgacttgtatacacagaacaacagagaaaagaacaatagaattagatcaacaagcaggggccacagtgagggctatgtcttaccaagaaccatttttaattgaatt

SEQ ID NO: 450295 - DNA, 765 bp, Homo Sapiens
cagtctccttaagtgaagaaacttgacgtactgtgtacgtacaatgcccactggtcatctaaccgcatgtagccttccgccagcgagctgaaaccagttaatcctcccatggctgcataaggaatgtcctgtcccactggtttttcctgagccaatctttcttgcttagtttccactactgtgtcatgggcatatgcaggctgaccaacaagcacaagtgaagcagctatggaatcctgaaacacttggaaacatgtattgcatgtaaagcccggcgcagcactgtgctgaatcagcaaagtgtttgcacctgcagcgaatgggctggctaccattcaaggggacataaaggtaagccctgcactggcagccagtcacttggcagggcagatcaatggggcactgctgaggaatcgcttccaagtcagttttatgttgtttatacctatgtgtacaaaaacacagtgtctctgggcccacaagtttacaatccatccctgttggtgaccgccagctcacaaataatctgttttgtaagcgcagaggtaaaacttttcttttgtattcttcatattcttcaggagtaaaaagtttccctccatcatcctcaccaacaattctccggtactccaggtactcgtccaccgccgccgcgccgccgagaggcaacgtcaaccgctccattgccggttgggaagccaaaggcttccctgcggaccagctgacctcgaagcccgacccgtcccgttccctcctggtaccgcg

SEQ ID NO: 450296 - DNA, 755 bp, Homo Sapiens
  misc_feature (69)..(69): n is a, c, g, or t
aagtaaaataattttcaggaaaaaataaaactgtattattaccatttaaataaaacatgaaaaaagatncttggatgatgttttaattttctccaatagtcttcatgaaggttttgtagctgatggcaatggagcttttcctttccacttagcagccttttccattttcatcctttcctggtatcgtctttcaaagaaagccatatcatcctcttcaggtctccttaatgaagaaacttgactacttgtacctacaatcccactgtcatctaaccgcatgtagccttccgccagcgagctgaaaccagttaatcctcccatggctgcataaggaatgtcctgtcccactggtttttcctgagccaatctttcttgcttagtttccactactgtgtcatgggcatatgcaggctgaccacaagcacaagtgaagcagctatggaatcctgaacacttggaacatgtattgcatgtaaagccaggcgcagcactgtgctgatcagcaaagtgtttgcacctgcagcgaatgggctggctaccattcaaggggacataaaggtaagccctgcactggcagccagtcacttggcagggcagatcaatggggcactgctgaggaatcgcttccaagtcagttttatgttgtttatacctccggtactccaggtactcgtccaccgccgccgcgccgccgagaggcaacgtcaaccgctccattgccggtggggaagccataggcttccctgcggaccccc

SEQ ID NO: 450297 - DNA, 945 bp, Homo Sapiens
agcggagggggcgcggtaccaggagggaacgggacgggtcgggcttcgaggtcagctggtccgcagggaagcctttggcttccccaccggcaatggagcggttgacgttgcctctcggcggcgcggcggcggtggacgagtacctggagtaccggagaattgttggtgaggatgatggagggaaactttttactcctgaagaatatgaagaatacaaaagaaaagttttacctctgcgcttacaaaacagattatttgtgagctggcggtcaccaacagggatggattgtaaacttgtgggcccagagacactgtgtttttgtacacataggtataaacaacataaaactgacttggaagcgattcctcagcagtgccccattgatctgccccccaagtgactggctgccagtgcagggcttacctttatgtccccttgaatggtagccagcccattcgctgcaggtgcaaacactttgctgatcagcacagtgctgcgcctggctttacatgcaatacatgtccaagtgttcaggattccatagctgcttcacttgtgcttgtggtcagcctgcatatgcccatgacacagtagtggaaactaagcaagaaagattggctcaggaaaaaccagtgggacaggacatttccttattgcagccatgggaggatttaactggtttcagctcgctggcggaagctacatgcggtttagatgacagtgggattgtagtacaagtagtcaagtttcttcattaaggagacctgaagaggatgatatggcttccttgaaagacgataccaggaaggatgaaaactggcaaagctgctaagtggaaggaaaagctccattgccatcaagtacacaacctttcatgaagactatgggcgaattaaaaccttcatccaagtatcctttcctggtttattcactgttataaacag

SEQ ID NO: 450298 - DNA, 913 bp, Homo Sapiens
gtgactgtccactgctcctgtactgctggatgaggcctcgatgaactaagctttttctccgctcctgcgtgatccctggcagcaactcacttttcttctcatccaggatggcatacaacgtgtcagacttctggctcagctcttccttgtacctggtgactgtttctccttggtcactcgacgggaatcctccagctgagtgatgatggtctgcacacggtcattccccgccaccagcatggagatacagttattcagttcagtcttttgtccctggaagacactctgcaatggggccacctcgcaggccttgtggatcccaaacaccttgcacatggagcaggtgggcacttcacacgtgagacagtagatgttgattttctcatcttcgtgctccttgcacatggggtgactgcccttctgcagcggccgactggagcactcctgtttgtagatgtcgatgatgttctccaccagcaggttcctctgcaggccgtacactccgtgacgatccatgatcacctcgtggcggcaggtggggcagcggaaacggcctccagacatggacactgagctgccccggctggtccagtagggatttgcagcctggaagatgtcattggcacacttccggcacaggttgtgctggcacggcaagatgaccactggcttggtaaacatctccaggcagatagggcagatcagctgcttctccaagttctccatgggattcccatcctggatcaggctcgacttataatccattctgtgggaaggaatgagagccacgcctagctgcctcctctactaactttgctctaagtagacctgggggtcttgcctttgtcacaaaacaccgggtcggatcctgttggcttccttctccatcccaagacttcgggccttgaccagc

SEQ ID NO: 450299 - DNA, 1324 bp, Homo Sapiens
tggctgcccgtttggagggtcacaaagaagggattgtacagactgaacagattaggtctttgtctgaagctatgtcagtggaaaaaattgctgcaatcaaagccaaaattatggctaagaaaagatctactatcaagactgatctagatgatgacataactgcccttaaacagaggagttttgtggatgctgaggtagatgtgacccgagatattgtcagcagagagagagtatggaggacacgaacaactatcttacaaagcacaggaaagaatttttccaagaacatttttgcaattcttcaatctgtaaaagccagagaagaagggcgtgcacctgaacagcgacctgccccaaatgcagcacctgtggatcccactttgcgcaccaaacagcctatcccagctgcctataacagatacgatcaggaaagattcaaaggacaaagaagaaacggaaggcttcaaaattgacactatgggaacctaccatggtatgacactgaaatctgtaacggagggtgcatctgcccggaagactcagactcctgcagcccagccagtaccaagaccagtttctcaagcaagacctcccccaaatcagaagaaacggatctcgaacacccattatcataattcctgcagctaccacctctttaataaccatgcttaatgcaaaagaccttctacaggacctgaaatttgtcccatcagatgacacagaagaacacaaggttgtcaagcgagaaaatgaaactctaatacaacgacgaatcaagaccagatgcaaccagggggcactgcaattagtgttacagtaccttatagagtagtagaccagccccttaaacttatgcctcaagactgggaccgcgttgtagccgtttttgtgcagggtcctgcatggcagttcaaaggttggccatggcttttgcctgatggatcaccagttgatatatttgctaaaattaaagccttccatctgaagtatgatgaagttcgtctggatccaaatgttcagaaatgggatgtaacagtattagaactcagctatcacaaacgtcatttggatagaccagtgttcttacggttttgggaaacattggacaggtacatggtaaagcataaatcgcacttgagattctgaattatttggctcctccatttctggaaattgagactcaagctttatgaatttatcaagaacttaaaaatgaagaaggtcacagattgatcttttataagaccttatttgatgctttgtgcttcaaggagatgatacctggtcatccatattaagcaaactttatgggcttacaaactac

SEQ ID NO: 450300 - DNA, 841 bp, Homo Sapiens
aggagacagaaggtgtctgggccatcctgggcggccggtcagcgttgctaggcaggctcggctgtctggccgggacgttgggcctgggtggcttttgagaccagtgaagaagggagagccggcctcatgccgatgcggcttgtggcacggctgggatgtgagggaggactcagatctacacacagaaacccctcttctccccgccctcccccagctcctacctgcctcccacgcctcaggtgtggctgcctgtgggaccatcccccaacccctttcctcgcacctccttgtcctcacccagttcctgcagtgtctctgacccacgcctcccgcctcctggccgacttgcccaggaggtgtctctggctcacctccgtctgttcatcaccttcctccccagtgtttccacttatcttggatgttttagattgaaacagcctgattcccggaagaatcctcttcattcattgctagtgcttcccctcacctcccactctccacttcccagtttgcaaatgtggctttcgccctccaagtgaaagcggactgagagcagcccttggggacggcccggtgcctggctgcaaggccgcgctggggctctgtcttggtgcacatggcttgaccggactttccctgcttcccaccacttccctcactcccagacctccctcattctttttgtctcttctttttgcctaaagccagtccttaacgaccctattcttcctctgcaggttggcttgcagacttttccccacctttggggctcgtggtggtggagagggcagctggtgtaacgaattgtggttaccgggccatacccggcagattgttgccc

SEQ ID NO: 450301 - DNA, 1318 bp, Homo Sapiens
ttttttttactatctggaatgtttaatcttaggatttacagcacagacctaggctcagctgctgaagctcagtgcacacagggtgctgggagagtcccacaggagtaggtggagcccggccttaggtctgagaggagggcaggcaagaggcagaggctctgctcctcccagcaccagaccctgcccgctgggggcctggcctcccacccagggcttggccagagagcaggagcctgtgggggcaacacgtaggtagcatttccaggggcctgtggcagcgacgtgtagctggaaagaggctactgccagggcggtgtggcaggatgttccctctgggctgccctgggattggccccacccccagtcctagagggtctggcctcagagtgttagggtcaggtcagcccctcccacgaagcgggactggacacaggacacctggggcagctgggcttggaagcgtctgacggcggccatgttgatgccagggcacgtggccacatccaacacccggagctgcctgcacgcctgcccaatagcatccagtgtctgctctatgagctgactgcagctggacaggttgagatgctgcagccttggccaggagctggctgcctgggcccagcccttgtcactgagtcggctgcagtgactcagcgccaagtgctccaggctaggacagcccctggccacagcaaccaagccgttgtctgtgagttctggcaacaggctaagggacagctgcctcagctggagaaactggagcaccttggctaaactggcatcagtcagcttgctgcaggctgtgaggtccaactcctgcagggcccgcagcgtgagcagggaggggccctgtggctctggacaggcgtccttggtacctgaggcctgatgctccagctctgggcgtgacttcaatgaagagcagtgggccaggctgagggaggccagctgggatggagccccgtgcatacagcccagggcctgggccagttcccgccctcggccatgtcgaggctctgcagctcctgcaggccacccagagctgtacatcctgcatctgtcagccgctgcagcttccccaggctcaggcgccgcaggtgccgcaggccccggctcacggccaagagcgccccatcagtcagttctgagcagccactgaggtccagggaggtaaggcctggttgctcccgaagggcattctgggcagcacggtaccaagcccaactcacgagggaggcctctttctgatctgacagaggcaggaagctcagaatatatgtgagcatctccaggggcagcgactccgccatcgcat

SEQ ID NO: 450302 - DNA, 819 bp, Homo Sapiens
acacaggacacctggggcactgggcttggaagcgtctgacgcggccatgttgatgccagggcacgtggccacatccaacacccggagctgcctgcacgcctgcccaatagcatccagtgtctgctctatgagctgactgcagctggacaggttgagatgctgcagccttggccaggagctggctgcctgggcccagcccttgtcactgagtcggctgcagtgactcagcgccaagtgctccaggctaggacagccctggccacagcaacccaagccgttgtctgtgagttctggcaacaggctaagggacagctgcctcagctggagaaactggagcaccttcaatgaagagcagtgggccaggctgagggaggccagctgggatggagccccgtgcaataacagcccagggcctgggccagttcccgccctcggccatgtcgaggctctgcagctcctgcaggccacccagagctgtacatcctgcatctgtcagccgctgcagcttccccaggctcaggcgccgcaggtgccgcaggccccggctcacggccaagagcgccccatcagtcagttctgagcagccactgaggtccagggaggtaaggcctggttgctggaagcacagggtagccacagcctctcccgaagggcattctgggcagcacggtaccaagcccaactcacgagggaggcctctttctgatctgacagaggcaggaagctcagaatatatgtgagcatctccaggggcagcgactccgccatcgcatccccgccacccaggcctcgtaccttaaaccgttaggagtactgcct

SEQ ID NO: 450303 - DNA, 655 bp, Homo Sapiens
taaagttttaaaagaatatcttaaagagttgttgtttcgtttgtcctttgtttgtttttttaatcctagatgtctcaagcttgccttccattagacaatgcagtaaggaaccctcagtttacaatacaggcaggcaggaagacaaccaactcaatgggatctctgtcctgtgcagtcatcaccagctgatccttcttgtttcttcactaaggtggtgacagcgttaacccccgttaaaaggacaggtgatctcttagtggggatgtctcctttgcttttttctcagcccaggccaacagtctctgctgcttctcttgctttgtctgtggtctgtacttgccagccagcttaccccattgagcagctgtttggtggtccaaggccctggtgaactgattaatcacagaaggcacttctagctgcttatagaggatggctctctgctgttgcaacctagtataatggggccatttgacaaagcaagtgaggtgccttttgggctggatgttctgtccaatgccaaaatgtcctgtccagtgccaaatttctcaaatggaagattcaccactttcatggtctcctgctttttcaagaccgcaagggttggcaccaccttcttccctttggccttctttctttttcgcaccttgggtag

SEQ ID NO: 450304 - DNA, 958 bp, Homo Sapiens
  misc_feature (869)..(905): n is a, c, g, or t
gcagtgacgatcagcacgtaagcacacgaggcctcgctgctgggtcggaggacggccagagcacgcaggcgggagcgggacccagacgaccagcagcagcttccggatctcggagcaggccctgcagcaggcccatcgcgcctcttgtcctctccagctcgtccttggaccccgctctgccggcgaaaggcttcctgcctgggcactgctctctatccagaaagacttcttaaacctttcttggcttccgagagtcctccttcgtcttgggggcagaacgggagggcagttataccctcgctgtttctacaagaggctgggctcctggcctcctgctttaggtgggattgatgagcatcgttttgtgaccagcaaaaaggaactgggaaaggatgataaacgggggcatagtgggcctcctctcggcttgattagtaatagagtaacttcattctaggtgtcagcagaaacccccttaatcctttaagccacacctttgctgctgctgctcggccttgaagaaatcatttaaaagcttaaaaacattaaaaacgctcagagcacattgtgctctccatcagttttcctccctcggatgacctattttggggagtacctgtttcatctcccacctgggctcgctgttggtaagactctagtagcccctttccttaaaacaagcacctgagcttgtcagagttgcatgcggacttcaggtggggctgctggtcgctcccaggacgtggtaccttaactctgttcacatgtctttccctcaaattggttccctacttataatttgccttgagcctgggcctgcaaagcagaccgctctcgacgaattcgagctcggccgatttggcctgatnnnnnnnnnnnnnnnnnnnnnnnnnnnnnnnnnnnnncggccgccaccgcggagagcccggtcgcccatagtgagtctatcactttttcg

SEQ ID NO: 450305 - DNA, 1450 bp, Homo Sapiens
cgttttgcccctggctgctctgcttttggccctaatttcgtctgggtctgcctcgcgtttcatggcctctttctatgagttgcgtttatgtcgcgcagttctattgttgccgtctggtttgtggcttttgtatttattccttgcgcccctaatccactcgtggcgtgtatttcagcttctcctacgtttgctctgtttgcgcttcctttcgtacgcgcattgattgtgccttgcggaggtgcccctccaccgtccttgcggtcgttttctccagccccctggggctcctatgcaccattgtggggctctattggttcttcgcacctattggagtatccaaggcctgtctggtgggccttctatagtccttcctccctaatggtcggtttttgtgcctcttcttcgcctccgggcccttcacaacgctactagcgtggtttataaggccccatggagtccaagccttggctcgcctccgtgctccccgtccttaggcggttccccgctcctgctgtaggctccaagtacctctgcttggcccgtaggttgcttcgcgggcccaccgcgctggcgttaccctaggtagtgggtgccaggcattgtgaccatgcatgatgtgtactgggcactgggcaagcccaccaccacctgggggctagcaggagcaacccagagcctgctcccccctcagagggcatgcctcaggggatgtttggctcggtttgaccccagcggccacatgctgctgctgcagcctctggatacgagtccatgtccaagtaggagggctcagggctcgtcagaaccccccaggctgcctggctccagcagctcagcaaagggtggatggtgggcggcatgggcatgttggtgtggcacgcccagcagaggatggccacccaggccagccgccaggtggtgcccgcctccgcctaccaggcctgccagcccgacaccagggcctaggtctttgcgcagggggccaccgcccactgccgagcctcccttgtcccgccagtgcacccagcacaacttccaggacacgaagagagagacacccagaaggacaatgccacagaatgtcacgatgaccgacagcaggctcacggagatgtctgcatctggaccccggggatagcctcggattcggtcattgaactcctggcacctgtcgttggtgtcagcatctcggacccgcgcacagaggtccgagaccaggatgagtgcccgccggcagaggtcatcctcgtagtctcctgacatggtggccgtctggtcctgcgcttatctctgccgtgtcctgggtggcagccgaggcggcggcgggcggcagcccatgggggttctagggcggacaaggggctgtggacccgttcccacgcgccgggtaatgagagagaatgtctgatctaggggccggagccgccgctgccgccgccgcagccccgct

SEQ ID NO: 450306 - DNA, 1044 bp, Homo Sapiens
  misc_feature (900)..(901): n is a, c, g, or t
accgcgttggctgggtggcctccattgtcgggctgctgctctcagcggcggggctcgccagcgcttcagtgggcggggacgcggcaggtgactccagaccaaggaggatgagctgctgtccctggaagagaacggatggagggaagcagctcctacgaagttccctctgtggctgctgctgatctggaggagggtgctggtcagactaggagcttgcctgccaccccctccaaagatgttcacaagggtgttggaggcatcatcttttcctcctcaccgattttagacttgagtgaaagtggtctgtgccgtttggaggaggtctttagaatccccagccttcaacaattgcatctgcaaaggaatgccctgtgtgtgattcctcaagatttctttcagttgcttccgaacctgacttggctggacctccggtacaatagaattaaagcgcttccttctgggattggagctcaccagcatttgaaaactttgcttttagaaagaaatcctatcaaaatgttacctgtggagctggggagcgtaaccacgctgaaagcactgaacctaagacactgccctctggaattccctcctcagctcgttgtgcagaagggattggtggctatccagcgcttcctgcggatgtgggcagtagaacactctctccccagaaatccaacttctcaagaggctccaccggttagagagatgaccctccgtgacctcccgagcccaggactggagttgtctggagaccacgcgtctaaccaaggagctgtgaacgctcaggacccagagggggctgtgatgaaaagagaaggccagcttttctcccgcctgtggaaaagccagacctgagtgaactcaggaagtctgcggactcctcagagactggcccanncgagggagagatcaagcgcttttggaagctgagggcagagatgttgagccggtgaaggcagacgtttctgggagacagctcctgacgagggaattaccctcaatctcaggggggcctggacattgaggaagaactacaaagcc

SEQ ID NO: 450307 - DNA, 1175 bp, Homo Sapiens
  misc_feature (17)..(17): n is a, c, g, or t
  misc_feature (68)..(68): n is a, c, g, or t
  misc_feature (117)..(117): n is a, c, g, or t
  misc_feature (199)..(199): n is a, c, g, or t
  misc_feature (209)..(209): n is a, c, g, or t
  misc_feature (215)..(215): n is a, c, g, or t
  misc_feature (247)..(247): n is a, c, g, or t
  misc_feature (273)..(273): n is a, c, g, or t
cctgccttcgccctggnaactctcgggaaacgtcgccgcctcggctcctcttccaaatctttttgctngggatcgcccatttggtaacggtgaacaaaaaggtcgggtaaagatgcncctggaggaggctgtcttccttctgaaaacgtgtcttggctttggtagttctttctcaatgttcaaggccgccttgagattnggaggtaatnccctcntcaagagctgatctcccagaacgtctgccttnacgtgctcaacaatctccctgcctcnagcttccaaaaagcgcttgatctcctcctcgctgggccagttctctgaggagtccgcagacttcctgagttcactcaggtctggcttttccacaggcgggagaaagctggccttctctttcatcacagccccctcttggctcctgagcgcttcacagctccttctggtttagacgcgtggtctccagacaactccagtcctgggctcgggaggtcacggagggtcatctctctaaccggtggagcctcttgagaagttggatttctggggagagagtgttctactgcccacatccgcaggaagcgctggatagccaccaatcccttctgcacaacgagctgaggagggaattccagagggcagtgtcttaggttcagtgctttcagcgtggttacgctcctggtgagctccaatcccagaaggaagcgctttaattctattgtaccggaggtccagccaagtcaggttcggaagcaactgaaagaaatcttgaggaatcacacacagggcattcctttgcagatgcaattgttgaaggctggggattctaaagacctcctccaaacggcacagaccactttcactcaagtctaaaatcggtgaggaggaaaagatgatgcctccaacacccttgtgaacatctttggagggggtggcaggcaagctcctagtctgaccagcaccctcctccagatcagcagcagccacagagggaacttcgtaggagctgcttccctccatccgttctcttccagggacagcagctcatcctccttggtctggagtcacctgccgcgtccccgcccactgaagcgctggcgagccccgccagctgagagcagcagcccgacaatggaggccacccagccaacgcggtcctcgtgccgaattcgccacccagc

SEQ ID NO: 450308 - DNA, 782 bp, Homo Sapiens
  misc_feature (523)..(523): n is a, c, g, or t
gagtcttctatgtctgggataatttaaacatggggtgtggatgggtctctgattctgtaattatatgtcagccagtcgaatgatggcaacttttaaggactggtccttagggaagaggaggtcaagtggtaaagacctaattccacacagcccaggtgactacatggagaatgtgctcaaaggcgaagtttatgctctgagctggacagtgtagactattaggggaaaacagtgaatgggaagaaaaggtgtgtggcccagattcaatttctagacacttcctttcctattttttctaccaagactacctagcagtggcaagtatgttctgaacattctgcagaaattccttctacctcactgaagtttcaagtaattaatgtgaaatggaggagttgacacagattaaatgggcacacatataaggacattcacagtcatttgtgaagcactattatgagacctaaatagcaagaagcaaatgtgaataactctgtcatttaaaaattttaaaatccaaatnggattttaatatttttcttctttttactttattgcctttccaatgcagataccgttaaacatattggcagttttttctcaaagcaaataggtgaagtttctctctgtctctcctagagagaccgtcctggatttgattccctatggcttgggcttgtgttcctcccttccttctgtggtgtgctgtagaaccatgcaggcttccctctccactatgactgacttcaaactgcatcttcagtgctcttcttccctccaaa

SEQ ID NO: 450309 - DNA, 710 bp, Homo Sapiens
gaccatttctttaagcatcaggcagatatgcttctgcacggaatcaaagttgtatcctacggggactgttttgaccactttccaggatatgtgcaagaccttgccactcagatctgcaaacagcaaagcccagatgctgatcgcgtggacagcaccacattattgggtaatgcatgccaggactgtgcaaagaggaagttagaagagaatggaattgaagtttcaaaaaaacgcacacaatcagatactgatgatgctggagggtcttgaaatctttacagtaaaacctgcaacttgaaaactagccttctgtaaccacaggtgcccaaacgaagaggaatgtatggagaactccacgtggatctctgattgcgaaaccgtcacatacaccaagagagccacatgggcatgtggccctcaaggctgggtgagagggctcccctgtgtgttgaactatgcaggagggtgatgcggacacatttcaggtggactttgcaaggactgatggatagctacctcagggaccagaatccgtgggaagggatggacctggtgttcccgttcccatctgacaggctctcttttgtcaaggtggtatttttcgtaataaaaggggaagagtaaagactgtccaagcaacagtagctgccaaagagaaaatacgaaatagacacttttttttggagtcagagtctcactctgtcacccag

SEQ ID NO: 450310 - DNA, 802 bp, Homo Sapiens
gaattaagtcagataatgctggcagccaaaggggcaaaatggcctgtgacattatcctgttcagagcttggagatgtacaagggacataggagcaatttacactgacacacagctgctgtaccagtgaaaacgaggctttgcaagcttgtacctactatataacatgtgcttggttgatggccatgcattttcagtcagaatttatatataaatatatgcacccatttttttgagtgcatataatttagacctaaaaatccttatgattaggtgaaacaccaaaaatataaggaaaataacacagcagaggaatagctcagcctgaacagtgtgatggtcccagctactacatcagatgcggtttttttgctcccttatgttcttcggatatggttatggcatttgtaggcttgggaggtaaaggaactgaagataactgggtgctgggttggggggccttattttttattatggcagcttgctatttttataacatggtgattgagttgaacacaatcaaagtacagtagtaactgatgtccccttcttcctggatgaatgagcagataaatatcgatgtcagcatccttgaaccatatcaaagtgagcagtgttggctactgcttctatttgaaatggtgctgtgtatggtagtggtctgaagctttgaagcgctacttagcatctcctttcttccatggagctctcacgatttcaacatgacagattggttacaatgctggttaaggtgagtcttcccttgcccccatcagtcatcttgtatgaatcccatgattgggg

SEQ ID NO: 450311 - DNA, 778 bp, Homo Sapiens
  misc_feature (514)..(550): n is a, c, g, or t
  misc_feature (715)..(728): n is a, c, g, or t
ctgagagaaggaaccatttatttagtcaaattattttacaacatggtcttctttgacagttgtcagcttaacacttaatatagttaaaaaagtcaacaattacctgcaaaattatatatattttaatgtctaaaaatatgttgcttatatagagcaggaaaatccctcctctccccacagggaaagtttcgttgtttttcccagagctgtgattattgccagtactgttacacgcatttcccaagccttaaagatctaaatggattatcttttccctgcttgtgtatgcctgttaaataactgtacccgtgctttgctttctcataagtcagtgacttaaacagccctgtttccttttcagctataggcatattatgctttttaaaaacccagctataaaaacatacagacagccccaatgtacagatttaaaaaagatgtaccaattacattaaaaaaaataacagcgattgattcgatagtaaaactgcttttgtgaccgaggtcaactcgnnnnnnnnnnnnnnnnnnnnnnnnnnnnnnnnnnnnnactgtgagatataggaaaataactctgcataatttatacagtaagttgccttctgattggttggccctggtctgatggtctgacaagcgcacagcacttgcgaatctgcttgagtttagaaatccctaccacttttcccagttctgggaccactgtcatcatttnnnnnnnnnnnnnnttagtaatttaattccccgtctttcaggaatgtatgtatttgcattaaaa

SEQ ID NO: 450312 - DNA, 877 bp, Homo Sapiens
  misc_feature (191)..(199): n is a, c, g, or t
tggatcacacagagttaggatatggaaaaaactcgacaatttttcgttcagaatgaagagggtgactatgaattcagtcagacatcttggtgcaatggtacttcaaagtactatggattcttatgatgtacacttcaccgggatcagggagaagcaaagttttagaaacttcacttaataaattctatggnnnnnnnnngatcgcaagcacaccgaatacgatctattatgctccaccacattctgacataggaaaattttgtgtattggttttaatattttaaaattcgtattatcgatactttgatattcttcagctcaagaaattgaactatcaaacattaaatgtgaagaatatgtgtgcaatgaaaaactgcttgtctgtcacatttttcccccattttatatttattctaggtataagaaataaaagctctgagcaatatacagctgtcactctgggcactgtcattcatgtaattctgtcctcttggctacacaaacagtgtgaagccatgctaactgttacagcataagaatagctttaaagtggttagcctatataccagaataaaaaggtaatgaaaagtatctagaaatgttacactgccaattttccacatcaaccatataattcaaaagttaccaccagccttatatatccaggaaagaaggattaacaagaaactattggtgtaaactgacaaagatgggctcttttatgttcccttttttggggggaagttggtaagttgaccaaactgctcaaagcaggcaatatcaattgcacaatgtagtgacacaacaaaaaataattgtgtgactgtgtagatctgacttgttttcatcaaaaaaagtttcttgcttaagaattaac

SEQ ID NO: 450313 - DNA, 1031 bp, Homo Sapiens
  misc_feature (169)..(169): n is a, c, g, or t
aaggggggtgggtcccagaaagagagggggctttgaaaggacggcagcctttttctttggggggtccggtgggcccagtttttgttcccgggaatgagagcccattgtaggtgggccatggtggggatgagggcccctggccccccggggaggtaagaagagacctgtnccgtgtaagggtctgaggaggtgccctgggtcgggggtgcgtcttggccttgccgtgccctcatccccccggctgagcagcgacacagcaggtgcaccaactccagcaggttaagcaccagggagatgagtccaaccaccaacatgaagatgatgaagatggtcttctccgtggggcgagagacaaagcagtccacgaggtaggggcagggtgctcgctggcacacaaacacgggctccatggtccagccgtacaggcgccactggccatagaggaagcctgcctctagcacactcttgcagagcacactggcgacataggtgcccatcagtgctccgcggatgcgcaggcgaccatcttctgccaccgagatcttggccatctgacgctctacggccgccagcgcccgctccacctgtgggtccttggccggcagtgcccgcagctccccctccttctgccgcagccgctcttctcgccgagacaggtaaatgacatggcccaggtagaccagggtgggtgtgctgacgaagaggaactgcagcacccagtagcggatgtgggagatggggaaggcctggtcatagcagacgttggtgcagcctggctgggccgtgttacactcgaaatctgattgctcgtcaccccacactgactcgccggccaggcccaggatgaggatgcggaagatgaagagcaccgtcagccagatcttacccaccacggtcgagtgctcctggacctggtccagcaacttctccaggaagccccagtcacccatggctcccgggcctccgtcgcctgcctgccgggcggcccaggtggaggtggggacgatggccgatcccgagaattccggacc

SEQ ID NO: 450314 - DNA, 563 bp, Homo Sapiens
gatcttgaagaggctggcaatgagaaagaacttacagtttgtgtaacatcattctctacggggtgttctgggggaaatttcacgtttcttgtcagtttcccttctcagtaagataattttctgttgtttgcattccagtgttcgaatttacattttttgtatctttatctattctttcctttgggtcatcattttgcttgtcaaaaactgagttagtttcacatttctttccttcttcaaagtcactgtcaaagaaagaatggtccacttcaccttctaatatatctccaaactgatccatgatggcaaaaatatatcccgagtactcgccgccgcctgggctccggagcggggagacggatgcgaacggaaaggagcgtaggcgggcagccccgcgagcagggagccaggagccgctcgcgcgcccctcacctgagagccgcggccaccacagccccacgcgcggcgctggcgcactcccgcggtcctgaacgggctcccggcgccgcgcgcccgcgcttccggaggcggagagagcggaaagggaaaggaggggcggcgtg

SEQ ID NO: 450315 - DNA, 1048 bp, Homo Sapiens
  misc_feature (343)..(439): n is a, c, g, or t
tatatgatcttcgctgggctctattctttgtcaagtcggttggttgtgctgtctctacgtgcagttcctccccaccagactgttgggtgcgtctgcgcctcaatacgctgagtccgggcgttttggtgcttctgtcctcgccgtcgtgttggttgctgagacgcgccgcgcctgggttgtttgtgatggtatttcttgcgatggtagtgagcggcccgtgctgcctcaaatcaacgcggggggttggtgtactagttctgtcgggcccttccagtgtgttggtagtgtgttggtccgtcgactgcctccactgtctgcctgtttggtctcgtcttggttcgcnnnnnnnnnnnnnnnnnnnnnnnnnnnnnnnnnnnnnnnnnnnnnnnnnnnnnnnnnnnnnnnnnnnnnnnnnnnnnnnnnnnnnnnnnnnnnnnnngtaaattgattgactcaatctatctcccaagcaccaatcctgaagggaatgctgaatctgaatgcccccataggtggaacttcaaactctcaatgttcaaaacaacatcgctttttcttccacaaatcttccttatgtatttgatggaaccaatatccttgaaataacataaattccaagctttaggtacctttgacgtataggggataaaagaaagggaacagtcaatcagatgctaagttctcttagttttacttttcttgtttctctccagtgcaaatagcaagcaatacacatagcaagtgctgaataagtgcttttggaatgtgtattctaatttctgaacctttccttatgcttccaaaaatgctgagagacgttcaagcttttggtagagagaagagatgaactgttgacttggatgtggggggacatttgaggactccacccctatttccaagcactgaggcaagccaactattctaatataaagttatggctggcagctatattaagtttattcactcaataaatccagtgcttctacataaaagaaaggaagaaacacttggacactcaaggttagaggggggaaattactgacgtttc

SEQ ID NO: 450316 - DNA, 1090 bp, Homo Sapiens
tttttttgaatcaaagtcctccgtttattaacagcaatacccacatcctcttcatagcctattaacaacagaggtaaaactattattcaaattcaaaaactacggtattgcctttgctgtggcagttaccatcaccttcacactctaaggtagcaggtgacatttaaagcctgcttaaatgtcagaatttataaagtgggaatctcatctgaactttatacctgatttttagaagcaaattagcttctaccaaattagctaattagcatgccatattcacacttagaacaactgattagtaaagtcacttgactaaaaacagaatttctttataaaccacttaacatatttactcctgtacacagactattcaagaaaaacaaaatggtaaatttaatagttcagacatcttagacaagacttgacttttgggcttcagcaagatgtggaaacttttttaaaagaatttttgctttctttctctctaaattttccttccgtgctttgatgcgggctcgtttctcacgttccagtctgagaaaatggtccacataaggcaaggcaaagaatcgtttcctattgtatcttttatttaggtgccaaggtataacccactgcttgaacttgtgccagatgattcttccaaagatgtctcttctccaagcaccaggtctagctctttcttgaccagtctgaagaagccttagggcatcttctctttcctggacaactttatctaatgcatccatggaatctactaccttatctaaccgctctggacttggcattggcaatctctgccgcttggcctcctgctctagggttagaagcatgtttctttctttcagtaagacataccaaagtttgtgtaaatcttcattacttttgttccttagttgctgacaggtccatgctgctccctgtgcaggcagggacctgaggagttattaacgatcgggaagatttcagggcggatgaaactctcctacaaagaagggccaaaccggccgcagccatgttttcgcataactggcaaaaccctcgtgccgaattcgccacccagcctcgtacctagccgtaagtttctctt

SEQ ID NO: 450317 - DNA, 1379 bp, Homo Sapiens
  misc_feature (52)..(52): n is a, c, g, or t
  misc_feature (57)..(57): n is a, c, g, or t
  misc_feature (423)..(479): n is a, c, g, or t
taaagccggtagcccctttaacaagtcaggttccaaacaacatttttcctcntggtnccccaggcagagactccagagccagttacaacataaactatttcctttataccatgaaaatagcaagccttgggctaattgcaaaaggtttttcaaaatgttgacctctaccttggagaaaatagagggaagcagaaatatagggtgctaatttgtgctataacctgttctcatgtcgtggtatattcccagttgcaacattttaaatttataagtgagaaagtaaaacaaagcttcatatctgtgaaagtgaaaaattgtccagaagtcttctattcaaagaccaattagctttttcttcccaataacttatcagaaagaaatgggtacttagaaacctaaggggttctttaaataggagtcagnnnnnnnnnnnnnnnnnnnnnnnnnnnnnnnnnnnnnnnnnnnnnnnnnnnnnnnnngttctttaaagatgactgccctctcttgaaagatgagtgctatattaaaagggtagatgtatctctataactcatcgtgtttagtatgttaattctctggcagatattagcccatctcttgtcttcatcttctttagtcaaaaatatcctccacccaagcatcatgatgactttcattcaccaccgcaccatgtttttcaaactccttctttaaatatgctttaacctcatctttagagagtttccagtcatcattaagatccatttcttggaatgattcatgggatcttggtccatttcgaatctccaggagatcaatattaaatatcagtgtactttctgggggaattttaccttttccttcttttccatagcccagagcaggaggaatgatgagctttctcttctctcctacacacattcctttcaagccctggtcccaacctttgagagcctccaggatgcccagggtaaaccaaatgggctgaccattgttatgtttgtgagtggagtgaaataaggagccgtccttttctaagtagccttcatagtggaccaacatcaaatcccctcctttggtcttgcgatggcagatgaatggcttctggagaacttcaattttcacttctggttcagggatcaaagccccaatcaaagaagtgacgaacagagtcaagaccgcgttccacaagaaaagcctcatgttgctgaagcaaggaaagaagtccctacgaaagcagcgaaaggtccctcgacttcatagatttaagaacgtagttcaaggcttacggacaagggcttcagacaagttcaggactcccccttcttagaagacgtggcacatttaccaccaactcttttctcaagggtcacgaacctacctttaaagagttaagcccc

SEQ ID NO: 450318 - DNA, 724 bp, Homo Sapiens
  misc_feature (705)..(705): n is a, c, g, or t
tcattctcatcctcgtcacccccatcccgaattccagaggctcctacatacagctaaggcgtagtagtccaggagctggatgttggacaatcttttggtgcaaagtccatgcctttcgtgaaaccaggtggaatagtaagaagatctttctcaaagtctatctcctcctcagcctcctcccgtgtgttcagatctgttatggtgggttcatccatcccccctggccagaagggatactgagttggatttccccataaggactgggaggctggccctggaggccggcgaagagacaaggaggttgtagccgagagatttgtgttctccagcaagacctctttgtaacccagtatctggcctgtggttgggtgtctttgggcctgtaggtcggatgggactggggctcccaggacagccaaaagagaccagggatccgtcttcctctgccattttcgggctgagtgctccacaccatgcagaggcagccaggctggggatgacagaaacaactgttctgcttcttgctgcagatctggggcacaaggagggaggccatggggaaggctactctctggagctccaggcaagttcagcagctcccagtgccccgtgcatccgagctccacggcccgaaggggtaggtccaggggatctggagggggtagcacaagtcgctctgtctccatcatcctggagccacagcantgcctggcagcccggaagt

SEQ ID NO: 450319 - DNA, 1001 bp, Homo Sapiens
acgtcacaagtaacccacaagggaatttttcatgagccacagcaactgataagagttgagactcttcaatacacataaccacgtatcgaagatctgtcctaaccaggaacacacatattatgataataatcgggtacacatcccgatgtagttacacacgattatctatagctctcagctgcgatcacctacttctaacaccatcttgaaggaatttgggggcacaactgtataagcccaaagcaattcctctcttccgtgctgtttgtaaacttaaagtgtatttttgaaatcattttagggagatttattcatgccattctggagacgtccaccctataaactactgtgacgtactacaccctgtagataaacttttaaaggcttaaatgtcccagtgggcgtggtggggctcatcatataccttgttgttgttgttaaaaacatagtataaatcaattatcttgtttcctgtcagtatttggaatagcaaaaattatttctggtccctccgttagatcaatccacaccacttttcatgacatattaacactgaaatttgacagacatccctgaaaagtttttaagtaaacaagtgaatcacagtggagtctcaatcagttaacagtgtagatccattttttttcaaaaaactgaatattaaaagaaaatcttcaacctaaataacattaaactaaaacaaaaccctcctaagaactaaagccaagtgtgtgttgtcaatgattcgatacttttatcccctgactgatttagactcctcctcctcatgttgtaagacatgtttgctgaaatcttcacgccaagcttttgggacgcctgggtgaagaggctatgctactgttgcatctaagggaatagtggcactgtttcttccctaacagacttcatatccaaagatgagcaatgaatctcactcacctgcattcaccagcatcttatcaggagataatacttgctgtgcaaattgatgacagctgata

SEQ ID NO: 450320 - DNA, 1204 bp, Homo Sapiens
gaacagaaagcatagccgccacttcagaggttacttcttccttggtccgccttctctgatcacctccctacctcatcctcaatctaacgctggaatattggatatggggtaggtcaccaaatgttgccagaagactcaaattatgccacccatatctcagctgggaagggcttaccgtggcctgactctcctcagggtccaagtccccatttatgatgtccaggcagatacacttgtttctgtcacatagtaggcgctggaaaatgttagtcaaatgcacgaggttctggtgtggagagtaagagaaatcttgggaggagtcatttaaggggtgtgcccagttgtcctcattaaaaaacactatcatcatcagggtgaccaaagcagacatcataggcagggggtggagtcagaggctctaatgtggggactgccgccaagctctgcagatcaggagcagtggacacagcccgtggtccccgaagccgaaggttgattggagctcttccagggcttccttcctgggccatggacccctctgaggccattcgcctctgttccagtttggctctcctggacccctctggatggctaggttgttcctcctcaggtgctgggggtatcacaacagtgctgtaggggggtggttggtccaactcttggggtcggcactgggattctagtcccaccacggcctcttcatagactggcacttcaaaggcttcattgtcccctgtctgactctgtcttttcctttcctccggtgttagcccatgctccaggtggagggagaaagtgcacacaggcgcaccaaagccacagggacacaactgcttgagaaacaattgtacaggcaaaggcccagcacaatggccggaggccctgataagtcactgtcctcttcgtagaccccacatctgtccagggccctcctctaccctctgctgatcactaacttgttaaactcagatttgcaaatttcctgccaggaggtagcccagtggctgggagcaggtgggcaggggaactcgttttctttccttgtaacagcaacaaccacgaggcagcccataccccagatacagcctgtcagaagttgccagcgctctgtgtagcaaggaattgcagattccctcctcacacctcggtcccaatcccatgaccctcccgacccatcgcacccacacctgtctcagaagttcgt

SEQ ID NO: 450321 - DNA, 1094 bp, Homo Sapiens
  misc_feature (958)..(958): n is a, c, g, or t
ccgcggagtgcggagggaggctgggctctgggaagtccgcgcgcggctccgcttcagaggcaggctcccggataatgagcacccatgtggcaggcctgggcctggacaagatgaagctgggcaatccccagtccttcctggaccaggaggaggcagatgaccagcagctgctggaaccagaggcgtggaagacctacaccgagcgccgcaatgccctgcgtgagttcctgacctcggacctgagcccgcacctgctcaagcgccaccacgcccgcatgcagctgctgcgtaagtgctcctactacatcgaggtcctgcccaagcacctggccctgggcgaccagaacccgctggtgctgcctagcgccttgttccagctcatcgacccctggaagttccagcgcatgaagaaggtgggcacagctcagaccaagatccagctcctgctgctcggggacctgttggaacagctcgaccatggccgtgctgagctggacgccctgctccggtcgccagacccacggcccttcctggccgactgggcgctggtggagcggcggctggcggacgtgtcggccgtcatggacagcttcctgaccatgatggtgccggggcggctacacgtcaagcaccgcctggtgtctgatgtcagtgccaccaagatcccgcacatctggctcatgctgagcaccaagatgcctgtcgtgtttgaccgaaaggcgtcggcggctcaccaggactgggcccggctgcgctggttcgtcaccatccagccagccacatcggagcagtatgagttgcgcttcaggctgctggacccgcggacacagcaggagtgcgcccagtgtggcgtcatccccgtggctgccctgcaccttcgacgtccgaaacctgctgcccaaccgatcctataagttcaccatcaagaggggcgagacctccacgctggtgtacgagnccctggagggacagcctcaccctgcacaccaagccgggagcccctggagggggccggccctcatgccactctgttttgagcagatgattttctaatatttatccactaataaagaagagtgtaaatgcacatatgg

SEQ ID NO: 450322 - DNA, 1227 bp, Homo Sapiens
ccaccaggcaccaaccgaagtgatgcgcccgcaggtttcccggtccttcttctcgggagccccgagagcaggggggattccacggaggccgccgggatcatgagggctgtagcagacagagatgacgagcacgggggacgatgaaggagaagaggaagatgcagatggcaaacaccggggccccagtaatcctgaggggtagggatctccaccaggcactcgatctcttcatcctcgacctgtgccgagcccatgatggcaacgggaacaccgacaacagaggccaggcccagatggccacattgacagcctgggctttgctggacgtgcggacgtcgagggcacggatggggtggcagatggctacatagcgatccacactcatggcagttagggtgaaggtgctggtgaacatgttgtagtagtcaatggcaatgactgtcttgcacagcgcattcccaaacggccagaagcccaggaggatgtccgtgccctggaagggcagcgtcagcaggaccagagtgtcggccagggccaggttaaagatgtaaatattggtggctgtcttcattttggtgtgcctgaggatgacgtacatgacaaggcagttccccaggagccctccgacacacacggccaggtagagccccacgatggtgaccttgagcccgaggggcaggaaggcgccgtggctggcattgagcagcagatgcgggggcagcagactgtggttggggctcaggagggacaggttgccctgaaggtggctgccgtagataacctcccagaacggcgcggggaagaggggctccatgccactgccctgcaaatccactctgtacggtacttctgcaacctccttgggagctgggaccaccgtggagacccccgccctcagccggctggcagtcgagcacaggtgcagagcagggtagaagaggatcttctcagcagacgccagaccagacgcagcagccgagtgagccggcagcccgaagtaatttgacttgaagtttcatcatcaggccttggcagcaataaacatgcttttagatctcagcatttccgttagccctttgaaaaacacgtgaatcccaagctggagaagccggctctatgcctctatgccccaatgacccctatgaggggcgcgtccacgcccagactctaacccagggcgcctccggaggggaccctgcccccgccacgacccgccccacctgctcg

SEQ ID NO: 450323 - DNA, 1008 bp, Homo Sapiens
cgtgggtcctcaggattctcccaagaatctcttccacagcatctggagcacagtcctgttgcagaaggcacagtctcggctcgggggagcccggcagggatccaggcgtgctgggggagggggcgcccgggcggagctcacctgcggcggtgggtcgtagggtcctggcttgtggagagaggttggcgctgttccttggctccgctccccaaagggcaaagcgccaggaagtcgggctcccggcggtctccaggctctagcccacctgcgcccaggccgcacccacccgcgtcccttcgcgcccccacacagtgtgtggagcgtcccgaccgggcgtcagcgggcagggccatgcagctcctgtggacgcccagaaagcgcggagccccttcccactagggcctggagaccactcttaaactggctcggtggccctgggactcgggctccggctcccgtggtctaacccctcctgggggctgtgtcctcgccggtacgcctaggtcagctggagacctctgggtcgccccggctcctggcggctcctggtgccactcggtccggaactggcttgcctgacatgagagggacagagcagatgcggctggcggggctgggggtccccgctaggtgggagagcggcaggggctgctgctgaccggagcagcctgggtctgttctggaaccgtcgccgtgaggcccctccgccccgcaaaccctccgggtgcggtttgggagtgaagccggacaccaaacaccatccacgctcagccccacgtgggtccaggagtcccgagcccaagcccctgcacctgtattttaactgttttttaaaaaacctgagggttaaagtcaggcaagtcagctgactcagtgtttgcctcctgcgtgcactagatgtgaccagcgtcttttgtctggcagtcagagaccaagcccccccaggccctgccaggacctccgtgactggtgaggccatcctctgcaattatgagcagcactgaggtg

SEQ ID NO: 450324 - DNA, 857 bp, Homo Sapiens
atatattccaggaaatgttaaagtggttgatcaacattagaaatctggtgaatataagtgagagccttgtacagttgaaaggttagattacaatgaccatcttgatagatgctgaaaaggcatgataaaattgattttgttgatttaaaaacaaacattagcatacaaggatgaataaaaaagaatctgaacatgataaaacatggttatcagaaacaaacagcaaatactagagacaacttaaccttagtccaacaggaacctgatggggatctgcagttgaaatgagggctgggggaaggtctgtgcatacatatgaggcaagtatgcttcaggatgggagagactccaagctttcatcacattttcaacaggatccatgacccccaaaaagttaacatcctctgaactagagataaaattaggaagctcagctgcactgctattccttaaaaacattactttagaggttctaactatgcaatacaggaacagactaaagaggtatattgaaaaggtgcagacaaacgatcattatttgtagatgagctggaaaatccaagaaaatcaacagaaaaactttcaaagctaaagagttttgtaaagtggctggaaataaaataaatatacaaagacaatagcattaatacatacattctgataaaaaccgtcagaaatgtaaagaaaaaaggtcccctttataagatatcagcatttcattagcctgtcttgcttaaaactctagtggttttccaaatgcttcatggatctgagccatcttcagagggtccagctgtggctctctgatcaggcctgtctggctcagcttccccttttggcaacgatgctgcagccag

SEQ ID NO: 450325 - DNA, 903 bp, Homo Sapiens
gaggtcggcggccaacatcccacacctgctgccttcacatgatgatcctggtgctctcggctagctccaggccgggccagggcattgtttgggcgatggttgcctggccatctggcccccggagcaatcactttgctctgccagtttggggaatatcaccacaggtgtcagagtctgaagtgaaatgtgggtcccccttgcagtcctccaaagtctcagggcaagatgtaccagcagcctctggtcctcatccccatggctccagagtgccctcccagccaacctagatgggagactcctcagtgctgaggcatccaaggcaaggggtggtcccggtgaagtatgctcctggtaggggttctgcaggagaggggctctccaggtgaggggtgctccaggtgaggggtgctccaggtgagggggtgctccagatgagggtgctccgggtaacagggtgctccaggtaacagggtgctccagggtgagggttctccaggtgagaaggtgctccagatgagggttttccaggtgagggtgccccgggtaacagggtgctccaggtgagggttctctaggtgagaggatgctccaactgagggtgcttcaggtgaggggtgctccaggaaaggagtgctctggatgagggttctccaggtgaggggtgctccaggtgccctccggagccaaggcacataccgcctcccatatcagtctccaggaccaatggaggggtgcgggcctgagcggtatccacatcccccagaggagatcgaagtctgctgagcagccccctttgtccaagccacttccctctggggtgtgagactgttctccaaaggtatcctctacaagggcctcccgccacaggaggcgatccaaactgctggtgccagtcacctttca

SEQ ID NO: 450326 - DNA, 1155 bp, Homo Sapiens
ggaaaagtttagatctggttactggagcaagtctcaaagagaaactctgaaagctgcgccagaatcacaggtataagataaggatagcattgacatttgctgggagttacagtgatagtttcatctcagcagttcatttttttcttcagtcactgctggttttctttgactattatagttgccaggaagatccttgctcttcttactttaaaaccagcatttaagtggcaatttggatgtaataggatgagaccaaatttatctaattattacagtagtaatacatttaagagttaaaaatgtgtttttatatatccacatatgataacaaaagattcaattcccaagcctaaattttgaagcatgtggtattgtcaaatctagcttaccatcttttttgggggtacttgcaaccatagtaaaggaagatggaatagactttagttaactcttaattataatctcatatgtctacataaggcacataaccagtttccaaggtcatcatggcttgcttaaagtctttccccttctgtactccatggaaatattctcagtaaaccaaaaacaaaaatggaaaaataatcaccaagccccatcccgacacacacacacagtccaaagcataagtcagtgtgtattgaatttaacaagtaatgcagtttgggatgcttttgctacattttggtggcattttaactagttatctgaatatttattaatcgtacttcctcttgtaaagttaactacttactttttggttgttgtttttttaacatcaggttctgtatctaataggagatgtaacactttatttcatggcaggtttttattgcagagacttgaagtcttagttttttaaactggcacataaaacactttttgctgttatttttatttatgtcaatactgcagagtatctttatgccttattcaagtggattctgagcctgtatgtcaccatgtaaacactgggggttcactcacctacgcactcacccatcactctgaaagaaacagaaaactgcgagaaacgacaggcatctttgctccattgggcttcaatgagggttagaacgcttggcacttctaaggagaccttaaaagagcacgtgatgctcccgggtcacgtgaaccttttctttcaaaggtgac

SEQ ID NO: 450327 - DNA, 1174 bp, Homo Sapiens
  misc_feature (181)..(190): n is a, c, g, or t
  misc_feature (353)..(559): n is a, c, g, or t
  misc_feature (594)..(685): n is a, c, g, or t
  misc_feature (1161)..(1161): n is a, c, g, or t
cgttgtgtgctaaatccaattacctggcatggaagcaacaagccggtatcccagctacttgggaaactgaggcacgagaaatggccttgaacccagtagggcggaggtgtgcggtgagccaaggatctttcccgttgcaactccaagcctggggaacaagagtgaaactccattcccaggnnnnnnnnnnttcacatccaaattttaaagataattcaaatccaaatcaactcaatcagaatctctcggggtgggcctcaggcaccagtgtttttttgtttgttgggacagggtcttgccattgcccgtgctggattcaaaacacctgggctcggcaggtgttgtggttcatnnnnnnnnnnnnnnnnnnnnnnnnnnnnnnnnnnnnnnnnnnnnnnnnnnnnnnnnnnnnnnnnnnnnnnnnnnnnnnnnnnnnnnnnnnnnnnnnnnnnnnnnnnnnnnnnnnnnnnnnnnnnnnnnnnnnnnnnnnnnnnnnnnnnnnnnnnnnnnnnnnnnnnnnnnnnnnnnnnnnnnnnnnnnnnnnnnnnnnnnnnnnnnnagagcaagactctgaaaaagcaaataaaccgaaannnnnnnnnnnnnnnnnnnnnnnnnnnnnnnnnnnnnnnnnnnnnnnnnnnnnnnnnnnnnnnnnnnnnnnnnnnnnnnnnnnnnnnnnnnnaaacctcctggtagattccgttgtgcagcccaggccgagaagcatcgcggagtcttgtcattcagcctgaaaatagcatcaagttcccatccactcgaacaacagtttgtagatcttaggctgctctcatcgagcaaacatggcctccttgcaacacctcaaatgggtgccaggcatggtacgcagcacacaaactgtgtcacttgatacagcggccccatgaggcgaggagttgggaggtcacagcacatgccccagggcacccagggacacactgaagcccaggcctccagcacgcaagggctgctctgaagaaatacgggaggtcctcactggagggtctggggccacacggtgggtccggagacagaaacgaggagaggacgggctcacccagccgtggggccgcgggctggacatccagtgggagtgggaagccaccgtctcaaggcagaattccctctctgccttgtccngaatttgcccccc

SEQ ID NO: 450328 - DNA, 645 bp, Homo Sapiens
tggtccacacaaggttggccaagtgaactggtgctagattggaaaaaggaacggataattcaaaggttgtaacgggttcaacacctacccccatgctttctcatccagaagacattttgcaaccacgacacattttgccacaaagggaaataatctaaggtcatttcctgtggggtatggggtcattctgtgtctctgaagaggccaggcatacttacacggtgacagcaccttctgcagaaggaccagaaagatgcaaggaggaaaaatagaatatgcattttctgaaagcatattccatgctttggaagtagggctgcactaaccaacatgggctgcagattcaagaacatccctgccatccatgtttggttttccatggtggacaagtcacccagttgaaaccttatcattctcccttggaaaatgcatggaaaaaattttttgaaagttgttttcttctgagcggaactcaaagtgtttaaaatgctgggtaaatacttgtggaagatgatcagtctgtcattaaagggagtacaccatatatagaaactagtggctcataataaagtcttccttactttgataactgataagcacagattcctcatgtgaagtgccacaaaggcatcaaatggatccaag

SEQ ID NO: 450329 - DNA, 1339 bp, Homo Sapiens
  misc_feature (422)..(436): n is a, c, g, or t
  misc_feature (1117)..(1133): n is a, c, g, or t
cttgtttacaactgattggacatgacacaggatacagtaaggcacaagtggatggtaccaatgagaccaatactttaggacttgtttttctgcaccaatactaaatatgtaccgttttcaagatgaatgaccaaaaagcgaagacaaatttttgttatgaaatacctataccaaattttaaaatgtacaccatctgagctgcccaaaaaggtttaaaaagtatccatttttccccagacatggaaactatctctcatcagtaggtccaagggaacttgggggattccaaatatcccagcactttacggaagggaggaggataaaaattccccttcctgctttcctttaccccgacataagaccaaaaccaaggtcgtatgtttacagtagtgtattctacttattacaaacaactggaattnnnnnnnnnnnnnnntcacaccgggagaccactggtgcgctgactggttgcgggatgagtaaggcacttcctgggagacagcagcttccccccactccacgggaaagatggcgcgcggggggctggttaggacaaggagcacgtgaggctcccgggaagcagacaggaacgtctcgacagcagaggaagacacagggaggtaaaacttggaggtgaaactctacacagaagtggtcactcggtcaatggcatgattgacctcgtttttgtttgagtccagtccttttagcagcattcatgtcattccgtaaattctcccactgtctttttcatgtgctttaactcccctgggtgtggagtggctcgccttagaagtgttctcgtctcattgtcttcgttcatctttctcatcctccacaaatcggatcgcactgactctgttgacagcacgctcgttccaggcttcatcagagacatcatttaccaagttctccagtgcaccacagcgaggcagattctcttgacaagtaggttcagaaggcagctgaggaagtaagacacaggttaaaatcttctctcctgtggtgtagtctgtgtctgtctggaatgtaagcaggggctgggactggttgtcagatagccacagagccttcaacttcaaggcagtcagggataaaggtagatgcagcaacctgnnnnnnnnnnnnnnnnnaaaaaaaagagacatcacaacctcaaattttgtaatcaaatcaatccctatcaacaaaatgaggaaaaattaaaaggagcttcctgagattggtttcaaaatgtaaaaacggtgttatgtttttaagacgcaacatactctttgcaagtggattcctcagtaggttcctgtgcttcccttttctgcatcccgggaattccggacgg

SEQ ID NO: 450330 - DNA, 1062 bp, Homo Sapiens
  misc_feature (976)..(1012): n is a, c, g, or t
gaaacagcaagggtgccaaattctttttgcaggtccagtttaggaaggatgggatgatagcctgaaagcagctttcataaaatacccatttcatggtttatttcggcaagcagctctcaatgaaatcaaaccagtggactttcatggccatcctcagttcttttagtaagcgactggcaattcggatcagcatgcagtaagcaaactgtgacttgagaccagatttagtaaacttattcaacatcttggaaacagcaagtcgatcattctttctaaaggtgatacaggactcccaatgcatggtactggaccataatattatcacttgatgcagcttcttgggcttcattgatccagcgcttaaccacatcatagcttatcttcatcatgtgcagggaagataccagtgctgaactggatacactggaaactttatccacaatggcctgcttcatgtatctttcaatggcttgcaacattgttccatcggtgatcctgcagagagctctgatggccgggcctcggtatacatcttcttttccagtcatgtctttagtcagactgcttgtgacaattatcacatcctcagagatggtagccatttctttgatggtaaggtagcacattctcctcaatgtttgatcattagattgaaacaatcgcgtcattgcaaagaaggcttctgtagcttccgttgttccaaagtgttcaccctggttcagtaagtaaagaatctttgtaagaatatgcaaacatcttcttggattgattggagtttcattgaatatacgagcctcctgtaaaacagcactcttctccagatgctggaaaggattggagccactaccagactcctcgtccttcttgtcgaattttttaatcatcttggacgacttcccagcgcccagacccactgcaaccgtcccaggcaccgcccgctctcgacgaattcgagctcggccgatttggcctgatnnnnnnnnnnnnnnnnnnnnnnnnnnnnnnnnnnnnncggccgccaccgcgattagccccattcgccctatagtgatcgatacatcc

SEQ ID NO: 450331 - DNA, 907 bp, Homo Sapiens
cagagggccggccctggggggaggcactcctccaggctctccctgtccttagccgattttgagggaaccctgtggcacctgtccctggatgaagagctgtcacctctgccttgccctttaactcaacccgcttcccagcacagcggctttctttttaaaacctgtttcactgagaagtttgtttttgggtccgctggtgtcactatggcctgggtgagaggccagcactgctgctgccctgaggggaaacgcctgggccgtgtagtggggacgctctgggaatggtggcggacgggcagcgtgggtgggacctggcacttcgtggtggctgagccatccacccagcagcggcctcctgtagcaccatcttgggaaagtcctgggggacgtgtgtgtcgtgctttttaccatcggtttgacttacagtggagtagaacgagccagagttcctgacttgagcaggtggatttgggcccaggccttgtttcactcttgcttctcggtgcggactaatgtcagcttgtggctgggaaagagggatgtgcagtgacgtggtcaccaaggcagtgagccccgctgaccccgggccagcacttggcaggcaggaggtgcggtctccagagtggtgggccagggcgggctggcctccgtcttctatcttcttttcttgcctccctgaccagcagactcacctcccaagaacgcctgcccgcccacccgccttaggactcccgatgcgctcctggaaggccccaggagtggcaccttagtgtgggtcggcccgcagatggcacccaaggccgggaagggcagtaactgcacacgcggcgttgtcagagatgggggtgggggatgcttctgggggccctttcttccccattgtgttgcccagaacatccctggcccc

SEQ ID NO: 450332 - DNA, 841 bp, Homo Sapiens
  misc_feature (216)..(266): n is a, c, g, or t
agcattccaggaacagggacttctcccgcaggcagcccccagccccccaccagggcgggggacaggcccaccagctccatgccagcaaacaaggagtcgcggctccacgcacagctgctggggcctctctttgggctgtccgtgccccctgggatccgttcaggtctccaccgcctgctttctgccagtctggcctcggcctcgctggggtctccnnnnnnnnnnnnnnnnnnnnnnnnnnnnnnnnnnnnnnnnnnnnnnnnnnncggcatcccagatgagggagcagggctccgggacgagaccggggttgaactcagaggctgcaggaagacctggctcccagggagaggcacagcgtcggtcagcaggtcagatgggcctgggagggcggctgtggggccaggctcagctgaggtgccccgggcaggggacagctgcccacaggaggcctcaaagtgcctcaggatcttggtggccttgttggtcacaggtcccgggctgcccatgctgagctcctgcagccacggccgggtgcggaggaggatgtgctcctgggggaggaggtcgctgctccccagggaggcgatggcacacagcgccctcagctgcgtgcattcactggtcccacgcaggtggcaggtcagcagctgcagcacggcctcacagttgagcagtccacacgctttgatgaagtgctgtgcctcctcgcggctcaggaaggcgcgtggtccccgagtcacagtcctcaccaagctcaactcctgctgacagtcactcagggccaccacctcgaccctttctgccaggtcacccggctcccggctggcccctgaatggc

SEQ ID NO: 450333 - DNA, 1033 bp, Homo Sapiens
  misc_feature (90)..(90): n is a, c, g, or t
  misc_feature (97)..(97): n is a, c, g, or t
  misc_feature (189)..(189): n is a, c, g, or t
tttgggatgggagtctttcttctgttcgccaggctgggaggtgcagtggtgggattctcagcttcaaaggtaatcttctaaatggtccantatactngtagtataacaatgttttttcagtccagtatttatgagggtcactcggctgcagcaacaaaatatttcaactctagggaagagtgtagcctngtagcattagcccctttgacaattttcttacaagatttttactttagaaacctccgacaccatgtagtttcttcagatacagtatatccaaactttttatagaaaccaacattttgtggtagacattcaagggtaatcttgtaacagttcagtttcttgcttagcaaagtaagggttgataataacaatttgccaagctgctttcctctgcattcatcactaacaacaacatcttctactcttcctctcttagcacaggaatggatgaatttatgttctataatcagagttgccgtagcaacaatctgtcctagagtcacatcttctacaactgtaacataataatccccagatttcttcatatgctcaaaagatttcataaattgttcagggctgacaactccagtctctgttagctgacccaataccttaaaaaaacctctatttaagtcagcagtacaaagaggcctcaaaaccaagccttctccaggatgtgttggggaaatggctggagaaaatgtagctgtattctgactccagtccacttctttgagtagacttgggtcaaacataggagtttcatcaggtttcatttttctagtaaggtccgtagaggccctgcggtcggcgctcctagccaggcgcgtcggactctcccccaccagtgtgcacagcaccggatccggatccggcttcagcgccagccccacctcctcctccaccgcccgcgccacagttgggaaccgcggcccagacgtggcagcgccaacgcctccacctcgcctctgccccctcacgcaggccgcgcgcaggcgagcggaggcggaggccaaggcgccacccg

SEQ ID NO: 450334 - DNA, 824 bp, Homo Sapiens
aatttctttaactttactttttctcatagagaagtcttcgtcattatcctcactctcacaataatcagaatcatcctcagaatcttcaccaggtgcaaagtctggttcagtgtcattagcactatcaccatcactgccttccagaagaatcttcctctgctgtgctgcagctttagatgctgcttttcttttcccttgaacaccaccaacatcatcttccacagtaatcttatccaaatctaaataatcactggctacactgcaattagagatatgaggagacttattcattgtttctattttactactgccatgtttttcaatgcttttatcttgagagttctgcacattagtggtgactgttggaagttccttcactgataaagctagtgcaacttctaagtctctctggtagagcttgtcatctaaagccatcctttttttaggggttttctcttgtactgggatttcttctttccggagattgttcaagttaggttttggtttatcttgttttaactcctttggtgctgttctggatttcttgtttaaaggtacagttgcagaaacaaaatcatcatcactgtcagagtggtcaaactgtgagtaattgactggtttcttatgtctcacaggccgcaccatggtccctttcaaggcttggtatttacagttctcaaattcttgttggcttcagcggcggtttcaattcccgcccaaaaccagacttcggagccctccgccccctgttaccagtcgtcctatcatcaccagccatgcttgcggcggcgcacgcgatcccatacattccgggcgtaccagcc

SEQ ID NO: 450335 - DNA, 754 bp, Homo Sapiens
  misc_feature (73)..(73): n is a, c, g, or t
gacccttccccgacagttcagcaccctcagcttattcccagggtccagttcctaattgttggggattggcgcnaaatgattacaataaagcaccaaaccaatgactgctccagagaatgcccagcccctctgtgatctggaaatctctaacttagatggttttggtcccaaacatattagtctctacccttcctgctatccactgctgcttttgactttgtccttcatattaacagatataaggctcatagcactgcagagcaaaaaaacataacaaaccatttttatccatcctctgtggaccagagctgaacacactcataatggtaactctggagtgaagtcctgtgtaatgacttcaaaaaaagaacaaagaaaacaattaactcttcctactcagtagtgcaaataaaacattttcttttcaaatataaaaataatccaagaagactatccatgattaaaggctactctctatgattaaccaggtccaactagttcagaagagtctttaaggaagtgattgtcaaaaaacactcagacaatccacaagaagtgggcaacatgagcaaagaatgaagacgcttcttaacatgaatccaagacagcacactagaataatgttcccaggtttacatttggtgatttcagatttcattttcataaaaaggcttgagaacatgccatactgccaatttttgattattcagggatgcttttctaacccatagattattcaggcttctgtatttcc

SEQ ID NO: 450336 - DNA, 721 bp, Homo Sapiens
  misc_feature (17)..(17): n is a, c, g, or t
  misc_feature (487)..(584): n is a, c, g, or t
aaacaccaataaatttnatttttctcttaagagagacagtcctgcttggcacagcagctcccctgtccttctcgccactctcagtgctctggctgtgtcatccttagacaatcgtccttgtctttatggtccaaaatggtgtctgtacatccagaccacacatccatattccatgctgcagaatggaagagaggcagtgaagggcgggggcggctcctgccttctcagagttcccagaagaaccctcacaacacatgggctctcatctccttgtccgagctaagccactgaccacagctgctatggagtaaggaaatgtgtccttggtccaaacacagaagatcttgcttctctcccatcttcaccttctcccgagcacgtccttcctccatccgcagcctgggcactccttcagctccaacttgttggaagttattccatttcttcgtctgttaaaacaggaagcaggctgggtacggtggctcannnnnnnnnnnnnnnnnnnnnnnnnnnnnnnnnnnnnnnnnnnnnnnnnnnnnnnnnnnnnnnnnnnnnnnnnnnnnnnnnnnnnnnnnnnnnnnnnnggagcaaccggcctatcagggggtccactgaagagatgtggtctgtgggtgccagaaggagcaacaatggaggcagtcgaattccgagagctcagagagtctgccaaacttagccggcctcggcgcgcggttcccgg

SEQ ID NO: 450337 - DNA, 927 bp, Homo Sapiens
ggtccggaattcttgggatagcagacagtggtcagtcctttcttggctctgctgacactcgagcccacattccgtcacctgctcagaatcatgcaggtctccactgctgcccttgctgtcctcctctgcaccatggctctctgcaaccagttctctgcatcacgtgagtctgagtttcgttgtgggtatcaccactctctggccatggttagaccacatcaatcttttcttgtggcctaaaagcccccaagagaaaagagaacttcttaaagggctgccaaacatcttggtctttctctttaagacttttatttttatctctagaaggggtcttagccccctagtctccaggtatgagaatctaggcaggggcaggggagttacagtcccttttacagatagaaaaacagggttcgaaacgaatcagttagcaagaggcagaatccagggctgcttacttcccagtggggtatgttgttcactctccagctcactctaggtctcccaggagctctgtcccttggatgtcttatgagagatgtccaaggtttctcttgggttggggtatgacttcttgaaccagacaaaattccctgaagagaactgagataagagaacagtccgttcaggtatctggatcacacagagaaacagagaacccactatgaagagtcaaggagaaagaaggatacagacagaaacaaagagacatttctcagcaaaaatgcccaaatgccttccagtcacttggtctgagcaagcctgccttcctcaactgctcggggatcagaagctgcctggcctttttcttctgagctgtgactcgggctcattctcttcctttctccaccagttgctgctgacacgccgaccggctgctgcttcagctacccctccggcagattcccagaattcatacgctgatac

SEQ ID NO: 450338 - DNA, 652 bp, Homo Sapiens
gtgagcaccacccatatttgcgggaccgcccttggtgtgagtgtgcgaaaaattaaatgtttttaaagacgtgggaatggtttgaatgtaaattagaacttttagcgttaagagagggatttcccccaggtggtggttgttggggccaaattagggagcttataagaggaggggaagcctggtggaggggcccccgccaggtttcccaagggttcggggttccttctcctcccccccgtgggccccctgaggtccgttggccttggaaagttttggccccctcaggcattcagttccaggtcagtgacgtatttctggacccactcctcactggggtcagcacagacctccgggcctctcttggttaggaagatgacactgggcttggagcactggctgctcgtctcaaaagtagtcagctatgaaattctgtggaatctgtcgggaggtgtagctgaagcagcaggcggtcggcgtgtcagcagcaagtggtgcagagaggacctggttgcagagagccatggtgcagaggaggacggcaagggcagcagtggagacctgcatgattgggagcaggtgatggaatgtgggctcgagtgtcagcagagccaagaagggactgactactctttgctgcctgcgtccttctccc

SEQ ID NO: 450339 - DNA, 863 bp, Homo Sapiens
ccgtgaaggtcccgctttctcggactcaccccgctctgtcggagcagttcaaggatggtggcacgtttcacatgctctgttccccctgagtttttgacttcctttaggacacaggctgcagcttgtgtctggctttccgtcggtcaggaggtacgatcctgtccagatcatggaaactgaaagctttcagcaatgctttgcaagatggaggtgctgccctgagcttgcaggtgggtcaccccattgcatagcctcaatgacacgctgcatctgtggtctccaccagcgtgtcctgccatgactgaaggctctctgcaaagctgagcaggttaaaactgtcacagcacttccgcagctgttcccaaatcagcaaaaccagctctgtcttcacctgctgcaggtaggggcccatggaccctgacgtgtccagcaatatgcatactttgctctccaaaacggtgccaaacagtcggcggctcccggacagcagccactgcagcctctggacatagcgccttaacaccttctccaagtgcctgatgtacacctccatctccctgggcgtccactggatgtgtctcaccactccatggatctcaacgctggggaagatgctgcagtgtttggcggatgctgacctctgtcctgacttttgatgagtgcagctgggacccatgcatctggaaatctccagcttcaattttttgagcccatattttgccacccactcttggcttgagcaactgtatcctttctgggtaagtcaatagaagagctagtccttctcaagccccttccttgagggtacttcttgtacactgagcccacgtcattccctttctctgtgtagaacagtaaaagag

SEQ ID NO: 450340 - DNA, 1276 bp, Homo Sapiens
actatctggtaattatacctatgtttactaacaattttacaactgctggctgcagcggtcgcatcgacattcattattattacatttccattttgcaaatgttagaggaactccttccatttgtcaggtgtgacccatgacttgcatgtctctggggacactctgggaagatgtcttcatagataaggagctccagataaacatgagacagaacagtccccaaaatcccttcagcatgccccagcccttcagggagttcctacttgtttatgaatctgtcccatattatagctcgttgagtagagaaattccaggatcttcctgcatggatttctgatcagaagagtggtccagagtgagctgtcataatacacttcttcttggcgcagagctccccctttgatgatctccagggcacattcctcctttggagctgcttgcatatggactatcccagaaactgccttcatggctgtttctgtgtctatgaggccaagaacacagagagtgattgatacattgaccctggacactgaatattcctttctgatggaggagaagaacccatccaaagcaaacttgcttgcagaataggcagcaaccattggataagccactttcccagccagagaggagacgacaacaatgcttccattgctctgcttcagcatgggcaaggcagctacagtcaggaccacgtaactgaggaagttgacttccatgcttttgcgcacatggtgaatatcatcatgaaaaagattcaaagaagtgttggtgatgtggttgagaatgagcatgtctagtcctcccatgagctttcctgcttgggcaacaaattgctctgcgaaggtcatgtcttccatggtgccagcaatgtagtgtgctgaggctgctccaagctccaggcagtgggataccaccttctgtagagtttcttttgacctcgctgtcaccaccacatgggctcccatcttcgccagatgataagccatctctcttccgatccctttgctggcccctgtgacaatcactttctttccttggagcatctctggtctgaattcctcgtttgcagaatagtagtagtaggccatgaagagccccagaatggggaggagatattttttcataaaagccatccgacagggagctggcctgaagactcctgtaggacacacagagagaacctacagagctttctacaacctcctaagcaggcagcagcctctgaatagtccgctctcgacgaattcgagctcggccgatttggcctgat

SEQ ID NO: 450341 - DNA, 1008 bp, Homo Sapiens
  misc_feature (257)..(257): n is a, c, g, or t
  misc_feature (418)..(644): n is a, c, g, or t
tgtgacccatcttttcaaattcccttacctgaggaaggagcccgattacaaggatatttacctgctcccacccggatctaggctctctgtttcctcgagtcactcccagattagtggtgtctagctcagcactgtttctgttatacttcattcataattcccagcgctgttggacgaggatgggaagaccgcctgtggccatgagccctccccggtgctcctggggctaaggctggggctgcagccatggggctggngtcagccccgggcctgggttgctgggtctgcccacagctgtggtctatggctccctggctctcttcaccaccatcctgcacaatgtcttcctggctctactatgtgggacacctttgtctcagtgttacaagattcatcaaaatggccttctgggtcggannnnnnnnnnnnnnnnnnnnnnnnnnnnnnnnnnnnnnnnnnnnnnnnnnnnnnnnnnnnnnnnnnnnnnnnnnnnnnnnnnnnnnnnnnnnnnnnnnnnnnnnnnnnnnnnnnnnnnnnnnnnnnnnnnnnnnnnnnnnnnnnnnnnnnnnnnnnnnnnnnnnnnnnnnnnnnnnnnnnnnnnnnnnnnnnnnnnnnnnnnnnnnnnnnnnnnnnnnnnnnnnnnntgtgagccaccagcgcctggccagagtgggttttagcagaggaactgacaccagcaaaggtttgcagacagtgtttctcctctggaacagcctcaatgaccctctcttcggttggctcagtgaccggcagttcctcagctcccagccccggggaagagatctaccctggcttggcttggctggcccctctggactgtggactgaaacacctctgctgcttctggaagattcctttgccccatccctgcttgagcccgtcatcacccccagcttgagaagtgggcatcccataccctttggcatcagcccaacaggctaataagggggtggaaacttggggcagaggaggacaatgtacccacgg

SEQ ID NO: 450342 - DNA, 1730 bp, Homo Sapiens
taaatatctcgcagtcagcaaacctgcagtttgccagcttgatccagaaggaggactcagacggtagcattgagtgtgtgaacgatggagaggaggctccagaagcaagctctgcaacgtcagctatcccttcttccgggccaaggccaatgtggctttccgtcttgattttgagttccgcaaatccatcttcctacaccacctggagatcgagctcgctgcaggcagtgacagtaatgagcgggacagcaccaaggaagacaacgtggcccccttacgcttccacctcaaatacgaggctgacgtcctcttcaccaggagcagcagcctgagccactacgaggtcaagctcaacagctcgctggagagatacgatggtatcgggcctcccttcagctgcatcttcaggatccagaacttgggcttgttccccatccacgggatgatgatgaagatcaccattcccatcgccaccaggagcggcaaccgcctactgaagctgagggacttcctcacggacgaggcgaacacgtcctgtaacatctggggcaatagcactgagtaccggcccaccccagtggaggaagacttgcgtcttgctccacagctgaatcacagcaactctgatgtcgtctccatcaactgcaatatacggctggtccccaaccaggaaatcaatttccatctactggggaacctgtggttgaggtccctaaaagcactcaagtacaaatccatgaaaatcatggtcaacgcagccttgcagaggcagttccacagccccttcatcttccgtgaggaggatcccagccgccagatcgtgtttgagatctccaagcaagaggactggcaggtccccatctggatcattgtaggcagcaccctggggggcctcctcctgctggccctgctggtcctggcactgtggaagctcggcttctttagaagtgccaggcgcaggagggagcctggtctgtgaccccacccccaaagtgctggagtgaggctccagaggagactttgagttgatgggggccaggacaccagtccaggtagtgttgagacccaggcctgtggccccgccgagctggagcggagaggaagccagctggctttgcacttgacctcatctcccgagcaatggcgcctgctccctccagaatggaactcaagctggttttaagtggaactgccctactgggagactgggacacctttaacacagacccctagggatttaaagggacacccctacacacacccaggcccacgccaaggcctccctcaggctctgtggagggcatttgctgccccagctactaaggtgctaggaattcgtaatcatccccatcctcccagagaaacccagggaggaagactgtacaatacgaacccaatctgcacactccaggcctctagttccagaaggatccaagacaaaacagatctgaattctgcccttttctctcacccatcccaaccctccattggctcccaagtcacacccactcccttccccatgagataggcccctggggctcccgaagaatgaacccaagagcaagggcttgatggtgacagctgcaagccaggatgaagaaagactctgagatgtggagactgatgggcaggcaagtgggaccaggatactggacgctgtcctgagatgagaggtagccgggctctgcacccacgtgcattcgcattgaccggatcacacattcccccac

SEQ ID NO: 450343 - DNA, 1554 bp, Homo Sapiens
  misc_feature (1052)..(1052): n is a, c, g, or t
cacactatcaagtgattcctttctgctttggtgacagaaggttcaagtggaagatccttctccaagaagttctgatgtctccaccttcatcacccattcggaagtcgatgtagccctctcctccactgatgacaagcatagacttcaaggtcgtctgactaccaggctcctgtgcagatggccctgctttgtcacccgtcagatccgtgccactactgctactttgtgggctgatgacttgacctgggactgccacaaagaatttcacagcatcccggtgcccatggaagcaaagctgtgcatgtgccattgaacaatagggtataaatgtccctggagtcactttatcactgttttcatcaccatatacacggattacacttccaggacgatttcctggtacacctgaggttttatttgccctcagccccagtaaacgtccctggtggaggattacggtttctgtcaatgggatggagataatgacaccatttcctgtccccacccacaaacgattacaagacaccataagagctgtaattctcacaaaagagaagcccagttttccagtacctaacattttgcttacataaggctcaatgtccacatcctgtagatgttgataagtgtgtgcatgatagagacggagcgtagaatccaagcgaatggagacccacacgccatccccctgccacgcaagctgtcgcacttggctctccttcctgggatgtgcatcaaaagatttctctattttcatggcctttggctgcaccacatagattttgttcctatagccacaccagactttgtcatgtaccacagtcatgcaacggatggaatgatgaggccgtccaaggtctaagaggtgatagtttgacaaatcccactgcccatccactcctctgtgaaagattgcaagggtgccgtcagccagggctactaacacgattcccttcacgtgtacaatactgagaatcgaatctttaagtttaatggaatggagacatttcctccactgggctacagatgaatggacatacaaacagccattntgagctccaagccacatagttggtaaaagactactcattttctgggcttcttctctcaccaagtcttgttcatttggcagtactgatatttgatctttatatgcatctgagtcattgctcgactgatacactggggagaggtcttctgggatctgaactcccaaaggatctgtaaagacatgctctgtgtagacgccagtttgggagatgtccactgtgtcttcagctgaccccgcattcccttctgtagcttcagttgcttcttctgctgttggaacattttcatcaacctcactattttctgcttccatttctggtggtttatccatcactggagaagcaccatttgtactaggggaagtggcagctcccgtcacaccttctgcagaacaaccaaccactgtgatgcctcctaacaggctgtctgtctctgctgagctgttgcttgtcatacttccacataaagatgctttgtctacctgaccagattctgaaagatccc

SEQ ID NO: 450344 - DNA, 796 bp, Homo Sapiens
  misc_feature (267)..(267): n is a, c, g, or t
catgaagaatacgtgctgaagctgaccaaagctgagaggatgagtctccagttggcactgcctctggcctgcaacagccagcattcacccccacaaagggggacaaggtctcctcaggggagactgaatgagtgtgccctgagcgaacttaaagggcccacaccccactccctgcttctcctggctgagcagatggcagcccaggctgggtgcaagtacagttagtgaagccagccattgccagggttaatccacttctgcttgggnaacagaagcccagaataaacatgaattcatgtcaaaatatgtctggcaatattttcccaaaaaatgactagggtgggtatttaagaaaacaatcaggaattaatatgtttaaacttgaccatcatacatctttcagtcccaggtcatccactgcacaatcgttccttgtttaatataaaaacaagaagctatttcagtggcacaattcttgcttaattcagacattcctggagaagcagccagcctttttacaaatgtcccaggaggatctttagaggcctgcttcccatttttctaatctccctgggaacatgttcatgatcagataaactgtctaatgcaaatgactctggtaacattctaactctagtgtcacctctgtgcccactagtgtctttggtgagagagaggaaaccttaaaaagtaaaatctggccttggcaggtaatatgtctcttgatacccagagggaggttttataggaatattgtcattgctcattataatttttttcattaagttcattttct

SEQ ID NO: 450345 - DNA, 1317 bp, Homo Sapiens
  misc_feature (619)..(644): n is a, c, g, or t
  misc_feature (667)..(901): n is a, c, g, or t
ttctgagaattcagcctttgaagtaattcaaagacagtttcttagcacacacgttaactccagacacagcagtggtgggtgcctccattgaggtttccgttttctcttctgtccatcaagggcccaacatccaactggtcccacagtgagcaggggcaactcttgcttcttcagcatctggccacttcgtttccatggtaactgccacgtgtacttttctagcagtctgtggccactccgtactcagctgaaaacactgtttcagccccctctctggtgacctcagccttctccaggtgtatctcttgatgatcttggagaccagcagccacagctgctgctactcctgcaggagactgtcaggctgtggtggggggcaggggtgttggaggagaagttgaaaatccgtgtgttctctgcccctctgctcctccatcttagcttctggaggagttaaggcaccaagggcaccaagtcaggttggcagttttgctgcccttgcccaagcctccagcaaaactagctggtcccctgctttgctgggtcccagccaggtgtgattttggttgttgattagtaaccacacattgtttttccccacctttttcattagtggagnnnnnnnnnnnnnnnnnnnnnnnnnnagacagagtctcacgctcttttnnnnnnnnnnnnnnnnnnnnnnnnnnnnnnnnnnnnnnnnnnnnnnnnnnnnnnnnnnnnnnnnnnnnnnnnnnnnnnnnnnnnnnnnnnnnnnnnnnnnnnnnnnnnnnnnnnnnnnnnnnnnnnnnnnnnnnnnnnnnnnnnnnnnnnnnnnnnnnnnnnnnnnnnnnnnnnnnnnnnnnnnnnnnnnnnnnnnnnnnnnnnnnnnnnnnnnnnnnnnnnnnnnnnnnnnnnngtgtgaaccaccgtgcccggcccattagtggagttctgatgggcacggtaaatattattaatgaaagagaaattctgtatacttttttaaaaatctctttaatgaaagaatgaagagtggcagagataataacttgaaagattagtttctcatggaattaattgggcttgatattcagtattgggaaactgtcttaaagaaaaaccattttcattgtagaaaatccttttttaaatacttgttatatcccagggagaattagtttataaccttccactcaagcagtcattagctgtttagagaatggatccaccctgcccctccaatttttggttccgggggtcaatccagtctggtcaagtctcctggtgggattctgcctgggacgaataccccggagcccctgttgtgtcccc

SEQ ID NO: 450346 - DNA, 363 bp, Homo Sapiens
cgccgggctggcggcgaggttggagagcacgtcgttaggcgccccgacgacgacgttgacgccggtgccgccgacggcctgcagcgccgcctggtcgggggcgtacagccgcatggagttgatgccgttggacttgaacatgctgacgacggtgctcgccgccggcaggttgttggcgctcatgccgtagcacactccgatggactcgacgctttgtgggatggaggcgaaggctccgaggagcaatgcgagagcgaacatggaggcaacgccttggctcgccattctctttgtctctctagctgcgttgagggtgtgtgggtgtgtgtatgtgtctttctttctctcgctctaaagctcttg

SEQ ID NO: 450347 - DNA, 905 bp, Homo Sapiens
  misc_feature (466)..(512): n is a, c, g, or t
tgtgtgcttttcatgcttcaagtaattcatttccttccaggagaagaatgttaaaaatgctttcagttctagttatcaaaggagaggaaatgactcaataacaccaagactaggtttaagcagacctgctgctaacacagtatcagataatatactgaaaaaaatgaacatactatttatatacattttgcaacagctgcattttcccacttaacctctgtgcagaactaaaatctgatagagcaaacttaagttacttttattattgttaaatacaactctgtacacattacacctttaacaccaaagcagctcaatatcagtcagaggaatgaaaacgccatctaaaaattttcatttttctagcccaactatacccaacagacgcaccctaagggtcagcacgaaaccagctgcacaattttgtaaacagtatgacaggttgtctctaggatcctactggatnnnnnnnnnnnnnnnnnnnnnnnnnnnnnnnnnnnnnnnnnnnnnnntctggaccagcaggctcccttcttccagtgccttgtgacagcccgacgctcagtaccacagcaggcttctttcacattgtgttcacaaaagggcagtcatggccgtctggttgaggggtgtgaggcagtctctgggggcagaatagctgtcactcgtcccgggatgcgttgggggcttctgagagtcagggtgtccgctttcggtggcgagggcgctgacagctttgggccggtcgtagcccctgtccgcaggctgtgcgctgtgtggcctttgatagtctccgtcctgggcgcccacacccgctacgggggagaagccgcccgaggagcacccagtgtttgtggccgggctggggccctgggacgcggtagccgctctgcgcagagaacgtg

SEQ ID NO: 450348 - DNA, 1293 bp, Homo Sapiens
  misc_feature (30)..(31): n is a, c, g, or t
  misc_feature (39)..(39): n is a, c, g, or t
  misc_feature (61)..(94): n is a, c, g, or t
gggcatagggatgggggtgtaatagtaaannggtttttncccctaaagccccaaggaaaannnnnnnnnnnnnnnnnnnnnnnnnnnnnnnnnnccatagaagagggaggtcttgcttaaggtttgcccaagcccgggtttttgaactcctggaagtccaaggagatcctttggccttgggccttccaaaagtgatgggatttacaggaggtgaccccattgcgcccggtgaattcctggttttttatgacttgcttggaaggaggaagacttggggcaagagggaagatgaagggagaagttcacagagatcttgtttctgaggcctcccagtctctttagctcaaagtactcagtatcccaaagtgtcatactttagggtatcgtctgagtcccaacatccctcattaccgagtaacaactgtgtttttttctccttgtattttttccttgactggatttggatacaggatccattgcaacatatttgatttggaaacctccagctgtcactgaagcatcacttagaaacttcaaggtcatgacatttcctgtactgatgatgtcatctggaagctcatctccacagtatcttcccacaaagccatggacatcatcgtaactgtcatatatttcaacataatcagccaagcaacctgggtcatcttcaaggtcaaaatctaaaaaactcaggtgaatacgctgaccatacttgagtctaatgtgccagtagcagatttggttatcttcgtactcatttgggaagcctggagatttaaaaatttgctttggatctgtaaagacgccaccacactcctttgcgtgtgggttgtagcaataggcatcccatctttcactcctattgagacggattccataatcaataatgccagtttttccaaatccacagttgggccctggcttcacaatggggtatccaactctgcccttagccatccatccagcagcacagacatgaaatccaatttttctggctgcctctagctgcttgtaagttgcgagatggccgccttcaaattcacacaccgccttagcttctgcgtaggtgagcttgtatttgccagaccgtgcttctctgtggtacacaccggctgctcgttcaagccatatggagttatgaaaaattccatccttgaatccccatccttgagtgtcttcccatagcaagagaaataagtaaattaagatgatcatatcgtcagttgtagtgaagtaacagcctgttaggggctgctcacaaattctcagagcagtggctgaaatgtgactccc

SEQ ID NO: 450349 - DNA, 973 bp, Homo Sapiens
ggcaggtgctgccttgccccgatgactgtcctgcctgggtgtatgccctcatgatcgagtgctggaacgagttccccagccggcggccccgcttcaaggacatccacagccggctccgagcctggggcaacctttccaactacaacagctcggcgcagacctcgggggccagcaacaccacgcagaccagctccctgagcaccagcccagtgagcaatgtgagcaacgcccgctacgtggggcccaagcagaaggccccgcccttcccacagccccagttcatccccatgaagggccagatcagacccatggtgcccccgccgcagctctacgtccccgtcaacggctaccagccggtgccggcctatggggcctacctgcccaacttctacccggtgcagatcccaatgcagatggccccgcagcaggtgcctcctcagatggtccccaagcccagctcacaccacagtggcagtggctccaccagcacaggctacgtcaccacggccccctccaacacatccatggcagacagggcagccctgctctcagagggcgctgatgacacacagaacgccccagaagatggggcccagagcaccgtgcaggaagcagaggaggaggaggaaggctctgtcccagagactgagctgctgggggactgtgacactctgcaggtggacgaggcccaagtccagctggaagcttgagtggcaccagggcccggggttcggggatagaagccccgccgagaccccacagggacctcagtcacctttgagaagacaccatactcagcaaatcacaagagccccgccggcccagtgggcttgtttgcagactgggtgaaggtgggagcctgctcctctctgtcctctgaccagagagctgccctgctaggagcacccaagccaggcagggggtctggccgccggcgttcctgggagcgggacctggtctccccgggtgttcc

SEQ ID NO: 450350 - DNA, 740 bp, Homo Sapiens
  misc_feature (71)..(84): n is a, c, g, or t
  misc_feature (634)..(697): n is a, c, g, or t
gatccatccttttgcctttgggcattactactgtcaccctccatttctttacaaacttcaggcaaggtggnnnnnnnnnnnnnnccaataggcaattccaggttgtaaactcattatcaggaagcttaatcttagaactgaaatacctcacagagcaatttaaacctctttcttcttgttcctattcttcatgggaagaaaactgggttgatccctatcttctttttaaggagccacatttgccatttattattgctcttttgcctatttaaaaaaaataacagtcagaaaaaataatgattattaaaatgatagtcattatttacttagtgaatgtcaggataggtatttattactcttagcttcttattggtatcagatgtagatcacggtcttactgttgattaactcttcagttatatatacatactttgattctttagttacataattgataacaaagtgtgcttctgaagaattattctggctgtatggctcttgtttcctccccttggtaaaaatggaggcatgaatctcggttttgtgatctgcttttaatttcatatatgacattatttgatgtacataattaccaacatccaaaagcgtttcttcccctttctacgtgtgcacnnnnnnnnnnnnnnnnnnnnnnnnnnnnnnnnnnnnnnnnnnnnnnnnnnnnnnnnnnnnnnnngcaaaagataatctactttgttaagataatttgtcactagctg

SEQ ID NO: 450351 - DNA, 1120 bp, Homo Sapiens
tgtactcccttatgatgcctgcttgttcggcaaattcattcttggctttagccagtataagtactggcgtgtatccattggttgcaaatatgctcttgacccaaacgtagacacacattctccagcttggctgactgaatttaattctgttacattgtacataatagatggctccagtgaaaccttctccataaacataggtgaggttgtcatattctgaattctgggcttccagaaaatacttcatcagtcacagaactgagggtcactctttgcattgtaaaatttggttttcacatccaatggtttgagaacctgaaatttgaagaattttctgaaatacattttttctccagcctgagttgtataactcacagcacataccaagatgtgtgttccaatttctttgacttcatgatgtatgacatcatcaatacaacaatccggtttaagttcagccactgcagcattggaggctgaaagatttaaacgctgagaacttgtctgaagatcagcttttactaatatgtcttttacaacttgattgctatcattatgaacgctgatataactggaaaaggtctctcccaaaaatatattcccaaaattctgtggtaaagtcagcatttctcccaacattaaaacttctgcaccattaacggttgaaggatcatctctcatcagctggttaaagagatctccaggtaagtctttctcttcacatgttactgggatattggtgaataaagtaggcttagtcagccgcatcacttttagcgccagcaggtgctcctgtttagggggattcacttccattttgaccggcacttttgacccacagcctacgggggctggacaggttcaacttgccccggaaggaaacggaaaacctcgcgtttgacaaaaccaaaagtcaaacgcactctcaacctctctctggtggtggtaccttaaattctcctactgtgtcctttacaaactggcttcttttcaacaagtccatttcttctatcttagaaacgtaggcataaaatactttgttttccatctgcaatcacacatcgcgactgcaggaaaagaaaccacccctaggtaacaataccctcgtgccgaattcgcc

SEQ ID NO: 450352 - DNA, 1016 bp, Homo Sapiens
ttcttccagagtttggctgttacaaatagtgtgtttctattgtccatcttgctctataaagtgagtgtaaatttagtgccttttaaactatcttgcaattttttagacaaaggagaaacgtttttagtacaattattgctgggaagggaaatactccaagatctcctcttgtgctgttttcccttttctgattgtttacccagatttccagaattagtctgttccttcagtgtgtgtgaccaggttaaatgctgctttttcaagctaggttgaaactccaatagatctactgtgcaatcataactgtgtgacttagcatcatgttctgaaatggttaagtactgtttcacatcttcagctgcctcttcagaaatcacaggtggtgatcttttaggtctgagtggaggcttggacccatcatatggaaaccaaggtataaatcttgatagcggacgagtaggaaagtcttgaattgctttttctgcaatttttggcagttgtgtgggatcactctcacatggtcgataatgtaatattacttctgtagtcattctgcagtaatccagttactcttagtgatgagaaaatttcttagttgaactcctcagagctagaatgttaatttattattgcaagattgtctctcttgccaaatcagagggaaacaggaccttttagcgccagcaggtgctcctgtttagggggattcacttccattttgaccggcacttttgacccacagcctacgggggctggacaggttcaacttgccccggaaggaaacggaaaacctcgcgtttgacaaaaccaaaagtcaaacgcactctcaacctctctctggtggtggtaccttaaattctcctactgtgtcctttacaaactggcttcttttcaacaagtccatttcttctatcttagaaacgtaggcataaaatactttgttttccatctgcaatcacacatcgcgactgcaggaaaagaaaccacccctaggtaacaatacgcggcctcccccc

SEQ ID NO: 450353 - DNA, 1002 bp, Homo Sapiens
gttcttaaaggtttacggattcggtttggccctcccgggccacctgaatgttgtgctgaacccgggcccattcttggaagttggcctggtccggtaaccttccgctggtcaacctagagtgtgttttcccatacctatatccgaatgtgtgccaatgtactggtaactcccttaaatgaatgcctgcttttttctgccaaagtgccattcctttgggcttttagcccagtattaagttactggcggtgtatccaattggttccaaatatgctctggacccaaacgtagacacacattctcccagcttggctgactgaatttaattctgttacattgtacataatagatggctccagtgaaaccttctccataaacatagggtgaggtttgtcatattctgaatctgggcttccagaaatacttcatcagtctctgcattgtaaaatttggttttcacatccaatggtttgagaacctgaaatttgaagaattttctgaaatacattttttctccagcctgagttgtataactcacagcacataccaagatgtgtgttccaatttctttgacttcatgatgtatgacatcatcaatacaacaatccggtttaagttcagccactgcagcattggaggctgaaagatttaaacgctgagaacttgtctgaagatcagcttttactaatatgtcttttacaacttgattgctatcattatgaacgctgatataactggaaaaggtctctcccaaaaatatattcccaaaattctgtggtaaagtcagcatttctcccaacattaaaacttctgcaccattaacggttgaaggatcatctctcatcagctggttaaagagatctctaggtaagtctttctcttcacatgttactgggatattggtgaataaagtaggcttagtcagccgcatcacttttagcgccagcaggtgctcctgtttagggggattcacttccattttgaccggcacttttgacccacccc

SEQ ID NO: 450354 - DNA, 1451 bp, Homo Sapiens
  misc_feature (52)..(52): n is a, c, g, or t
  misc_feature (164)..(164): n is a, c, g, or t
  misc_feature (490)..(490): n is a, c, g, or t
tttatgggaaggaaacctaggtcttcccataacccccaacgtttctacaccntctccaagtcccttatccagagttataggttccagttttcacatttccagggagaaaatctgctccttggcagtcttcaaactttacctgacatacattatataccctcagnccagggcctcaatctcttaacatctccatgaacaccccagcaaacaacaaaatatatccatttatcacacttcaatcccacttgaacatcagttgccactatcttgatatacttgtgttcccaaaaggtgacggagtgtcccacagcagccaaggtcctcaggatagacatgttggcaccccatgatactgaaatttggtttttaactgcatttcttgttcagtttggctgggaagatctggacagctggaagtgagcttctccatcattttctgtttctttctttgtgatccattttccccacctgtgaagcccaaccaccccanccaccaagtgcagctgcaattcctgccactttgaagcctgcaaggaggccaataggaccccctaccattcccccgatgagtgcacctgccacaggcagagctgccagcttgtattttgcagccttccctaagtttttggttccctcttcaacattcacagcagcactgttgacatggtctgcaatgctgtcaatcttctcctgctgagaattcactaggagagagaagtcagtgaccagttggctaagttcaattaagtccgcttctaaggtttcccacgattctgcagcattttgatcttgaggaatttcaggtaaggcatatatctgagtcaaactctgagaactagcttcagcttcagtagtatgaaatgctccaccaacagtcatggatctggtcaaaggaggctgtagcaaagtttcttcatcattaaattgcttcttaagttcttctacagattccaaatggagttggagaaattctgctgttgctgctgatggttcttctttaacaggatctatcattctcttcagaagtactaggtcatcctttcggactttcaaacaaagtttctcaatttctcggatattggatcggagttgctgaactgtacgtcctgcattgatatgctcttcatgcaacttgtcccagattctgcacctttgatacttctcaatatttatctggtgctttcttaacctttccaggtctgttgggattactatcttaatgaatttctggatagctggttcaagacggcgtaatttcactttttcttcatcttcagacatcctaaaaaaatgttgtatgacctccctggtaaccagctgttcttctccactcatatagaaaaacctcccgccggggcgctcgaggccggtcggtgggcatcccgggaattccggaccggtcccggcgcccgcttccccccgagaggtcgagggtaagttgctgagtctca

SEQ ID NO: 450355 - DNA, 1127 bp, Homo Sapiens
caggccttagtcaagaactggccccctgggtggcagttcccctcacaagggttaaaggagcagggcctgttcgacctgctcctgacccacacactgaaccagtccctaagaacatcaatccctggcatgcccgtacctgtcgtgcagttttgagtcatgctgcccagggcaggtattccagctcccagcctgtgagtcctgagagccaaattcccttgcaaagcagggctgatagtcagggtcccacctcatctatctgtcggcaatccagtggtatctaggtgagagtcccatgcacacggtcatcccacaacacactccacactccacagccaggcggggacacacagcccccttccctccctcccaggtaccaccatagctgctagtgtgtgaccgaaggcagggtcctggcccccgctgaagcactatcgccgaccagcaggctcacacaccttggcctgttgctcctaggggtcgcctgtgctattcagccaaggggaccacagtgcctgctggcccagctgagctccgcctagcgagcccacctgcctctcctgccatggactctcgctcttctgcttttcccagcaggaagggcccagcctcacctacgagacctgcagccccccgaccagctgaggctcccctcttagacttataagtctatggccactggcatccggctgcctgccctccctgcctcccccagggtcccttcagagggtcctgggttttctgaacacccagaggggcctccggcgctccctccagccatcccttttagtttcaccctcctggttcaagcagtgttctttctctatcaggcctgggtggctgttgcatggggctccccaaggcaaggggtggccccaggccagttgggttgggaagacagggtgaccagagaagaggggaagcccgagggggccgagcatcagcctgaattgcgggtgccctgcctgggtgccgtgtgagaggccagcgtgtgtggggtggggagggccgccacagcccccaggcgctatctgtgaagctacggctcctccctccatcttcctcccctttcccttccagccccttttccaggaaccttgccatacccacacctgcagcctcccctcccg

SEQ ID NO: 450356 - DNA, 1056 bp, Homo Sapiens
agacgccgaaacaggcaccgagacacgcacgaccggagcagagcacaaaccaacgcgaccgcacgccaacgcaccgcgggcaccgacaaccgagagcaaccagaggccaagaagtggcggcagacgcacacgcgagctcagggaggacggaccaggggaccagccgcaacagaaccaagccgactgcccatgcactacggaatactagaggaagccgaccccggacggagcgcagatgagacaggacactgccgcagcgaccaatcggaatgctgcgcactaagcgaactgtcgctactcgacgcagagaagtcaggtatcctaggatcgcacgacagctgtgagcaccaaaggcgcagagccccatctgctttcccagtagtctgttcgctgcacatgatctttcatttttgatctctacctgccttacgtactcagtttttaaagttacttttaaatatttaatagttaccatcagataaatccacaaatggacaacttttaaggaattcagtgtttcataattttacgattgttagaagcatcctattgcaatggggacaaaagtgtgtggtggctgtcatctggtgctttctatttctccggaagtatgagaaacctgcagttgcaccaaagcgagagaacactagggggcagtgtggttagagcagaactctcaagaggcttggaaaggtgcgctgaaatcaccaacagctggtgcgataaatggggtctcattttaaccttcacttgtatccaccattccttctattttcttctattcacccgggcttctttgcagcacagtcattttaagaatattctgagagcatcttagctctcactccatttcagctcagtgaattcttcttcccacgtgagtcgccggtgcaagaggggggttcctgcttgggtacccacatcagtaggttttgtctcctcatctgcttgtcttctgaagataaatcgttggcagaaaagggaatgaggagcaggtaggatgagatgtttcatcgcaattcattctacacaccagcagtcattggatcaattctc

SEQ ID NO: 450357 - DNA, 1149 bp, Homo Sapiens
tgtgaaaccatttggaagactcgatttggttcttcttctgatttggagtatgctccttggaatccgagagaggatgtcaaatgggttgtgcttgtggttataattcaatgaaataaatcacgaagcagagaggctggccagttaagtgaatgccaccttctcacagctcacaatatacaaatatgaagttgctgaaatcctagacattttctgcagaggggccatgtatgggaatccaagcaaaagagctccgcctcctgctgcccctccaggattgaagcacacctctctcttcgctaccgcgttaccttcgtagttttgactttattgccactgctacaggcccaacctgagtaatctggcagcactttacaaatcctctccttccctaacacggattcatgtgacaccaccatttctgaatcaccatggaagcttcaacacaagaaggttgagcccgagttgtgcccgccacctgtcccgggaagcaagagcacttgaccgtttgtgaccgctcttctatgcggttcttattgcagcacctgtgcacggcgaccacctcacaggtcccttgcttgatttggtggtgacctgcatgtccccggaggtgctggcttgaggcggacatcagcttacagcacaccattaacacgtaggctagaaagagccagtgcgacagcaacactgacttagcacagactctcatccttggggacctcataagatgtggttctagtcaaacacacttattccaggatatatttcagagtgactccaaattcccatctgttgctagaaccaatcatttctgccgttccaaaaaacttatcgtagctcagaagactcgactagagccggcatccaagtcggaccggcgcgtccggaactaggtactgatcgccgcaccggagcccgaggacgctcaccgtgccgcctccccgcgggagccccgggagcggcccatcacctctgcagcctcgccaggagaagaaaagttcccacgtctctaccaggagaagcccgaagctcctgcgggagaagcctgaagctgctgctggagaagcggcagctgaggcaggactcccgatgtttgcccgcagccgcgcgcgcagtcggtgcgccccgtccagggcggcgcgccgctccgct

SEQ ID NO: 450358 - DNA, 217 bp, Homo Sapiens
agctgatggagcaggagagcgccctgcgggaactgcgtgagcgcgtgacccagtgcttggctgaagccggcaggggccgtgagtgacgtccgcactgagctgttccgggcgctggaggccgtgaggctccagaacaactcctgcgagccgtgccccacgtcgtggctgtccttcgaggtgctcctgctactttttctctgtgccaaagacgacgtgg

SEQ ID NO: 450359 - DNA, 607 bp, Homo Sapiens
agctgggtctgcatgccgccagcttgtgccgcagctcagcgttcaccagcaggaggcgctgcagctgctcctgcaacgcctcgggtctccatgccgcgctgccgcaggtcgcggttgtgcgcccggagttcgtcccgctgtcggtccgtgacctccttgagctgccgcagcagcgcagcgctcctcctgtggccccgcagcgcagctccctgcggaggcgctcgttctcctcccgcagccgccgcagctcctgctccgccggctgcgccgacacctgcagcgagtccggggcgggccccacggcagcctgttccaagagctccagcgcccagcaccactagcaggcaaccagcaccaggccgccagcctccaggcccgaaacggcagcgccagatcactgcagctcagtgcccagggccccggctagatggtacacaagctccagcggccagatgccgaccccagcggcctcccgagacccccagccaggcaccccgggcgccgccctcctgggctccatgtctcccagaggcttagggctgcgacccccccaccccaccctccactgggacggggaaaagcgaaacagttccgccccaggaagccg

SEQ ID NO: 450360 - DNA, 734 bp, Homo Sapiens
cggggcaggtcctgggtagagtccaggttggcggttcctggggcagggccaggatagggcgatcctggaagctgggcttcggaagcgtccagctgttgttccccaccagaaccaaatgagcgcaagatctgacaaagaagaaaaaaaggttcatcttttattcctccaaaccctttcatttaaatcaagagggtgggatgtggttattgctgtgttttttggcagaatcaacggtttctgggtctgagatgttgcatacaccttctcagtccctgtatcctgagatggagtcacctgaggatccacagcaagtcctaaccagggatgggctctgggtgattacaggaaggttggcttcagaactgggccaggggcactgctttgcttttgctgttttgatcagctctgtgcctgcatgagacaacgaataaccaacgggaacagatagggtctctctctctgccacccaggccagagtgcagttgacgcagggcacggggagccccgaagtggagcatagtgtgtacggaactggtgggtcctggactcactgacttcaagcaacgaagacgagagacctcgcgacaagtcgctggacgggcaagagcgcatgcgctgcaatctatcatcatggaaattaccaaccgacgcaaacaactatcaggggaaccatggcctgataatcagatcatacaaggtgtaatccagcaagtcacgagagaccagcgaacagg

SEQ ID NO: 450361 - DNA, 1360 bp, Homo Sapiens
  misc_feature (344)..(387): n is a, c, g, or t
  misc_feature (889)..(1151): n is a, c, g, or t
agatttgaacagaactcgggaattcccaggacccatgcaatcctcagagccgggtataaaggattctctcaaggattaaaagggaagaacagtgtacatacaggccctaatataagggggcaaagattttcatacaaacagaagtttgcgataaggaactttaaaagaaaactgtcacctacaatgctacacctgcccaaatatcttttgcaaaataaccatgagaaaagtatttcttgacagagaaccaatgatctcatttgcagattttgtgatcctatacatagagaatcccccataatacctacagaggcgcacacacatacatgcatacagaggccagnnnnnnnnnnnnnnnnnnnnnnnnnnnnnnnnnnnnnnnnnnnntactagagttaataagtgaattcagcaaactttcagcaaacaatcagttgtgttagcaatgaacaatctgagaagaaaattgacacaatgatttcatttataatagcacttgtaagaataatatgcctgagaataaatttgttcaagaaggtgccgtacttgtacacagacaactacagaacattgctcgaggagattcaggaagacctaaatcaattggacagacatcttgtgtccatgggttggaagttgtaacatggttaagataaaaatacaactcaaagcaacccacagattcaatacaatcctatcaagaagtggccttttttacaggaatgcctaagaagaacttcatattcctaaaaaatagtgtgtccccccaaaacaaaagcaatcttgaaatgcaagaagaaacattttctattccaaaggtctttaactgctctaagcagtacttggtagtcttcaatatataggctttcatatctctttttttcttctnnnnnnnnnnnnnnnnnnnnnnnnnnnnnnnnnnnnnnnnnnnnnnnnnnnnnnnnnnnnnnnnnnnnnnnnnnnnnnnnnnnnnnnnnnnnnnnnnnnnnnnnnnnnnnnnnnnnnnnnnnnnnnnnnnnnnnnnnnnnnnnnnnnnnnnnnnnnnnnnnnnnnnnnnnnnnnnnnnnnnnnnnnnnnnnnnnnnnnnnnnnnnnnnnnnnnnnnnnnnnnnnnnnnnnnnnnnnnnnnnnnnnnnnnnnnnnnnnnnnnnncgaagccaagcctggctggctttcatgtcttttctatgtagtttatgtttctggatgccattgagagtctggctggctttcacatatttgctatgtcgtttatatttcttgatgttattgtaaatgtttattaaaggaatcttttaaaaactttgttttggccaggtgcggtggtccacgcctgcctcgtgccgaattcgccactcagc

SEQ ID NO: 450362 - DNA, 1037 bp, Homo Sapiens
  misc_feature (243)..(298): n is a, c, g, or t
ggtgcgtgtttgtgttgctctggttcttggttgttctgtgcgtgtgttttgctcgcgctgtgtttgggtattgtgggctcgttgcgtgattgtggtggctagttttgttgtctttgtcgttttgggtgtcttgtgttgcttccatgtggtgcgtcgtgttgtatacggtggtgtatcaagttcattatggtgtctgtgtgccgtgtgcagggggggtggctggccgtttgtgcggtgcgtccnnnnnnnnnnnnnnnnnnnnnnnnnnnnnnnnnnnnnnnnnnnnnnnnnnnnnnnngtgctgcgtttctttggtgcctcagtgggcgtcttgcaggctaggagacaatccgatctgtgtacctggggactccggtagcttggttttgaatggtatgctttggtttcggattcatctgtggttgctgtgttgaaatggatttgtttatggtgaacacctgggttttatgacagtgacagctacttggctaatgcagcatgctgttattaatgatcagggatggggtaacttggaacgctgaatcaaggattctgttcggctgtggggcccctgggcagcccttttcgtcctttggaaagcggcaatgctttgcacatgctgtttgtgccacttgcacatggtctggtatgaaaggggcatctgtcctcacagctgcaggtgtctgggtgaaatagcttgtgcttctggcagcaggtctcccagacttctctttgcacctcaaagcaactgcagtttttggggtgctggattagatctcttgggacatggtgttttacagacacatctcgcaacgatcttcgtcaaacatcactgtgtggccacacagagagctggttcctggagatgagagtggtcttctgttccagcaagtggacttttcctcctgcaaaacacatttacatttgtctgctatcccatagcatgtcaataggacagagtttcattggaatgggaacagcgatcttctttagggatctggatggatcttcatcctaaaatcccgaccgtaccagct

SEQ ID NO: 450363 - DNA, 893 bp, Homo Sapiens
agcgggatcgcgtcccccgggccccggcggcctccctgctgcggcggggaggggcggctagccgcgacgtgcggcggacggagggggagggccgcgagccttcggaaccagcctcgagggtgctgaaccccgcgcgccctgcctcgccgcggcccccgggtgggggcgtccacggcccgggttcccggcgggcttggggcagggacgcagtccggagattccgggactgcccggctgctgcagccctgcaggctcctctctcctccccgcttcccctccgcactgcctgggctaaaggcggccaagctgaggctccgagagaaaagggaaaattgcaacccttgcctacaaccagactgacagcataatttcttaggaatcaagaatcaatacagggttatttctttagcattaaaccttaaaagcccccttggaggctgaagaagcagaggatagccatgcatacacttgaacgtgaaaaatggtcctctttcattggagaggtcttcctcttcagctaaaccgacagagtggtgaaaagaagaagggaccccttgttgaccaaaataatccagacaaatcaaatcggccctttccagcaaggagtggaacagcccaagggtggctagatcacatcttctgctcacaccaccactgagcaaaccctctccaggactgccacctatgcataggtcattgcccttgtgcaagagcacatcaagtgggagctgaagtccttgccaggctccattcaccaagcagagcttatgtcgtagtgtggtctgtgtctacccagaggcatgtgggtcctttttaaaatgttgcaccaatgcttcttgtatgagctggcaccagctcggacatcccagcctcataccctggtcctatacagg

SEQ ID NO: 450364 - DNA, 546 bp, Homo Sapiens
  misc_feature (68)..(132): n is a, c, g, or t
tacttttccacaggtatcagcatcctcagcttcttgtcaatggttataaaatcacgtgtgagttatannnnnnnnnnnnnnnnnnnnnnnnnnnnnnnnnnnnnnnnnnnnnnnnnnnnnnnnnnnnnnnnnaaagaatttagtttagttcctcttactgtatcatggtgaagtacagctatcttcaacctattttttctgaccaacctttgtctttatattgatttaacattactttttaaatttagtcttaaaattcttactttaaatagtagttttagactacttatatttaatattgttatctatattttggccttaaatctactatcataaaatttattttccataaaatttaatctgttctttattactattttccacttttgatgctttaccttggattaagtgtttaattttgaattttattttatttcaactaatagattattagtcatatgtttttgcttattttgtcctgttaggtaggtgctctaaggtttatactatggaccttaactttccctgtgaaaagtaggtaccgcc

SEQ ID NO: 450365 - DNA, 1633 bp, Homo Sapiens
tagattaaaccgtgtaagttttttattgtttttgaaaaatcaagtctttatcattttactaggaactatttacagaataaactaatgagattcttcctgaggtaaaaatactttttggaaaaacttctccttgatgaaatttcacttaaaacatcacttccatccgtgaagtatttctttaagatatttttggtcccttccttttatgtggaatcgtcaattcaaattttaaaggagactttgagatgtttttcatctattattttaaaaatgttgaaggggtttttaattctgccttcaacagagatggacacacctctgattatgatgtaaaactgaataagttactctgacaggctttcttttctgcagcgcatctcccatcattattaataaggattgaattcttttactccatgcacaatctatattccctgctttaccaagaatagaaatctaattctcactatgaaggcagataaaagtaatcacttcaacctacagatgactgaatcagttaccaacgcactcagactttaaatagcatttatccaatgtgtctatatttctacacacattcatatgaagaacatgtagtttaaatcattgcacaatttatgcttttaatgagttgtgatggtcattaatatttttattacatttccccaaagctgggctacttactgttattattttcagttagaaatatagatgtattttctatttttgatgactttgaaacataatccttggaatataatatctgtgtgtaatatctgtggaaatcatgaaaataatattcaaatagtatgcattttttccagaatgaaaatttcctctacaataacattcatctttttttcctgatgggcacataaaagtcaacatttgtaacattgctggacattatttacattaaacatgcatcagcttcaggtgttgcagaaactgggcaagaagccacaaggtacacaatacacacacacgcacaaaacttgtattattatacttacctaagtgtctaaagaggtggataaatatattaaattactctagagcaatgatttttgtggggcctattggaaaatatgactgtagtttgagtgagattcctctaagagattcaacttggccactatttattgagtattcaattttaaaaatactaacaaaggcttatgggatgaaaatttccatctaaatctatggtaaatgtgttactagatgctgtagtaaaaagactggtgtggtaattgtaaaatatatctaacatctaaacctttgtttgtttgttttttacctgaaatccttatgggggtgattatgtatatcaatttgaatcttcccatcaacaagatacataaataaatagccagcctacctctataagttaataatttagttcacctgctctatattttgagggcagttcttctcttcctttgacatgcacaagattcaccaggggatcctatcaaaatgcaaactcatagaccacgctttgactagccaagataaggggtcagagcatcgaaatgagtgtgtaggtgactgtgctaagaccctcctgctcacctgggcactggctcgtcatacaaacaaagcttaggaactcctccccctgtgggaaagt

SEQ ID NO: 450366 - DNA, 1338 bp, Homo Sapiens
agcggacttgggcggggccggtagcggcgggagctgcactggccagggttccggctgtatatccatgagcgccgctggcagccggggagctgcaggaaccagactgggggcgagctgagcacctgtagtcaatcacacgcaggcacagatgaatccttcatatttatctggatttagctggtagcatttgtctcctaagacttggtcacagaggaatccatgtgaccttcaggccttctgctctaaactggcaggagatcctgtttctactcacagcgtccgagggtctggtggccgagccctgaggggcgctgttgctcccaggtggcagaattcagcatcagagagccacacagctgaaagagatggatggcttttaggtttgtttgaataagagatctgacctgaccggcccaactgtacaactcttcaaggaaaattcgtatttgcagtgggaagaataagtaacattgatcaagatgaatgccatgctggagactcccgaactcccagccgtgtttgatggagtgaagctggctgcagtggctgctgtgctgtacgtgatcgtccggtgtttgaacctgaagagccccacagccccacctgacctctacttccaggactcggggctctcacgctttctgctcaagttctgtcctcttctgaccaaagaatacattccaccgttgatctgggggaaaaggtggacacattccagaacggccttgtatgggaagattggcagggtgagggttcgccacattccttattggcaccgggaagtttcatcactatgtctgatggagccacttctacattcgacctcttcgagcccttgggtgagccactgtgttggagatgatatcaccatggtcatctgccctggaattgccaatcacagcgagaagcaatacatccgcactttcgttgactacgcccagaaaaatggtatcggtgcgccgtgctgaaccacctgggtgcctgccaaattgaattgacctcgccacgcatgttcaccttatggcttgcacgtgggaattttgggagccatggtgaactacatcaacgaaagacatatccctggacccagctggtcgtcgtgggcttcaggcctgggtggtaacaatttgtgttgcaaataccttgggcggaagactcagggcaacccagaagaaggtcctgtgctaggtcagggtgtgccaggggttacaggcacctgaagtgcccggcaaccttcatgcatgggatacagggccgggttctacaacattcctctttgggtgtacaatttaggaaaatattctcttcgccagggaagactttggaacaccgtagaac

SEQ ID NO: 450367 - DNA, 1359 bp, Homo Sapiens
  misc_feature (148)..(148): n is a, c, g, or t
ccaaacaggagctttctttggtttcttcgaaaggagattttggaagtggtaggaagactttcaatgcccccaacggattctccagctgcattaacccagcatgagagggaacataattcctgtgcaggtaccccatgcaactttcttncctcatagtattccttcagggagttatagccgtgaaactttcctcatcaccattgtcatcaatctgcatcagggatgttgctgtgtagagccggctcaagtcgtgttctccagggctctggggtttcttaacatggtctccaaaaagagcttgcctgtgcgagaggatgatcttcttcatgttgtcagccatgaggaagttgtagacccgccggcactgatcccattgcatgaaggtttcctgggccctcagtgcactgtacccctggcacacgctgacgcagcacaggaccttctcttggtttgcctgagtctcccccaagtatttgcacacaatgttaccacccaggctgaagcccacgacgaccagctgggtcaggggatatgtcttcttgatgtagttcaccatggctccaaattcccacgtgcagccataggtgaacatgcgtggcgaggtcaattcaatgttgggcagggcacccaggtggttcagcacggcgcaccgatagccatttttctgggcgtagtcaacgaaagtgcggatgtattgcttctcgctgtgattggcaattccagggcagatgaccatggtgatatcatctccaacacagtgctcagccaagggctcgaagaggtcgaatgtagaagtggctccatcagacatagtgatgaacttccggtgcccataaggatgtggcgacctcacccttcccatcttcccatacaaggctgtctggatgtgtccacttttcccccagatcaacggtggaatgtattctttggtcagaagaggacaggacttgagcagaaagcgtgagagccccgagtcctggaagtagaggtcaggtggggctgtggggctcttcaggttcaaacaccggacgatcacgtacagcacagcagccactgcagccagcttcactccatcaaacacggctgggagttcgggagtctccagcatggcattcatcttgatcaatgttacttattcttcccactgcaaatacgaattttccttgaagagttgtacagttgggccggtcaggtcagatctcttattcaaacaaacctaaaagctgcgtgtgattgactacaggtgctcagctcgcccccagtctggttcctgcagctccccggctgccagcggcgctcatggatatacagccggaaccctggccagtgcagctcccgccgctaccggccccgcccaag

SEQ ID NO: 450368 - DNA, 622 bp, Homo Sapiens
ttgcacatgaggatctgctccaggagggtctgagaagctggcagagatcccgatcattccccccaagcacacagccaggatgacataggccttgttccacatgagcagcttgagcccatccaggaacttctctgaggtggagctggcagccccggcagagggcgggttggggggcacactctcccacaggcagatggtggacagcaggcagacgacgccagcagggatggtatagacaccgagcgccgcacggagcccgacggagtcacaggatccagatggccgccacgccaaatgtgggtggataccaacgaggtagaccagtgacagccagttgatctgctccatggacaggaccaagtcctcagcaatgacgtcagccacaggtgcaaagctgagccacagcgtggcgttggagcagttgagcaggctgatcgcgagcaggaacacccagcggcgcgcgtaggtacggtggccccgctgcgcgcacagggcccggggctcggccaaccccgtctcggcctccgtcggccccgcaatcgtcggcggcctccacgggtctccgccggtcacgccgccgcccgggctaaggaccttcccgcgtgggccgggaccgcctgcg

SEQ ID NO: 450369 - DNA, 1135 bp, Homo Sapiens
cccaaagcaggggggccaggtggccaccaaggggcaagggttctgtcccctgcaggttgggacccccagggccaaagggggcccgccggcccagagaagaaccaggccacaggccaaatcttgggtggcctccagtgaagtggctggttccggttccccattaggggcccagaagcccagtgcccccaggattccccaaacgtgatgaagagagcgccacagaggcccggaaaaacccactggaagtggccgcttgccccgaggatttgcttccaggagggcttagaagctggcaagagatcccggatcatttccccccaagccccccagccaggatgacataggcttttttccacatgagctgcagcttgagcccatccagggaacttctctgaggtggagctggcagcccccggcagagggcggggtggggggccacactctcccaccgggcagatggtggacagcaggcagacgacgccagcagggatggtatagacaccgagcattaacggaatgtcctcacccttcttgaccagcacaggggacagcacattggccacaaggacgcccagagggttcgacatggtggcgagcatgttggccgtggctcgctggtgctctgggaaccacaaggcagccagcttggctggagagaagatgaccaggctctgggcaagggcacagaggctctggccacccatgaggaaggcaaatgggttttgggtcccaacaaccatgcagggcaccatgcgtagcacactcccggcaaagttcagccacgcacccaggatggtcgccgcacggagcccgacggagtccaggatccagatggccgccacgccaaatggggtggataccacgaggtagaccagtgacagccagttgatctgctccatggacaggaccaagtcctcagcaatgacgtcagccacaggtgcaaagctgagccacagcgtggcgttggagcagttgagcaggctgatcgcgagcaggaacacccagcggcgcgcgtaggtgcggtggccccgctgcgcgcacagggcccggggctcggccaaccccgtctcggcctccgtcggccccgccatcgtcggcggcctccacatcccgggaattccggaccggtccagcc

SEQ ID NO: 450370 - DNA, 660 bp, Homo Sapiens
  misc_feature (205)..(205): n is a, c, g, or t
  misc_feature (390)..(398): n is a, c, g, or t
  misc_feature (593)..(613): n is a, c, g, or t
cagttaatgttattgaaagttgaatttatggactgagttggaacatatcctttttttccccatagcttgatcatgatttaaaacatgctcacgaactccgccagctgcattcaagctctatgcctctcttggagcaaatgatgaagacatccggaagaaggtgagtctgggagaggggcgtcccccagtcctgacagccagcagnagggagtgacgtcaacctgaaagtcgtggtgaagagcactaacagtgactgtttgaatataataaagcagagtgactaaaggcataattgaagaatgaatgggacccggatttggggggttgtttgtttgtttttagaacatagagtggcatggccgtgctggaatgacaaataactggcgtgcnnnnnnnnngtgtcattaatatgaattattatgttgcacatttttgcatgtgttctgataaaaatcaattctagcactgtgaagcttcagacaccttgaaagtcctaacattagaattgtaaatgttatttatggaaataccttccaatgctattgagaaattcaaatctctattgtatattgttctttgatatgtggcttagnnnnnnnnnnnnnnnnnnnnngctactgtgcaagtttaatgtgaataaaatctttgtggaatgatgaa

SEQ ID NO: 450371 - DNA, 1031 bp, Homo Sapiens
  misc_feature (305)..(305): n is a, c, g, or t
ttatgtgtgaaccaaaataaaaagaggcatgatccagtttgagggaattataacaaaaccctacgttaggctctatgataagtaagaccctgtgcagactatgaagccaggccctgggctttagcccttgaggtacaacaggcagtgtttactgagctctatggccacagggtatctggctatgacgtgccattggttaccaaagggaactggggtcaaggcatgtgggttaggttagtataaaatccttcaatgctagtaaagagactgcttcaaacacgtttttcttgttgacacaatgctanccttcatataaaggaactgttcaccctgaaaacacattttccctgtaagaacacattcacatactcaaaaaaagacttttatctgccaacaagatttaatggttaccttctgtttctagtatatttggaatttatccttctctcgactaccttgtttctggtgctgccaccaccagaattccttaagggaatgtggaggtctgggcttcccccatattctctggcatttctttgccccttcagagtgccaggcctggagagttgcaaagtgtggttgctctccgcctcagccacactgtacctcctctaacaagaatagaaaggttaagggacttggccttctcaggacaaccctttaaatgtacttttccattcctacaaagcctgttgatgctgaaagaaagataggaaatagctcttgtccttgttttgaaggacaggagactaattttcccttcaaacttgatattctggtgtttttgtgactgtttttgtaaattattcaaagttgttggaattttaagtctgattttcccagtactcatcatgaaggtcatagaatatgctctgagttggaaggttttccaaatgggttctcgaccaaaaacccactttttaaccaataattttgatgggttagacatgttcttccatcctctctcaccctgaatatggcacatacacacacacctggtacttctagtctcaaatgtatctagcactcag

SEQ ID NO: 450372 - DNA, 615 bp, Homo Sapiens
gggacctgccaccaagggcactggtctgctatggtaaagtgggcaaggagtgggaccctcagaccatcagggagctctggaaaagcacaggctcttctgatggtggggtgcgctgccatggctcgaatggcagtggggaggccttggaggcttccggatccttccgaggtgtggcctggggctggccgggggaaggggagatcccgggtttgaggggcagttacggaagatgaagcccatgccggggaagaggggcttcatcaggttgacggggcagaaggctgagccagtcgggttgaaatggactttgttcttgtcaggacaggaagtcaggaaggccaggtcaggacctggagacgtggcttcttcaaacacacgcactttctcacagccttctgggggctcccgtttgaagatgtagctatgattaggtcgaggggaggcagcaaaggcaaggactggagatgggctgccatcttcaagaaaggctgggtgtcctggagaggaggctttgtcgttgggggtggatgccagctcctcggcggcaccccgatgttcctcatgactggccaggccacaaggctggggagatgccaaggacatggaaggagagct

SEQ ID NO: 450373 - DNA, 908 bp, Homo Sapiens
cctcatgcgcagtgggccccgcgccgggccccggggcctcgggccgccgtggacgccgtgggtcccatatggccggggcgtgggcggggcggccagcctgacgcatgctctgtcaccccctaccaccaccagggccggcggcggctggctgccccgagggacgcggccctaggcggtggcgatggggaccgcccggatcgcacccgtgtctggcgctcctgctctgctgccccgtgctcagtctccgcgtacgcgctggtggtatgcagatgacgtcatgactaaagaggaacagatcttcctgctgcaccgtgctcaggcccagtgcgaaaaacggctcaaggaggtcctgcagaggccagccagcataatggaatcacgacaagggatggacatctgcgtccacatcagggaagcccaggaaagataaggcatctgggaagctctaccctgagtctgaggaggacaaggaggcacccacttggcagcaggtaccgagggcgcccctgtctgccggaatgggaccacatcctgtgcttggccgctgggggcaccaggtgaggtggtggctgttgccctgtccggactacatttatgacttcaatcacaaaggccatgcctaccgacgctgtgaccgcaatggcagctgggagctggttgcctgtggcacacacaggacgtggggccaactacagccgagtgtgtcaaactttctcaccaatgagactcgtgaacgggaggtgtttgcaccggctgggccttgatttacccccgtgggctactccgtgtccctggcgtccctcaccgtagctgtgctcatcctggcctactttaggcggctgcactgcacgcgcaactacatccacatgcacctgtccctgtccttcatgctgcgcgccgtgagcatc

SEQ ID NO: 450374 - DNA, 1363 bp, Homo Sapiens
ggtccggaatttccgggatgtgggggggaaagatggcggagctgatgctgctcagcgagattgctgacccgacgcgtttcttcaccgacaacctgcttagcccggaggactggggtctgcagaacagcaccttgtattctggcctagatgaagtggccgaggagcagacgcagctcttccgttgcccggagcaggatgtcccgtttgacggcagctccctggacgtggggatggatgtcagcccctctgagcccccatgggaactcctgccgatcttcccagatcttcaggtgaagtctgagccatcttccccctgctcttcctcctccctcagctccgagtcatcgcgtctctccacagagccatccagcgaggctcttggggtaggggaggtgctccatgtgaagacagagtccttggcacccccactgtgtctcctgggagatgacccaacatcctcatttgaaaccgtccagatcaacgttatccccacctctgatgattcctcagatgtccagaccaagatagaacctgtctctccatgttcttccgtcaactctgaggcctccctgctctcagccgactcctccagccaggcttttataggagaggaggtcctggaagtgaagacagagtccctgtccccttcaggatgcctcctgtgggatgtcccagccccctcacttggagctgtccagatcagcatgggcccatcccttgatggctcctcaggcaaagccctgcccacccggaagccgccactgcagcccaaacctgtagtgctaaccactgtcccaatgccatccagagctgtgcctcccagcaccacagtcctttctgcaggtcccttgtccagccacccccagtgtccccagttgtcctcatccagggtgctattcgagtccagcctgaagggccggctccctctctaccacggcctgagaggaagagcatcgttcccgctcctatgcctggacactcctgcccgcctgaagtggatgcaaagctgctgaagcggcagcagcgaatgatcaagaaccgggagtcagcctgccagtcccggagaaagaagaaagagtatctgcagggactggaggctcggctgcaagcagtactggctgacaaccagcagctccgccgagagaatgctgccctccggcggcggctggaggccctgctggctgaaaacagcgagctcacgttagggtctggcacacaggaaggtggtctgcatcatggtcttcctttctcttcattgccttcactttggacctgtcagcctcgtgagcctccttcagctccatctctcctcggatgaaccagggggacctcaccccggagaccttgctggggtcctcaaaca

SEQ ID NO: 450375 - DNA, 897 bp, Homo Sapiens
ccccgggctcgggcggctgggatggagcagaagagcgcggagcaccggagggcacgcagctgacggagctgcgctgcgttcgcctcgtttgcctcgcgccctccactggagctgttcgcgcctcccggctcccaccgcagcccacccggcagaggagtcgctaccagcgcccagtgcgctctgtcagtccgcaaactccttgccgcccgccccgggctgggcaccaaataccaggctaccatggtctacaagactctcttcgctctttgcatcttaactgcaggcagcatcgccgccattaccgtgacagtcattgccgtggtgctgctggtgtttggagttgcagcctacctaaaaatcaggcattcctcctatggaagacttttggacgaccatgactacgggtcctggggaaactacaacaaccctctgtacgatgactcctaacaatggaatatggcctgggatgaggattaactgttctttatttataagtgcttatccagtagaattaataagtacctgatgcgcattgaacgacaatcttaagccctgttttgttggtatggttgtttttgttttcctccctctcctctggctgctacaacttcccctttctggtacaagaagaaccattctttaaaggtgagtggaggctgatttgcagctgaagtgggccagccttgcaccagccaggccagaccaccatggtgaaggcttctttccccactgcaggacccactttgagcaaggaccgaggcaggaggacttgggttgtctcgtcacggggttactttcaggggaacatttcattggggtatttctttaacttctatctaggaacattacattaagtatcaatgacgggcaacgaattgagctctcgcaggatttccc

SEQ ID NO: 450376 - DNA, 826 bp, Homo Sapiens
tggtactgctcacttgcattgaatgtttgtgtcagacctgactcctctgtcgggactctggcccaattggactccattggtttggtcctggtcacagtggacctatggttgtattaacggagccagaaaagacctcaggtgtgaggttgataggaatgaggtgatgaggctggagctgaggggagatgatttggaggctcagcagcggacttgcgacagtgtaagctgccacgcctgcttcaggagtgccccgagctgtgttcctccaacgtgcttgttaagtggactccaccgcttgttggacgagaacccagaagttgagggggtctgtggtttgttgccttcccaattcgaacctgggtctggtgatctcctcttctctggactctatggaaatgttcttaggaagcagagatgttggggctgatgctgtatactgggagcaccgagttgttgtgagtgccgttggatggggaggcagtcgttctgcatcagtgttttgtggagagctagtccagatggtggtcggtggtacaatgtttgtcggaagagaaacagacaaaggagctgatgtaggcagactctgtaccctgccatcctgcagttaagatgcaaagagcgtagagagtcttgtagaccatggtagcctggtatttggggcccagcccggggcgggcggccaaggagttcgcggaccgacagagcgcactgggcgctggtagcgactccgtctgccgggtgggctccggtgggagccgggaggcgcgcacagctccagtggagggcgcgaggcaaacgaggcgaacgcagcgcagctccgtcagct

SEQ ID NO: 450377 - DNA, 582 bp, Homo Sapiens
  misc_feature (91)..(92): n is a, c, g, or t
  misc_feature (187)..(187): n is a, c, g, or t
tggataagcacttattaataagaacagttaatcctcatcccagccatattccattgtaggagtcatcgtacagagggttgttgtagtttcnnccaggacccgttagtaggtcgtccaaaagtcttccataggaggaatgcctgatttttaggtaggctgcaactcccaaacaccagcagcaccacgngcaatgactgtcacggtaatggcggcgatgctgcctgaacttaatgcatgttctacttcctgcatgatcaccctgggaaaggtggtggtggtctccatgtctatgagctcacacatcactttgcctgacacagttgttgggggtgttttctcctggggtactggctcagctgtggcatgtgaagtgggtgtgtggtcagagctggactcctctgttggggactctggtgcagttggagctccagtgggttgggtgctggtcacagtggagctatggttggtagtaacggaggcagaaaagacctcaggtggtgaggttgatagggatgagggtgatgaggctggagcttgaggggagatgagtgtgggaggctcagcagcggactgcgacagtgt

SEQ ID NO: 450378 - DNA, 1060 bp, Homo Sapiens
ccgagctgcttccacctaagctactcacaatgccccgccttggcacttcagccacaacaaaccccccacggcacaatggtgcatatgccctgaggcttggaattgggttgcttttatgtacaaggctagctgggctttttcatcgttgccctgaagagacacctgtttgccactcctctccctggctgagtcctctggcatccatggtgggtggtcgagccaagaatttgtggtatggagcttgtgtggcggcgctggtggccctgttagctgccgtgcgcttgtggcttcgccgctatggtaatctcaagagccccgagccacccatgctctttgtgcgctggggactgcccctaatggcattgggtactgctgcctactgggcattggcgtcgggggcagatgaggctcccccccgtctccgggtcctggtctctggggcatccatggtgctgcctcgggctgtagcagggctggctgcttcagggctcgcgctgctgctctggaagcctgtgacagtgctggtgaaggctggggcaggcgctccaaggaccaggactgtcctcactcccttctcaggcccccccacttctcaagctgacttggattatgtggtccctcaaatctaccgacacatgcaggaggagttccggggccggttagagaggaccaaatctcagggtcccctgactgtggctgcttatcagttggggagtgtctactcagctgctatggtcacagccctcaccctgttggccttcccacttctgctgttgcatgcggagcgcatcagccttgtgttcctgcttctgttctgcagagcttccttctcctacatctgcttgctgctgggatacccgtcaccacccctgggtccttttactgtgcctggcaggcaagctcgggcttgggcctcatgggcacaccagacctttctattccacagggcaaccaagcctgtctttccaggcatccatttggctgcagcctcgggggattcccgaggggcatgggcccggtacttgggccggtttgtctggggccacccttgtgtcccccc

SEQ ID NO: 450379 - DNA, 996 bp, Homo Sapiens
gtcgccaattgtctcttcatgctgagatcagtgggtccactgctgtaagcatcattcagatttagcagaccccctcctagccctctgtaactatggtaactataggtcccatttccattgatgtacagcacgtcctgtgagcctggaacagctgatgttgagtaagtggcctgggtcgcctctggtttacactgtttgtcagctggagcagactcatcctgctgtctctccagacgcatcctcttggcggcatttctactctcactctcacaagctgaagccaagatactctctgcaactgctgaagtaaggtgggaaggaataggtcgagaattaaaagctttcagccgctcggcttcaacgccgtctgtctcattaactttctccgaatcgtcatggtcctcgtggtcatcttcgtcctcatctcccctgtttagtgagaggtcctcagctcctcggtctacactctcatttttgccagagtcatagctggagtaactatgtgcaggagacttgcttccattttctctcgcctctcgttccatcttgaggtcagaaattagaagattcttatacttgtttttcccattactgttgtgatcatctattctgtattccgaagttagctgcgcagagaggggactgtcactcaggttcagtggctgttcatcttgctccagcccagttttgccatcactgttggagtctcccatctccctgctgtgtgttccccctgaagcaattgaactgtgccccagagtctcattgccattaaagctctctgcagcagaatcatccaacatagtttggtccatcctgagtagctgctacacagaaggtgcagtatttaggtctgtgggtatggccttcaggttcactgggccaaggcggtggttcttctctcaaggtttcagcctgggtaccatagcatttgaaccaaagactctgtatatgagtcccaaggaaaacagcacctggagctttggaaaataagag

SEQ ID NO: 450380 - DNA, 915 bp, Homo Sapiens
ttgtgggtcgtcctcctcaggaagtctttgaggatcttcacgaaggagagagggaagatgcccgttggctccccggacagtgcccctccagccaagtctttgttgatccgactgaggaggaagatcacatctccagctttgaaattcagctccagtttgctgtttccagtgaagtcaaatagagcctctgctctcggagctgccatgcggtcaacgctgttgccctgtggggacacgctcttgactttccgggtgcgcgggcggagccggcggagtgcctggggcacctgctctgagtcatagggcgactggtaaaagaagatccggacgtcctcatccatcagcacccagaccggcaggctgagcaggctcttcatgtaggcgttgagggcaggtatccgcatctcggcgatctcctgtttcacacccacgtagactttggctgggagtgtgggcagggtacaggccagggcactgctcttgctgtctggcccgaagcgctcctccagcttgctctgcaaagcatggaactggcggtagcggcggtagatgaggtacttggatcctccttttgtcttcacctcgatgacgaaaacaaagtggctggtgaagcctctcttctcctcgatgtcagcaatgttggccgagatggcaacatcatccggaagctgttcaaagtcactctcggcccgcagctgctgggccacagccatggtgggcgatggtcccagggagcaggtggagagtctcgcccagccagtcccaggctgagttcacctctcacttcctccagccaacctgcgtctcgtctcagcctgtggtcctgggagtccccaggagctgcctttggggaggctcaggcctgcttctctccagtctggcagaggctcctcctccaggctctctgggcctagc

SEQ ID NO: 450381 - DNA, 810 bp, Homo Sapiens
ccccttcagtccctactccctcatctcagcattggtggtcttctccagctggtgcatggaatggacgtccaggtacttccacatgcagatccggggtcggggcagcggcggcggaaacaagttggctccggggtcttcatccgctttcgccgccgccgccgtcgtccactgagtccgcacactcgcacgcgtccgcgcggccgacccatgcactgagctgcgatccttccccgcttcccgccgcagctcggagagatgttcaagctccgactgcaccctcattcccaaaaagtggctggtcttgcggttgagcatctcgccgctcttccgtgccgcgaggcgccccgggctcccgccgcctaggttccaggacagccagcgctcggtcggcggctaccaaggccgggcccgttcgcctcgctccggccaatctacgcgcggagaggcgcggcggggcgaatccgtgggggcgtctccctccgtctcaacggcgacggttgccaagggggcttgtgagggaaggaaggcggaaagcgcaggctcacgccagtgggagcgaagagaacgcgcagatacgtgagaagttgcgagtgcccacctgggcgccctctcttccaggttgctaatacgagggccggtgctgtcctccaggctgggaagtgggagcgcggtgtcagttactatgggaactgcctcttggccaatcaccgagagaaagaggaggtgtttgggaagaagccagaggacccgagtggcgggaccaagcgtaaccatagaagcagaagataaagaagtttcctcacatccggg

SEQ ID NO: 450382 - DNA, 1030 bp, Homo Sapiens
cggagcgctggctctgctggcgctgagaaatggaccaattttgacaagatatagtgctgcagcgtgcctgatgggatatattcagtcatggcgtccgaactttgtaagacgatctctgtggcaaggctagaaaagcacaagaatttgttcttaaattataggaatctgcaccattttccattggagttactgaaagatgagggactgcagtacttggagagactctatatgaaaaggaactccctgacatccttgccagaaaaccttgctcagaagcttccaaaccttgtggaactatacctgcactcaaataacatagttgtggttccggaagccattgggtctcttgtaaaactccaatgtctggatcttagtgacaatgccttagaaattgtttgcccagaaattggtcgtctgagagctttacgtcatcttcgattagctaataaccaactgcaattcctacctccagaggttggcgatttgaaggagctgcagacactagacatttctaccaatcgtttgctaactttacccgagaggcttcacatgtgcctttctctgcagtacctcactgtggaccgaaatcgtctatggtatgtgccgcgccatctctgccagctgcccagcctcaatgagctctccatggctggaaaccgtcttgcatttttgccacttgatttaggtcgatctcgagaactacagtatgtatacgtggataacaacattcacctgaaaggcttgccatcttatctgtacaataaagtcatcgggtgcagtggctgtggtgctcccattcaagtttccgaggtgaagctgctttccttttcatcagggcagcgaaccgttttcctcccagctgaggtgaagggcatagggacggagcatgatcacgtcctccctctgcaggaattggctatgagagggctgtatcatacctaccacagcttgctgaaagatttgaactttctgtctccatctcattacccagaagtctcctaaagctgctgcactgccctctggggcactg

SEQ ID NO: 450383 - DNA, 844 bp, Homo Sapiens
  misc_feature (672)..(711): n is a, c, g, or t
cctgggcacaatctcgttccttgttgcttctgggcccttttctccagtggtgatggccctgctcattaacagggcaaaaggaagctcctccgagatgccaagccatatcttcatagcttatcctgtagcccctgaagaggagacccttttgacctgagtgccggccacagggaggccaggatgctgcctttccactcaagcagtttgagctattcctctagccaagaaatgccttaccaggggccaacatcaagttcattgattttcaaccaaacacagattcgctgggcaggaggaggcaatagagggcaaggcaggagctgagcctcgaaagagcatgcaccagcaccagctgtcacacggcccacagaatgcccctcccagggctgtgggctcctgctccttccacctcccatctgcagcagaagggtgcgagtcagttcccaggagacggcttctccagtttgaaataaacatctgtcaaggtgggaccaagaagtatacccttggtatcccggaacgcaatggcttctaggtaagagttaaaccggccttaaactgtgcagagatgaaacaccttacccctgctgcacacagttttagtcgacccaaatgcaatcatggagataaataacagggaaattaattagaagagttgccaaaaatacccannnnnnnnnnnnnnnnnnnnnnnnnnnnnnnnnnnnnnnngccctgaggaccaggctgtccatccaatccgttgtgtcctggcaacccgccggctcccggaggtcctggtggtccagaaggtcctgtgaggcagatgcccttggtgctgttgcacaggtccaccatcactcgg

SEQ ID NO: 450384 - DNA, 1138 bp, Homo Sapiens
  misc_feature (1005)..(1005): n is a, c, g, or t
  misc_feature (1072)..(1072): n is a, c, g, or t
  misc_feature (1114)..(1114): n is a, c, g, or t
aacacacacctgattagcagttcaagaactcgacataaaaataattcatgctatgtttcaattggagggtcatgacactgttgggcccacaggcaaagcattcataagtcaatttaatttaagttcatatctacctttttgaaaatgactccctatgttacaatgaaagaattcatcaaataatgattcaatcatgcagcactacttcctagagttggcagggaaatcatgcatttcttggcggttgagagaaggctgatccaaaaacacagtgaagagatgttcccattcctcaaagtatttcacctccatgggcatgatgatttaaaacctgctaagttcccgaacctatgcaaagtggccaatgtgaggaagcagaagttggataactcattcagaggctaccaattttccaaagagtcactatctagactagcggatagtgaggtagacgagggcagtatcaagaccttccttgaagaaagcaatgatgagtaaagaagatgaggatgggttataggcagcatttagtgtaccatgtgaagagattaagatggcactgacacataaaagaatcaataactagactaatctccttacccagcttcttcaggcactgaatcaagagataggatgtagacttagaaaaaaaattaactttacctttttcttttattcttatttccactgattaggaaaaattatgcatagagttttacaagtcacagatttagctacatattagatttcaaatttcaaactggagttaaacagtggaagaattgtaactaaaaaatatgaagtcttgccaagtagcatgctgtttaagaactctcaggattcattactttttactcttatcactgagaaacatcatatatgtttttggacttactctcaaagtcaagtcttcaatccactgaagtgcaaagcctttccttctaccagttatttataggttttcttaatgtcaaattattaggatgaataatttggttagactangaacccagaatggctaaaattctctgagtgataggaattcccttaagggaagaccaaaaatttcccnttaaaaaaccaatgggacaccatactatgggaaaaaccatcntaaccaaccattaaaccatccccc

SEQ ID NO: 450385 - DNA, 509 bp, Homo Sapiens
  misc_feature (23)..(23): n is a, c, g, or t
  misc_feature (31)..(31): n is a, c, g, or t
  misc_feature (100)..(100): n is a, c, g, or t
taaatttaaccccttccccttantcccaaanagttaaaccctgttctcaactccctggttgcaaagaagggcccatcccagctaagtccactggtggctncctgggggcaatccctcccagcgcccccgaattgagctgtggcaatgccatgaggtggaagctacattcacacggggcaagtgggtgtgcaaggctgagccgcaggaggtgggtgggggactgtggaggaagtgccctccaggcctggtccaccctggtggtgccaagggaaggccacagcccccacccaaacccctgcggagccaggagttgaagggtttggacctggaagacatttgcatggtgcctccctccgtggctggatgggggcagcctcgtggttcagggccgagacggtgggtgccaggcttggagggaggatggtggaaggggagaggaaaaggagacatctgaccttttgcttctctcagggaggggcctttggctgccacctcatgccgaattctgg

SEQ ID NO: 450386 - DNA, 1209 bp, Homo Sapiens
tgttttttcctttaaccctccccccaaggccttttttggccaaagaggaaaaggccctggcccattcgggggtctcttttcccggggataaagggttcgattctggggggaaggaaacttggtgggccctaacttcctcccagttccggggggatcctggcattttcttccctagagtgcagatactgctcactggaaggctgtctctgtggcactctgtgggttggccagtgcagagtggggctccaggattttgaggcggctgcagtggtgtagcgagtggcccaggggtttctgccttgggggcctcttcctgcgcagcctcttgagggcctcagccacacggtggtcccctgcacattcccagatgatctgtgcccgttcctcggccagctggtccccgctgcgttgaaacagggcttggatctgcagcagctcggcgtcctggaagatgttggccgaggcctgcttgcggccccgggcctcaatcggggcctgccaaggggttggctcactgaccaccgaggctggggtacccattgtggatgctcacactgaagggcagctccgacagacctcaaatggggatggggcaagctaagatgcgcccactccaacctcttccacagccttcagaaagggcaggcgcagctctgggcttcctgctgcgaaggtgcttacaagggccagtcggtgatcacgggcagcacaagagcatggcagagggtatcctggccgaggtcctaaggcgacatctgcagcacgaggaggccccgggactcagacgtggccgcttcgcagaacgacggggtcctaagtggatctggcggtcgcgtcccgctggcaccccggctctgactgtcgccctccggctcccaccgcagcgccgagctgggccgccgacctacgtacctggttgcttgaggcaggccgcacgcagccccaaactggtccgggccacttgggtcacagccgcggttcccgggagaaagcgctccctagccccggaacagccaatcctcggccccagccaggtatgagctcccaggcgagccttccaaacccaaggcggagttccgtgcgccaatcatcggtgggagacagggagggggcgtgtccatccccgccccccgcctccgctggcctcgaaagcggagtgcgaagcttcctcaaacctaatcggcggcggagcggcggtgagggggcgtg

SEQ ID NO: 450387 - DNA, 922 bp, Homo Sapiens
tctttccctaggaggtgccagaatactggcccccctgggaggctggtcttctggtgggcactcttgtgggtttggcccagttgccaaagttggggcttcccggaatttttgagggcgggcttccagttggtgtagcgaagttggccccagggggttttttgccttggggggccttcttcttgggccagccttttgaggggcctcaggccacccggggggtccccctgcacattccccagatgatctgtgcccgttcttcggccagctggtcccccgctgcgttgaaatcagggcttgtatctgcagcagctcggcgtcctggaagatgttggccgaggcctgcttgcggcccccgggcctcaatcggggcctgccaagggggtggctcactgcccaccgaggctggggtacccattgtggatgctcacactgaagggcagctccgacagacctcaaatggggatggggcaagctaagatgcgcccactccaacctcttccacagccttcagaaagggcaggcgcagctctgggcttcctgctgcgaaggtgcttacaagggccagtcggtgatcacgggcagcacaagagcatggcagagggtatcctggccgaggtcttaaggcgacatctgcagcacgaggaggccccgggactcagacgtggccgcttcgcagaacgacggggtcctaagtggatctggcggtcgcgtcccgctggcaccccggctctgactgtcgccctccggctcccaccgcagcgccgagctgggccgccgacctacgtacctggttgcttgaggcaggccgcacgcagccccaaactggtccgggccacttgggtcacagccgcggttcccgggagaaagcgctccctagccccggaacagccaatcccctcgtgccgaattcgccacccaggcc

SEQ ID NO: 450388 - DNA, 761 bp, Homo Sapiens
  misc_feature (584)..(605): n is a, c, g, or t
gtcgatataagtagctgctccaatctgtttggccatatttgccccctggtcataggacactggcgtctgcctgtgattggagagctctactaatgtactgacatctgtccgcagatcagacttgcagccgaccaagagcattttggtatttggacgaaattcctggatttcacctttccactttttgaggacactgtccagggtctctggtctactgatgtcaaagcaaatcagcacagcatccgaatcagggtaagagagggggcggacattgtcatagtaaggagaacccgaagtgtcccacaggctcaactctattctttgtgtgtcgatttcaaaactggccgtgtaattctcaaacactgtaggaacgtaattctcggggaagcagtccttggcgaagacatggagcagcgcagtttttccacactgactgtctcccaccacaactatcttgcatttcacgttctgattaggatccatgatagatttgctggataatttctggctggctcttctctccttcattgatgttgccttattttctcttggaacaggaattttctcttaagaagaaaaaaaannnnnnnnnnnnnnnnnnnnnnttctctctttataaaaagcagatataaaaataaatcacaggctgatgggcaacctctgaaacgcggcgcagacgaggaggagagcgagaggagcaggctggttactcccctccaacaagttttaagcctgactcctcaccgcgcctcccaagtcca

SEQ ID NO: 450389 - DNA, 984 bp, Homo Sapiens
  misc_feature (162)..(162): n is a, c, g, or t
aagttaatggggacctggcttttccacttttttcccctggatattctgggggggcccgccagtttttctgaaagcagggattccggaatgatggcaaaataaccaaggatgaaagttttacccaagatggaaggtgagggatggggcccttttatgatcccnccacagggaggagttgattgtgtcccagcacccataatcctcaaaatggatcctggcgtatggtccacaccatggtgaatgtgctgggtacccttccgctcagagaagaaggagacggcaagcagggtgtacaggtagaggccctccaccagcagccagaagaagttagccatgacacaatattggaaaaagaccatggctgccttacagcccaccgagccctcggagcactggtccgactccccgctgtcgaagagggccaagtctttgatgaagacagcggcagccctcaggatgaaggatatgaagaggtgcatgtggatgtagttccgcgtgcagtggagcttcctgaacaggctcaggatagctgtggcgaccagaagggtggcgagggacaggccgtagccgatggtgtagccggtcttcacagaaccgtagaacatggtctgctgctcatccaaactcgctgccttgtcatccaaaccacaggcaatggggtacgggccaggctccaggtgcgtccagccttcgtcggtgcagctgcggcttacattgcggccttgaatggaggagaagagcttgaagatgaggggacaggccaagacaactacctggccccgaggggtggctggccagcaggtgaggttgtcccacatcttgctgcagccgccggcccaagggcccaggcgagggcgcctgccagcacgcatagccagcgggcgggcagcggacttggcgggcgcatggtctgccctgagcccgcggcgggcggccccgcgcgggcaaagagctggcggcggcgcaccaggcgggcgatggccg

SEQ ID NO: 450390 - DNA, 1154 bp, Homo Sapiens
cgcctgcacctcaccattgaggaagcagtagaggatagccaccacaaaacccctggaaagaccccacgacgagctcaaagaccatcttcacttcaggcttaaaattgtccggaaagaaggcgaacatgatgtagtgtactccaaacagggggatcagcaggagtgtggacctggctagccttgagtatggactgctgtcactcttcctgatatctgggggccgcagtttctgaagcaggattcggatgatgcaaataaacaggatgaagtttaccaagatggaggtgaggatggggccctttatgatccaccacagtgaggagttgatggtgtcccagcacccataatcctcaaaatggatcctggcgatggtccacaccatggtgaatgtgctgggtacccccccagaagtacttccgctcagagaagaaggagacggcaagcagggtgtacaggtagaggccctccaccagcagccagaagaagttagccatgacacaatattggaaaaagaccatggctgccttacagcccacctgaacaggctcaggatagctgtggcgaccagaaggtggcgagggacaggccgtagccaatggtgtagccggtcttcacagaaccgtagaacatggtctgctgctcatcgactcgctgccttgtcatccaaaccacaggcaatggggtacgggccaggctccaggtgcgtccagccttcgtcggtgcagctgcggcttacattgcggccttgaatggaggagaagagcttgaagatgaggggacaggccaagacaactacctggccccgaggggtggctggccagcaggtgaggttgtcccacatcttgctgcagcctattgtctcattctccagctgggcctcctccaggcactgcttgtgctgcacctcgatcatctgcacatagtcacactcctcctgcagcctggccgcctggccgcccgccggcccaagggcccaggcgagggcgcctgccagcacgcatagccagcgggcgggcagcggacttggcgggcgcatggtctgccctgagcccgcggcgggcggccccgcgcgggcaaagagctggcgggcggcgcaccaggcgggcgatggccgggagcctggcagagtggcgctggcgctgtgtccccccgct

SEQ ID NO: 450391 - DNA, 759 bp, Homo Sapiens
ctgtctcttggtgtctcttcattttcgtttgtctttcgtctcctttgtttgttctgttgtccttctgggaggacaatggtcccggagctcagccccgggtcccgggtgccggcgctcggggcccgggccacgacatccccccggcgggagcaggagcgtgaggatggtggccaggggtccggggccgccgcggagcccctcgccgccttcgcagagcccctcgtcgccttcccagagcccggacagaggggcgcctccgcctcctccccggcgctcaggccacacgcgagtcccgtggcccagcgggtgcccgggcaggggcgctcctctgcgcgccccgacgcctcgccggctcccgcggctccttacccgccgctctcgggcgcggggctccgcagctaggcccctgccgcccggtggccggcgtccgcggggccccgggcctcatactcctctccagacaggccgcgggctgcgggcggggtgggccgtggatcccgggcgcctaggaccgggacgcggcagcaaggcgtggagagagcccccgggggcgtcccatgaggcgttcgggatcggcgcctcctaggtgcgggctgtgcgggcagtcctgctcccgcccccggggctgagctggcggcgtcggcttcggagcctcggagccgagccgagtccggggaagcgctcctttctcagctccagccgaagagccgatcccgggaattccggaccggaccagcgggcaggcattgggtgtggccg

SEQ ID NO: 450392 - DNA, 964 bp, Homo Sapiens
attttgatataaataaataatttaaattttattggtgttattggaagaaaaatgctattaatgggctaataaaaaacatgtgtttctcttatggattttaataagctccagtattattcaaatgatcaaaaatatagttataattttttgaattttaaaaacgtgattgctctaataaagaataaaatctatgctttttaacaaacatagttttggtgcctaattctgtaatatgttttattgaaattagattcatttctctaatgtgagaaaaatatatccagtaatagtattgactgtttaaaaaattgagctcatcaaaaatattgtcatcaaatacaggtggttaatctgacatacattgcagttacatgcattatttttatttacaacatttgctccttaatgatgaatttatctgtgttaccctgtttttctacctggaactccatagaatgatgtttgcaaaccaacatgtgctcttttcagtcattcactgttttaatatgacatggtagagaagataaggtttatggcaggtaattttttgtaatgtgtattaaacgaagtttcaaagattagaaatacatctgtgtcctgaaaaccttagatacatagccgactgtatacagaggttcatctcaacctcaacactattgacttttggggctggatagttctctgttgtgggggtttgtcttgtgcactgtaggtttttagtagcatccacactttctcctcaccagatgccagttgcaccctcccccaagttgagacaaccaaaaatgtctccagatattgccagctaccccttgagggcatggtacctctggttgagaaccattgctagagaatgatctttactgaatttgccctttataagaaacccagtgaatttctagagcaagtcccaaaaaactaagggacagctaagaagttatatggttgacttcaaaggcctaaa

SEQ ID NO: 450393 - DNA, 884 bp, Homo Sapiens
ggctggatcgcgccggagttacgggatcgagggcgggcctgttgctggatttccctcgctaggagggggcggtgttgctaggcgaagacccggggtgccaatcccggggaccccctccgtggggcggcactgcagcgttgccgggtggcgcgggccaccgccgccgctgaccccgagtgcacccttcccctaggccttcgatggcttcgcggctctgggcgtgtcgcggctgcgtggagcccgcggacatggtgctactgtcggtgcccgacaagctcatcgtcatgacgtacctgtgccagatccgcgccttctgcaccgggcaggagctgcagctggtacaactggagggcggcggctggcgccggcacgtacctgcgtgggcagcgcccagcccagcccgcccgacgacctggacgccggatggcctggctgcagcgtgctgcgcggtcactggggccgaggggccccatggagcccaaggatggcctgcagacctgcgcagacggggcgggccccggggtgtggcctccagtgaacgcggtcgcgggccgctgcctccaaaggacggcggggccgaggccccccgagagtcgcgacccgcggcaggtcccggccgaggggctggtgaacggggcgggggcaccgggcggaggctgggcgtgaggagctgcggacggccctcgggtcaaacggggagcccgggtcggtgcccccgacccgcggcgcacggctccattctcccacgtgcgcgatcgcggacctgctcaagaaagagggcgctcgcggcttgcgggaaacagcagctcgtcctccgatggaccgatccgagacgcgggaagccatggtagcctgcgtctagcgaaggccagggccgtgactcc

SEQ ID NO: 450394 - DNA, 1069 bp, Homo Sapiens
cggggggagaaattgatttcacaacggggagggcgggaagtattcgctgaggggttttgattaaagagagtgagtgtgagaggcctccgaaagcacagtaagaggtagtggtggtttcagaataaacgacgaagggttacgcgtggaaggagcggacattaatttttgataagaccccatgcagtggtatgcgagttagctgtttttaagcacgcgggttagttcgcacctttttttattgggcgggtgtcgaggattaagttattattcggaggggagcgtttaagtctcttacgcttactgtattaaataggtgtgacttgacaccgcgggtgggcaaaatttgggctgcgtcccggttatagtggggggggacgaataaggtctacggctgtggtggttgctgcaccggccggcctagatgtttaaacgtgtccgacggttttatattgtggagttaaggcatgtgttgtattggtaggggttattcgttggggggaggtaaagcctccctacccccaaaattaggtgacgttgatacacaaatttgtggagggggaaagcggcaaaaccggcacatagatagtgtggtgttgaaccgttcaccagcccctcagccgggacctccgcgggtcgcgactctcggggggcctcggccccgccgtccttggaggcgcggcccgcgaccgcgttcctggaggccacccccggggccgccccgtctgcgcggtctgcggcctccttgggctcctggggcccctcggccccgtgaccgcgcagccgctgcgccaggcctccggcgtccaggtcgtcgggcgggctgggctgggcgctgcccacgcggtacgtgccggcgccgccgccgccctccagttgtaccagctgcagctcctgcccggtgcagaaggcgcggatctggcacaggtacgtcatgacgatgagcttgtcgggcaccgacagtagcaccatgtccgcgggctccagcagccgcgacacgcccagagccgcgaagccatcgaaggcctgcttgttgttctgcttgatgttgagtgggtctagcgaggcatag

SEQ ID NO: 450395 - DNA, 905 bp, Homo Sapiens
  misc_feature (498)..(745): n is a, c, g, or t
  misc_feature (763)..(776): n is a, c, g, or t
gtctttgtagtagctcagtaaattcaaaggcaaactaaaaaccagaagcagagcccagtaccccccaagatgcagtccagataaaacagcaacaacacacaaattaaacaatacccaaagacctgacaggtttattatattataggcagtttctttctcaaaaataacttgctcatacatgtgcacctatgacttatggataattcatgctgttgtaaggtggtagatccccctaggctggttttgccaacacatatagatttttttaaaggtagccaagtaatcagagacatttattttctgccatatgtaacaccttcaggctctctctaacaccctgctggcatggcagagaattctagaataactttgttaacctgagaaacacataatttgaaaaaccaatcctttgccctcaccaccctcccccctcccattaatataaaaataataataaccataaaaactagaaacatttgccaggcgcagtggctcatnnnnnnnnnnnnnnnnnnnnnnnnnnnnnnnnnnnnnnnnnnnnnnnnnnnnnnnnnnnnnnnnnnnnnnnnnnnnnnnnnnnnnnnnnnnnnnnnnnnnnnnnnnnnnnnnnnnnnnnnnnnnnnnnnnnnnnnnnnnnnnnnnnnnnnnnnnnnnnnnnnnnnnnnnnnnnnnnnnnnnnnnnnnnnnnnnnnnnnnnnnnnnnnnnnnnnnnnnnnnnnnnnnnnnnnnnnnnnnnnnnnnnnnngagactctgccccgaagnnnnnnnnnnnnnnctattattttattatttaaggattatctgtggttttcgatgctccatgtcactgccatcttaggacagggactcctgcacttagtgcctcgatacatgctaggtgcactctcatggcattctgatggct

SEQ ID NO: 450396 - DNA, 677 bp, Homo Sapiens
  misc_feature (467)..(475): n is a, c, g, or t
  misc_feature (644)..(644): n is a, c, g, or t
ggcacctttggagaggattgtttatattttcagcctgggttcctttatgcagtcccaacttagaggggagcttcggtttatttacactttgctttgcacgataacttgtatgcgaagacctctttatatctttcagtaggtcagagggctctttgtcctggttgaagtcccaaagtgtcagtgcagctgagaatgtttctcagcctccccctttacagaggaagggtcctggattttcataaatccagaccatgcctgcttcctataaatccatgtatatgacattgtactgtatctgatttctgtgccagtcatctgacctgattctttaaaccccataaaggtactggctatatgtagtagtagtatcctaggtaaatatggtgattaaaatacttctcttctaaattataaagataatgagttttgcattttattaaagggtcctgttgttagtgacacaggannnnnnnnnaatgcttcatacatatagttcttatctaaacttgttcagctaacttcatagatcagttacttagcaaattcatactgagtcttattttgggaagtcttcctgagggaagctgtacaaaactgaggtggtcaggttcatctctttcaagtaccagttatacagccatctnaataggcataacttatggcaaatttatacattt

SEQ ID NO: 450397 - DNA, 911 bp, Homo Sapiens
tgggtggcgaattcggcacgaggcagcgactctcccgggctgccagccgggacgcgcggccgccgccgctgcagacgacgagtccgccctcgtcccgcgcccccggggctcgcggagccaggtctccacctctgggcaggagagttgccgaccacctcgggggtgctttctctgcgcttgaacatctatagctgcttctgaggggctgggagccgggcccctgggagagacgagccatgaaccccccacagcctctgcatttggggacctcaccttaggagagtgccatttacagcttccgccagggcaaaggagctgagcagccatcccaagcccagcccacctccctcccccggcccctggtaggcatggactagcagctgtgagcagccagagctgatgcccggcccccaggggggcagaggcgccgccaccatgagcctgggcaagctctcgcctgtgggctgggtgtccagttcacagggcaaagaggcggctgactgcagacatgatcagccacccactcggggacttccgccacaccatgcatgtgggccgttggcggggatgtcttcggggacacgtccttcctcagcaaccacggtggcagctccgggagcacccatcgctcaccccgcagcttcctggccaagaagctgcagctggtgcggagggtgggggcgcccccccggaggatggcatctccccctgcacctccccgggtccaccggccatctcagccatcatcaagaacgccagtctaccctggcccagctcagccaggccgcctacgacagcctcgtggcttgcgaaagctccagcttcgacagcaagccccaacaggctccaagggacggacatatccagctacggcctggaactcgggttctgcaccaactcccgcctgaccc

SEQ ID NO: 450398 - DNA, 1514 bp, Homo Sapiens
  misc_feature (27)..(27): n is a, c, g, or t
  misc_feature (41)..(41): n is a, c, g, or t
  misc_feature (106)..(106): n is a, c, g, or t
  misc_feature (124)..(124): n is a, c, g, or t
  misc_feature (151)..(206): n is a, c, g, or t
  misc_feature (208)..(208): n is a, c, g, or t
  misc_feature (212)..(212): n is a, c, g, or t
  misc_feature (214)..(214): n is a, c, g, or t
  misc_feature (218)..(218): n is a, c, g, or t
  misc_feature (229)..(229): n is a, c, g, or t
  misc_feature (245)..(245): n is a, c, g, or t
  misc_feature (250)..(250): n is a, c, g, or t
  misc_feature (272)..(364): n is a, c, g, or t
  misc_feature (378)..(378): n is a, c, g, or t
  misc_feature (384)..(384): n is a, c, g, or t
  misc_feature (387)..(387): n is a, c, g, or t
  misc_feature (393)..(393): n is a, c, g, or t
  misc_feature (395)..(852): n is a, c, g, or t
  misc_feature (854)..(859): n is a, c, g, or t
  misc_feature (863)..(867): n is a, c, g, or t
  misc_feature (872)..(873): n is a, c, g, or t
ttgtgttgtgccgtgtttgtttttttngctggtgcttggtncgcggttctgtccctccgcgttctgcgggtggggttgttgcgtggtgtctatgggctcggtgtgncgttcgggcggcggtgtngcgtgttgttagctgttgtgcgtggcnnnnnnnnnnnnnnnnnnnnnnnnnnnnnnnnnnnnnnnnnnnnnnnnnnnnnnnntntttngngttnttggttgtggnggcgggtggttgtggnttgtnggggttggtggcggtgtgggtnnnnnnnnnnnnnnnnnnnnnnnnnnnnnnnnnnnnnnnnnnnnnnnnnnnnnnnnnnnnnnnnnnnnnnnnnnnnnnnnnnnnnnnnnnnnntgtgtttgtggtgngggtgngtntggttngnnnnnnnnnnnnnnnnnnnnnnnnnnnnnnnnnnnnnnnnnnnnnnnnnnnnnnnnnnnnnnnnnnnnnnnnnnnnnnnnnnnnnnnnnnnnnnnnnnnnnnnnnnnnnnnnnnnnnnnnnnnnnnnnnnnnnnnnnnnnnnnnnnnnnnnnnnnnnnnnnnnnnnnnnnnnnnnnnnnnnnnnnnnnnnnnnnnnnnnnnnnnnnnnnnnnnnnnnnnnnnnnnnnnnnnnnnnnnnnnnnnnnnnnnnnnnnnnnnnnnnnnnnnnnnnnnnnnnnnnnnnnnnnnnnnnnnnnnnnnnnnnnnnnnnnnnnnnnnnnnnnnnnnnnnnnnnnnnnnnnnnnnnnnnnnnnnnnnnnnnnnnnnnnnnnnnnnnnnnnnnnnnnnnnnnnnnnnnnnnnnnnnnnnnnnnnnnnnnnnnnnnnnnnnnnnnnnnnnnnnnnnnnnnnnnnnnnnnngnnnnnntctnnnnnggggnngccccacccttcggcaccagctgcagcttcttggccaggaagctgcggggtgagcgatgggtgctcccggagctgccaccgtggttgctgaggaaggacgtgtccccgaagacatccccgccacggcccacatgcatggtgtggcggaagtccccgagtgggtggctgatcatgtctgcagtcagccgcctctttccctgtgaactggacacccagcccacaggcgagagcttgcccaggctcatggtggcggcgcctctgcccccctgggggccgggcatcagctctggctgctcacagctgctagtccatgcctaccaggggccgggggagggaggtgggctgggcttgggatggctgctcagctcctttgccctggcggaagctgtaaatggcactctcctaaggtgaggtccccaaatgcaaaggctgtggggggttcatggctcgtctctcccaggggcccggctcccagcccctcagaagcagctatagatgttcaagcgcagagaaagcacccccgaggtggtcggcaactctcctgcccagaggtggagacctacacagacctgggacctcagctgataaaagtcaataatgatccttaagaacacctatgtctgcggctcagatcccggaaa

SEQ ID NO: 450399 - DNA, 1225 bp, Homo Sapiens
  misc_feature (59)..(68): n is a, c, g, or t
tgatagcgcgagagggtgggaacgaggggggggagagagatgtgaaagaggagtatctnnnnnnnnnnacactgatacttgcttattgtgcccgagtatacacaacagggtggcatcaaatacaaattaagtttcatcgcggtgagtatagcaacggtcatatcattttgcgggccattagagggtggcagaacaattgtgctatagggaaaggggtagcggttaattccacactataagtgagaaagtgtgtatttgaaggagaagaattatagggttggttattccgggtgttcggggcgggggtaaacacgggaaggggactgtgggtcctttaattatatgcaggggataatgcttttgggggatccatattaggggaaggaattggggcccgaaactgttacggtgggcattgcggggcagaagtaatttccacaggaaagccatggatgttttgctgaagagaaattcttctggtggagtagagcttgttttgttaatgtggtacagattttgaagggttcagggctattcaggtttgtagcaaaattgcaaaagcaaggacataggtatcctttgggtgaacttcacatgttggtttttcatctctatcaatacttgcaaagcacttttatatttgcctttgataaataacatatccatcaaaatattgaatgatgtggagtctgagaagaaacctcgtaaatgctggtctttcatgagctccactgcagattcctcgagatccaactcgtaacacaacctcacaaaaagcggtccaaatttatactcccccaaagtgaaatttttgttctctgcatggtacctgtaaatgacatttttagccagttccacatggtcccgagactcacacaaatgtagtaaggttatcaactcccccttcaagatgagcttgttctgggtcagtttctttttcaagtttctaaaatacgtttctttagtgccagaaagattacatgcaacagccactttcttttgttgaaattcttttaatttcaccacattatctgtaagtaggtatcttttagctccgagagggcagcggcagctgacagagccggagcctcccaccccaggatacaccaaaatctgcagcgcctgcaggagaactcgattcgagggccgaaatgcagcagccatactgtctcggaccataccaactcgctctcgacgaattcgagctcggccgatttggcctgat

SEQ ID NO: 450400 - DNA, 863 bp, Homo Sapiens
  misc_feature (776)..(812): n is a, c, g, or t
tttctggattcatgatttgagaaaaaatggacacagcttttgccatctcattctgattcagagctaatgccacagcgaaacaggatgctctcctggagagaatgttctcctttgagtagagcttcttctcttaatgtagtacagattttgaaagattcagggttattcagtttgtagcaaattgcaaaagcaagaacataggtatctttggtgaacttcacatcttggtttttcatttctatcaatacttgcaaagcacttgttctttcatgggctccactgcagattccttggagatccaattcgtaacacaacttcacaaaaagcggtccaaatttatactcccccaaagtgaaatttttgttctctgcatggtacctgtaaatgacatttttagccagttccacatggtcccgagactcacacaaatgtagtaaggttatcaactcccccttcaagatgagcttgttctgggtcagtttctttttcaagtttctaaaatacgtttctttagtgccagaaagattacatgcaacagccactttcttttgttgaaattcttttaatttcaccacattatctgtaagtaggtatcttttagctccgagagggcagcggcagctgacagagccggagcctcccaccccaggatacaccaaaatctgcagcgcctgcaggagaactcgattcgagggccgaaatgcagcagccatactgtctcggaccataccaactccgctctcgacgaattcgagctcggccgatttggcctgatnnnnnnnnnnnnnnnnnnnnnnnnnnnnnnnnnnnnncgccgccaccgcgtgcagctccgggtcgccctatagtgagtctatacatcc

SEQ ID NO: 450401 - DNA, 815 bp, Homo Sapiens
cagggcgcgattgctccgcttggcgatccagcaaaccctgcatcccaaggcctggattcagctgccttctgagtctttgacttatgttccttgccctggaaacagaacgccgcggtccgtaccggagagggagaagttgcaggacgacccgccgggaagacccgagcgcgtgcgccttccccgcggctccacgggcacaaaacggtggctccggagctccctagacccaggcagcccacagctgcgcgcgcgcctccccccgagcgcggccgggctcccgcgggaaacaagcgaccgcggcacgcgtgggcgcggcgggtgggtgccggcagccaggttcctcccggctccccactgcggatcctcgcggctcctcccggctccgcccagcggctcaccccgcggacggggatccctccgcccaccgccggcccttccgcgccaagtagtgcgaccccggcccccgcagcttccgccaacccaggctcgcgaggacgagtccacggtcgcgggcgagaaggagcgacgcagagacggccgggggcgcggggcagtcccgaggttttccccgcgaggccgcggggggtctcccagtggccagggagagagcgcgcccaggtccgcggaaccacggctcctgccgcggcgagcgggccgggagtctacggtcggggcagagccgcccgggaagccgcgcgaggacggcggccggcggccggcggcggaggcaggtgtcccgaggcctgccccacccccactaccgcgggcaggaagaggaaggagccgcggccgtgcctggcgggcgggggtgcccg

SEQ ID NO: 450402 - DNA, 1030 bp, Homo Sapiens
ggggcacagcaaatctccatatctggtagagttaatgatcataactcttaagatcttacattttgcttttatttttaaaaagtaaacttctaaaaatcttatacactggtatgtgtacccatgagtagagctatattatgctttcttgtctaattacagggataaatgaaatatgattgctaatagtacatgtatttccattcaagtatatatcctaacataacccaatataaccatttaatatattctctaatacaatattattaattttaaagtaaaatggttctgatcattactggcctcctctaagagtacatgacaagtacttaagtagtggggtagaactgaaagtgaaattccttaatgtctacaattcctgggagccctctggcatgcaagtcttcaaaattatgggtgacttaaggtccccacaccacctgttttccccggcagtcctgcaacaggagcacttattcctatttcatagtgtggtctggtggagcagagcagtgtggtccccaggaagggatgagctgctttggctttccagagcactcactggctacatgaccttgggtattccacctcgttttaaaaatggggcagataatcctcaggagattgcaagaagaatcagaaaagctgtgcagagcagctttgtattataaacactaggacgctacctacatgctgcaggtcctaaactagtgcagtgccaagcagcacactgggcctgtggccactgatgttcacaaggcctcatggtcaatggagcttctgcatctgagcgagccagtacagatattcattcaggagctccaggaaactggctttgctctctagagggcagctcaaagggcccattcactcacaatccacccaacggcattcctggcctccggtcacagcctcagccacggaagtcctgcagggtttgccagtctgtgggggtgagtgccctaacaccatgaactgcccactgctcccagaaagaaagaagaacttggaatatgagactccccaggtctcc

SEQ ID NO: 450403 - DNA, 1005 bp, Homo Sapiens
gctgggtggcgaattcggcacgaggccgacccggtctcacttcgctcctgggcagctgcgcggagaactggggcactttgttttagtaaaatcggaggtgaagatggagatattcatcgaggttttcagtcacttcttgttgcaattaacagaactgacactgaatatgtgcttagaactgccaacgggctctttggagaaaagtcttatgatttcctcacaggttttacagattcctgtggcaaattctaccaagcaacgataaaacagctagactttgtgaatgatacagagaagtccacaacacgtgtaaactcctgggttgctgataaaactaaagaccttctctgatggatgacctctgtgaagcaaatggcacttttgccatcagcttatttaaaatattgggggaagaggacaactcaagaaacgtattcttctctcccatgagcatctcctctgccctggccatggtcttcatgggggcaaagggaagcactgcagcccagatgtcccaggcactttgtttatacaaagacggagatattcaccgaggtttccagtcacttctcagtgaagttaacagaactggcactcagtacttgcttagaactgccaacagactctttggagaaaagacgtgtgatttccttccagactttaaagaatactgtcagaagttctatcaggcagagctggaggagttgtcctttgctgaagacactgaagagtgcaggaagcatataaatgactgggtggcagagaagactgaaggtaagatttcagaggtactggatgctgggacagtcgatcccctgacaaagctggtccttgtgaatgccatttatttcaagggcaaagtggaatgagcaatttgacagaaagtacacaaggggaatgctctttaaaaccaacgaggacaacaccaagacagtgcagatgatgtttaaggaagctaagtctaaacatggggtatgcggatgagggtacacacccaggtcctgg

SEQ ID NO: 450404 - DNA, 861 bp, Homo Sapiens
  misc_feature (679)..(679): n is a, c, g, or t
  misc_feature (681)..(681): n is a, c, g, or t
  misc_feature (745)..(745): n is a, c, g, or t
  misc_feature (756)..(756): n is a, c, g, or t
  misc_feature (760)..(760): n is a, c, g, or t
tcagcatgtgtcagattctgtaactatttctcctgtgatgtatcagtcagcttttgctgcaaaacagcatcagaaatctcagtggtctacaactagattcccattcttgggtagtctacaagttggcttctaggttatgctccaggctgggggtctgatcacgtctgctccacaacatgtcccgtattctgggtccctggttgaagcagcagcttaccttgggccgtgttctttctcatggcagaagcacaggaggccaagccctaccttgcaagcacaaatacagcccctgctcactttctgttggccacaacacatggccatgcctgacctctgtggggtgaggcagtgcatggccaaggaacaagcacagtccacacagggggctgtcactccgtgacctcagtattacaaaatggttctcaaggagtcgcaaaatgtgtggcagatcatccatgatttgtttcccgtgtgctttacgaatatcctgaaatttttaaaagctgtttccattagaagggatctgttggggatttgaggtgagatgagaaagaccctgcattccagcccctcagttagcagtggtgaggccggagtactccacacgggacagttttaggaaagtgctggaatccaaagtttctccggaggctatgcaaggcgctttggaaaggcgacngngacgcagggagcccgccatgtaggtagaagcagcagacggtgagggaggccatccccacctggnccctgcgaacnctgnacttcagtgaaggaagctgttgggatacaggtcattcagccgggcaggaaagatggggatggaagcccagcaagtttcacagggatccgggaagttgtgtt

SEQ ID NO: 450405 - DNA, 724 bp, Homo Sapiens
tattgtaccttcaataaggaagctgagcgccacaacagcttctcgagacactagactactatgggttgaatgaaatgatgcagtgagttgcttttggatctaaaggcagctcgaggagatcagacagatgatcatagactaaagcttggtgactgtaatcattccagttcttattatgacgattagatttttcagtcaggtcaggagactgagatttgtttctgggactgggccactcttcgccaatcagagatgtccttagggagaccttgttcaactgttgaatgtataagaagagcagaaactgtagcgtgtccactgaaagctgatttctctgcttttcaacttcctcctcagacatgcagttggacagaacctcagaccattccaggcgctcctcaggtgtcttcattgaaagactatcaaatatttcgaagtaaagccacgccaggtccttggccaactgcagcttcccacaagcgatgtgcctccatgtagaccagtagaggcgcgggtaagctccttctgtggcccggatttgcacatagcgtggatatcttcctgagatagtgaagactaaacttggatggaggggggacctgcaaggcacccactataaagggttctgctttcacccagaggagaactctggactgatccatattatctctaaggacatcagggtgaaaaggcttctttgcatacctgcttaatgcaggcgccg

SEQ ID NO: 450406 - DNA, 1087 bp, Homo Sapiens
gatgatataggagctaggggaagggggttgttgccttcttcaggacctgactggacagatggacctggctcaagcaactactctggatgcactttgctgtgtgggatgaactaaaagtgtctgaatttgctgataactttataaaactcactatggcatgcttccctcctggtgggccctaggatggatgacactcaagatactacagatgtgggtgcaggcatgcacacacacgatggaatatggccattcctacacaggtggggtagagagtgggtcagcagcctggcacctcacagaggtggggacctaagaggactcatgattatgcagagaattggattgggtctctgtcatagattgagtaatctcttcccttacctcaattccatctccacccatctctacatctgggcacagcaacccagagatggccaaaagcattcaagcctgggggaagatgtttgactattgctgctcttcaccagaacctcacacctctcctgggactggaacccttcagtgggtgtgtggccagtttggaggctggaatgatgggccagggtgtaggattcattctccatgtaaagtttcctttcatcctgcctagccatccccaaggtttatttccagaagaaaggaatatctctacttggatcaattctggtcatttcaagaggatggaggcctcaagtgtggggaacttcccctactccctggatgtgtgtacctagcacacttccttctcccacccctttttccagtggattgtttttctgttctcttctgtcctgtcttatactgcaactgtgtctcctaggggacagatggccttctttgtcatcttcactctccaccccagagaggagtcagagccataactcaatcactcagcccctccaaagatagtgatgtgtgataatctcataatgttgagaaccctgatgagatacatgtcttcctctccctacaatgcctctggggccaaggacacccattcttcttgctatcctccatccccttgaggcttccacttttttctttttaaggaacataacggcttgggacatcaagaattggcctgggg

SEQ ID NO: 450407 - DNA, 930 bp, Homo Sapiens
gggttgcggaagggctgtctacaccataatttggtgtcaaaatagggaagggatggaaatgtagtacccggatgtctttgtagaggactcagaaggaagtagaggagaggtcttaagtggggctatatgccaagaaagtgggtcggtggggctgagactgtcggctgagggttagggtagtgctggtagggtctggaagccggggagttgtcggtgtggggtcggaaagctggagggggtgtgagagcgagggtgtcagtggaagggtctatgttatcaaggcagtgtccaggatggaggtcagggcagaatccaggagtgggtgagaggacagtccttggcgcactcgggacatctggctgggcggagtcagatcggctttaatagagggagcctgaggaggctcccggggtgcgggcgcggcccagccgcctcctacttggctgcggctggcggtggggcctgggccgacgctggtgcggcctggatggacaggacgccctcgggggacagcgcggacgtcacggcagccggatccacgccaggcggcaggcggtagcgacggtggaactcgcgcgcgacgaatccgtgctcatccgggcgctcctcgtggcgcgcgtgcacctccacgtgttcgcccaccaccttgacagcaatttcctccggcgagaagtgcttcacgtctagcagcaccgaaaagtggccggggtccgtcggcacctgggcgacgggcagcgccacgctgggtgcgcgcaggtagtagggggcgagcgtggtggggcagagcgcagccagctcggcctccagcagcccctcgccgaagcgctggtcaaagaggcgtccgggcgccgaaagtccgggcaacggggccgaggcgcggcgcagccaagacggctgcacaggcacagggatctccatcctgcatcccgg

SEQ ID NO: 450408 - DNA, 1289 bp, Homo Sapiens
  misc_feature (220)..(314): n is a, c, g, or t
gccagtcagaaaatgtttattgagctcctcaccctgctccccatcctgggcccatctgaggaatattgagcacccacacagagggaccaacaaagaaaaggaacctggtggggttccagaaggaggagacataaggtggacatggtattcatgagaaggaaggggcatcaggagcacacttgggtgaggatctacaggagtaacaccaagaaaatgcttnnnnnnnnnnnnnnnnnnnnnnnnnnnnnnnnnnnnnnnnnnnnnnnnnnnnnnnnnnnnnnnnnnnnnnnnnnnnnnnnnnnnnnnnnnnnnnnagtatgagccaccacaaccagccccgtgtttcatgagctgttactccattccaggagcctatcacttgggccccctctggattcttgaccaaggtgtccacctccttcatgaaccggagacacagctcctcttcccatggcaaagcaatgcactgcacagtcaccagaactccgacggatcctcttaccgcctctgagaaatttttgtcagaactatctccgtagcaccccttgtagaaggccagttcctcctcgtcctgtagtgtcacgatagtgacaggcaccacgcccgcgggaaagtccaggaggttgtacagggtcacataagactgactttctgatgctagggaggaagagcctatatagaaggcagagcccagaactggcaccagcagcacatccaggtccagggacctccacttggctatgaactcttgctcatattcctccactgctgtgtgctgttcccacagtttcttgggtgtccccctatggctccagatagccaagaagtcaaagcagctggtgtccagtaggggaaggaaacaaactggactgagcctgtgggcttctcactcactgcagcctggggtgggaaagggggtcttctcctcctccctaaagggcatctggagcacagtggggtccagtcggtacatgtcttcactcagctggtcttgcaggcacagcgccaggctctccacgtcctggccatggggccagccaccgtggtcaccgatttttttccccttgatggcagaggcaattccagtgtagctgaggcgggaacctgtggtccagaggccataaacaccacagaagctggctggtatgcagatgctgtcacctgtgtcagtacccatgcctaggatggaccccctttctgccagcagagcccctcaccccctgaggagcccccacatgtcttctttaagttcagtgggctcaacatcgggccatagatgggagttgccg

SEQ ID NO: 450409 - DNA, 1106 bp, Homo Sapiens
  misc_feature (27)..(27): n is a, c, g, or t
  misc_feature (39)..(39): n is a, c, g, or t
  misc_feature (49)..(49): n is a, c, g, or t
  misc_feature (120)..(120): n is a, c, g, or t
  misc_feature (198)..(198): n is a, c, g, or t
  misc_feature (214)..(214): n is a, c, g, or t
  misc_feature (243)..(243): n is a, c, g, or t
  misc_feature (250)..(250): n is a, c, g, or t
  misc_feature (253)..(253): n is a, c, g, or t
cgtgaattcccccaaaggaaatggaangcttccccaatnctcaaccaantgccctgttgaaaactttccctcaagcctgaacagctttccttctgttactttcaaatgaatgacaggctncccaggaggaaagtttaggtaaacctctcttcaagtgctgcgtcccaaaagtcccaaagaactgtctacctatgaggngctctcaggacctggnacgtgtgatcacggtatccggggaagcangccagcntgngccctggggaggaggaggcgcccgggttactggctccgggctgcatcccctcgtctgggtctgtgctgttcctgcacttcattacataattttcctcttattccttaaggctcaaaaagtcttctactgctctcagtcactttatcctgggagtcagatgtttgcctggttttttagtgcatgtgaatacctacccagaattgctctgtgattttcaaaatgctaaattccgtagattctttgagaccagtgactttcactctttcaatccatttccattgggttgaaaggatattgagggggacatgcagcctggaagagccggaagctgacctgccttgccgctctgcttgccgctctgccgctctgccttgatggactcctatggacacaagcaatgccacacagcaccaacactggacagggacacactgtgatggtgggggcgggggcaaggcaaatcaatacccctctgtaatctggtcttgtataagccaaaccctccaagtctttcccaaggccctctcactgctgctgctgagctgctgctgggtcccagtggtgcacagccttccttgttgtgatgagccagtcgatggcctcaactttgctgggctacaggtgtgttcctggtggcccagtgttttgtgacttctttccacagctgttctttgagtttgttcaacattgcttccaagtcaaatgtgtgagcttttttaccgaaccccgaaccccgtgaagcccatggtgaccacaagctgcgggtccggtcccgatgcgtctgagcctgtcacttcgctgggcccagagcgctccatggctggccgcacaccgcagaaccagccacagcgac

SEQ ID NO: 450410 - DNA, 1408 bp, Homo Sapiens
  misc_feature (843)..(893): n is a, c, g, or t
gaatagatgtaccagtgactatgagcttatcatctggactgaaacagcagtcagtcattgggaacatggtgggaagacccgaggctgaaaaaagtggtttattaaattgtcggatgtcccataattttaatgaatcgtcacctccacgagaggcaaggacattaccatcataggaaaaagtcacgcaagaagtgtctgtgcccgagtcatgagcctgtttatagtggaacttaggatgaacagtcaaatttcggtcccagatctgtatgcttccattctggcaggcagctgctatgaggtttccatctctactatatgtgcacgtagtgggaatgacttttttgccttgcatcgtccgtggtttaaacacactttttttgcttctttggattttcaacttcccacgtcctcacagtcgcatcatttgagcaagtcataaattctccctttattttgggatgccatgagccagtatgaagcattgctgtatgacccttggtgttggccatgtccacaatatactggtctccttttatacattccattacttcaaaaccatctctgtcaatcaccttggcctgagagcttccagatacaacaagaatcatgtctcctgtgttactatactgtaatgacttgatctgatggcactcacagggctgaagggatcgaaatgccttaaaagaagcatccattccagcaaaatcccaaaacttaacatcatagtcatatcctcctgtcaccaaacgggcacctgagggatccagacccaaagcagacactgttttagtgccatgcttcagcgttatctcatgcgagtcaggaatcttgtgaacaggattnnnnnnnnnnnnnnnnnnnnnnnnnnnnnnnnnnnnnnnnnnnnnnnnnnnattaagaggtggaggtaaaggaccgaggatatcttcctccataaaattaactggttttcctaccattttagggggtaaaggagggccaatttaactcagtcatcagaagagttcagaaactctgttcacttttcactgctgctcgtatccctggaagatgatttggagcaatctctgaccacatttgatcttgaggatgttggctcaatatcttcattttgtcttcttaattctttctctctgttcatttcttcctctttttctcttgcttccagtgttttgcgacttctttccacagctgtccttcgagtttgttcaaacattgcttccaagtcaaatgtgcgagcttttttaccgaaccccgtgaagcccatggtgaccgcaagctgcgggtccggtcccgacgcgtctgagcctgtcacttcgctgggcccagagcgctccatggctggccgcacaccccagaaccagccacagggacagcccaaacaactgcaggggaacttgccaatccc

SEQ ID NO: 450411 - DNA, 888 bp, Homo Sapiens
  misc_feature (827)..(827): n is a, c, g, or t
ctggtcactcttaaatgttagaaagagcttctttgacaaaccactgacaaaaggcaggaccatgccattctcttgcatgaataccacaagtctatccaacagctcttttgagtcgtgatcgtctgcccagctttaaaattaagaagacatcttcgcctcatatgatcttcccatagagaacatgtgaatgaggcctgagtgagttttattcagatgatgcatccaattttgaatttcttctaaggagtgataaacttcataattatatccagagagggatcttcggtttctctgggtgtgcaagctgcttcccttctccagtgttttctgaagatcttctatgaggaccttgtactggatgttggcttcctgtaagaaggctaacagggctcgggaaccattttgggggatatggacatcagtaactgttccctctgatacataggagatactgctgggctgccacaggtccaccttaagttgataggatattttcttcagtgcatatgcttcctcttctgttttgggaataaatcttatcactttatcaccagcatagcggttgttataaaggtggctgtgccccggttgcagaatcttcaaaaagagccagcaaagaggcaggaaagcagctgcctggcccctgcgcttcccgagacacttcatagtgttaagaagagaggagttgaaagttacttaagcagccacccgaggctggaggtggctcacagcaccctctacacaccgcacaggttctccgggaagggggtgggcgaggaaggttgagagtgagccaaatgtgacacttctctccagctagcaagggnaaaaaaaagttcaggcagctgaggaagggaagttgctattacgacttggtcttgggatcca

SEQ ID NO: 450412 - DNA, 895 bp, Homo Sapiens
gggagactgctgcagccctaaccttcccagggctcagctctttggagctgcccattcctccggctgcgagaaaggacgcgcgccctgcgtcgggcgaagaaaagaagcaaaacttgtcgggagggtttcgtcatcaacctccttcccgcaaacctaaacctcctgccggggccatccctagacagaggaaagttcctgcagagccgaccagccctagtggatctggggcaggcagcggcgctggctgtggaattagatctgttttgaacccagtggagcgcatcgctggggctcggaagtcaccgtccgcgggcaccgggttggcgctgcccgagtggaaccgacagtttgcgagcctcggctgcaagtggcctctcctccccgcggttgttgttcagtgtcgggtgagggctgcgagtgtggcaagttgcaaagagagcctcagaggtccgaagagcgctgcgctcctactcgcgttcgcttcttcctcttctcggttccctactgtgaaatcgccgcgacatttacaaaggcctccgggtcctaccgagaccgatccgcagcgtttggccccggtcgcgcctattgcatcgggagccccccgagccccggcgaaggactggcgggtggggtagggaggtggcggcggcggcatggcgaggttcccgaaggccgacctggccgctgcaggagttatgttactttgccacttcttcacggaccagtttcagttcgccgatgggaaacccggagaccaaatccttgattggcagtatggagttactcaggccttccctcacacagaggaggaggtggaacgttgattcacacgcgtacagccacaggtggaaaagaaacttggactttctcaaggcggtagacacgaaccgagcaa

SEQ ID NO: 450413 - DNA, 1734 bp, Homo Sapiens
  misc_feature (199)..(236): n is a, c, g, or t
aaaggtgagggttcctttccaaaaggttccccaaaggttacccgttttttcccgtcccggggggtggtaaaaggaggggcccaggccccaagttaataattgcggctccccttatggggccccctttgtcccaagaaacctggggttcggcttaagcttgggccccctgagggaattctttagaccgggccgccttttnnnnnnnnnnnnnnnnnnnnnnnnnnnnnnnnnnnnnntttacatcattttcttaaactgtgatgtaaatttgacaagttaatggtaaaacaatcaagatgttgcaatcaattgtacatttaatggatgtacaatttttcttattcctccaagattagtgtgatgtttttatgttttgttttcattagagaatgaatcaattcctattacagattttaacttcggagatatttctttacaatcatcttccttcttataagaatggataattgaaattttaaattcatgcaaaggttctcaggcatatgttcctcttgaaaattttctttagtctcttcaaagtctaacatgaatcagaaaatgttaaccttcttgagtcgagagcaaatactggtgagatagtatatttctctgccatccagattttccagttttccaagttgataatttagccattagttcttgcttagctgttgcttcatgcttttggatttgagtccttaggtgtagacattggattatccttgaaaacagtagggggaagtgcgtttgtgtctttatgaaaagaggctgggggctcattgccttctactggcagatcatacacatggggcttcatctgactcatctcttggggttgaacagcctttaccatctggggtttcctcttctgtttgtgtggcctggtgccagtggtagatagtggcctctgatctttcttctgcttttctctggagctttggtgccggattactatagcacccaccacaaaaatgaccgccattgggaacaggaccccaaccacaatggagaagtggaagaccactgaggagtcatcgcagtcgggagggatccatccttcctcacattgacactggagctcatggtcacacacagcatgtcctttgcacttagatgagcaattggttgatttgtaggctttctcaatatccacacattctgcattaatgcaaaccttgttatcgccacacttagttccattggccaccatgcctatttcttgacttttgtcttcaggatcaaatgttttacatgtcaggaaagtcactatccgtcctttccagggcaaattatccgacccaccttgacagaacacttcccacacatggtatcactgaggaaaaagccaaatttattgcaggattcaaattgcagttttatataaatgctctaggactatggatatttaactgatggtatttttccctgtagccgagactcttagttgtactttacactcattttcccttatttctcagtaataggatgcctgaacgttagcacaatatattattgctcaaataaacagcattacctagaaccctgtacacctaatttttgccagttgccgaagtgctggcccatgagaagaaaacagaatcttaagcacaattctagaaggtggccttaaatgaggaattatcttgtatttctcaacattttctcattttttgcctgattggagtatgatagctagagaagctatcataggcctagagaaacacatggaaatga

SEQ ID NO: 450414 - DNA, 699 bp, Homo Sapiens
taaagattgaaaccaagtttactgtttcttgaacagaataggaagaaaatattttaaatggctgagctggtcattagactattactcatttatcttaaaggcagaaacttgtcaaccccaactacgtgaaacagagaagcatgatttgcttaagcaggcgacattagagttaggcctctccactgaagcttcccgaccgtcagcacgtggcagacaggatgcgcccatcattccgcaagggagaaccggagaggcccgggagagtccttggctgtcctctcatcgaatgatgggtgccgagcgatcattcgtcacagtcgggcggagtttcacagtggcaaaggggttttctccgctgagaaaaggcggctttgcagtcccgttggcatcgttaggagccgcggtctcgggcttggacgctggggccttaaaggtggatgtcgtcctggccgaatctgctctcctgtcggcagctgcccccatggacaagcattccaagtagtcgggtggggggatgacaacactgctattctcagacaagttcacggtgctgatgcttctcactggtgtggggctcaaacccaaaaaggacacagcacgtgttagataatgtctcaccaccaaaccccaaacatcctctgtgtccctgaccaaggacaacagtaatagtacatcaccaatcaaacctgatcttgatct

SEQ ID NO: 450415 - DNA, 1404 bp, Homo Sapiens
  misc_feature (641)..(650): n is a, c, g, or t
  misc_feature (1367)..(1367): n is a, c, g, or t
  misc_feature (1389)..(1389): n is a, c, g, or t
ttcgtagtggctcccggcggtgggtcaagggcgaggaagtagggagaggggtggtgtccggcgggggacgggcgcgaggggtcgctggagggggagcgacatgctgggtgcagaagatacgaggtcgatcgtcggaaaggagacatcgaggtaagccgcccgtgcctgcaacaggagtacataacctgattgagtaggtgtactagcgaggtttaagatgaagtggctggtgtagcgtagcatgagccagagtagggtgggcgggtcaagctgaattaaacagagcggcgcgggcgcgatgtcggtaccggtgtcattatattaggcgacgtgatgactcgtcatgggttacatcagcggcgcagagcgtcacacctcgcggctcgctgaccgtgagcgcgtcaacgatggagtagttatgcgccttgggagcgtcgtattaggcggtctacagtaggcgaggctgatggcggtgtcagcggaagaccggcgaagtactagtccgacaacgatgcggcaacgggcacttgggcctccggtgagggcgtcgtagctgccggtgccacgcgtagcaaggacacgatgtaaaaaggacacataaaaagagtgggcgtgacatataggagtgacggagagggcgnnnnnnnnnntgatgaggactcggaggggggcagcgggtataatagaaagggtgtcgcctaaggggcgtaaatacgacatagtcacactgttaggaatggggagtatgcgggcggacgaatgcttttaggtaggggagttcgatatgagaaggcagctacggaataaggaacaaacgtggatgtatgcggcagtccgtgtgaggaacgctgggtgagggccatcaaagaggatcccctcgctcatactcaggggcccttcaggagaaatgtgtcccagtccagctctcggggcacagaagcgggggctcggtggagaaggcctccctggagcccagcaggtatggggccctggcagcagggcccacgtccatatgctgttggtcagcaaagcgggctgggcggggatggctgcctcggtcgccatggtaacccctcatggcctcagcaaaggctcttcatagtcttgggggccaggccccaggaacctccatccagggtgtcccatccttgatgtcaggatccccaccaccaggcagaagcctaacttcagaaggctcaggaccactgaatcgtgggggctcccagccctgcagacagatgtggtggggggaggcagagagaggtagctccccacaccctgttctgagccccctttctgaaggagccagctaccatctggactggggggaggaatccgtagaattccggtccggtcccagcttatgntgcctcgtctgcgattttagcncaggttcgcctccgc

SEQ ID NO: 450416 - DNA, 808 bp, Homo Sapiens
attttttgaagttttgcctaaccatcccatttttaccagggtcaatccaaaattcccaaaggcggtgccaaatggaacccaaggttattggaaatgaaaataaaatttcaaggaattaaaaggttagaatttacctttatgagggtaactttttatgtaaggcaaaccatccacagtgttaagaaatgcctctctttccaaaagagtcattaaagatgcgcatttttcctagagctattatttcatgtgcccaaaaatcaagcaaaataaaatcccatgcttcctggaatattaaataccatgcagtgtactatttaagaaaagaacaaggttaactaactaaaagcagaactcacttattttttgctccctagccaattaaaaataagttcattaaaagcacttgaaattatatatttaacctgaaaaaaagttgctaaaattccaatataaatgtaaatatctttaacttgcttaacccagctatccccaatacagtgtagtggggcaaaatgttcaaaagaaaaatcatccagtgcacgtagatgggcaccaagaagctaagcttccctgagcgcgtacagagccgccaggcgactcaattcacgtgctccttttctggggatgaaaaggtgctcaccagatctttctatgcaactgagagctcctaaatcaagtcaaaggggaccatcgtactgaaatatgtccatattttccagtggtccaccagctgggctcagaggccaggagctgttccccttgcccaggctgcagaccaacctgaatttcagcttttaatgttcttacc

SEQ ID NO: 450417 - DNA, 1220 bp, Homo Sapiens
tctcaggtgtaaaacaaactgacctgaaatttttagtatttactatctgtgacaatgaccaataaaatgtgtaagaatataaaaaataaattcattcattgttggtagtactccaaattcaatgcataagaaccttttctatctaaagcattttcctaaaactgcaaactaaaaaatctgatatttaaaacatttatgtggtaaaataatctcatttgattatggatatcataaatagaatataaaagatattacatttcttcaaataccatttgtttcactgtgttcaattttgagtttcctaacatccattctacaggtcaatcaaaatacaaaggcgtgcaaatgaaacaagctattgaaatgaaataaaattcaagaataaaagttagaattaacttatgaggtaacttttatgtaagcaaacatcacagttgtaagaaatgcctctctttacaaagagtcattaagatgcgcattttcctagagctattatttcatgtgcccaaaatcaagcaaaataaaatcccatgcttcctggaatattaaataccatgcagtgtactatttaagaaaagaacaaggttaactaactaaaagcagaactcacttattttttgctccctagccaattaaaaataagttcattaaaagcacttgaaattatatatttaacctgaaaaaaagttgctaaaattccaatataaatgtaaatatctttaacttgcttaacccagctatccccaaaacagtgtagtggggcaaaatgttcaaaagaaaaatcatccagtgcacgtagatgggcaccaagaagctaagcttccctgagcgcgtacagagccgccaggcgactcaattcacgtgctccttttctggggatgaaaaggtgctcaccagatctttctatgcaactgagagctcctaaatcaagtcaaaggggaccatcgtactgaaatattccatattttccagtggtccaccagctgggctcagaggccaggagctgttccccttgcccaggctgcagaccaacctgaatttcagcttttaatgttcttatggtacagagtggtgcaggatggaagccattcagagcctgatgaaatggaacagaaaactcccattttctgtcacctgtcaacttcctgtaattcaaatcacccttgaataaaattaaatgtgccttctgtagttcagcatataagtcaggtgcaacctcc

SEQ ID NO: 450418 - DNA, 792 bp, Homo Sapiens
gggtctaaatggcagtgatccagtagctgcatgggtaaatgctaccccatgctgccaaagatcaactgttgctccatagtgtcgttctgatgatctggttcgttagcacgtgcgtctcgtcatacagtatcaggggtgcaaaatattcttctgtgccatacagagaaacaaactgctcatcatcttctaattctctaggctgcaccaaaatctgtgagtttgtacacagactgtccatcttcccctataacacgcatgatatttcctggcttgatatcacggtgcactataccattctctcgtagatgattcattccacccaccacatctcgcaaaacaattaagaattcagattctggtagtccataggcattagaaggttcttctaaaacagtgtataaactcccacatggacaaaattccataataagtactttatgtcttgttgttgtctcctcttcaatagcaaataatttgacaatatttttgtgattgagttttttcaacacttcaaattctctcatttgaacatccactggacgaaggaagcttatgttattaaatactttgatagcaaataaatcaccagttttcttatgtcttccacgaaagacatttgcagtagctccttggcctaaaatatcagataaaagccacagatgattagaagtgctctgcatcttggctggatcaggcaatcctcttgttataccagccgggtctccgccgcgccaccgccggcgggctcccgcggcctcctcgagactcaggacacttccggcttcgcaagcc

SEQ ID NO: 450419 - DNA, 835 bp, Homo Sapiens
cgggatataatactccctcagaagtataggaaattaaatgctacacagttttacaaatttgctaaaaatttgttgttgcacttcaaatttgttaaatttttaaatgtgccacgtttaatatcattacaactactttctgactgcattactcaacccccaaggaagcacctggtttcagggattgcatccctttcccaagacgtgcacttcactcagaaatgcagcagcacaaatactacatgttagttctccggttattagttgctaaactgtttaagagccactgggcagctggaagcctcgaacccaaaggcattaactgcttaccaaaagaaattcagtctgacaactggcctcagcgttgtcttgtaaggacaaacagctagagcaaagtgctgggaagattgctgctctgccagcgcaggcaggtagtctttgagtgcttatacaggtggctggactgactaaacctcttgccacacttcaggcaggcgtaaggcttttcacctgtgtgaacacggatgtgcttcttgcaatctgtcaaagtcagaaaagttttgcagcagattttgcaggcatacttgcgagctccctctacaaccaaaacattgtgctctgataaggccttcttgcactttgacagaacatctgcagatgccctggtcaactgtggagggccaggctgggaaggatggccattttcaaatgaggacgtagctccattcatcattagctgagaactggtagagttttctgggatctgtgagctcctgacggaagttacaactggcattttgggagctatgcggcggtagtaaggaaagttactggctcc

SEQ ID NO: 450420 - DNA, 300 bp, Homo Sapiens
gacggccgcctccgggaggcttggctgcggcggcgaaggtggagagcgcgcgcttcgtgatgcgggaggcgatggccatggaaggtcgggctcggaggggtcgctggaaagcaacgaaaagagacgccggctgctcttctcccgtgaccggacgatggatgagaccaccgaccagcgaacgagcgacggatgagaggaatcaagaaccgagtagcgctagaggaggaggaagaagaagtcggagacgacgctggtgttgatcggtgcagtgttgaggctgggagcgagcgaatgcgtagg

SEQ ID NO: 450421 - DNA, 896 bp, Homo Sapiens
gctgctgcggtgactctacaggatctccaaagtgctgggattacaggtgtagccaccgtgcctggctgcatttcagtttatttttcagtaaaactggtcaaccatccacctcactgcactaccgtggaatgactttaaaattttgcgagagccatttgggcccacagtcaccgcttgctgaagcagatgggatgcctggtccaaggtcacgattattaaagtagacacacggggcactttgacccacctgtagtacatttctttcacagcaaggcagtgcaaccggtagcacatcgggctcttttagatgctgctccagccttggtccggtggatcatgcttggtttagaagctgggttgtctttctcctgcccccagtcctgtctttgcttttatagtgcatcatacaccacgtagaaccgagccaggttcctgccatgtggacgctgttcctgcctgagagtctcttagaggaaggctgggaacactgtggaaagactgggcatctctgcaggcggagctgaatggatgtgaaacccctgtgggcatgtgcttccgagttcctcagcaggcatttgtagttcttggtagaaagttcgctttcggttctgtacattctttaagacaaggtctcattctgtcacccaggctagagtacagtggttgtgatcatagctcactgccgtcccttgaactctcagactcacgtgaagcctctctactcaggctccgtgagtaagttgagacatacaggcgctttgccgccaacccgtgggttaatattgcattcttttggcaggagacaggggttccattacatggccaaggttggctcaaactccgggcttgaacatccttctcaaagctcccaaatgctggattacacggctaacaca

SEQ ID NO: 450422 - DNA, 1005 bp, Homo Sapiens
  misc_feature (13)..(13): n is a, c, g, or t
cgacgcgcgagancgggaggggacgagggcgttgcaatcgttcggggcgggggctttccggggagggggtgctcaggtgcaccagcggcggcggaccctcagactctgccctcccctccctttaacccccttccagccggacgggaggcggggcagggctgagcatttgtgacacctacatttccgtggctcccttcttttcccccgacccctgtttatctcttcgccttccagaagttcttttccatcaggccgtcgcaccttgcgtgggaaggagcaccccacttggaagcaggaggcggggttcagatcttggccctacccctcctgtgttaaagtccgcgagcctcagtttccctcacagtattttttgcctcgccttacccggttttgaggatctgtacgagaaagagaaaggaagtggacatttgttgaattcctgcatggccaaataccacgcagactgcttcatccgccacgtttaatccttattacttggtgttctcagaactcccatttcatggattcttaagctcacagagtcagtgaataacagaaagggattcagatctagccgtttagctgcacagtggagttcttctccagagtcttcccttgtctgggctctggctggaactattcctcagccaaatcctcgccccagaacagtgcttcctgtttctccagctaagaagtctccctttcagtttccttcttccagcacggagtacactgctctgcctccacttagattacttcagaaatgaaatgcagcaaatatttatccagcagtgcagggagttgaacttttggagtcgggaaccttggattcttgttctggctctgccacttactgtgtgggcttgggaagtcctttgtcttctctgagctttcttttctcttggcgtaacagcgtggctcttgtcccattctccctccctggtttccagcagggtctcccgggaggtttcagccccttgttccccatgggcactggcagtcagg

SEQ ID NO: 450423 - DNA, 1220 bp, Homo Sapiens
gcatcccatggctgagggacagccaggatgacacttaggctgtctctcactccatcctctttggggattctgggatgctctcagagagcggggtgaagcccagcaggaggacatgtctctcgtaggccttggtctgcttgaacatggtgtcagtcccatggaggtggtccagctacacccagcaccccatagcactggttgaacttgagatggtggtagtcgtggaattcaggcgaaggcaggaagggaaggtggtagccacagtgggagtttggtggtgatgagtgagggcccaaggaaaaccacatggtgatggaggacaagtgggagcccattactaatgggcccactatcaccggtagcatgttggagactgcatgctctatagggtgggcatagagagagatcacgcccaatgggagctgtccactcatggtgtttcttgtggattttcttgtagaatgttgggtggtgaaggagccggtgtgaatagtaggacaagacttcctcgatcagcgtgaagatggccagctccaggaggaaccagtggaagttggttagctcacggcggcaggggtctctccaccatttgaggaagggatagaggaagaccaccatggggaaagatatcatgcactggttgaaaagaactgtgcggatagactggcgcagtttcacaggatccacaggttcattcttgccgacctgaattcggtagcgagagatgaagttaggttttcctgttgtgtcaaccaccaatagaagcccattgaagctccagaagaagagacaaggcacttggatggcacctataaagaagaggatccactccttcccttcaaatgtagtcagcagcctctcccactgggcttgccaaaagtagccagaagcaccccaaaatctctgaagatgccatgtcactgagttccagaaggccacaaatgagagaagtccagagcccaggatgaaagctgtcctcctcatagagccccagatgtgtccctcctgctttgacttttcattgtgtagcatatgtccagcttctcctttcatctctgcagtgggctgtgtccaagctgctgaggtccttgcacaggtcaaatctaagttctcttccctttcagcccccgctttggtggctgttgctgctgcggctctgctgcaggctaaccttgtttttgctcgggtgggaggcatgaccatggtgatctcattacaga

SEQ ID NO: 450424 - DNA, 923 bp, Homo Sapiens
ggttttgtgtctgaattttggtatacaccttgtacaattgagaattcatcaatgtaaggtgtcattgctgaattaaaaggtctggaattgcacaatcatggttccttcaaggccatagaggttcctaattcaacccactccctccccgtgcccttagggaagaagaggtttacctgacaaaagtgcaggtcccaggctcagctgtttttcctaagccattgggccttcaagacattgggaaattcttggccctagccggatgtttaacagtgctcaaccattgcttttgcaaaagcgtttcttacgcctcattttggtccggtgtctagccatacaagttcactgatcctcctcagcccaggtcgcataactgttggtatctggtaaccccgcaagcggggaccgagtcaatctggcgcagggtggcgcggtccaacacgccgctgacaggtagctgggacacccactgaaacgctctgatggcatcgctgaatcgagtggaggttgggagctttgggggacctgttcattgaggtatccgtacttctctaggaatgcctccgcctccttgcgcagctcctggcctccgcgctccgcgggctgggcgtccaggtggccccacagtagcagctgacagggcgcgcagcaggaggccgacgcgcgcgaccatctcgccgcctccggtgcagcccggctcggggagctactgcgcgcagggaaccagccaggcagtcagccagcgcccgggacccccggggatgggactgctctgcgccgcccccgcacggagagggactgtcccggggtttcgccagtgccctagctgcgcgctctgggccgctcctccgctgcccttcgccgggagccggccagacgtcgtccagcccgggcagtgcctgcccgcggtccgccggccccgggac

SEQ ID NO: 450425 - DNA, 1431 bp, Homo Sapiens
gaccccctttgaagaagtagaaatctccatcagtcaatgacactgccgcagcctcaaatgttgggggcagcccgacccatctttcctgcagtggacggggcttctgagacgttgccatcagctgccacctcccagaaatggctccctgtaaaaatgtacagttgctgttgcctgtctacagtgatggcatcgaaggaagagtggcagtatttagggccctgcgtttcagggcgccttccttgggggctgtaggagtcccaggtctcaaagtcagtgaacagctttcctgggagctggacggccactgagccccctaggggcttcccatacaggctctgcacggccagcacgtcgtcccagctgagcagcgcgtcgcggcccagcctcttgtagtagggcgccatgagcgcgcgcggcgcgggtgagtgggtgaggccaagcgtgtgaccgatctcgtgcgccagcaccacgaacaggttgcgcccgcggcggcggctcagggaccagcgctcatcttggtcgaagtgcgcttcgccgcggcggggcaggaaggcgtgcgccaggggcgccccctggggccatcaaaggcattgcccagcccatcgttgtggtccccttggaagaaggtgagccggatgtcagcggggcctgtggctggggcctcccagaactccagcgctgagacgttgctccacaactggaaggcggcgcgcacggcgccccgaactgccggctccggcagatgctcaggccagttcaccaggcggtaggagaggtgctgcttgtaccatttgttaccttgctttgcaaagcgtttcttacgcctcattttggtccggtgtctagcaaacaagtcactgatcctctcagcccaggccgcataactgttggtatctgtaaccccgcagcggggacgagtcatctggcgcagggtggcgcggtccaacacgccgctgacaggtagctgggacacccactgaaacgctctgatggcatcgctgaatcgagtggaggtgggagctttggggacctgttcattgaggtatccgtacttctctaggaatgcctccgcctccttgcgcagctcctggcctccgcgctccgcgggctgggcgtccaggtggccccacagtagcagctgcagggcgcgcagcaggaggccgacgcgcgcgaccatctcgccgcctccggtgcagcccggctcggggagctactgcgcgcagggaaccagccggcagtcagccgcgcccgggaccccggggatgggactgctctgcgccgcccccgcacggagagggactgtcccggggtttcgccagtgccctagctgcgcgctctgggccgctcctccgctgcccttcgccgggagccggccagacgtcgtccagcaccgggcagtgcctgcccgcagggtccagccaggccccaggg

SEQ ID NO: 450426 - DNA, 821 bp, Homo Sapiens
gtttgcctttagcaccattttatttggtttgtcccactaaaatgactcgagaagtgtttagacaaactccccttaagatgtgcactccatctttaagaacgtgttagccttaactttgaggttctatatagtcagagactatgacaccactaaggttcagaataaagtttaggccacataaaattgctgtttaatgtagtcgatggaagactttaaactatgcttctagcttatttttccctcattcattcagcaaatctctattgagttcttcagtgagaaggagcaggcactgggcctggaatggaaggcgggaatgaatgggcctctgatggtgagaggtgacggggtccctcagctgtgagatgcaaggggcgccttgcagcctccataatatacatttgactttgcaaacgtctagacatgttttctgaacctttttcaggacatttcaacctcgggactattcatattagtggcctgagaggtgtttgttgtggggccaccctgtgcatggtagaatgttcagcagcattcctgccatccatatccattaggtgccagtagcacccccgctagagctgtgaaaaattctctccagacatagtcagatgtctcctggggccatatcacccctccgttaagaaccactgatgtcttttacaaaccaggagttatcctcctggtggttaatatggtgtaaccaaagaatcttgcactcaatgcacagtgtgatgttaactaaaacgagttaaatatttaggaggcttgacagctacctgcattgtagaacccttttcttatctcagtgggaacctttc

SEQ ID NO: 450427 - DNA, 1315 bp, Homo Sapiens
  misc_feature (1097)..(1097): n is a, c, g, or t
  misc_feature (1109)..(1109): n is a, c, g, or t
  misc_feature (1115)..(1115): n is a, c, g, or t
  misc_feature (1265)..(1265): n is a, c, g, or t
  misc_feature (1279)..(1279): n is a, c, g, or t
ggggttacgcgcgggcgcactgcgggggccaaggaaggaagaaatgtggtcgcggttggtgtggctgggccttcgggcccctctgggcgggcgccagggcttcacctccaaggcggatcctcagggcagtggccggatcacggctgcggtgatcgagcacctggagcgtctagcgcttgtggacttcggcagccgcgaggcatgtggcgcgactggagaaagctatcgccttcgccgaccggctacgcgccgtggacacagacggggtggagcccatggaatcggtcctggaggacagatgtctatacctgagatccgacaatgtggtagaaggcaactgtgctgatgaattactacaaaactcccatcgcgtcgtggaggagtactttgtggcccccccaggtaatatctctttgccaaagctggatgaacaagagccattcccacacagctgagtagctcattctggaaagggggtactctgtgaacatgtggaagcattaatgacagtatttttttactgtgaatactaatgttcctgcttttttcagtcccctgaaaaaatggatgctcaagcatttcttaataacagattcttctgaagacagaattgggaaagatctggccccaacaaggcagtgagttcctgatgctaactgaggtgaaagaaaagcaaaagtcagcttccaaggaattcacttaacaggcctgttcagtatggaagacattatttatctgcctttaactccccccaaaggaccataccaactgcatgaaagtgaacttttctatctacgtaactggtagacggagcatcttgatcactatgtgacaaccttggctgtcatttttagttgccatttgcattgatttgagcagccctatctttaccgaacatacctgaatttgttcctgggctcccactttcttcccagaagagggctaacttcctactaaggtctgaagagtgttgaaagtagactagagcttgggaactcctaacctagaactatctgccatcccacaaagtgattatatgccaaagggatactagtcatacctagtgtttctctttctgaaaagagaacttatcctanaattagccctgngcctgngacaaaggagtcctctccgcccccaaaatgattattaaattgagatgagtccaggataaaactcagataccaaggataaatgaaacttatttagggataaaaagtgggctgggcgcagtgggcttcactccctgtgatccccagcacttntgggaaggctgaanaacgggcgggatcacaaagggtcagggaagatccag

SEQ ID NO: 450428 - DNA, 964 bp, Homo Sapiens
  misc_feature (186)..(186): n is a, c, g, or t
aaaccattttcaatttggccccagcatttggggataaagaaaaaaatttttataaggcagctttttcgcaccaaagtcatctgggtgattctgcgtggagaccatccaattatggatatgatccccagcagatgtaaagttacgacgaatgtgtctctggctaagagatgccttctcaatcttgtntgggaaaaattggttccccataagaaatgtacctacgtcaaatgccaagattttaacattgaggtccactgctcttttacgcttttctttgtctagatggattccactaatttcaaaatcaaacataaacagttcagccactcgccttgtttctggatcaagggaatccacaagttttttatcagctagtaatttttgcaaactttgatataaatccacatttgtgttcaacttctctaccatggtgccaatacttctacaagcttcttccgcagcttctctgaatgctggctcagggtgagcgattttcacaaaatcagccaagtcggccactctgcataaggaatccgagagctcatcgaagatcagcacggtctggggcccaggtggggtggaacatgcacggtccacaagcaattctgtctttctcaaggctttttcttgtgcaatatgaaatccttctggggcactcagctcaggaactccaaaaagaccccggcgctcgccgaacaggtccaagcggctgccctggggcttgacattgaaggcggcgcccacgggagaccagctggtgctgacccttcgggcccggatcccggcttcgaggcttccccggcccgcccggcggggcggcagagctgctgctctggctcccaagccgcccagccttccgacgcacagcattctagcaccagagcagtcccttcctccaacgcagatccctgccctgctgctttcgctgggagcgcgcgctatcccgggaattccggaccggtcc

SEQ ID NO: 450429 - DNA, 863 bp, Homo Sapiens
tctgggcccttttggtgtaccccctggcgagcaaagtgaagatctcagcctcagccttcactgctggcaggaggagttcctgacactagcctgagattgcatccacactggcactgtcccaggtactgatacttgctccagccatggctctagccctggcactggcaactggcacttgcatttggtgctggtgctgatgcttgcttcagccatggcataggccctggaactggaactggcactaacactggcacttgtcacgtcacccaacggcagctgccatctcgggcacggggtatctcctcctcttctctcaatgcctcatttactgccacggaaaggaactggggtgggtgtcattcactttggccacaaactccgggacttccatctgtcttgtttcctttgagagcccccacaagaatacctagagcgtgggattgctgtgggacacctatttgtgcaccagatactcctgctgcacactagctttggtgatgagcttcatggactccccaaagacgaaatgctttttagacgaaatgtgcctccaacaccctcaacacctcccagaccacctcctcggggacacagctggcctgcatgaagatcgagtccagagtaatcatcaggagccgggtctttggtgtgccctggtcgcctgtcaggccccaaaccagggcaggatcgatttttctgatcaagacataggagttctctgctggatcaagttccttcagatagaacccaaagactaactcggggaggtcagaggctttcttgaaaatctcagggaggaagctcctgtaccttttgatgacatacttcagcatgtctgcccttttgatcgccagccgtcttcc

SEQ ID NO: 450430 - DNA, 877 bp, Homo Sapiens
acaggggcacctggtaggttttaatgcagcgcagctgaggtgccgagttcagcatggccgatgcttcccagcagtgacgtgttcatctgcctaaaagaaatgtggctgtcagtgtttgagtaggtggcaagatatcttccatcaggagcaaaagccactgcagtgattggtcccttgtgtccatggattgtctgacattttccagtccggatgtagtacagggccactgaaccatggcgagctccaactgctattctgtgattccgctcataatagctgaccatgtagaacctgcagatggctgggaaacattcttgaagacctttctttttaactaaagatccttcaaggcagtacataatgatgtccataacctccacgagaagatccacaacatctgtgggcatcttttcaataagaatttcaatgactctcaaaatttcccctttagctcgtgcaagagttgttgtgtgcatattctgctgtgattgggtatttgctgcaagagccgtatgtctgtgtacctctttggctatggtggtgatgaaggcgggtggtctggcggtggccatgagcgagagggcatgcctcgcagagcgggccgagctcagctgctgggctcagagcgcaaccccattgtgatgttggcacgttgtttctcggcatcggcacgaagttcgagaagccccatcagaacagcggacacatccatgtaaggctcccaaacagtgaacccacgtccaatcagatcaatggctgttcttcggatagtgctgtgtggaggaagtttggggcttggaggctgtagcagaagaaacgtcagtgccttgcaagtatgtctggccagcgagtagttggatccaccactagtcaaccc

SEQ ID NO: 450431 - DNA, 1326 bp, Homo Sapiens
  misc_feature (1184)..(1184): n is a, c, g, or t
  misc_feature (1282)..(1282): n is a, c, g, or t
  misc_feature (1316)..(1316): n is a, c, g, or t
aaaagtggcttcgtaaaatagaagagcagtcactgtggaactaccaaatggcgagatgctcggtgcacattggggtgctttgggataaaagatttatgagccaactattctctggcaccagattctaggccagtttgttccactgaagcttttcccacagcagtccacctctgcaggctggcagctgaatggcttgccagtggctctgtggcaagatcacactgagatcggtgggtgagaaggctaggatgcttgtctagtgttcttagctgtcacgttggctccttccaggttggccagacggtgttggccactcccttctaaaacacaggcgccctcctggtgacagtgacccgccgtggtatgccttggcccattccagcagtcccagttatgcatttcaagtttggggtttgttcttttcgttaatgttcctctgtgttgtcagctgtcttcatttcctgggctaagcagcattgggagatgtggaccagagatccactccttaagaaccagtggcgaaagacactttctttcttcactctgaagtagctggtggtacaaatgagaacttcaagagaggatgttatttagactgaacctctgttgccagagatgctgaagatacagaccttggacaggtcagagggtttcatttgtggccttcatcttagatgactggttgcgtcatttggagaagtgagtgctccttgatggtggaatgaccgggtggggggtacagaaccattgtcacagggatcctggcacagagaagagttacgagcagcagggtgcaggggcttggaaggaatgtgggcaaggttttgaacttgattgttcttgaagctattagaccacatcgaggctcagcagtcatcccgtgggcatttggtttcaacacagaaccctagcatcctactctggaaactggtctcggagttaaggcgaattgttcaagaacacaaactacatcgcactcgtcagttgtcagttctggggcatgactttagcgttttgtttctgcgagaacataacgatcactcatttttatgtcccacgtgtgtgtgtccgcatctttctggtcaacattgttttaactagtcactcattagcgttttcaatagggctcttaagtccagtagattacgggtagtcagttgacgaagatctggtttacaagaacnaattaatgtttcattgcatttttgtaagaacagaataattttataaaatgtttgtagtttataattgccgaaaataatttaaagacacttttttttcncgtgtgtgcaaatgtgtgttgtgatcattttttntttttaggac

SEQ ID NO: 450432 - DNA, 1866 bp, Homo Sapiens
  misc_feature (58)..(93): n is a, c, g, or t
  misc_feature (151)..(151): n is a, c, g, or t
  misc_feature (160)..(160): n is a, c, g, or t
  misc_feature (239)..(239): n is a, c, g, or t
aataagatggaaaagaggggttttattttattaaatattatgattaggctttggctcnnnnnnnnnnnnnnnnnnnnnnnnnnnnnnnnnnnnaccagtaactttaaaaaaatatattaaaccatatccaaggatcctaaatatattattnctccccaanaagctagctgcttccaaacttgatttgatattttgcatgttttccctacgttgcttggtaaatatatttgcttctcctntctgcaatcgacgtctgacagctgatttttgctgttttgtcaactgacgtttcaccttctgtttcaccagttctggaggaattgttgaacagcttacagcactgcctgaagaagtgatactcagagttcttgttctatactgattcatagctcccacattttcttcatctctgaaaggcctgaattctctatttaatgacgacaaggcaattagatgagggcattcatcttcatactcgtcagagccagcaggggactcctccttgaacctctctggaccatcttggcctgttgtaattttccagttttgtttttctccctcagaaaattcagttacagagttgttttcaacaacctgcccttttatttcttctaaagcttgattgaattcagtcatttcaaaactccgtgcatcagcactctcttctgataaactgtcttcctttatttgttcagggtctccagatgatctgcaatagcagccctctgattcttctagacagttccgttcactttcattttctgacctgtaaacctctgctttttctgccacttctccatctgaaaatgagaattcagatccctcttttgtttcaatatttttatcatctggacctaatggatgaagcagttcatcatctgcctgcatttcctttgtgtagccactggcagaaacctccacatcaagagtgtcttctctcctgatatccttaaaagttggaaaaagctcactttcgtagctgaaacgtttcataaagaaatctttaatgcatttaacatctctgtcaaaataccactcagcattgggatgagaagttgaaaccatctgtggaaaatcaatcatggtgatatggtcactttcatccaaaatgagattaaattcattaaaatctccatgaatcagcccatgatttgcaagtttgacaattagttccatagcttcatcatatactgatgcaggatcttcaacatggtgtatctgacatagtggataaccatttatgagttccatgaccactgcatgacgattgtaatcaattggctttggaactggaaatttcctctcatacaatgccttcatataggcaaattccttcatggcagagagacgagataaataaagccaagacacattgtgcctatgtttatgataatcgcgtttgtttttcaaatttcgaaacgaggttcttcctagtctgtgaagctttaatgcaaattgttgtccttcttcatttgcaacaatgtaaatatctgattctttgccaacacccatctggtttccaacagactcaactacttgcctagaagaaagtgttttcaaagctaggtaatcatatcctgcatttgtcaaccgatagccctggacagttttggtacgctcccaagctatgagtttatgtttcactaattctcttaaaactttattacagccaccatgtttaaggctggctatagaagcaatcaaactgccgggaacaatttcatggttcttcatgcccatttcaaccgcggtcaagaccctgaagtcatctcggctcatgtaacgcaacttggccacattcactttccccatggcggccccagtccgaacccagatgcctctccgacgacagccgcaaagcgtccc

SEQ ID NO: 450433 - DNA, 1297 bp, Homo Sapiens
tgtaacaaccaccaacagttcatcgtcaggaattgtccccattattattggttcagaacagtctatacggcacaaatatggtttattaaatggattcagtatctctggtttgcagttttctattaaacagcatgacaaatgttttcaaaacttagctagaataataactgaaatttctgttgtcagatgttcagactgacacatagcatgatgttagagaatatatatatacaatatgtctcaagtagtttgtttttcaaaacctttttaagtatgcatacagtgctaagtcccattatagctacttggttaaagtcatgttattttacgtattcatctacactgcctcattgctaaacgggcttgaggttgatgtgcttgatttttaacaaaccataaatgcatagatatatctaacaccctagccagaagattcttttgtcattcattcataggtaatactttgaccccgtgtgcattgatataggtgataagaattttggctctgtgttctattacatcgataagcttttcaattccttgtctacctccttgactttcccaatacactttatcaagaaacagagactgaagaagtttctgccgtaagtgctggctcttcaaaacagaaactgcagaagctggaaactctttgatgccttctaacaatttgaagtttaagttatcttcactcctgtcaaagaaacccttgttgtctataaaaaccaaatgccttgggtcatgctttcgctggataatgtgtgctagagccgcagaaccttggtcatcacattttggcctcaatccattctgtacacaggcatcttccttgcgaggtctgaatccacagcaatttgtatctaagcgattataaatctgtaacaaaaaatcaaagagtgccatcttggaccactcatgatgatgtatttcagtacaacctgattcaggcttgggtactcggccattctgccagcatttctgtttcagcaactgctgataagttccccaggtgagcttaacagaagaatgggtgtcattacttgctgaagataaagatgcatcccaaagaatgatggggcatgggcggccatcttggatgaactctgctttcctgctcacagacggcagggtcctgttgagccccaggatcctgtctaggtggaaggcaaacacctcactcatgtccaagggctgcttgagaagcccacaggggctagggccacagcggagcacagcgccaggtgcgcccccctccagcaccagcaaacgggctccgctcctagaggatacagccgct

SEQ ID NO: 450434 - DNA, 741 bp, Homo Sapiens
ctttcccaatacactttatcaagaaacagagactgaagaagtttctgccgtaagtgctggctcttcgacacagaaactgcagaagctggaaactctttgatgccttctaacaatttgaagtttaagttatcttcactcctgtcaaagaaacccttgttgtctattttatcctaatgccttgggtcatgctttcgctggataatgtgtgctagagccgcagaaccttggtcatcacattttggcctcaatccattctgtacacaggcatcttccttgcgaggtctgaatccacagcaatttgtatctaagcgattataaatctgtaacaaaaaatcaaagagtgccatcttggaccactcatgatgatgtatttcagtaccacctgattcaggcttgggtactcggccattctgccagcatttctgtttcagcaactgctgataagttccccaggtgagcttaacagaagaatgggtgtcattacttgctgaagataaagatgcatccccaagaatgatggggcatgggcggccatcctgaagtgtttcagagatgagaagcattcatctctccacattcaggtttgtcaaaatgatgcagtactggactctctagagaaatctcaacaagtgaagagataaaattctgtcacagtggtgagaaagcgggttttaaaagatatgtgggtgttcatgtgaattccgctctcgacgaattcgagctcggccgatttggcctgat

SEQ ID NO: 450435 - DNA, 1042 bp, Homo Sapiens
attcttcggatcatcccacccaccctgtgggatgggaagaagagaggggacctcccaggggagccagtggccttcccccaggggctgccggctggtgctgaggagcagcggcagtttctcacagagcagtgcatcgcctccttccgcctgtgcctgagccgcttcccccagcactataagagtctctaccgtctggccttcctctacacctacagcaagacacaccggaacctccagtgggcccgcgacgtgttgctaggcagcagtatcccgtggcaacaactgcatcacatgccggcacaggggctcttctgcgagaggaacaagaccaattttcttcaacggcatctggcggatccccgtggacgagattgaccggccgggcagctttgcctggcacatgaaccgctccatcgtgctgctgctcaaggtgctggcccagctgcgggaccacagcaccctgctgaaggtgtcctccatgcttcagcggaccccagaccagggcaagaagtatctgcgagatgctgaccgccaggtcctggcgcagcgggccttcatcctcactgtgaaggtgctcgaagacacgctgagcgagctcgcagaggggtcagaacgcccagggcccaaggtctgtggcctccccggagccaggatgaccaccgatgtctcacacaaggccagtcctgaggatggccaggagggcctcccccagccgaagaagccccctctggctgatggctcagggccagggcccgagccaggaggcaaagtgggcctcctcaaacaccggcctgtggccatggatgcaggagacagtgcagaccaaagcggggagcggaaggataaagagagcccacgggcagggcccactgagcccatggacacgagtgaggccactgtttgccactcagacttggagcggaacaccagccctgctgccaggtcgccctgcaaggggaccggggcccccgagagccggtccactgaggctgtccctggaaggagctgagcatcagtgcccggcagcaaggcaaccaggtca

SEQ ID NO: 450436 - DNA, 1182 bp, Homo Sapiens
accattcaactggtgtggtgcggttcactaacactcctgagtgggggggtgcgacgcgacggaacgcaccgcatcgatttctggcatgcccctcccgccgctcccgcgaggtcggctagtctcgatgccaaggtgaagagtgcgcttcagcatgggggcaagattatagatgaaacggctggtgtactcccctttgcattcttcgagaatcgcccctctcccttacccgcctcacacccccgtttgcgatccaccccgtccgcggccgccgggtatggccgcacacggcggcttcggcaggcgggtgcgccgtggcggggcggcctttggcatgttcgcgtccgtgcctagtatccgagccatttcgtccctatctttgcggggcacggcggtcacttgcgggggcaagcctggcaaccacggggtggtgtccgcttcccaagttggaaggggcaaaccagtggcctcccctcgtgtcccatgggctcagtgggcccctgccccgtgggctctctttatccttcccgctccccgctttggtctgcactgtctcctgcatccatggccacaggccggtggttgaggaggcccactttgcctcctggctcgggccctggccctgagccatcagccagagggggcttcttcaggctgggggaggccctcctggccatcctcaggactggccttgtgtgagacatcggtggtcatcctggctccggggaggccacagaccttgggccctgggcgttctgacccctctgcgagctcgctcagcgtgtcttcgagcacccttcacagtgaggatgaaggcccgctgcgccaggacctggcggtcagcatctcgcagatacttcttgccctggtctggggtccgctgaagcatggaggacaccttcagcagggtgctgtggtcccgcagctgggccagcaccttgagcagcagcacgatggagcggttcatgtgccaggcaaagctgcccggccggtcaatctcgtccacggggatccagcacagatgccccgccggtgctccgccgtggcatctgtagcagtggagctagggcgagcgcacgggccatggccgcggaggctcgttcgctctctcgctcgcggcgggccggggcggggcaggcgcggccggacggggcgccgatcccgggaattccggaccggtaccac

SEQ ID NO: 450437 - DNA, 973 bp, Homo Sapiens
tcggtggccaagggttgcccggtgcccaggatttgttccccgctggcctccaagcctgggtgaccaaagcctgttctccaaacaaaaaagtatttgttggaaaccctgttgtgtgttaggtactagggatacagcagtcaaccattaagagccaggaaatctaaaaaggtgaggaaatacacattctaagaatgtaaggaaaattttatgtcaatggtaatgatatggagaaaaatcaagcaatatggactccctatgaagtcatgcagaaattaaggtacaggggatgaagatatcctagagataaaaggcatggtgatattagtactgatattcctgaaagagaaagctgagtgttgtaggaaggatggggttttaattctggggccctctcttctggcaatatagagacggagaagggaagtcttaacatctgtatgttcccagaaaaatgtatctccctaattcttgtatgtaattttgaaggttcatggacacttctgaagccatttcatacgtattttaaattgcacccaagaagaaatatctgagatgtttgcattcccatatgtattaggataggctgagttgtgctgcagtacaaccccaaatgccaactcttaagggaccggggccaaaagtcccatcaaggtaaagttttatcctccaagaccaggctctctggaagtgctatatcagatttggatgtttgctcctactgttctggagacccaggaaccaaaaggatatcttctgttttccacatacttaatgtagagtggtggaactgtatctgcaacaaacattcttcacaaactcacgttttcctcaagcggcaccctcggcagcgctcaagtgagagtattccatccttggaatactccgagaaggttcgagccagaagttggattgcctgaaatgccgcttccagcgcactaagtaacttgaactgcgctaagcaactggccagaat

SEQ ID NO: 450438 - DNA, 1377 bp, Homo Sapiens
  misc_feature (48)..(84): n is a, c, g, or t
gatgatagatcatatagggcgactcgggctgtatcgcggtggcggcgnnnnnnnnnnnnnnnnnnnnnnnnnnnnnnnnnnnnnatcaggccaaatcggccgagctcgaattcgtcgagagcggactggctcagagggaggacgcacccgccagccagccgggaaccttccctcgcgggctcccagggcgggtctcttcctctctctagccctgctcaggcattcggcaggtccagcagaggtacacctcctgcagcgggttccaagtgcacctccagcctgatgggcctgaccaaggaggcttccaggagcacagaaggggctgcaacccaggtacccagagagtgagcagctccacgcgggactgtgcacggtggccgacacccgcagggacgcccgccggacgagcacgcggagggccctcgcctccacggatgcaccatgccggtgtgaggagcatctgttcttcccactctctgcagttaacaaacccaacccaaaccaccacaggtgctcctcctggggagtttcctgtctgacaaatgccaggctcacttcaaggagaatcacgcttctttctaaagatggattcaccatttaaaacagagctctgggagcctttcggcaaatcttgaaagctgcacggcgcagagacatggatgtgacttcccaagcccggggcgtgggcctggagatgtacctaggcaccgcgcagcctgcggcccccaacaccacctcccccgagctcaacctgtcccacccgctcctgggcaccgccctggccaatgggacaggtgagctctcggagcaccagcagtacgtgatcggcctgttcctctcgtgcctctacaccatcttcctcttccccatcggctttgtgggcaacatcctgatcctggtggtgaacatcagcttccgcgagaagatgaccatccccgacctgtacttcatcaacctggcggtggcggacctcatcctggtggccgactccctcattgaggtgttcaacctgcacgagcggtactacgacatcgccgtcctgtgcaccttcatgtcgctcttcctgcaggtcaacatgtacagcagcgtcttcttcctcacctggatgagcttcgaccgctacatcgccctggccagggccatgcgctgcagcctgttccgcaccaagcaccacgcccggctgagctgtggcctcatctggatggcatccgtgtcagccacgctggtgccctttcaccgccgtgcaccttgcaggcacaccgacgaggcctgtttctgttttcgcggatgttccgggagttgcagtggctcgaggtcacgctgggcttcatcgtgcccttcgccatcatcgggctgtgctactcctcattgtccggg

SEQ ID NO: 450439 - DNA, 881 bp, Homo Sapiens
cagaaagggagtgcttgcgagcttcccagaaacttggacgcagtaggacctgctgaatcaggcttcagacaatcaagtccactgattggtatggctgataatgtatcttgtctccaagtgcaacaagtttctcctgaattagataacttgtcattcgggtcattatttgttctcttatttcaacatctttgagatctgtgagaaccacccaaagttccattctcaaatttctcaggcatagaaaagacgatccctttcggaataccacaactggccttcactcaatattccttaagatacaatctccccaggtggtgagccatggtaccagtatttcagtgtagtggctatactgtcgcgcagccaaaatgcctccaaattgtcttcctgtggtggtcaagtttttcaagaattcgccacgaattctctgtgtgttacccactcactggtgatccagacctgcaaggggttgatgcaagttttcagggcttcttcctcctgctctttttctatatgtgcccccaggttctcttgagcaattaccatcatcagttcagtcgtcatgctagaggtgacatcatagtaaacgctgagcatgctccaggaactcattatatcctcccaacagcaaaccctttcctccacgatccacagctctctccagatgataggggaattcttgtgactccacttattcttttcacacacatcttttacgccaatcctcccaaacctcaggacgttgtgtgattttatgtatccgaaaatcaggaagattcttttgtaaatagtctgccacaagttctgttttagcataatatggacatctgctctacccgcgatgacgaatttggccatggtcgagagagactcagaggcag

SEQ ID NO: 450440 - DNA, 789 bp, Homo Sapiens
ttcatgagcattgttttgcgttcaggtaccgctttgatccttcagagaggcaccgtgcttcttagccagttcctccatgagtgacaccctcctttttggtgctgtcatcccagcaccactttggacgtgggcctggcggaagtcctcctccaccttcgtgcagtatggagacactgcgcagtacgggagatgccaggtcttgggtctccaccatcataggcttttgagatgttcttccgcctgcttgttgtcaaatagagttatgctaatttctgtatgcatccctaacacttcgccactcgtcaatatgggaattaggttgtagccggcaggagcagaggcactggtgatccagacctgcaaggggttgatgcaagttttcagggcttcttcctcctgctctttttctatatgtgcccccaggttctcttgagcaattaccatcatcagttcagtcgtcatgctagaggtgacatcatagtaaagctgagcatgctccaggaactcattatatcctcccaaaagcaaaccctttcctccacgatccaacagctctctccagatgataggggaattcttgtgactccacttattcttttcacacacatcttttagccaatcctcccaaacctcaggacgttgtgtgattttatgtatccgaaaatcaggaagattcttttgtaaatagtctgccacaagttctgttttagcataatatggacaatctgctctacccgcgatgacgaatttggccatggtcgagagagactcagaggcagggaccgcccc

SEQ ID NO: 450441 - DNA, 777 bp, Homo Sapiens
caggatcctctcattgcagtcctcattcacagtgacaagcttggccttcaggggctccagagcccgaatcttctccctttggtgggccagcatcccctcatacgcattcttgatggaggatagtaatggcttgtacgttttgaagtcctctatgaagaactcaaagatctctctgtaaggctgcagccttagttcctgggtggaatctgtgcccaggtccagcaggaggagctccttgcgtaggtagttttccagttcctccaagtactggggcttggcagtgcgaaaggggtgctgctggcagctccctactcgcttccggtagtcatctgaacagggttttcgattttgcaaaatggtctggccactggtgtatgtgggccatggggacaggtgcccacccatggagaactgaccagtcagcgtccttcgtttctgaagaagcttgcgattctgggtgctcttgtcttctgtgagaaaggattcgtctatggtcactcctgaaggccgtggctgtaatctcgacgcggacgagaagctgtggtaccgcgactgctggcaggccatgacccacgggcaggcgggcaatcagcacccgcggcctgggaagctgtggtagcgtacagccggtcgccatggcgaccaggccccagaggcccccccgcggcgggggcggagtcaggatgcgccacgcccccgagcctagcgcccgcgggctgggagtaggacaaagtagcaaaggtggactggacccggcagcggtgccctgagagtcac

SEQ ID NO: 450442 - DNA, 692 bp, Homo Sapiens
atcccctcatacgcattcttgatggaggatagtaatggcttgtacgttttgaagtcctctatgaagaactcaaagatctctctgtaaggctgcagccttagttcctgggtggaatctgtgcccaggtccagcaggaggagctccttgcgtaggtagttttccagttcctccaagtactggggcttggcagtgcgaaaggggtgctgctggcagctccctactcgcttccggtagtcatctgaacagggttttcgattttgcaaaatggtctggccactggtgtatgtgggcccatggggacaggtgcccacccatggagaactgaccagtcagcgtccttcgtttctgaagaagcttgcgattctgggtgctcttgtcttctgtgagaaaggattcgtctatggtcactcctgaaggccgtggctgtaatcgttttgctagcacgtaacgtcttcactgggctaaatcagcccgattctaaccattgactctgtggtgctggagccctagatcaatggtcagaggccagcaggaggtgcagaggtccggatcaagtgccatttccctctctagaagtactcaaaccctcatctctgccctcatccctgccagcgcctacctcgacgcggacgagaagctgtggtaccgcgactgctggcaggccatgacccacgggcaggcgggcaatcagc

SEQ ID NO: 450443 - DNA, 1007 bp, Homo Sapiens
tgcttgatctgcatgggagggccgctgtaaattccattccctgtggatgcgttcctgaaatctttcaatacggaaagttcgtcgtaatccgtcatgccccccagttatttataattaagaaagatgacaccagggaaagaggacggagatcctggcagttctcccggccgaagtcgacgcaggctcccggtctgaacgacttaggaaacggggactctgggggaggcggcgggagcccaggtcttagccaccgcgcctcctggggttccccgattcgcgcatcttttcccaggcttgagccgggaggctggcgttgacctgcagataaacggtctcagggcgcggcaccgcgtgtagtccgggcccccgcctttcgcaacgaaccccgcctgggcgacaccgcgcagggaggtccgacccgtcggcgccggtacaggctccggagtaagcatgggttgctccggggcccgcagcggcagccccgtgtgccctccgccgggtttcaggtccggcggcgcgggtgcagagccgcgtgcgatgcctggtgcgcgtggcttcccccggaaaggtggcgccaggccgaccatgggcccacgtcccggggcctcggagcggcaccgcgcggtctttcagctgcttatcctccctgggcgggtccgcaggcttctggggccaggaccagcgagctcccgggaaagcttcccggaaagcttacccagagagcgcggacccaggcgccgagtcttcccggagatgacgagacaccgcgagaggagcacagcgcaggctcctcgggactccgcggcgcaggccgggcagcccgttacttgttttatcgttcccgaaaccaacctctaagttgtctatcagtcctccaccttttagctgtacctcttagaagtgtcttctcagctgcggtgggaagataggattctttcttaaggtgaccaattaaatggccggataaaagacttgttctgcccccctttatcgcttaacacctgccc

SEQ ID NO: 450444 - DNA, 1325 bp, Homo Sapiens
  misc_feature (13)..(13): n is a, c, g, or t
agtgccccccggncctagttccccctacttccaatgacaatgtaatccataaatggatcaacccaattttaatattattaatttcactttgtttcctggaataggcaagattgatggggtaggtagtcatgtatctcttaatgatggagacacattctgagcattgtgtcatcaggcgatttcgttgtgtgcaaacatcacagagtgtacttacacaaaccaaggtgggagaagcctgtggacacacctatgctgtatggtatagcctattgctcttaggcttatagctctgtacagcaggttactatactcaataccataggcaatagtaacataatgtaagtatttgtgtatctaaacacagtgacaaaggtacagtaaaaacacagtattatcttatgaaaccatcgtcatatgtgatctgtacttgaccaagacattatgtggtgcatgattttataattcttaattgggcatatgagtaaactgaggcatcaagtgattcagtgactcctaaatgttgactggtgagttgtggaaccaggattagaactttcactctggtctatttctactatgttgcaaattctgcttttctgggttatgtaagtttttgacttttatattatagtgagatagaattaactttgtatcaagagtttagggatccatgaaaattgtatgctcaatttgatgtgcatgtaagatcctccttatgagatgacttacaattttcatgaagtttctaaaagggtctctgtaaccaaaaggttaagaacgctggcgtgctgtgtgtgtcacaatgagactgaggtcaagtctagggtgaccttttttcaggactgtaagtaggggcgggtaaacccagagaagatggatgttcgggtgggaataatcatttcattctttagagtcagagagcattggagcggccaccttcctgagaaggtggtacacgtgcttatagctctacaagtccattcggacaagcttagaaccttagatagaggattcttgaagatcattaaacctgagggtccacaaatctggctacacattagaatcatctggggagctttgaaagacaccatgtctgggaacaacccccagggatttctattttacttgtcctaagattctggcttctgtatttgtttttaaagctcctcagatagttcgcatgtaccagagttaggattaccaatcttctaaatgagtagttatcaaccttggctgaacaatggaatcacttggggagctgttaagaagtcctcttgcctgaatctcaccctcagatcttctgatttaatttgtccggggttgtt

SEQ ID NO: 450445 - DNA, 758 bp, Homo Sapiens
cgggggccccatgggaaaagctgcctttgatgagccactcctcatggagatggtgaattgcttccaggtattccagcggaatgaccttctcctcttccctgcatctcttctttaacctctggtaacaagtctcaggattggtccgaaggtaaactatcaaatcaacagacacgtccatgttcctcaagatccagtcaaaccattccgacagaactacatagtccacttctggcatcttcccacttctatacaggttttctacaaaaatgtatcttgcgctgtgaatcgacctcttccatcaaccgtacagatgacacctgaggacgagtatgcctgtccagcatggtgagctgcacataagtctgtagcgtaagaccccagcgagaggcatcgtggtacatcaggcccagaggattgtggccacggacatttctccacttggacacaggctccgttaacacctcgacgtctgtcgcgttggagaagaattccaggcatgtcgtcttcccacttgcaatattgccctcgacacagatcactgattttttctctttttcctgttctttatcgggaggccaggcccggcgctgcaccctccgcggcccggggcctgaggccgggctcccgcgacttcccggcccaaagcagcgcagcgcccgggcggcccagccccgcagcggccacagcagcatagccgggcgagcggatccagaggcccggggttccttcttgtgcgagtcggcgcggacgactccgct

SEQ ID NO: 450446 - DNA, 884 bp, Homo Sapiens
gaccccccgcgatgatggatgatttgggcgaactccagctccgagttgaagatgcccggaggcgggtgctcggtcaccaggagacagttctcttcgtcactgttgtccccacagtcgttctgttggttacagaccagcggaaccaagatacaagcatttaccactggtgcaggtgaatttgcactctgtgaaagcatttgtggcctgaaaaccagcttccggcatactgctccccggacaagcctgtgctccaactcttgcgctgtcccgtcgaggaagccgccgggcgaggctcaggtcacttccatcttagcctgtccaagtccatcgctctgctgggccggcctctgggagcatccgcggcccacctgcccggctctcgcgcgggcgggcggtacctgggtgtggcacctgggcggcggcggtccctgctcccgtcagccgtccagccagggcgcggaggccatggcgcgggtggaggggctggccctcaggccctcagaacacgggcgcccctggccacgccgctgccagcatcctgcagggtcgcacctgcacgcgggtgctccttgtcccagccgcagctctctgtgctccgcctctgaaacttttacactatacagaaactgatgggagttctcggaaatggcccaacaggaggtttgatgtcacgaacgtagagcttgaaccgagggcgcgcccccaggcccacccggggcggcgcaccgggaaggggtcccgaggaagcttcctaaaggctgtgcagggcagaccccttcacaaaggcaagtgccgggccgggctgggtgcttgtcgcttcctgtttattccaaggtgaggggcagagagaaattcaacacacgcctgcttcctccggggctcgg

SEQ ID NO: 450447 - DNA, 1544 bp, Homo Sapiens
  misc_feature (17)..(17): n is a, c, g, or t
  misc_feature (37)..(37): n is a, c, g, or t
  misc_feature (46)..(46): n is a, c, g, or t
  misc_feature (83)..(83): n is a, c, g, or t
  misc_feature (104)..(104): n is a, c, g, or t
  misc_feature (216)..(216): n is a, c, g, or t
cctggaaaatccctccncaacaaaggttgcccccgtncgggcaacnccaagggcctcccagcttctccccgaaacccgcaggncgatgtgttcgtctgccctgncgtggaggatcacaaagttatagaatttctgttccgatgatgattccagggaggaagggaacagggaggagggggtcaggtgagctgaacaaggagtagatgaaggaggagnagcaggaggaggaggggatgtttctggggtggtgggagtaggtgggcacggcttggtatttggagaggtggtatcttctacagaaagttggagtggcgtctggtctttgacagagcaggggtttttgaccggctccagaataggcaaaggggagagactgggggcctgcagacccctcggtgcactccactgggtagttggtgctggtttctggagctgcgggggtatcagggaggccagtggaggttgcatctggggccacttcgggaagcccaggaggtgggctgcttggcagctctggtgggctggcaatctcccccgatggcggccagctcatctcctcaggctcctggcagccaccggggacaggctcgggcaccaagctggcctgggggtcgtcacagagcttgctgggcccatgtgggctgcggtgcaggctgaggaagggcatggtaggggactggctgatttccaagttgctggccagggaggcagggctgccagtggatcgcagggagcacccttggctccagtccggaacaccgtcaatggggcgtgggaggctcctggtccccagagggcaaagccgaggatggtgggaggcagcccagattggactggagcgtccggatgctccctggatccccagcaatgtcccacccacaccggtttcgggcctcatcctgaagttcccccagccggtggtcgtccctggagctgagggtgcggacggcttcctggtaggccacgtcccgcagcgaggcggggcacagcttctcctcagccagcaggtggtacaagcgggccacagcccaggacacatctgggggctcctctgggtcctcggtgctgtccacgccagcccactggcgggccaccagccgggccaccgcatcggccttcaatgcctctagagagatcctggcctcagtttcctggcccagcttcaggagaaccatggcatgcaggaggtcctgcccctggcagcctgggcgtggggtcttcagtttgtgcttcagatacaagagcttgtcctggcctgctgcacctagaatgtcgaaggcgctaggaagtgatgggcccgtgcaggccatgggcacaggtgggtgcagcctccggcagcagaagctggaggtggtgaaggcatgttccacactgccccccgccttctgcacgcccagtgtcccctacccattcactgttccaggttctgcaggagctgcccaagcagatcagggatccggggcttgccggctgcgccactgggtcctggggtcctgggggctggggcttctgcggagttgcccgcggaccgtagcgcgctgagg

SEQ ID NO: 450448 - DNA, 1190 bp, Homo Sapiens
  misc_feature (84)..(193): n is a, c, g, or t
attaatagtcataaaaatcaactacaaaagaaaggtatagagttcacaccaactgcatgataattatgtaattatgtagagatnnnnnnnnnnnnnnnnnnnnnnnnnnnnnnnnnnnnnnnnnnnnnnnnnnnnnnnnnnnnnnnnnnnnnnnnnnnnnnnnnnnnnnnnnnnnnnnnnnnnnnnnnnnnnnaagattatttttaaaaattagaacatactcaccagggttgtagacatagatgggttgaaaatattctaggttctcaatacagttttcggtttttagtccacctagaaatgcacactcataatggctgcaggtcttgtttatgctttgaaggataaggttattgccagccccctcctgtgacacttgaaaaacctcattcagaggtattaaagtaatcctttcactttcctttatccaagaaaattttcaatgtcaactcccaaggcatgtgtagatggataacacagtgagctggtcattagcagcctgaggtttggctgaatatgcccaaggtaaaatggccaaacctggcttggtttagccctccaaatgtaaatgaagtgccctggcttgttctatataccacagttttggaactggcctcacaaggttttctcagcaactgcagggctcttgtgaggtaaaagtggaaagctttgaactggaagccatagatataatcttctcgagattggccagccatcttcacagcttcactgaacagatggtaaaagggagtttgctcttgagcttcggaaatatatgccatcagggctattccatggttatccttaaaattcatagggagaaagatttgagtctttcgggctgcccatttggcttttgcattttcccacacagtatctaattgctggtggcttgctttttcctcctttagcagttggggaacgtatttaatttccatcctgtccgtacatttcaggtattcatcatcaaatgcattatctgccatgtctaacacttcagccttcacctggaaaatgtccactagaatcatggttgccagcagcatggtgactatttcaaaatgtcccgtcttcatttttctcttctggcttttgtgcctttggaggaagtttaagtgatgctaggcctcaaactgactccccactctcagttgtggtaagcaagtcttcaggatgggatgttgttgaca

SEQ ID NO: 450449 - DNA, 659 bp, Homo Sapiens
tgtgcccgcatctcattttgcattttagcagaagtcacggtgctgagttgttgattaggaggaagaaagcccctggtgcatgcaaggcagccaggcctacaactcagctgacttccagaagtgtccagggtgggagagccgccggttcagcttgggaagtttctccagcatgtccatcagcaggctgaagactgggtctctcctgcaggtcgaaagcccagcaggccgacaggatctcactgacttccttccccaagctgacagaagtcaggacacgcttcattccttccccgcttccaatctgccagatggatgcctctgcagcctggttcttcaagggccagtctcttgcttgcagctcataccaaacagtcccaaatgcatagacatcagcagctttggagaatggcagctgatcctcgtccttcccgggggtcatctcgcgtacaatctcaggggccagatagcacagccagtcgtgggacagctttagctggttctcacgcctggagaccaggaagccgggacaaggacacaggcctttcagcaggcagcaaagaggcctgcctggcacaggtctgccccagggccggcagaacacccacacacagcttagaaaacacacccagacccagaacactgagcctgcacttgggaaa

SEQ ID NO: 450450 - DNA, 761 bp, Homo Sapiens
ccatctccttctgcctgtactctccctccgcagccgctcctggtccatgcaacggttcaggtagttctcgcgggacttgggcaggagctggctgacgcccgagagtacctgcacagcatccaaggtgctcaccacttcctccttgcacttcttgtgggtcttgagctgttcctcgccgtagcggagaacgtcctgatgagatcctgtaacttccgtgtcagttccaggtggcacagcgccagcttgtccgaggagacgcggaagacctcccagagcggggcgaaggtccccatgggggtcccgttgctggccagcttggagagtttcgccatcgccttcgagtaggtctcctcgatggtggccctctcccggatgaagtccgccagctccttggtggagatgggcccctgcttcacgctgtggtacaggacctcaaagccatgatttttctcgccccaaaaatgctccccaaaatacgacatcctgatggtctctgtggagacccctgcaggccccgtccagtgcctgtcaagatcacacagctaggaagggacagtagatttgcactctggactggctgagcccagacctgagctctcagctccactccaggcagctcctggtgtctgagtcactgtccagctccgtgcctcagtttccccatctcctgagctcgggccgagccccgcgctcgccgccacctgcggcttggtcgctgacaccggagcccgccccgcccctccctccgcggctgcggcgcg

SEQ ID NO: 450451 - DNA, 875 bp, Homo Sapiens
  misc_feature (402)..(402): n is a, c, g, or t
aacatcttcaagggtgggaatcttgggatgttgtgaatactgaagatccattgcgagaagaccgtgattccagtaactgcttctttgtggattttacagtgctcgtgtaactgcagtttggtgatgttattccaggccagtgttttgctttcttcggtcaggtcttcaaaagactcttcacctggggaatctgccatagaagcattataactggaggtctgggacaaacttttaaactttggggtgatccttcgaggatgtggtgtcacaaatagttgttttggtgtctgcccaaattccaagatttgcgtaagcatggctaccttctcatcaggatcctggatgctgttcaagtctacacctccttcataggtcaggggatgaaatacattatgggccccnaactgcatcaactcccctttttgtttgtagcccaaatattagatcaatcccactcgtgaaggtgttcagacacataattgctttccaatgcatctttgctcttctggagaaagtcctcgggactggaagcccaagggggaagctccacatcgtcaaccatctgtcctccttgtctctttcccaaatccaacttcaggctattgactagaaagctcacatcatcaccatagaattctggaattaactctttaaaatccgttgcaccatccagacagtttttccaagtttctgcaatactgttgaacattctatctgcattatcaaatcttccattctgcaggcacagcatatactctggtgcaatcctaacaagataaaaaagtacataacccggggaagagtagtgactcccatacatgaactttggttcaggcatttcctggtagcgtgtcagtagtctctccagccgttcc

SEQ ID NO: 450452 - DNA, 684 bp, Homo Sapiens
  misc_feature (482)..(490): n is a, c, g, or t
agtcgacggagcctctcaaatatttaatgtttttacatcacagactcatagaatacttctgatatggtatagggctcatatatccttatttagagaattatattgtgatttttaaaaatctaagcaataaaataattactgaaattgcactacttggtaaagcatgtctataatacaacacctccaaggggggactcactggaagcccaagggggaagctccacatcgtcaaccatctgtcctccttgtctctttcccaaatccgacttcaggctattgactagaaagctcacatcatcaccatagaattctggaattaactgaaagtttcggggcaaaaataaaaaagaaccacaaacatgttttaaagccgttagaaaccccaagtccagttactcatcagctttattaactgcttacctctttaaaatccgttgcaccatccagacagtttttcccagtttctgccatactacatatgnnnnnnnnnttcacctatgttcagctaaggaaatagcaatagcagcatttcctatgcacttgggggctgttctacactttacctgtattaacttctgtttgtcagtgccacatagttctaaccatctctctgagtgtcccactttaacagagggcacactcagagagtctccgtcgaactggtaccgagctcgattcgatcac

SEQ ID NO: 450453 - DNA, 1149 bp, Homo Sapiens
tctggaggatactgcccatggtgttttatcaagtttcctctaaaagctgcttagtgacagcatgtatgtttcctagcaaagtaacagcgggctttacattattcccccaattcttctgcacagatatcaacctggataaacttcacatctggctgatatcttggaggcagtccaaaatgtaaaatccaatttagtctggcaccaaataacacaattacatcagcaaattgcaaagccctggatttggctgcacttacacagttatggatggttgtccagggacaacacccttccccattagggtgggcaaaaatggcagtttatattgctccaccaatttcttgatactctcttctgcatgagcgtaagcagcacctttcccgatgataagaaggggttgtttggcattcctaataacagaagccgccgtgcacacagcagaggtttctgccatgctaataggaggtgacatgcagcgttccatgtactttatagaattcacattcacctgaaggttcacaaaatctgctggtatgtcaacatagcaagcacctggacgaccatagatactgcttctcactgccttttcaataacaaaaggaatagcttctatgctgcttgggcgggcagagaacttggtatataatctacaagcttcaacctgaggaaactcctggaaagctcccattgtttcttggtttctttcagaggaaccaccaatcacaagcaagggccagcagttcatgtttgcatttgccataccgcccaaggcatggatgagacctgggccagaaacaacaaggcagactcctggcctgcttgtcagatatccaatcgcggaggcagcataacaagccgcttgctcattcctcatcccgatgtacttgatgcctagctgctgggcagcaatggcgatttcggtcactgggatgcctacgatgccaaatatgtactccacatcttgcgttttcagggcctgagcgatgactttagcaccagacacctgctcctcgctgcgctctgcgaagttactgtccggcatcttccaccgaaaagctctaagcactcacgcagccggcaaacaagcggaatcatccagcaaggcaaacgcgaagtcggcagcacgccacctctgatcccgggaattcc

SEQ ID NO: 450454 - DNA, 895 bp, Homo Sapiens
atcttcgcacagtatcaccggataaacttcacatctgctgatatcttggagcagtccaaatgtaaaaccatgtaagtctggcaccaatgagcacagtacatcagcaattgcaaaggcctggatctggctgcaccaccacagtatggatgttgtccaagggacaacacccttccccataggggtgggcaaaaaatggcagtttatattggcctgccccaatttgcttgatactctctttctgcatggaggcgtaagcagcacctttcccgatgattaagaagggggtttgttttggcattcctaataacagaagccgccgtgcacacagcagagggtttcttgccatgctaataggaggtgacatgcagcgtttccaatgtacctgaggaaactcgctgggaaagctcccattgtttcttggtttctttcagaggaaccaccaatcacaagcaagggccagcagttcatgtttgcatttgccataccgcccaaggcatggatgagacctgggccagaaaccacaaggcagactcctggcctgcttgtcagatatccaatcgcggaggcagcataacaagccgcttgctcattcctcatcccgatgtacttgatgcctagctgctgggcagcaatggcgatttcggtcactgggatgcctacgatgccaaatatgtactccacatcttgcgttttcagggcctgagcgatgactttagcaccagacacctgctcctcgctgcgctctgcgaagttactgtccggcatcttccaccgaaaagctctaagcactcacgcagccggcaaacaagcggaatcatccagcaaggcaaacgcgaagtcggcagcacgccacctctggtactgcacctctgacggacaggagggcaaccccgct

SEQ ID NO: 450455 - DNA, 980 bp, Homo Sapiens
cctgggtggcgaattcggcacgaggcagaggtggcgtgctgccgacttcgcgtttgccttgctggatgattccgcttgtttgccggctgcgtgagtgcttagagcttttcggtggaagatgccggacagtaacttcgcagagcgcagcgaggagcaggtgtctggtgctaaagtcatcgctcaggccctgaaaacgcaagatgtggagtacatatttggcatcgtaggcatcccagtgaccgaaatcgccattgctgcccagcagctagggcatcaagtacatcgggatgaggaatgagcaagcggcttgttatgctgcctccgcgattggatatctgacaagcaggccaggagtctgccttgttgtttctggcccaggtctcatccatgccttgggcggtatggcaaatgcaaacatgaactgctggcccttgcttgtgattggtggttcctctgaaagaaaccaagaaacaatgggagctttccaggagtttcctcaggttgaagcttgtagattatataccaagttctctgcccgcccaagcagcatagaagctattccttttgttattgaaaaggcagtgagaagcagtatctatggtcgtccaggtgcttgctatgttgacataccagcagattttgtgaaccttcaggtgaatgtgaattctataaagtacatggaacgctgcatgtcacctcctattagcatggcagaaacctctgctgtgtgcacggcggcttctgttattaggaatgccaaacaaccccttcttatcatcggggaaaggtgctgcttacgctcatgcagaagagagtatccaagaaattggtgggagccatattaaactggcatttttgccacccttttttgggggaaaaaaggggtgttttgtcccttgaaaaacccattcccataactgggtgtaagggggcaccccccaaaaatcccgggggccttttttgccaatttttgcctggag

SEQ ID NO: 450456 - DNA, 460 bp, Homo Sapiens
  misc_feature (20)..(20): n is a, c, g, or t
  misc_feature (27)..(27): n is a, c, g, or t
  misc_feature (40)..(40): n is a, c, g, or t
  misc_feature (57)..(57): n is a, c, g, or t
  misc_feature (329)..(329): n is a, c, g, or t
ctcactgcccttttcaaatnacaaaanggaaatagcttcnatgctgcttgggcgggnaaaagaacttggtatataatctacaagcttcaacctgaggaaactccctggaaagctcccattgtttcttggtttctttcagaggaaccaccaatcacaagcaagggccagcagttcatgtttgcatttgccataaccgcccaaggcatggatgagacctgggccagaaacaacaaggcagactcctggcctgcttgtcagatatccaatcgcggaggcagcataacaagccgcttgctcattcctcatcccgatgtacttgatgccctaantgctgggcagcaatggcgatttcggtcactgggatgcctacgatgccaaatatgtactccacatcctgaggaacgaagaaccagggagtaaactcccaaggccccaccatatcgccacatccttccgttcc

SEQ ID NO: 450457 - DNA, 814 bp, Homo Sapiens
cggggcaccagggcctgttaatcatgcacgtctccagctcctcctgggagaagcccctctgccctcgttccttgctccggtaccacatgaagctggtctttaaggcgtttctcattcggagcacggagccgacaggccactcggtgatgagtctgggacatccctttgggagccaccgagagcaaggactgccggagcttctccacaaagttctccggaggcaggattccgagggcgggtctgttgacatacatgctcgcattattgacggactcgttaggatcgagtttcagcaggtcggggtggcatgtaacctatggggacagaggagatctgggcataaagatccagcattcggttgccgctccacatcaaccaggtcaattgcctcggctctcttcgtaattgcagtgaaacaatgcacagcctcttgcattctgaatatatattcacgctgtttcattaactcctgagatcctatggcccatgggacttccagtcttcatcacgagcgccccatcactaatcacaacttcaacgtcgacttctcggctcgcagcttgatctaatgtgtctggatccaggcaccagcaggcggtagctgctagctggaagcctgcaggcccagcgcagctcgggcgcagcaacatggaggccatgaccccttgagggacagggacaccctgttgcgtgctagccaccctccaggccccgtctccagatctgcgggatccgatccgccgggttcactacttgctggatgcgcgccccgagttccggcagcgctgggtgtctgctcgacttcccccccgct

SEQ ID NO: 450458 - DNA, 512 bp, Homo Sapiens
ccaatatgggcaccagtgaaaatgcaattgaggaccagattgcctcaaatactactacgactcctcaaacattcatttctacggatgacttgctggactgcttggtgaatcccacaagtaaccaggatagtggcacaacttttgatacaaggaagaagtttatgattcaagtggaagatgacttttaaaataatattttttaaatatatatttttaagtagtatgactaaaataaagatgaaccagcaaaaggtcagtttgcacatttgtaaatgtatttatccttaccgaattacatgtcagtctgttgccaccttctttcatgcacattcctctttggccaaactggctgctctttgtttgtaagcttttgttcctctctcatcccatacttttagcctgtgtcaaatgtaagtcccaagtatttccagcaggaagtaatgtcttcctcagcctcaaccagggaccaaccggctgcttacttttgcaaataaaattttactagaacacga

SEQ ID NO: 450459 - DNA, 1583 bp, Homo Sapiens
  misc_feature (42)..(55): n is a, c, g, or t
  misc_feature (151)..(159): n is a, c, g, or t
  misc_feature (242)..(266): n is a, c, g, or t
aaaaaacggtgggttggggggggtcttaccaaagggggcccnnnnnnnnnnnnnnttttccccacgggccacattttgggagatttcttgggagaaaaaccacccacactgggagatgtttgggggtttttcccccccaatatgaagggannnnnnnnntttccatccccatattaaaaacaaaggtaaatccggtgccggtaagggttctccgctttttgcccaaaacccatttggggggnnnnnnnnnnnnnnnnnnnnnnnnnaattatcattccatccaggttctcccattaggagggcaaaagtaccaagtttcccctttaattacttggtgctgcccaagcgggacctggaggttcaactgtggggaatggccagccccaaggggactgggacaaagcccaatcactgctatggttgacttctcaagtagaggaggaaatactcctttaaataaaatgatctcattgtttctgcttttgatgatagactcatcaaggaaggggtaggcaaaactataccctgttgcaaagattacacagtcaatgccctcaaatatggtcccatcctcaaaaatggccgaggtctctgtgaattccttcacgttaggctttacggacacaatgccacacagaatgcttgctgggagctcatcgttaaatacaggctctttcctcaggactccatttaaaggcatcaagccatagttttcatgcttgaatcttgcattcatctgcttcacgtacaaccagtcagagatggctgtcggtaaattgttcttgaggaaggttccaaatcgagtgacgagcagcatgtcccaaggataaccattgtcccagacccggctcatcacccaggagccacttctggaactgatcatgacctgttctgctgtgcggctgagttctgtggcaatatcacagcccgaattccccaggccaaccaccaggacacgctttccattgaatacacctggttctttatagtccctgctgtggaagcatttgcctttaaagtggtttagtcctggaaaggactcttttggtaggttgggatacacatgatgtccggaacaaaccattacagcatcaaagacagccgattcttttttaccatccctttcagtggtaacatcccactggccagtagttgcaaaatcaggatgtttatttacactggatacaaatgtcttaaattgtatgtacttcaggaggttcttttctttggcaaatgcaatgatatattcctggatcttgctgttgtgcataaagttggggaagtcatcgggaaatgggaagtctgggaaacacatcatctctttggaagagttggaaaagactgatttgtaaatgctagccctgccctcctctgcatggtctgaaaatttccacaggcccccaatgtcattgctcttctcaaagcaggtgggctccagcccctcttccagacagctcctgatggaggccaagccactcacaccagctccaatgatggccactttcttccccatggtaacctttttaattttcctacccgttctttgtcttcttttcttctgtgtgtctacgtcctgtccaacc

SEQ ID NO: 450460 - DNA, 905 bp, Homo Sapiens
  misc_feature (495)..(509): n is a, c, g, or t
  misc_feature (582)..(590): n is a, c, g, or t
attcttttgcaattcatgtttctcatttctcaaagtgagcacattgttctataaaaacatgctggtacacccttaaacttttgatcaatctgagtgaggtgtgcttttcctcttgggacctactcacgtttgaagattggaaacatcacgttaggcgaggcagtatctcttgaacatcttctaaagggttttttaaaaccttattctcacatatttcatttgtcttgaatatttaagtggctcttaaacgttttgggtctacatgcaaatgtggtacttaacaaggtaggaatccatcttcttagctctggctgagggtgccagccatcggtcaggtcatttttatctcaagaggcagaaggcagttatgtcaagaattgtgctcagggcaggatttcgtttccacagaggagagacacttgcagagtgccagctaggttagatcttttgccgcttctttcatttgattaatttgggtttttaaagggctgtttnnnnnnnnnnnnnnnggccgggaaactttaacaagtaggcattactgtagtactgcatttcttagaacattttaacactagaactcannnnnnnnncacacgtatttttacttgacagaagccactataataatcatggagaagtatctggagtctgaacattcactttaattctcccgttccaaatggcctttatctccgcggaaataattttcccagttgttctggctataattccgtgcaataaaaaaccggtggtttcccttttttccactttaacccttggttcggacaaccaacttaaggccgacaaccaatttcctggtcaggcacggcaggcatacttaatcccaatgggtctaacaagtttacacccgttaacacttatcaatctctccatgcgaatccatg

SEQ ID NO: 450461 - DNA, 869 bp, Homo Sapiens
ttgtgttgcgacgactactacctcaacctcagcaagtccactcggatgaacttgtctgcccaacttcttccgagtggacttgctgagggttgaggtagtagttcgtcgtcctcgtcgatgctctccaggaacagcgggatgtgctggaagacgatggcatgctggcagtgccgctgcctcgcgatgctcggctgctcgtccagccactggtcctgagcctgcttcaggctggggcattttggaggggtttctcgtagaactgggagttgaggaccaggaacaggacggcccccgacccagaagctgaagtagtcatctccccaagtccggcagaactcctcgacggtctcggccgtgggggtgttgccaatgtcatggttgccgctgacaaggaccaagtgggatggccctgtccactgccctaagcactcgcttcaggtcctccgtctgctccgtccgccacggcttccctggcatggcgtggatgaggtcgccgcacagaacgaagaatttgggtttggggttcagcttgttgatggcctggacggcttgctcagttagacggatctcctgttcccattcgtcaccgccattgtcacagtccccagtggaccaggccttgatcagcccaaactgtgggtctgcgcccaggatgaagtagaatgggcctttccattcgctttccttttctgcgggaaacgcggccagggtcctgcccctggctctgtggaaaacaccccccgcctctgcagccgacatggcgagcgagtttctggccttcacttagaacactgcgtgggtggaagccgcgcgacttcacacagaacaaccgctggacctgtcccgctttgggcgacgccctttgatct

SEQ ID NO: 450462 - DNA, 1139 bp, Homo Sapiens
gggctcttgtaactgatgctcagagaccgggtggagttggctgggagacctaaatgctccacggtcctgtaggtctcagctggcctggcccgccacccagcccacacccttcccctagggccctctcaccagtgtgagaataggcctggggaagtctgggcccgggaggcccccgacccccactgtccagacaccctgacagcgacacgtgtaaacaccgccaaacagtggagacaggcagccctgccgcccctccgcctctgcagccaggcctggtctggcagggagtggaggcaggtgtccttgcagggagggcccgaagccaggctctgccttggaggatgctccggaaggaccacataagcagttgccctcgtttggatttggtcctgccctgagcattgtccccaagcagggcaagtttcagccaactaggccctccgctaccccccatctgtctgatctgggctttctctcccgggtctgggcttcctgtcctcatcctcatgggcaggaagacggagggctgttttcgggtcaacctcctgcaaggaaaaccgattactctgttattccagcagatccccaaagcgcatcccttggcccagagattcccagagaaccctgcccctccaggtccacccccagactggctgcctggggggaaggagccggcctttagggaaggcagcctggcatggtggaggttccctgggctcctgggcctttctccagccctccagccgcagaggtgacagtgaccagggggctggaggggcagcaggacaatggtgagtggaggggggctgggaggctccctcctcagcctgggggtcctggcaactcccaccttccttgatcccctctaataattgcaacaataacactgtcactaataaaaaggcaggggaaaccaggccaaggggcgcttctgccctttatgaaaatcactttaatttaacccagatgggtcttgttgataacctcatacaatgagcaccctgaattatactttccgtgagaacacactagttatatttagccacaaattacgactctgtgtttaacaagcactttgagagtggggagggggccgggcagcctcctgacctggttggacaaaccggcactgcagcatg

SEQ ID NO: 450463 - DNA, 856 bp, Homo Sapiens
  misc_feature (16)..(16): n is a, c, g, or t
  misc_feature (39)..(39): n is a, c, g, or t
ttaaatatccttcctncccactctggtggcttttctttncactataatattaaaagttttgtttgttttcaatggaacaagacttgttaattttactacagtacaatacaccaacatttttggttggtgccgtctatgccctattttaaaatgttttgccacagtcagccatggggaattcaattgcagctcactgactcttagtcatttcaatttaatcagtatatgctaagaccaagaaaatgcagctggttggtggacccgagccctaatcatatggctgacacgcaaagtcatgaaggtaggggaatgattgttgagtaggaaattagtaatgtcgtgctaaaagctgcatctcgtgagttttgatatataatactaccattaccatttaagtttaaaaactcataaatttccattatacattattttattcatgaattacttagatgttttttggagggtagttttttgttattgatttctaatgttatagcactttggttagaatttgtgttaaacatggtatcagttcattagtatttgttgaaaattgctttgtggtctagttcacacttaatttttctaatattgcatgtgtgtttgaaaagcatatgaattttctttctaaagtagagcatccacaaaatcaagcctattaattgtgtcattcagatattttctaccattactagtgtttgacagtttctgctggagatgtgacagcatttcccactcttttggatatataaagcaaagatggcagtgttgggcagtgcagtctttcagcatctgctggctgtgggtggggaataagggaggggaagagaaattaatctattggaagcattatatc

SEQ ID NO: 450464 - DNA, 956 bp, Homo Sapiens
  misc_feature (606)..(642): n is a, c, g, or t
gacatttcagggataaatcccagtcaaattcgaattattggatacttaaatgatgatgaggccttgcttgtgccacacaggtatgctaatgagtagacatctcccagcctcaagactgagtgaattaggcccaaatagtgttccacctccccatcttttagggtgttccattaactccagtatttcagaagttccctactattgggaaggaagtagatgtagtcatctatatgcttatttttgtcaacctgagttgggaatacttgcacaaggcaccattttggaaatatgtattagattgtttatccaaatcacccataaatggtcatagatgacacattttcacctaaggaataccagtaagtttatctatgttcagttacccatcgcctctaactaaagttaacacatgtcttccttctgaaacctttctaaagagcaccctgcaatcacacctttctagccacagccatttctcttgaattagtaaggtggctaccaccgcccatttgagctgttctccttcagtcctgtagtcccatcgcccggggagtctcccaatgctaataaaaatccatttccccagaccaaagaacatatacaccnnnnnnnnnnnnnnnnnnnnnnnnnnnnnnnnnnnnntagaagagggtcagggagcatctgacggacgtttttaaaggaaggggacagctacttccatgggactgcattttagttgtgctaaaagtgatgaaagtgggtttgcattattctaccaccacacccaaccacctgcccacggaaacccccgccggagaccgaagtttacccaaatagcgctcggcaagcgctgccataaattcaaaactaactctgccgggcccgcgggggttgcgagacagggaccgaacgtgaaacccggggagccccgcgtctcttgcctccgaaggttttccgtgatcagtgtccccttc

SEQ ID NO: 450465 - DNA, 1318 bp, Homo Sapiens
cttggaccctctccatcagttcctggttctgtctgtgagcacagccacctgttcctgcagcgaggccaggtgttcctgggccgacggactgagttgtctggacagcagcacctcggcccctggaaggtcaggcagctcaccctcctcatcctgcagggtggttacgtcatagctagtattctcccgctcgttctccagcagggacagccggctctgcaaaccctccacctcccgtcccaggctctccttctcctcttgtctccccaccagcaactgctgtagctcttgcacctgtctctccaggatgtgcagggagctggcctccggggactcctgctgcctctgttccttgtgctgttccaggccccggatcttctgcaggaagcggcccctctcctgccgcagcctcacgatctcctcataggcatctcgatcatccggcatgggaatgtctggcgggagttggaggcgccttccgcttcttgggggccccctgctttccatggctggacatagagttctgagatgacgcctcgcctgaatcatcctctgtgagggcgctgggtgcgggaggggcgctgggctgcgttttgcagaaggtgcaggatgagtttgtcccgcgccagggcggccatagtgaagccgcgtcctgccccagcgctatcggtgatgcccggctgggctcccgccctgcagcaggacctccactgtcttcggggctggccccctcacaggccagcatcagggccgtccatgccttgcaggtcctgatcgttcgcaggcagccccttgctgcagtaggagacggcacaggtcatgtgtgacacatctgagctgctataatgaggggtgttgcgcctgaccgatcttgggggtttagatgtgccttaaaggagcagagcacctctgagcaggagagacagccaccagccgctgcatggtgtagggcagtccacccgctgctgtccacgacgtccaccacgcaggaagcctgcagtagttgcttcaagcactgtgggtgcccgtatttggcggccaggtggagggcattgtaacctgccccgtccgtgcttatgacattgctgccatgagctatcatcacctccagacagctggccgcaccccgcatggccgccaggtggaacgcggacttgccctcggggtctagcttcgtgggcaccagccccttgcgggcgatgagggcggccacccgaggtgcatcgttgttttccacggcttgtagcagcctctcgtcactcttgccccagtcttgactctctgtcttcttaaatcgcgacctgagagtcttcatagatga

SEQ ID NO: 450466 - DNA, 1233 bp, Homo Sapiens
  misc_feature (268)..(276): n is a, c, g, or t
  misc_feature (1061)..(1061): n is a, c, g, or t
ggcctgggtggcgaattcggcacgaggcagacagcgagagccccaggaaggtttgcacagctgtgccccaagcaccttggcctcctctcagctcgccgaggaggcacgctagagccgccttcccggtgggagccctctgtcccacagggagcggggagccagctttgctggggccctacctgcatgcccagccttacccctcattctcacagcacagatgaggttgagaccatgcagtcaatgcattgcttaaggtctcttatttacnnnnnnnnnccttaaacatagtcgctgtcattcagacattcagagaatggttggccacaaacaatgaccaagtattgcttggcttaacttgaaggcctgctgtctccttctgggggtcagggacgcagctccaccctcaccactagcccaccctgcccgtgggcataaccttgacgaagagagagaatgattggcatctgcttttctcttttctttgctaataattctgttcctggctgccgagagtgaagtttcaccatgtggaggtttggctcctatcacctggtggtctgattcataccctagcctgaggctccactggaagatctcgcagcctcagtgtatgggaaaccctttccccaggcttgtcccagcactgccgctccccacccctgagccaggaccccagaggatggccatgccccgtgcctggcagaggtctggtgccagcaactgggagctgctccggccttggcttgggggccagaggagacgcctctgcgtcacaccccgtgcacagcagcgtgggcacagaggagcgctctttcatcttgaccaggactgcaccaagaagcacccaggtgtcttcagccctcccaacctcgggggcgaactttctctttcagccacaggtcccatgagggcccctagccagggaccctggtctggtaaattgtaatcctttctccagcccagctctccacttgttccttgtgtgagctgagcaggcagtgcacctctgagtgtccctttggtaaggcccaggggttgcactgagtctgcagaggccgcgnactcctagaacgctgtgggtgcaggtgagccggcgtgtcctggggagatgctgccagcacacagggccctcctgctgccagcaggttgaggtgggtaaagtcttatcaggtctattcttaaaattaagtgggctggagaagaatggagctccacatgccagcaacgtatatg

SEQ ID NO: 450467 - DNA, 481 bp, Homo Sapiens
  misc_feature (16)..(16): n is a, c, g, or t
aggctccctcggcccnaaggcaaagggcggaaccagctccccaatgctggcaaccaagacctctgccccaggcaacgggggcatggcccatcctctggggtccctggctcaggggtggggagcggcagtgctgggacaagccctggggaaagggtttccccatacactgaggctgcgagatcttccagtggaacctcaggctagggtatgaatcagaccacccaggtgataggagccaaacctccacatggtgaaacttcactctcggcagccaggaacagaattattagcaaagaaaagagaaaagcagatgccaatcattctctctcttcgtcaaggtttatcccacgggcagggtgggctagtggtgagggtggagctgcgtccctgacccccagaaggagacagcaggccttcaagttaagccaagcaatacttggtcattgtttgtggccaaccattctctgaatgtctgaatgac

SEQ ID NO: 450468 - DNA, 817 bp, Homo Sapiens
tggcaaatgcccccaaggacctgggggcagaggctggtccgtgcacttggagacagacccctccttcccaagcagccgaggcggcagttagtcaggttggaccgcctgggaatgtcaagagtgcatcagtaaagcccacagtgaggtaagaagagaaataaggagaaaaaccttccagacagatcatccccaacttcatactgatagacacgaatgacccgacgatatgctatgctattcaaagaaaagaaaccaaatgaatacaccaaagggaggggaggcaagagcacactgcaacagacacacacaaagcccaagctggcagggcgcaggcaagggcaacctggtgcccggcgggtacctggaggcagcaggcccagtggttcaccccaggcagctcacaactaggaatgggcaagatgggcagggcttgggaggagccataaggtgaggggagcgtggcacctcacggagacaagagcaagaccagcagacacaggcatggggcagggaggggagtcaggtgccagggtgtcctacgggcacaggccggaaactgcgatccctacgtccccagctgctctgccatcagaatgtgtggcccggctggatgggtctatttctccctgccgcctatacaggcttgatgtgcctgggtgcagagcctcaggagtgcaggccaagccactccagtcccagcagcctggctttcacagcaggcttggcagattacaaaggtgacccgccaggcagagccccaggccaagcagagaagtcctgccgggactgggcgggacagcccagcctgctcctcctg

SEQ ID NO: 450469 - DNA, 809 bp, Homo Sapiens
  misc_feature (11)..(11): n is a, c, g, or t
  misc_feature (30)..(31): n is a, c, g, or t
  misc_feature (76)..(76): n is a, c, g, or t
aaatgaatttntcctccatgcggctttctnngttaagctggcttttcgtatattgtgtataaaaagatcagattcnaggatgatttggtgggattgccaggggctgaccggagtgttgctgggaaggagcctcagctccgctccaggtcctccaccaggtaggactgggactcccttagggcctggaggagcaagtccttgcaggtccagttccaggctggtgtgaaactgaagagcttccgcatcttgcttgggttggtgggctcggcccgcactgcctggtactgctcatccgtcaggaccttcccgtacagagcatccagcagccactcaacgtttgtgaccctcgcgataagcgcagcccggtgctggtctataaagtgcaggcctggcttggctgccgactgaggaggggcctggatcccagctggcgcggctccagagccctggtgcgtggccgcctgcagctgcccggccatctcctgcaggcccatgtcgcgcagcacgttagcggtgagctcggcgccgtaggtctccaggtagaagctgaccagcttgtcggtgaggtccaaggcgtccatggacagcagcgcgccccgcgggatgcgcccgtagccctcgcgcagcggcaccgacagcagcttcagcttgaacttcttgagctcctcggcggtcaggttctccagcgcatccaggatggcgtcgcgcgcgcgccccatggctccaggatccccggccgctgccgccgctcaccccgctgcagccgccgaccaggaggaagtcgcctcgtgccgaattcgccacccagc

SEQ ID NO: 450470 - DNA, 942 bp, Homo Sapiens
  misc_feature (560)..(583): n is a, c, g, or t
accaaaatattataggtggtggtaatccaattgggggtctgcggggaagtactaaagactgaccactttgaagtttgattggttcaattttttctttggtccacaatggtgatctggatgggcggacaaaccaatgttatttagaaacttgcagctccgcgttcgttccttgctgtacactggatagactccttcataggtctcagctttcccttcgctcatgatgttaattatgagcgttcctgtgccaggcttcatggtgaccagagggtctttatcgatgtcaaaatgagtcccattacgggtccaggaaaagcttgggggcggtttccctttggcttcacactggattaccatattctcccgagggtcaataatgtaatcttttggagactgttgggtgatggttggaggctgtacccagatcaagaggtacttccagtgcactaatcatctggcacaggaagagaatcaggggcactctgcccgcagataagcgcttctttttcggcattattttaagctgcattagcttaactcctgctgagactcacacactnnnnnnnnnnnnnnnnnnnnnnnnaagattttgtgaaacgttgtgtgcaacgtttaagtaattttcatgcggggaactttgaagaagctcttaagttgttcttccttttaattctttaaaccaaacgtcttcttagcattgctcttcagaaggtccactgggctagacacctcccaaatgtttttctgatttctgaagctatccttttctcaggagaatgcccacagctaagaccagctttggtcgaagtcttcagcaaacaggggataaagaatgctgagagagaatgtcacaaagattcgttctcgcgccgcgccctccgctcagctctggcgcgactgcccaggacctggaccgccggtgtcctccgttctcgacgaagc

SEQ ID NO: 450471 - DNA, 861 bp, Homo Sapiens
  misc_feature (109)..(429): n is a, c, g, or t
gacaattcttagcctgtatttggataacaactgagtgtcaaaatatataaagtaaaacttgacataatatatagacaaatatatgacagtggaaacatataaattagannnnnnnnnnnnnnnnnnnnnnnnnnnnnnnnnnnnnnnnnnnnnnnnnnnnnnnnnnnnnnnnnnnnnnnnnnnnnnnnnnnnnnnnnnnnnnnnnnnnnnnnnnnnnnnnnnnnnnnnnnnnnnnnnnnnnnnnnnnnnnnnnnnnnnnnnnnnnnnnnnnnnnnnnnnnnnnnnnnnnnnnnnnnnnnnnnnnnnnnnnnnnnnnnnnnnnnnnnnnnnnnnnnnnnnnnnnnnnnnnnnnnnnnnnnnnnnnnnnnnnnnnnnnnnnnnnnnnnnnnnnnnnnnnnnnnnnnnnnnnnnnnnnnnnnnnnnnnnnnntcattaagctactagaagaaaaatttcctaaacattagttagggatggggttcttaaatatgacaccaaagtatggtccatagagggaaaaactggacttcattaacatttaaaacctttgctttataaaagacactgaaataaaaattgaataaaagagaataaaaagacaagccacaaactacaaaactaaactaggaaaacaaacaatagaattcttttaaaatggcaaaagatttgaacacttcatcaaagatacacagatggacaataagcacacgaaaagatgctcaacatcattagtcactaaggaaatgcaaattgaagccacattgagataccactacacatctactagaatggataaaataaaaacaatgagaatacctggtgttggcaaattatggagcaaccacatcttcatacgttgct

SEQ ID NO: 450472 - DNA, 846 bp, Homo Sapiens
gtgccgggatgccctcttcgttccacgcggttcagacctggatctggtgcacacagggtacccccatggcctccgggtgcttgcgcttcgcatggcgccggagcgtgttggcctctggtaaagcgcagccggcagatggggcactggtacgggcgctcccccgagtgcacgcgatggtggtgcgccagctcgcccgcctcgcggaagcggcgggtgcacagcgggcagcggaagggccgcaggccggcatcggaatattgcacagccccgcgcacaggtgctctgggacgcgctgtgaaggtctgcgcccgcaaaccctggcactgggtccgggcttcagctctgagtgcgagatgctgtggcgctccaggtcggagaggtaggggaaggcccgcaggcacaccgggcagaagtgtggggccttcctggggccagagccctcaggcccagccgctgaaccttcagagaccgtatagggcacaccctgatcatcgatcaggaggaggtcgctcccgccactgctgcctactggggctgtcaccccctgcacctgcaccagtgggggctcctgccctgacttgggggggcggccccgcttgcgatggagggaggccttgagtgtccgatttgaggaggtggctcccccaggacgacggcctcggcggccccggggaacaggaggagataaggccagaggtttctcttcctccccgggcaaaggcgaaggcaacgggtctgggctgggggtgtccattgagcagtggggggcttgggtctgggcactggagccagctcatttgcatgtcgccggggctcgcgagtgtgcgcgcgcgcgggggcaacggg

SEQ ID NO: 450473 - DNA, 1106 bp, Homo Sapiens
acgagattttcccattggagttctttttaagtgtgccccggaatatccaaacatgtcaattttctgctcgaggaaccattcactttggaatgagggtgtatcatcggtgcccaagcccttcatcgatttatagagcttttcagcaaaatatgcagatttgttcctcatgcactttactatagccagcagagcatcttcaaagctaccagatgtttcagatttaatactctgttcaatatccttctgtgatatccttttgtattcatcaaacacatgcaacaggtgatttcggttccgggaacagagaacagttagaaatttcacctcatctgtcccccatttcttctctccagcctcatacaggtcctgggcatcctgtctcacgagagcatcgtccagataatttccttcatccctcccaccagctgacagagacaccagcactcgctggaacatgaacgatgtgtcagagcgaatgtcatcttcaaggctccgtccatattgctgctggtaggtttggcttatgcgccggatctcctcaggggtccgggaggccaggatctcaattaggcagccctcatcagtgccggctcccttcatggcccttcgcagctcttgcacgtcatacagcaccgtgggcgtcatcatccccacaatcacctgctcgaagttgccactcagttctgacttcaggtcgtctatcaagtccctgccgatggtgctcttgtaggctgtcctgatctcctggcgctgggcggtgttgcggtaggcaaggacgctaataatggcgtcttcatcggtgccgagccctttcatggccttcctcagggtctgggcatcttccatggcattgaatcctgaagcagctttgacagtacctcctttggttgccatggccatgactctaggtcaagatcagagttcagccacccaagcagaagttcttcgaggccgggctgcgctcctcctctgcggctgcggaggtcacaccctactcagggccaagacagcgggtcttatccgggacggatccgccccactgtggggtggagactgagcccaagttcctggtgttccatcccgggaatccggaccggtccagcctc

SEQ ID NO: 450474 - DNA, 1173 bp, Homo Sapiens
ggtccggaattcccgggatctcggagagccttttgctagccccacggggacctctgtgcacggatggacccgcccggacctggcgggaagcggcctggcaggcggcggccccggcggcatcagcagagacaggacggggccgacgccgcgggcccctgaggcgtgcgtgcccaccgggcccggcggcggcaccatgatgccgggcgagacccattcggcggcgcccgggacggcggcggacctgtcgcgatgtcatgggctgcgcctctctgcagcagaatttgaatgaatatgttgaagcattaattaccttgaaacaaaaaattatcagatacagataatttgttaacagaatatcagaagaacatgtgatgatatccttttactggctttttctgttgagttttggaactaacttatgtttaattcctgaaagagatgtgagaattgttcctcataggccttctggaagatagtacttaacaggcttcagtagggagcatgtctcacaagcacagtaaacagacagtccttttcttcttaatccatgtttaagtgatgagttttacacaattgacgattacttttcttgtacgacttgtgactcccttaacgtctcataagcttatacgtgggtggggtactcttaactttgtactcgcggcatgtggcactgttcccacgtttaccactacctgtgacactgcactgtgcatacttgcctgaactgtcatctctcgcgatcttgccacgaacgtacacgtatggcgacaatttcaacgactgccggggcacagttgaccttttcactgtagttattcgcggtcgatttcaccgcggaaccatggtgagcgcgcgccactatacgagtctccagcaggtcctcatgacaacaaggcgcccgggactgttaattaattccaggaacagcccctcgttgcgtgcgcaatccaccgaaccacacacacatccttgcgcggccctttcacaaggcgagcgcacagttggttgcgggcgcatggcacctttataccgaacgacactgcgtcgatgtcagacgcagccaagtggtcttgcaggccagagcacattgatacacgacagaggcgcgcaacaaagcgagagcgcgaacatacggctcaccgccctcgatgatctagctccggaggaaca

SEQ ID NO: 450475 - DNA, 888 bp, Homo Sapiens
ctgtatttgtaagggtccacacacagatgttagtagtttgtaatgttgaatctctggaagagtaaggagacaaatatgtaccgggtctgtgactgttgctatgatcagggagtttggcactagaagagcagttttggttttctttattagggttaccgagaaagctggaatagagatctcttgtgtctttctccaaagactttggaatgaaaacaaatccagttttctgatacaaagagctttcccttggtatagtatttctttctgtagagcacaggtaaagctttgcttcagtggttcctccgttgggacactaagaaacaacttgtgaaagtgcatattggccttgtactggctggaagatgaagacttttttctttcagtcttagggtcatttttgctttctgttttacagtcgttcttatcacttgctaaagaggcaccatcaaaactggattttgaccataggctaatgattttcttctggtctggggagtccgcctccacagatggggtaggggattgggctgttggcgacctgcaggctttctttttctcctccacaccattctcagcctctgagtgggctgagccaagtttgctctccctcttcccgagcactttcgcaggctttgtgtcttccacatcttgctgtagttcagtcatcggggccgtgtctggagggcaccttcagacttccgcgcgcctggctctgccccggctcgtcccggcttctaggtccgggtgcgcaggccaagcaagcggcgccgtgccctcccctgcaccctccgcccagcgcatccaggccgggccgcgccaagctcccggggccgcggacctggacacgtcggagcgggcgcgattggtccgacccactgtggaaaagcc

SEQ ID NO: 450476 - DNA, 877 bp, Homo Sapiens
agtctctgtaagtgtccaccacacagattcttaagtagtttgtaaagttgaatcctctggagaataaaggaagaccaaattatgtaccctgtctgtgacttcttgctatgatccagggcgcttggcactaagaagacgcacgtttttggtttttctttaattagcgttactcgagaaagctggaatagagatctttgtgtcttttccaagactttggaatgaaaacaaatccagttttctgatacaaagagcttttcctttggtatagtatttctttctgtagagcacaggtaaagctttgcttcagtggttcctccgttgggacactaagaaacaacttgtgaaagtgcatattggccttgtactggctggaagatgaagacttttttctttcagtcttagggtcatttttgctttctgttttacagtcgttcttatcacttgctaaagaggcaccatcaaaactggattttgactcttggtcctgaatgaagcatagatttggagagaagatatgggcataggctaatgattttcttctggtctggggagtccgcctccacagatggggtaggggattgggctgttggcgacctgcaggctttctttttctcctccacaccattctcagcctctgagtgggctgagccaagtttgctctccctcttcccgagcactttcgcaggctttgtgtcttccacatcttgctgtagttcagtcatcggggccgtgtctggagggcaccttcagacttccgcgcgcctggctctgccccggctcgtcccggcttctaggtccgggtgcgcaggccaagcaagcggcgccgtgccctcccctgcaccctccgcccagcgcatccaggccgggccgccacgct

SEQ ID NO: 450477 - DNA, 1276 bp, Homo Sapiens
  misc_feature (161)..(217): n is a, c, g, or t
ccggaatttccgggatcgcaggccggggcgggcggcgcggctatccccgccccgcacgctgctgggcccggcagcttcagaggctggcggacccgcgcggggccggcgcagcggagcgcgccggcggcccggggcccagcgggagcgcgccctccgccgcnnnnnnnnnnnnnnnnnnnnnnnnnnnnnnnnnnnnnnnnnnnnnnnnnnnnnnnnngctgggcgcgctgctcctggccgccgccctgggtgcactgctcagcttcgcgctcctggccgccgcggtcgccagcgactactggtacatcctggaggtggcggacgccggcaatggcagcgcctggcccgggcgcgcagagctgctctcctcgcactcggggctctggcgcatctgcgaagggcagaacggctgcatcccgctggtcgacccttttgccagtgagagcctggacgtctccacctcggtgcagcacctcatcttgctgcaccgtgcagtcattgtggtcctgcccctgagcctggtccttctcgtgtgtggctggatctgcggcctgctcagctccctggcccagagcgtgtctctgctgcttttcaccggctgctacttcctgctggggagtgtcctgacactggcgggggtcagcatctacatcagctactcgcacctggcctttgcggagacggtgcagcagtatggcccgcagcacatgcagggcgtccgcgtcagcttcggctggtccatggccctggcctggggctcctgtgccttggaggcattcagcggaaccctcctgctctcagctgcctggaccctcagcctgagccccccaatctgtggtcatctgagtccccagcaggtgggagggagagggggagactgaggcccagagcggcagagggacccacccagatcgcctggcgccagagagatgccgtctcaggccaaggcctccctggcctctgttctgtccactctcccccgaagggcaggcttggtggagaagaggctgatgagagggcccgagagcccctccgatttgcaggggtgggggggcaaggagctgaagggatcccgatgttcccctctgcccctcccttgtcttcaaggcctggtagggtacttttccgtgaagcccttcccggggagaacgtaggcacccgagttctggtcttgtccgtggccagcctgctgctggttcgggccccgaccttccttttggggcaccggcggggtttcccgtggtggcccgtgggccctctgctgtcagatggatcg

SEQ ID NO: 450478 - DNA, 1234 bp, Homo Sapiens
cctcttttctctctattttcaatgttctttctgtcctttgttctctatcggtcttcctcgttgacttttctgttatgttatttccctcgtgttctaattttttcgtggttgtcttttatttttctcccctttctggctatgtttttctgtcggaatcgttgtatgtcattttgcttccttcttgtgtgtgttctctttccttttccttttttctcctgtttgtctaggttgttcaagttttttcgtgttactgttctatctgtgtggtgtttattcgtctacctttcttgttgttatccgttttgttttttctctgtgtgtgctcttgatttgttccctattatattgtcctcatctttgtttagtgctctttcttgtcctcgtgctctcagtttccgttgccctttatttcagtctacgttttttcttgtgatggacctgtttgttattttgttgtcctcgttttctgttcttcgttatattttttttattgtctgtgttggatcttgttttgcttttcgttttctctctgatttgttttcgtccttgtcatcattgggtttcattgtcattgttcctaagttcttctggtgttgttattttgtttctatctttctctttctcgctttcatccttatgatggctaatgttgtgtctctcaagatggttcatcatgctcttgtgtatgggatattttcgattcttctgcttctgcccttcttatatgccagcctctcttgcagtctctgcgtctctccttgcatgctcccgtttctgttcctaatgctcggatagctcgccctgttctgttctctctggcgctccacgtccatcaggttcggcgtaccgtgtgccactccctcggggcagggtttcgactcggaagcgcacgggtaccgggccttccccgcgcgactctgccttctacggccccggcccctgcctctaggaaacccggagctcgtgcgagccccgccccacggtcgcggcgtgcctgtcatttcctctccgcagggcgtgcgggtctcgaagatgagggagcaacaacgtccacgaccgggcttctccggcaccttgggcttctttccgctgggactcgacagcggctcggctccgcaagctctcagcgcccagggtagcggcgacgacgctccccgaggagacgcgaggaagacgggcccgcgcttgctgggactccgtcagggcgcgtgcgcggcccgggcgccgccccgct

SEQ ID NO: 450479 - DNA, 946 bp, Homo Sapiens
  misc_feature (107)..(107): n is a, c, g, or t
ggggaggttccatgattttaaatgccctaatttgagttaaatttagtcaagcggttccttggttttattccaaaacccttaaattcccttccaaccaaaatataatnttctatttttctaagcaagtcttgtggggaatatacagagcccttgatttctggtaacactgcaaataacattattggtccaataagtctttctaataagtatccattgtgcaacagtttattagtggctgcttacatgtactgctcttttactgagtgaaacacagttaaccgacagaacttcataaaccttagtaacacatcttccaccctatataaaatatatagactacttactgttttaagtattcaatttgctctgatgtcactgtaattcactgttccccccattttcctgctttagtatttataaacagataatttaatgtggcttaaaacaaaagaatttcaaatttacatccaattcaaactggctatttaaaaggtttcctggttctatgaagctgcttcggccattagtagagaaaatgaagtttctgtaatggaggcaggctttttaagtagtgacgtgacttccaccatgccagctccagtccgtggaagattagcgtttacaatatgtcgttgtaagtgcttaatccagtcttcctgaacagacaagggtcctcgaaagactaggccacaaaacctgcatcggagaatgtaaacctcgtcagcaccatgaggtaatgttagcattttcttcttgcttccagatcttgaccttgatttcttttgcttacaatctaaggcaatggggatgaggtggagatcaataaataacaaatatgtctgggtttgctccagaataacctagattttgtcttattaacatcttgctgcaagaacgatctcatccaaaattaaatcaaacagtttggtgccgtgtgcgtcaaacc

SEQ ID NO: 450480 - DNA, 969 bp, Homo Sapiens
gggatctgggggcggcctgggggagcagccttagtgtcttcctgctgatgcaatccgctaggtcgcgagtctccgccgcgagagggccggtctgcaatccagcccgccacgtgtactcgccgccgcctcgggcactgccccaggtcttgctgcagccgggaccgcgctctgcagccgcagacccggtccacacggccagtggctacgacccttgggatttgccctccgctcagctcgagcttccctcgtggccgacggaacaatgaaggattgcagtaacggatgctccgcagagtgtaccggagaaggaggatcaaaagaggtggtggggacttttaaggctaaagacctaatagtcacaccagctaccattttaaaggaaaaaccagaccccaataatctggtttttggaactgtgttcacggatcatatgctgacggtggagtggtcctcagagtttggatgggagaaacctcatatcaagcctcttcagaacctgtcattgcaccctggctcatcagctttgcactatgcagtggaattatttgaaggattgaaggcatttcgaggagtagataataaaattcgactgtttcagccaaaccctcaacatggatagaatgtatcgctctgctgtgagggcaactctgccggtatttggacaaagaagagctcttagagtgtattcaacagctttgtgaaatttggatcaagaatgggtcccatattcaacatctggctagtctgtatattcgttctacattcattgggaactgagccttctcttggagtcaagaagcctaccaaagccctgctctttgtactcttgagcccagtgggaccttatttttcaaagtggaacctttaatccagtgtccctgtgggccaatcccaagtattgtaagagcctggaaaggtggaactggggactgcaagatgggagggaataccggtcatctctttttgccc

SEQ ID NO: 450481 - DNA, 1032 bp, Homo Sapiens
  misc_feature (13)..(13): n is a, c, g, or t
  misc_feature (89)..(89): n is a, c, g, or t
ttaaaaatatttnaaacaacacaaataaagtaaaaacaacctcagacccccccagactagacatcccccactgaaaatcctttgggggncccctgaatttggattttcctatgcaaaggcattgatttcccaaagaagtgtgataaaaatgtggtttggcattctcaaaaactccagaaagttccctcttctgctgcgactttcactgaaatgaaaatccttcatggagaacgaattaaaacttggaaattcacatgagatttctctcgctcctttgttatctcatctcttacacaacttttgtgtggttttttgctcagcttaaacaatgacaggatctgtccaaatgtcaagccgaggtattttgagagcaggaagagaagaagcctgtctacagcacccacatccaccacagcacgtgaaatgcattgaacgctttagctatacaagaaccctgcagcttcattacattgcaaataggctaggccacaacccgagaggacaaacaaacatgagctgtttttaagagttcaacagaaatttggcagctttagctttttattctacatttccacaacttcttcacatggcatcttatagaagatgaaaattaattattaaagaaacatgcattattttttaaaaatgcatactaatgcatgaaaaaaatacatcacctgagaatgtctttttcctcagaaacatggatccagacataagcaatatgctaaagatggctttctaattaatttatgaaatcacttcccctccaacccaagggaaattatttgttttaataagtagatgaaatattataaaatgttcaatcaagggcttgtggtcaaggtgtttctattataaatgattgacctttatattttagatgattgcatttgatgcttaaaatagtgttcatgataagaatgtaaaggaaaatcattttgtaagcaatggaaaccataatagtttacttgtttaaatttactgtttgctagaaaaccagacactagactaaaagaggacagaggccag

SEQ ID NO: 450482 - DNA, 1027 bp, Homo Sapiens
  misc_feature (43)..(43): n is a, c, g, or t
  misc_feature (47)..(47): n is a, c, g, or t
  misc_feature (59)..(59): n is a, c, g, or t
  misc_feature (119)..(119): n is a, c, g, or t
gaccgagaccaaggccggaaaaatctccttggcgcccatcggncaanggtctttgagtncccatccaccaggtagaagccagatgcagggagggccaaggaagccctgcgccctctcanggtctgtggctgatttcgctcactgagccaatggtccaggacccaagtccctttcttcccgaaggcgctgtgggagctttggaggcccgaagaggtagtgtcggagggcggcgagcccagtccttcgaatagttggctggattcttttcttgaagggggaaaggtccacagtctggaagtgctgcagggcctcactgaaggagattagctgcccaggctgctctgagctagcttggctccctgtctctggctggatggtgtccacagcttcccattcttcttgggctctgaccacctctgtactcacaacacgtggctcccattcataagcttctgtggtcagagcctggagaatgccatggttcttcaactctgagatagggattcctctgaaagccagaacactcttgtccttgtcatatgatggagaatatccagcagacaatctttcaccctgtccatctcttaattcttctttactatggaaagagcaagatttttcattcatgactcaaaatcatttgttcatgtgagctttgtccttgggcccagaaagcattttagtaaggtctgagatcagaagctatgtggagagccagagatccagttgctctacctttgccttccttggcagtcactcagactaagagtaagaaaacagtccctttgtgccatccgagggtgtaggaggtttctgtgagtgctgagagaagtcctctgaggtcttcgaagcctcagctcggttgtgatgcgcaggtaacagagagctcaattcatcatgacaaccagtcagacaggggctgtgagcagcctttggacagaactttcgcatagccgttaaaagagctttccaaacttgggggtcccgccgcctcggctaggcctcatctgctcatgcgcacagccgc

SEQ ID NO: 450483 - DNA, 957 bp, Homo Sapiens
  misc_feature (712)..(712): n is a, c, g, or t
ggcgggaccccaagtttggaaagctcttttaacgatagtaactgtccctactgaaggccccaggagtgctccagccagagctgaggcttcgaagacctcagaggacttctctcagcactcacagaaacctcctacaccctcggatggcacaaagggactgttttcttactcttagtctgagtgactgccaaggaaggcaaaggtagagcaactggatctctggctctccacatagcttctgatctcagaccttactaaaatgctttctgggcccaaggacaaagctcacatgaacaaatgattttgagtcatgaatgaaaaatcttgctctttccatagtaaagaagaattaagagatggacagggtgaaagattgtctgctggatattctccatcatatgacaaggacaagagtgttctggctttcagaggaatccctatctcagagttgaagaaccatggcattctccaggctctgaccacagaagcttatgaatgggagccacgtgttgtgagtacagaggtggtcagagcccaagaagaatgggaagctgtggacaccatccagtcagagacagggagccaagctagctcagagcagcctgggcagctaatctccttcagtgaggccctgcagccacttccagactgtggacctttcccccttcaagaaaagaatccagccaactattcgaaggactggggctcgccngcctccgatactacctcttcgggccctccaaagctccaccagcgccttcgggaaggaaagggacttggtccctgaccattgctcagctgtggcctggatagccaagcacccagtgcatggccgagtcctccaggaccatctatgagacagtgaccgggtcccaagtcttgacgtgtcgcccttcatgggaacacactgtggaggaccttggcttatcagggaacggaatccaagccaagacaccg

SEQ ID NO: 450484 - DNA, 1089 bp, Homo Sapiens
  misc_feature (628)..(628): n is a, c, g, or t
ttcccaccaggttaaattcttccccttcccttttgtttcttcctcttccccttggttttcttttaaaaaaaggttttaagtttgcctggatggtggtgaccgagaccaggccggaaaaatctccttgcgcccatgggccaggttcttttgagtccctccaccaaggtagagccagatgcaggagggccaaggaaagcctgcgcctctcagggtctgtggctggattcgctcactgagcaaatggtcaggaccaagtccctttcttcccgaaggcgctggtgggagcttttggaggcccgaaagaggtagtgtcggagggcggcgagcccagtccttcgaatagttggctggattcttttctgaaggggggaaaggtccacagtctggaagtgctgcagggcctcactgaaggagattagctgcccaggctgctctgagctagcttggctccctgtctctggctggatggtgtccacagcttccaattcttcttgggctctgaccacctctgtactcccaacacgtggctcccattcataagcttctgtggtcagagcctggagaatgccatggttcttcacttttgagatagggattcttctgaaagccagaccactcttgtccttgntcatatgatggagaatatccagcagacaatctttcaccctgtccatctcttaattcttctttactatggaaagagcaagatttttcattcatgactcaaaatcatttgttcatgtgagctttgtccttgggcccagaaagcattttagtaaggtctgagatcagaagctatgtggagagccagagatccagttgctctacctttgccttccttggcagtcactcagactaagagtaagaaaacagtccctttgtgccatccgagggtgtaggaggtttctgtgagtgctgagagaagtcctctgaggtcttcgaagcctcagctctggctggagcactcctggggccttcagtagggacagttactatcgttaaaagagctttccaaacttgggggtcccgccgcgtaggctaggcctcatctgctcatcatgacagggaattccggaccggtaccagcct

SEQ ID NO: 450485 - DNA, 786 bp, Homo Sapiens
agcggatgagcagatgaggcctagccgaggcggcgggacccccaagtttggaaagctcttttaacggctatgcgaaagttctgtccaaaggctgctcacagcccctgtctgactggttgtcatgatgaattgagctctctgttacctgcgcatcacaaccggtgagcgtctgtctctgtgcccctcaaagtggcccatagttttgtcctgggggcccgcctgggacggagtcctctatggcgggtccctaatgacaccccatccgtggggaacctgggggacggggagccgcccatggacaagcatggtgaaaggatcagctaagggcccatctaatttaaattcctatgcagagaatctaacctccagcaagcagttgaagaatcataccccctccttgcctaaagagggtgcataatgaatacttgattggagaaggatccatttttacaggaaggccgtttccttaggtccaactatcaggaaatttgcctttgagtacttccttgtttaatggaattgttgctcttttcttctctgctacagatagtaactgtccctactgaaggccccaggagtgctccagccaggtgtggaaagctggtcacgattctatgctacttgggttcattttctacacagcaacagaagagccctcctgagattgctattaccatacccgactgtcaccttgccaaggctgggccaatgtgtgtaagtcataggcctgtcatgggaggccatgattggaggaaaaggaaaggggaggcagatattgaaggccca

SEQ ID NO: 450486 - DNA, 483 bp, Homo Sapiens
cagatgaggcctagccgatgcggcgggacccccaagtttggaaagctcttttaacggctatgcgaaagttctgtccaaaggctgctcacagcccctgtctgactggttgtcatgatgaattgagctctctgttaccttgcgcatcacaacacgatagtaacttgtccctactgaaggccccaggagtgctccagccatggtgtggaagaggctggtacacgaattttaatgcttacttggttcatttttctacacagcaacagaagagccctcctgagattgctattaccatacccgcctgtcaccttgccaaggctggccaatgtgtgttttgtcataggctgtcatggaggccatgatggaggaaaaggaaaggggaggcagatgttgaggccagaggccacagtgagagcagtttagttcctggggtgccaggactaagggggcattgccctgtcccccggattacagtgagccacatgt

SEQ ID NO: 450487 - DNA, 1383 bp, Homo Sapiens
  misc_feature (1286)..(1323): n is a, c, g, or t
  misc_feature (1335)..(1335): n is a, c, g, or t
ccatttgcgttcggggaacccaggggcgtatatttggtgggcgatttatgagaattcttttcttgttagcgtaaaggggtaatctgtggttttctactttagagtatccccattttcactgagtcgcgggaaagcgcggaaccccctaggccccttttgtagggtgcaatatgtgcctaaaattcgggaattgttgtcatttcatcgaagaaaagggaggtaattttgttgcgcatgtggtgaaacctgttacttgtaggccagggggggccattccgggggccaagggtggtgcttcgaactggggtgggttacgcaaaaaggtggaagggaattatgggggtgattctaggggcttattattcataaggctgaacggcccaggcccaaattatcatctggtatttggctggatgactttataaaattcatcgatagactccagatgggtccaggttcaaaggtatcttttcggttcctcctgtgatttacttttcaacggattctcttcttggggttccccttcagcttttttggtttgtttttccctgagaccctcgtcttttagaaacaggagatttgctatatggggatgaagaacgagaagaggatgatcttggagacctagaagatctatatgaccggcgagatctgcttctggatctttgagaagaaacggatcttctttttggactcctggaacgtgaacgacctcgtctaggactcctagagtgccttctattccagacaggtctataaccacctcgatgatatctacctcctcctccttgataataccctctaccccttcctctgtacccataaggtcgtctcattcctctattatttctgtaatcgcgacgataatctctagaatacatacgatctctactacgagaccttgaatatgttctggaacgagacctagaactgtatcgcttctttctagaatgagatcttgatcttgatcgagaactagactgtgatctagactttgaccttgaagaatgtgatctagaattggagcgacccatttcttttctccttggttttatgcaggatcaagaagtcaagtgaagtctttgagatactgtaaaaattcttcctggagagaatgctctgagaaattaaactctaaattcgaattcctgacacgccgaatcgcggttccgggaatttatctccgttgcaaccagcacagcggccatttcccgactcaagaacgacgaggaaaaccatagagccccgctctcgacgaattcgagctcggccgatttggcctgatnnnnnnnnnnnnnnnnnnnnnnnnnnnnnnnnnnnnnnccgccaccgcgntcaccccgagttcgccctatagtgagtcgtatacatctatggggggcc

SEQ ID NO: 450488 - DNA, 1143 bp, Homo Sapiens
  misc_feature (1086)..(1086): n is a, c, g, or t
  misc_feature (1113)..(1113): n is a, c, g, or t
cgagcggccgcccgggcaggtacccctgtgcttcattcagtatcagtaaccctgcaatgatttttacaaatatctttttctagtgggttttttacttagaggaaagaactttgtaatagctcttaatgtttatatataagagaagacagaatggaaaatgttttttgaagtcaaatattgcatgatgtaaagaaaaaactttaaacttaaatgagtaggttgtcctgaattacactggtaactctctacttctttattaaagaagttatagtaagatgcctttgttacctgatttcagtgtacattgtttttatgtggttttctgataatgtcctgtcagaattgtattggtttaggccaaaggccatagcaaaaacatagagaacaaatatgatcttaaaaatagattgtaacattttaaacaattagtttagtaatttgggaaatagtggatgcataatactttaacagaagtcacacatctgtaggtttatcttttgattattctcctgaggcattagatagtttttctattataagtgacagattgactcacttaatataaataagtagcatacactaaaagcttactatgtgccagatactgtgctggacacttacatagataagccattgaatccacacagcagccctgtaagaaataagtaaaactctgcataaagtgttcgaaactaggaatatacatttcattatgaaacaatgaatagattatgcctatctgaatcactattgcattcaaataagtgattacttcacatcatatatcatcagtttacactccttaaaaaaaggtacataaattcagtgaggtttttttcttaacatacagaagtacctaaatactgcttgcagtataatattgatattggaagctgcagtttccagaataagtggagtaataactaaacagacatttaattttatttcaatatctatggaaaaaacacttattaaatctccctgtattttatgttgtctttattacaggatcacttgtctgtttgttgtgtgccacttactgggcaaaactttaaacccgtacctggatgccagctctctactccngtgggctgtggggcccgtttcctttangggacctggggcctaattaatccaccttac

SEQ ID NO: 450489 - DNA, 1122 bp, Homo Sapiens
  misc_feature (56)..(376): n is a, c, g, or t
tttacagccatgttctggggggggtaaacaaatttcccaatggacggggggggccnnnnnnnnnnnnnnnnnnnnnnnnnnnnnnnnnnnnnnnnnnnnnnnnnnnnnnnnnnnnnnnnnnnnnnnnnnnnnnnnnnnnnnnnnnnnnnnnnnnnnnnnnnnnnnnnnnnnnnnnnnnnnnnnnnnnnnnnnnnnnnnnnnnnnnnnnnnnnnnnnnnnnnnnnnnnnnnnnnnnnnnnnnnnnnnnnnnnnnnnnnnnnnnnnnnnnnnnnnnnnnnnnnnnnnnnnnnnnnnnnnnnnnnnnnnnnnnnnnnnnnnnnnnnnnnnnnnnnnnnnnnnnnnnnnnnnnnnnnnnnnnnnnnnnnnnnnnnnnnnngtagaatgccttgtccttgtaggcagacaaggacagacctcggtctggtctcccctaggcctagacacagatacttgataaggagggaggattctagggaaccaaggtcagaagcctcatagagcaggaagtatgggttttgtggcctgttgatggcagaagcttctatcttaggcttagagtctccagctaggctcttgctgggaaaacagtgcagtctttgctttcttttatatcagagctgcattttcaaacgtaaccatcccacacccactctccagctattcgaggactttgatgacagccctccagtttctcaggatgtaacagcagcaaatcactgtgcactttctcacttgctgcccatgatcccccatgctccaaccaccgggcaggcccatattgggcatgaaaggatcttggccttaatttttcttttgcctcgtggcgataaagggagcattttgtttttttcaaaagacaaaaccaaaaggtgcatcttaattagggaacaggtgcagtgagaccagactgaactctgccaggcagcagcctttcactttgtgcgcacaatgcttttaatgcagccccgttgccatggcgattaccacgtctcagcttactgaggtggcgttgcaaaccaggttgggcagcctgtcaccatcttgtagcccagccattgaaagaacgtaggctctgagactgtcacaacagggaagacagagatggaggagtctccatgcgag

SEQ ID NO: 450490 - DNA, 1761 bp, Homo Sapiens
  misc_feature (381)..(441): n is a, c, g, or t
  misc_feature (1148)..(1158): n is a, c, g, or t
cagattcgtttgtgtttttcgtttagaaccactaaaagtgcttgtaaactgcgaaattactgtagatcactgcgaataaatctgaattactactaggtaccgtcagcccttcaatatttgtgagttacacatctgtggattcaaccaaccctggatggaaaatactcagacaagaatcagtacagagtagtgtctgtactaaacaggtacacactgttgttttcttgtcattattcactaaatacagtaataacaactaattacatagcatttacatattaagtattatatgtttagagatgatataaagtatacttgaggatgtgcataggttattcgcaaatactacaccaagttatgtaaggcgcttgagcatccatnnnnnnnnnnnnnnnnnnnnnnnnnnnnnnnnnnnnnnnnnnnnnnnnnnnnnnnnnnnnntaattgcaaactacttcagtgaataacagaagctaactaaaaacttagttctgaatgattggattgtctgttgcactctacctactgaagcagagtgtttacatggccacaggtaattcattcagtaatttcagggtatgactcaagatgcagtattcttctctgtggctcttcgccttggagcacttggaagatgcattatctgctgaaaaaccaatgttcagtgtgggctgatataataaaaattaaatactttaaaaactgaatcaaaatcatagctaaaaatcaatgctatatagtttctatgacatgaaaaatctgtgaacaaatcatgttgttacaggtcttgttttatgtttctcttgtgcaaagataattatttattacaagtgaggtttctgccatcagcagagtcaaagggtaacctggagtgcctacctctttgaattgtgatactcaatcgagtttatccgtgttaagtactgagcacagcacttggcctacagcaagagctcaagaagtatttgtgattttattatcgctaagtaaaaataaatttgagtttcactaagatttttgaaattcacattttatttgcatggcataaaactagcctattcagacaactccccataattaaacttgaaaagatcctgattatgttataacagaaaagtaattatgtccctaattcatgttatttgccnnnnnnnnnnnctggttgcctttgattgacttctgaccttaagcatgaacagaaatgtgtcctaaaaagcctggtctttccagtgaagagtcaatcagtttgccaaatgcttactccataattttaatctaataacattttactaataacattttatgaacaagaacttactttcacatccagacaatatttttagaataaagctcattgcaccttataatgtgctttatttaatgtcatcttctaccatgtgcaagaagtttgggggagtatgggcctagtagagatgtttacaaaggtcttgattgaaagacccacagggctttgttaattggttttaaagatacttacaatttctctgcaaatacatagaacaaagacaataaaacgttatttagtaagatataagtcctattgaatcagttggtacccactttcatttatagacccttcagagctgaaagggatggggaagagggtggatgaagaaggtctaatggagaatacacagaagaagcagaagccatggctcctctttttaacaatgacagagaaaggaaaacaatggacatagcaataaacatttgctcatttaattttagtcaagttaaatc

SEQ ID NO: 450491 - DNA, 813 bp, Homo Sapiens
agttatttaagtaccacagcttactgtagacgacgctaagcacacactcaaagggagaaagcagtttcaacatcctctcacagtacacacaaatctatttttcaagatttatgtttgtatagatgtttatatatcgtaatagtttaaataatcgtcactatcacctgcagctttaccaggcagctcaaacctggacatgaaacgttcaaaaacattcttgcatggatccgggagagccagtgtgccaaattctgagatcacaattcggtttttagcactgttggccttatatgtatcactctgtagaaacttgctcctgtatgtcactgtgccctttgccattctgaactggtgaagcagcgccatcccatcaaaccaatgattgtacttatccttcccaaactcgaatttcccaggtccaattcgaagtagagagccattgagccacttaggaaaatgtccccagactcgagcagagatgccccgtggagcctcttccactgtggtcagcagcggtgcaacacatggcagaccccgacactgcccaaagacggcttttttctgaggagtatttcccatgtaccttttgaaaactgggagccggtgcaccatcacaggaaggaaatccactgcagtggcagaatgactcctgataaaatggagaaagactcgaaaaaacatttttgtattgagcagatccagtgatttccaaatcctctcacactggcagttttgagtactactaaacagtgaacacgcacagaactgcctggccgctctcgacgaattcgagctcggccgatttggcctgat

SEQ ID NO: 450492 - DNA, 948 bp, Homo Sapiens
cgacagagcaagactccatcgtcaaaaataagataataaaagggaattgcaggggtgatcgaacgtgggtgtgggcacctcagcagagatcaggggccttgggcacagagctgggtggagcgagaggtccgtgctggtgcagaggtgctcctcctaggactcagggctaagtttcttgggaagatgtccaaagagaaggattcgttaacagaatttcaggatcgtgggagctgtttgtatgatatgaaccattaccttagctacatttttcttctcacccaaaaaacctctacaagcttccttttgcatttggagatcccctgcctgagaacacaagagtgggctgcttttctctcagaccgaggaagactgtgttgcttagaaaaggacgtcctcacccgcagctctaagcggaggccctttctcagctcagcctccacgcaggtgtcacccggcggttcccctctggctgtccggggccgtgtgtgccgacgtcagagtcagagcccgagcgggacccaccggccctccacgctcactctgcccaggacaccctggcagatccttcaccaaaagctagtgactttgcgaaagccatgcagccccgctctggccgggcccccggccatcccgtgctcccaaacagagtctccaaacacggtggactctgccgctgctgattccgcaccccagggtgctggctgaggagtttactgcagaaacaaggcaccacagagaggctggacacttgggtggtgggattcggggcacgctgggtaagtccaagggcggaaggaaggagggggaggaggagaaggctgagttttaaataacgtctcaggaggccggagccacgctagatgggctctggtttgagcttctctgctaggaagtcattcacaaaggcctccacgatggcgggggtgatctcctccacgtccatcacgt

SEQ ID NO: 450493 - DNA, 488 bp, Homo Sapiens
  misc_feature (417)..(417): n is a, c, g, or t
  misc_feature (425)..(425): n is a, c, g, or t
  misc_feature (462)..(462): n is a, c, g, or t
  misc_feature (477)..(477): n is a, c, g, or t
ccagaccaagatatcaaattcaccatcaagtttcaagaattcagccctaacctctggggtctagaatttcagaagaacaaagattattacattatatctacatcaaatgggtctttggagggcctggataaccaggagggaggggtgtgccagacaagagccatgaagatcctcatgaaagttggacaagatgcaagttctgctggatcaaccaggaataaagatccaacaagacgtccagaactagaagctggtacaaatggaagaagttcgacaacaagtccctttgtaaaaccaaatccagggttctaggcacagacgggcaacagcgccgggacatttcggggaacaacatcctcggttccgaagtgggctttattttgcaggggtttgctttcagggatggcttcatctttncattcgtncatccttcattcacggttgggtgggtcctcttttgcntggaagttaccccgngggaggacaca

SEQ ID NO: 450494 - DNA, 432 bp, Homo Sapiens
  misc_feature (356)..(356): n is a, c, g, or t
  misc_feature (396)..(396): n is a, c, g, or t
gaattcctcgaactccaaatttctacctggacaaggactggtactatacccacagataggagacaaattggatattatttgccccaaagtggactctaaaactgttggccagtatgaatatcataaagtttatatggttgataaagaccaagcagacagatgcactattaagaaggaaaatacccctctcctcaactgtgccaaaccagaccaagatatcaaattcaccatcaagtttcaaggaattcagccctaacctctggggtctaggaatttcaggaaggaacaaaggattatttacattattatcttacattcaaatggggtctttgggaggggccggggataaccagggnggggagggggtgttgcccaggacaaggggccctggaaggntccctcatggaaagttgggacaaggttggcaagttt

SEQ ID NO: 450495 - DNA, 502 bp, Homo Sapiens
  misc_feature (67)..(67): n is a, c, g, or t
  misc_feature (84)..(84): n is a, c, g, or t
  misc_feature (225)..(225): n is a, c, g, or t
  misc_feature (479)..(479): n is a, c, g, or t
accagaccaagatatcaaattcaccattcaagctttcaagaatttcagacccttaacctctggggtnctagtaatttcagaagnaacaaagattattacattatatctacatcaaatgggtctttggagggccggataaccaggagggaggggtgtgccagacaagagccatgaagatcctcatgaaagttggacaagatgcaagttctgctggatcaaccaggnaataaagatccaacaagacgtccagaactagaagctggtacaaatggaagaagttcgacaacaagtccctttgtaaaaccaaatccaggttctagcacagacggcaacagcgccggacattcggggaacaacatcctcggttccgaagtggccttatttgcagggattgcttcaggatgcatcatcttcatcgtcatcatcatcacgctggtggtcctcttgctgaagtaccggaggagacacaggaagcactngccgcagcacacgaccacgctgt

SEQ ID NO: 450496 - DNA, 1150 bp, Homo Sapiens
  misc_feature (860)..(860): n is a, c, g, or t
  misc_feature (903)..(903): n is a, c, g, or t
ggtccggattctccgatgcgaggcctcctcccgggcccggggctggggagcggaagccatcagtgggctcggaggacactgtcccagccaggacacggccatcggtcactaatctgcagcaccggaatgtccccaggccaatcagcgggcccagcctgactcctggagattgtgaatagctccatccagcctgagaaacaagccgggtggctgagccaggctgtgcacggagcgcctgacgggcccaacagacccatgctgcatccagagacctcccctggccgggggcatctcctggctgtgctcctggccctccttggcaccgcctgggcagaggtgtggccaccccagctgcaggagcaggctccgatggccggagccctgaacaggaaggagagtttcttgctcctctccctgcacaaccgcctgcgcagctgggtccagccccctgcggctgacatgcggaggctggactggagtgacagcctggcccagctggctcaagccagggcagccctctgtggaatcccaaccccgagcctggcgtccggcctgtggcgcaccctgcaagtgggctggaacatgcagctgctgcccgcgggcttggcgtcctttgttgaagtggtcagcctgtggtttgcagaggggcagcggtacagccacgcggcaggagagtgtgctcgcaacgccacctgcacccactacatgcagctcgtgtgggccacctcaagccagctgggctgtgggcggcacctgtgctctgcaggccaggcagcgatagaagcctttgtctgtgcctactcccccggaggccactgggagggtcaacgggaagacaatcgtccccctataagaagggntgcctggtgttcgctctgcacaggcagtgtctcaggctgcttncaaagcctgggagccatgcagggggggcttctgtgaggtcccccgggaatccttggtcgcatgaggctggcagaaaccatgggacgtctcagacatcaggcacctggcaatgggcaagtgttccccctgggctacaccgggcagaatactggcaagtggaggtgccagcctgcaagtggtggtgcacgggcgggttccgggcaggagggagtgctgatgggtttgtgaccattcggatacgggggga

SEQ ID NO: 450497 - DNA, 842 bp, Homo Sapiens
  misc_feature (605)..(636): n is a, c, g, or t
gctcccttcaattaattgtgatgtctttcttctgccgctcccttgaccagggccctgctcctcagcatctgtgagctctcgcttctggtcaggtccgcagggcaggagctgctgctgacgcccaccagggagcctgtgacctgggggtcgctcgctgtacacattcaggtggctgctggacaggggtagcgtcttgggcatctgcatttcaggattgatgtagccaaggacatcgttcagacgcataatgttgtcaatgacatcatccaactccctctcagggttggagccaatgtgcagcatggccatggggctattgggagcactgttgccagcggaggaggacagcacgtgtccagctcgcacccctggggaggcggctggtgggggtttcggagagccctgggctgggctgatgtgggcagcaaacttgttcccataggtctcggacaggtactcccgcaccttctgatgctgcgactgctgcagatggtaggatgtgggattctccaggtaggactgcaccttcaacacctccccaggcacaggtgtggcgactggaagtggacgggggtattgatggccggggtgggcggccctccgannnnnnnnnnnnnnnnnnnnnnnnnnnnnnnnatgtaatgcatgacagcctgttgctgcatgcgctcccgttgctcctcctgctgcgcctgctcccgcatgagctgcatgcgcaaccctatgcgtgacgccatggtggctgccggcgctggctcccttcgagagggcgcccctggaaggaggcacctggaatgctcagctcctccaggggccggagcccaggccgcaccccgccccag

SEQ ID NO: 450498 - DNA, 957 bp, Homo Sapiens
ggggcgaatgcggcgcgggctcctgcctctctgggtgggtgaggggcgcgcggattcggagagggggctccgggagcggcgggaccacgcagccacctgtgagccttcggcagctgcgggcggcggcggcgtacccggcccgagacgggaggagacgctcggcggcccccgcccgccggcccgccgggcgcacacactcgcacccgcgcacgcaccggcagcaggcagcggccaccgccgcgatgctcgcccgcgggttggggaagtttcccgccggcctcggccgcgggcacccgtgctcccaggtgtagcgcccccgcgcggcgcgggctggcggcgcctccagcatgaccggccagagcctgtgggacgtgtcggaggctaacgtcgaggacggggagatccgcatcaatgtgggcggcttcaagaggaggctgcgctcgcacacgctgctgcgcttccccgagacgcgcctgggccgcttgctgctctgccactcgcgcgaggccattctggagctctgcgatgactacgacgacgtccagcgggagttctacttcgaccgcaaccctgagctcttcccctacgtgcttgcattttctatcacaccggcaagcttcacgtcatggctgagctatgtgtcttctcctttcagccaggagaatcgagtactggggccatcaacgaggttcttcatttgacttcctggctgcaggtacaagctaccatgggccgccaaggtagaagcccgagcaggagcaagtgggaccgagcagagtggaccaggagagcacgcaggttttcctctcgatgagaatctttgccttctaccaacgaacgcctccaaggttcgatgggcaggcccttgggaactttcggcaggcaacttgtggctggcgctgggcacaccccgggtatcagtgctggggcagggtctcaggatccggtcgtccggtg

SEQ ID NO: 450499 - DNA, 870 bp, Homo Sapiens
ataataccctgactcccacagtttttaatagataatgcaaatgacaattcaactatatgccaccaacaagagaaaaactggtactggtgaatctcatacgtatcaaggaagaaaaaaatgcagaattcaatatcaaaaaagatttttttataccaggtatatacatcataatcatggttgtctgatacattaagtgttctgtattagaggtttgcaaatatacataattctattgctaatgaggaattagccaagcccaactattcatcgcccataaagaaaaattttttagaaaattgtgtatcttttaaaaaagttggaagtgaaactgttgaccacttcggagctttagaagttccttttaatggtagttagatggcaagagctggcattttggttacatcagccaattcaaactcacagagagaagttaccaggtatcaaattttaaggcagattttattcattaaaagcatcttaagaagcagcagaaattgcagaaatgaagcaattcagcatttctactaataataatttgtattaagcatgtcgttagattctgtgttggccatttgacatctgcgattcttaactgctccataaacctgctgaatcacagggccacaggagcatcactgttgtttacacgctttttgtcaggcagctctcatgagcctgcaatgttgttattcccaaccactgacaccagcattcattattttactttgtattcaataggaaaaagccccaccgtttttgcttccaatcatcacgttcataaagcgatagtcccacctccctgataactctgctttctcacccttgcataaaaccgcctttgtgaggcccccagggcctgccttgcctctt

SEQ ID NO: 450500 - DNA, 1044 bp, Homo Sapiens
aaggcattttcttatttatcattctaggcatttgcagctgtaagacaaactcccttgtttgattacgcattcacctgttcattgcattcatatcattcaacggatttattacggaaattatttgtgctggctgtgggtacaatgatgaacaaaagcttataccctggacctcatatttatgggctgcagtagacactaatcaagatggtcacaaaatgtgtatcttatttcactgattataaaatacagatttttcacattttatcagggttcatgttataattgatgatctactatatattatacgtttaattgatagcgtattttgtgattcataaaatgagttttataactagaattctataattaataaacatatagatatttacataaatttatagtgtatctatgccttttccttctttctcccacgacgatgggatcttgctatctttgcccaggctggacttgaactcccagtactccagaatagctgggactataggtgcacaccaccacacctgacagcagtatctatgcttttgagtgactacgtgctgctacaagaatgactctcactctgactcccttcgtcccatcccacacttcaacagcagtcaatcttgctaccatatccccgtctgcagagcgaatatcgtggtactaaatctccctctctccccttcttcccactctccacagactctgactccacaaatccagaaggatatttgaaaatacatatgtcaaccaatgcttggcctggctcccctgatggcccacacaaggtgattaacccccaacaagcctatgaagcaaatcttgagaggtgacaaggaatcaccatatgagcgcccaagggcgtaaagccccatgagccttcgcaagttgtgcgttcaagacgcggctataaaacctgcaccccgacgctcagcacaacggctgaaaagcacaggccaatagccgataatatgacgcaacggcgcaccatcagcgccatgcgcaaccaatcattcctcctacacaactccgagaccctcccta

SEQ ID NO: 450501 - DNA, 916 bp, Homo Sapiens
gtgtagtgaccgtatctgacatcggctggcttgctggcggtcggctgcgtgctggcgattctgtagcccctagggcggaatctcgggtgtatgtccccggtcgtatctttcaagacccttttctccctaatttaagggccatgtgccatcgccggggtttgtgtgtaatccccgggctccgcatttttttcccacatctcgcctcctagccctatctgtcgtgccgctgcttcctcccccggctcgctgtcagtcactgcctcggctccggggcgcggcctccgctgggcgtacaatggcatgcggtgcccccgtcccgcagcccacgctccgacaccgctggggacagggccgggtgatcccgcgctccccgatgcagccaggggcacgagcaacgcagccgggagggctccgctggggtcgaacgggggcccgggacccccggggctgggcggagtctcggggctcactctcccgcccagggggccgggagcgggggctggacggagctggggctgtggccgcgcgggaagtcgggaaggaaattcccccagtggcgcagggtccggcggcgccgaggggtgggcgagcctcggtctcgagcctcttggcttcctccgcccgtccccactccggtcccggtttgggccctgctcggtctccgagtttgatccgacaccggctcggcctccgggggtcccaccctcaggtgtgcggcctggagcacggagggctgcagaaagccttgggagcgacagagccgggggaaggttggcggccgggtcggcaggcgggagggcggagtcagcggacggcgaaggggcgcacgggtggccccgcagagcatcccgaaaattccggaccgattccaccgtattgtcttattagataaatttttatatattttttatcttat

SEQ ID NO: 450502 - DNA, 943 bp, Homo Sapiens
agttagtagttttcatagtacattagcaaaagtattgtttaaaaatatttgttcaggttttctcaatcaagttgaaaggcacagcatccgattcttgggccacccaccgcagcacatcgccgcttgggaacaagatgcagtccgcagcgttgccagtatttgtcccagtggtgtaaagttcgggagtgaagttgcaggttaaagttgagagtgatgcaggtcctggtgcaccactaccccccgtaccacccgaagggcaccagtctgtgagtggaccaagggaagttgtagccggagtggtcctccacggaaagccagatgttgaccacgtggaaggtcagggtggtgagcgggtggcacccgagcagtgtgacgttcatcatgtcgaagaagcccaaagaaaacagttcccagacgctcatatactgcgttgccagtgcgaacgaggacgagttctggtggtgcaccttgtggaaggtgcggtacagccagggcaccttgtggtgcagcaggtgccacacgaagaactccatgtcgaagagtagcaggcagaacaggatgtggtgcagcagcaggagcagctcgggagcttcgtggggcaggagggccgggctgcgggcccaatgcagcagcgtcacggggaacacaaacatcacatgctggtagagggtctgccccaggcaaggtagcagctgctgcgcggatggcgagaagtcagggtggatcttgtagcgccgcagggcgggcacccaggagcacaggatatccaggaccacgaagggcaggcaaaagcccacgtatgtggtgatggagaagatgaccgggaagaagggcgactgtaggagggcctcccagctcctcaggtggtcccagaggggctgcaggaacagctgcccggagctgcaaaggacctgggggtcggagcagttgtggcagctcattg

SEQ ID NO: 450503 - DNA, 926 bp, Homo Sapiens
  misc_feature (53)..(54): n is a, c, g, or t
  misc_feature (113)..(113): n is a, c, g, or t
tctagccctggagttggagatccgcccagccgacgcctccagaaaggatcaanngaatggggctggtgtctgagtaagcaatctggtccttgggtcggaacaagtctgctatntgatgaggacgtctcggtcgcatgtgaggctcgaagtgcaccaggcggtagggctgtgacttcaggaagctggttatccactgggcggtggcctcgccacagtccctgccctctatctccaggccgtgcactctgcacttgtgcactgcatttgtggtgggcattttgataggcagtagtaggtcctttgtgtaggctgcactgagagtcagggtgtcaccatcgcaggtcagggaaatcaggaccaggcgaggttcctggcgagcagtaaccatgtttccctcctggttgatcacaagccaaaacctgtcccgcaggttgccgctgcgcagccccatggccgtgcactccgcctcgctcaccggcacccccttgcaggatttcacagggtagatccagagctgcgccactgtgcccacctgctgcagcagccgccggcgccgcgtgggccatgcgcggcgccaggcgacagcccccagcgccaccgcggtcaggcccagcgcggcaaccccgagccacccgggccgggattgcgcgaggaggacaaagcgcgccagcgcggaggagccggcggcgcccatggctggcttctccgcgaggtggcggcggcaaggccggagcgcgctggtcgcccggggccgctgggggaaggtgcggcctttggccccgagcccaaaggctgggcagctcctgaacccttccgggcacaatcagagcagtgcgtccttctggggggcggcagcggggagtgggaggtggtggctcagcttccacttggtcggcgccccacatgcctctgcaaccttccgtcgc

SEQ ID NO: 450504 - DNA, 1026 bp, Homo Sapiens
atcacagccggtcaccacaatatttggcctgaaattctccattttcattttcttctccatcctggtattcaaatctaccagggaggcatctgtcatgatcaggagcgggcagtagtctgggtaggccacctggaaattctgatcaagagtggggagaagttttcttgatgttcttcccttcatgtttgtctcaaattgaaccaatctatatgcttcagttttcaagaagttggtgaaccacttagctgcctcattgccacagtctctgcctttaatgtcaaggccaaatatcctgcagttgtggagtttgtttgaggaaggctgcttgctaggcaaaaccagctggtccatgttctggagccctgaagatcaggcagttattctcataaatgatggagatgagcacgaggcgaggctcctgtcgggcagtgaccatgtgtccatcttccttaatcaccagccaaaacctgtcccgcaggttgccgctgcgcagccccatggccgtgcactcagcctcgctcaccggcacccctttgcaggatttcaccgggtagatccagagcttcgccacggtgcccacctgctgcagccgccggcgccgcctgggccatgcgcggcgccaggcgacagtccccagggccacggcggccagtcctagcgcggcgacgccgagccacctgggccagggccagggctgggaggccgaggcgggccagcgcggaggagctggaagcgcccatggcagagcgagggcgggcgcggaccggcgcacagacccggcagcgaccggagaccgggaggacgaggaggcccttaaggatccgggcaggcgtgaggagtcaaagttgacccaactacggaccctctcacactttcaccgccgagacggcagagcagttccgcggagagcgggaatgccttaatgcggtgaccaagcctgcgcggtaatggaggaagacaggcagacagcggcgggggtaccctgggcgccgtgggagcgacgccgcatcccaggaattccggacc

SEQ ID NO: 450505 - DNA, 1090 bp, Homo Sapiens
ctggaccggtccggaattttcgggatcggaggggcagccgcagtcgcgcggattgtgcggtctcgcggcgctgggttcctggtctccgggccagggcaatgttccgcacggcagtgatgatggcggccagcctggcgctgaccggggctgtggtggctcacgcctactacctcaaacaccagttctaccccactgtggtgtacctgaccaagtccagccccagcatggcagtcctgtacatccaggcctttgtccttgtcttccttctgggcaaggtgatgggcaaggtgttctttgggcaactgagggcagcagagatggagcaccttctggaacgttcctggtacgccgtcacagagacttgtctggccttcaccgtttttcgggatgacttcagcccccgctttgttgcactcttcactcttcttctcttcctcaaatgtttccactggctggctgaggaccgtgtggactttatggaacgcagccccaacatctcctggctctttcactgccgcattgtctctcttatgttcctcctgggcatcctggacttcctcttcgtcagccacgcctatcacagcatcctgacccgtggggcctctgtgcagctggtgtttggctttgagtatgccatcctgatgacgatggtgctcaccatcttcatcaagtatgtgctgcactccgtggacctccagagtgagaacccctgggacaacaaggctgtgtacatgctctacacagagctgtttacaggcttcatccaaggttctgctgtacatggccttcatgaccatcatgatcaaggtgcacacctttcccactctttgccattccggcccatgtacctgggcatgagacagttcaagaaagctgtgacagatgccatcatgtctcgccgagccatccgcaacatgaaaacccctgtatccagatggccaccccagaaggagctccagcgcaatggacaatgtctgcatcatctggccgaaaaaaagaagggggaactggtgcccaaaagactggccttgccaccacatttttccataacaacctggcctggcctcccgggttccagcggcagcagacc

SEQ ID NO: 450506 - DNA, 938 bp, Homo Sapiens
  misc_feature (28)..(28): n is a, c, g, or t
aagcaggctggtacgccctggagttaanggatggctgcgggtttggcggcgctgcgccggcaggcagcgaggccgggtcggtgccctgggccctcgcgcccctcccgcgaggcctgtcatgcagggccccgccgggaacgcgagccggggactgccaggcgggccgccctccacagtcgcgtccggggcgggccgctgcgagagcggcgcgctcatgcacagcttcggcatcttcctgcaggggctgctcggcgtcgtggccttcagcacgttaatgctcaaacgcttcagagaaccaaagcatgaaagacgtccgtggaggatatggtttttagacacttccaaacaagccataggaatgctgttcatccactttgcaaatgtatacctagcagatctcactgaagaggacccttgttcactgtacctcatcaacttcctcctggacgccactgtgggcatgctgctcatctacgtgggggtgcgcgccgtcagcgtcctggtagagtggcagcagtgggagtccctgcgcttcggcgaatatggagaccctctgcagtgtggagcctgggtcgggcagtgcgctctttacatcgtgatcatgatttttgaaaagtctgtcgtcttcatcgtcctcctaatacttcagtggacaaaaggtggccctgttgaatcccattgaaaacccagacttgaagctggccatcgtcatgctgatcgtcccccttctttgtcaacgcttcgactgtaccgcggtagcggacaatttcctcatgagaaacgggggaagacgacaccaaagctaaagaaaggggagccaacaggatcgagaatgcgacaaggcacgtacgacggccgcatccacgagagtctgactctggaaccgatcccagcgctgatgagatgccgaccgagctacgaagacccgcatgcacccc

SEQ ID NO: 450507 - DNA, 755 bp, Homo Sapiens
ttgctgtcgggaggggtgtggccgacgtgagcgcggccggtgtgggctatcggggagacagttggggagagctgctgacggggaggatcgcgataccgctgacctatgcggtgaagttcctagagataaggacggttgttgcatcacccccgacgcgctgtgtttcgcgccatatggcgtctgcgtagcattgtggcttcgttttgaagtatacacgtgtccctgggcccgcattcgttccagccggcgtattctctcggatctagtgacgatcgagtgtttcggtcttcgtcccatggttgtcgcagcgtaggtagtatggtgggttggatggtagggtctgggggttgtcagtcgtgccaggggatctctgctggcaggttatagagctgccctttctctttgggctctcccactacgtgccagtagatcatgatggagacgaaaaacgtgaacttgaagccgatgatgaacagggtgcagacccgctgccttggggcgccccggagcagccgcagcaggaggtcggggggcttggacatggtatccccagatcagaccaggagcttccagcaggaaccggctggtcagcctgggcagcccattgcagagaggtggggatcctggcagcccacaggcctccgggagacacgccctgggctcagcagccgaccttctttgccaacacgaacacggcccttccacacacttgcagcggctgcaaatccatctctagctccagcgcgcggcggcgc

SEQ ID NO: 450508 - DNA, 1117 bp, Homo Sapiens
cagaaaccgagccggcccccggaaatggtcccgaggaccctgtttttcatcccccctttgccaaagggccggcctttccctgggatgccccagctcctcgcctggggctggccttggggcatcctgccccagtgggacgcttcggctctgaagattttgccagctgttttttgtctctgagcactttctcttcctgtttcaaatcgggagttctcactgacagctggagccagaccgtcaaggcgataaaatatttattctaaactcgaaaatagttttctttcttcttcctcgctgacgtttagcgctgctgaagccttgattcggtttttttctctagaagagtccatcaagcttcctagcaatactttcatttcttcttcgtcactgtctggagaatcaaatgttctagcaggttctttctgtttgggggtttgcaaagtcctctctgttgcccagcaggtgcttcaggggatatgttgttgtcaacaggtgcttgtttcttctttagatacctactgaccttcgcgttctgtgcattattttcggtgacaggaagttcacgggcttgattctgggaagttttgtctgtgttctgggacgcgagttcgagtgcaccgcccagagaggattctgtcagctctctttggaagaccagcatcggcggtcattgagtcagattccgtgtcagacaaattcctctgcagcttccgattcatgatccgggtttccagctgggccagcttcatgagtgcggcattggctcggatcctggaggcagtggtgggtggtctacatgaggcaagcctgggtccactcccgagcacagggttctctttcaggagtaagtgtttctcatctagagtttggtttctttttagaaatctgcttatgaccaggtgctattttggtaagatttctactgatctggaagtttctgatttcttccattcgttgaatcttccaaggaaacatcactgaagtcaccaaaaacatcacgcatgggacggctggctttccttgcagaagccattctcttcccacgccgtccatttcgcagaggcagccgccacattcaggcctgaaggagcggttccatcccgggaattccggaccg

SEQ ID NO: 450509 - DNA, 1359 bp, Homo Sapiens
  misc_feature (33)..(33): n is a, c, g, or t
  misc_feature (69)..(69): n is a, c, g, or t
  misc_feature (89)..(90): n is a, c, g, or t
ttttcacaaacattcacgatgttctagatacanaagatagacgatagctatattctatgcatgtcaaanttttcaagtagatcattttnnaaatttccaagttccaatgtcactttctcttgaaacacgactcaaggtcaaaacttataaatgtacaccttctagtacatttaactttccaatttaacccttctgccaactttattctggacactgaagttttgattataaagaagggaggaaatagatttcgatgagtctaacagtatattacgtaggcttataagatgcttcttgggtacagtctcacatcttttcaacctctgattccagtcatagctctggtgaagagttaacgggaagactttaccctgctctgtgctgacaccgtctcacttcgagcatgcaccaagactctagcttcctgtcttaagacctctctgatgcagcaatgtgtgatgctaaggtaccagctggactgtcagctagctctttgcagcccagagggttggggtggtggaggcagtgggttaatgccccaaaggagcagccctcaacacacaggaggtggttgctgatggagaaatacttctcctttctgcgtgaggcagacagttctgagataaagtttaagaagaatcctgagaaagttctgcattatgtagccattaataggggtggaccacttgataagagcagtatctggtttgctcggacttagtttccctgtttccggcagttcactcgccctatcgctcagtcctgctcctgggtgttagactcataaataggaatgtgtctacctttgtctcaggctctgctttcaagaatgacctagattaagacagtgggtaagtgcgttgttggtacattacataatgcagggatgtaatttttccttgactctgtgcatctacaaagaaacacttattcagatggcagcatagttgaggatttccacctgtgttcctttttgaaagctcatggtccatcctgagcctgaccacctgggaatgcgcttgctggtgaggcggagccggcgtgaagccagtgtgcccagcggcactggtaccacgcgatgctggattgcctaggctggtcagacggagcaaatcggaatccacggaagaaaattcacctcttaaggatccagtccggaaagggtatggccgggctcttcctgggcaggggtgcccaaatggatgaggatgctctctgcagccctcggcggatcgcaaaggagcagggctccggtcttctatctgggaaaacatggttgtcactcgtggagaagccaacggagccctgcggagtattctgtcctgttctctgctgcaggcagaagaagcgcatgcgcgg

SEQ ID NO: 450510 - DNA, 1493 bp, Homo Sapiens
  misc_feature (1422)..(1422): n is a, c, g, or t
ggtccggaattcccgggatggcacggggaccccaacgacggctgtccctaaagaaccgttgcgactggtaactgaagtggaagagagtccagatttcttgtgtgtggtcaaggagacggacaaactttttgtcttcagacgagggagcgttttgtaggctctccaggggttgagatgattcctgcttctgcgaaggctccccataaacagcctcataagcaggatgaagattcagggactgaagtgggagaaggcacagatgaatgggcccaatccaaagccacagttagaccccctgaccagctggagttgaccgatgcggagttaaaggaggagttcactcggattttgacagccaacaacccacacgcaccccagaacattgtcaggtacagcttcaaagaaggcacatacaagcctattggctttgtgaaccaactggcagttcactacacccaggttgggaacctgatccccaaagactcagatgaaggacggcggcagcattaccgcgatgaattagtggcaggttctcaggagtctgtcaaggtgatttcagaaacaggaaacctcgaagaagacgaagagcccaaggagttagaaactgagcctgggagtcaaacagatgtgcctgcagctggggcagctgaaaaagtgactgaagaagaattgatgactcctaagcagcccaaggagagaaagctcactaaccagttcaacttcagtgagagggcctcacagacctacaacaaccctgtccgggatcgagaatgccagacggagcctcctccccggacaaacttttcagccacagccaatcagtgggagatctatgatgcctatgtagaggaacttgaggaagcgggaaaagaccaaagagaaggagaagggcaaagaccccagtgggctaaaaaatcagggaagatggcccatgaggaagctgacctctatggaagtctcagactggatgatctcatcaaattgtccccaagctgctaagatcatggagcggatggtcaaccagaatacatatgatgacattgctcaagattttaagtactatgacgatgctgctgatgaataccgggaccaggtgggtaccctgctgccgctctggaagttccaaaatgacaaagccaagcgcctgtccgtcactgccctctgctggaatccaaagtacagggatctgtttgcagtgggatatggctcttatgacttcatgaagcagagccggggcatgctgctgctctacagcctggaagaacccagccttccctgagtacatgttcagcagcaacagcgggcgtcatgtgtctcgacatccacgggggaccaccccctacctgggtggcagtagggcactatgacgggcacgtgggccatttacaaccctcaagaagccccacttccaggccctccttnctgcagctcaggccaagtctggcaagcacttcagaaccctgtgtgggcagggccaagttggcagaaaggat

SEQ ID NO: 450511 - DNA, 892 bp, Homo Sapiens
  misc_feature (550)..(599): n is a, c, g, or t
cccactactggctgacccactactggcttggtagagacagtgggctgccgttaggatgtagaactcgctcagaatagttccaccacagaaaccctcgtttttcctcattgatgagcagggcctgccagggacactccccgtccttgcattcctggcctcccacgatcctggtgaggttgttgtcgcccctctcaggctgcgtctggttgaagtcaagcaggtcgaaggggttctcggtggggtccaggtcggctgcatcatatggcttccatgtgatgctgtcaggggcctccccgctgctgctggtggcctgggccactgacctcttcctgcgttccagggtctgtttcccacaggggtagggccctgtgggaatgcaggccttgccgttgtcagccagggtgtacccgcgggcgcaggagcacaccacagagttctgttcctcgtggcagaactggtcacagtccccgttgtccaggctgcagagcttccgtgtgaataattcacagtttttgccttcgaatccttctaaacaggtgcaggtgtattnnnnnnnnnnnnnnnnnnnnnnnnnnnnnnnnnnnnnnnnnnnnnnnnnncactggtcgccatctttgtatttattccagaattcattcgtcttgtcgctgtcctcaaagacctcgcgggcctcttcgtatgagcaggtctcttccatgcactctctttcgaggtgtcctttcttcatctcttcaagaaaggaattggccctcgtgaccctcgccaggatgttgttggcctgctccctgcggatgaacagactttccccgagcagcaggaggccagccagggagggactgagcaggacgaggtgcagtgggcgccccatggtgatcccaggaattccggaccg

SEQ ID NO: 450512 - DNA, 865 bp, Homo Sapiens
  misc_feature (26)..(26): n is a, c, g, or t
  misc_feature (43)..(43): n is a, c, g, or t
  misc_feature (52)..(52): n is a, c, g, or t
  misc_feature (60)..(60): n is a, c, g, or t
  misc_feature (85)..(85): n is a, c, g, or t
  misc_feature (101)..(101): n is a, c, g, or t
caagggggaaagtggaatccattccngttaaaaccctggtggnccttttaangagttggnagtttaaaaaaacaggagtttgggncggaaaatttatatanaatatagctgttagctgccctttccggggtgtgttaagtcagtttttaaaaatccccctctcaaattcttctgtacacaatcagcatctcatcactactaaaataaaggaagattttaaaccaagaaaataaagcagctctatcttcgattttggtcttagttacaaaaacatcttacaaagctttgccctgatacaccaagtgttctcatagatttggaataatatttccattaacttagctttcacaagttaatagactattaagacgaatattagatacctgaacttttcttatgtcgatgctcttctattttgcttagctcttgtatgcgcatctacatttcacaaaaataaaactacagcattaaactttgtgcaatgtttaagaaaattcttagaacattttaataaatataaaaaaggtttaaattctttcccacccacaaggatgtctgcacctgaaaaaatgtgatttacttttgaagtcttgtttatataaaattaacttttagggagaaaagatgaccatagatagaaaactgccttttgtggttttactacttgaaagaccacctgtatttagaattgtttgcaaaagttaattttaagtcattaaagacacgttgattttgcacatggtaaacataagctgagcactgttgcatataaaatatacaatgctcattaaagatagtggtattgtgaccatatatggctttgtttcatatagtttggtaacattaaagtatagctttgtcaagt

SEQ ID NO: 450513 - DNA, 750 bp, Homo Sapiens
cgggctcccgggcgccggacccccgcccagggccgtgtaggcgcggagccccagccggcctgccttgggtccgtagtgaggttgtggctttggagctagtcctccgttctgccgacccctgggggcgtccttccttctttttgagcccgcgatgagaaggcgctcccaccacatcccctggggtctctgagacttcctggcgagctggggcggcgcggcaggtgcagggctggggagggcctgacagccctggagagtgcccgaccccaatccgccgccgtcttctaggcggattccccagaggcaggtcccagtccctggcgcggggaggcggcgcgcttcagaggggcgcagggtgcgcgggggccgttggccctccgggcacttcccctttgcggtctccccgccctccttcggagctggtgcctgaggtcgctgggacctcagcctggcgtcttctctcgccccgagcgaggcaggtgccgtgggcggccccggctacttctgcatttcgagcgcttactttgcattcagctctaagtcggagagctctggggacagccgagagtgccagtggcctcatagggagactgagggttctgtttcacctcgggcgccgtgtgggtctgggctgtccacagcacctctgcgcctcagtgataggagaagccaagcgcgaggcctctcaacgctgcgtgcactctatttcccaggtatctggaatcccggcgcctagaacgtgtttttcgg

SEQ ID NO: 450514 - DNA, 870 bp, Homo Sapiens
  misc_feature (409)..(462): n is a, c, g, or t
aaaatccagccctcacccttgcctcccaggtcagccaggggttgatactcacaccacagctggctgggagcagaggctgctggtctcatagtaatctaccactaagttgcgaggaagcttcctcgcggtgtaagataaagcagcaggcggtgggagggtctgagccctactgaaaggaaaggccagggtgagatcaacactgcccatgggagctgtttattttgacttctaattttgcatcttcattgagcatccctgtggagctaccagaaccccaaaatatggtcccttgtatccattcccacctaacatgagcaggagtcttattctgaatagtggatcttcagagaagaacgagaaagaaatctagaagattggaactggattcagtctcagaacacatcgcacnnnnnnnnnnnnnnnnnnnnnnnnnnnnnnnnnnnnnnnnnnnnnnnnnnnnnnttgaacaaataattaaaggcagagccaattcaacagtctgacttccagcccatcgttttcctctgctggttgctaattcttaagaaaataggaacttgaatgttactgaatatctactagactctacatttagcagcagactacatggcaatcttcctagctgccttttgtcccatccccagatcccactgtttgccagccatgaatagaaaaaaaggactctgcctacaccttgactcgaaatagcagctgcaaaagtagacttacttggtgctgagagtgctagagagcagaaggcagctactagcacgaggagagacaggacagtcacgcagagcttcatggtattggtggcaaagaggttttctcagaggtgaggctgcagaactcagaagcttcagaacctag

SEQ ID NO: 450515 - DNA, 671 bp, Homo Sapiens
ttggtggggggggcattttattttaaagttttattatgaaaacacatggaattaacggtgttatccatgtatttgcaacagcagagaaagagtgagagtggaccatccccataggggacacttatcctttggctaaactaatataaataatggaaataacacctaatacaataatacagcacataaaagagattacattaagagaagagacaggaactgcggagaggagtcctgagtatggaggagatgcggctcatggagaagcatccaggctcaggtgaccttccctgaagacttcctgtctctgagcagctcagttcagttccaggtcatacacgtactcctggacccaggactcactggggtcagcgcagacttgcttgcctcttttggtttggaataccacagctggctgggagcagaggctgctggtctcatagtaatctaccacaaagttgcgaggaagcttcctcgcggtgtaagaaaagcagcaggcggtgggagggtctgagcccattggtgctgagagtgctagagagcagaaggcagctactagcacgaggagagacaggacagtcacgcagagcttcatggtattggtggcaaagaggttttctcagaggtgaggctgcagaactcagaagcttcagaacctagctgtgtcctgtccc

SEQ ID NO: 450516 - DNA, 963 bp, Homo Sapiens
  misc_feature (471)..(483): n is a, c, g, or t
tatcaagaacaacacttatcgttatgtattgtgttagttatattgccagtctgttgcgactgactcaaaaagttaaatgttgccactgctgaagatgattatgagcatcgcaaactttgtttctgacccattttgacagtttttatatactcctttaaaatgatgaatgttacaggttaataaagttaatacctttaaaaacttggtgaaattccattacagaagccaaaaataaaaactccctgcctctgaaaagtcagattacctgacttcttgtttggcaaccatcagtttgtttaataaaagaaaaaatttggtggtataacatgtttgatgacagatggctctatctctagattcaagctgagtgttgaaatacactgctgaaagcaaagagataggtatgttttccagaaaaaaagtcagtgtcattgctccagatgacaaggttaatgtggtaaagcataagcnnnnnnnnnnnnnggaagatggagtctcgctctgttgcccagcgcgtgggagtgcatgtggcatgatctcagttcaccagaagatccaccttccgttggatttaaagcgattctccggcctcaatcctcccgagtgtggctggaagcatgcgggcacctaccaccaggtgtggccataagtattcattatctgggtgaattctataaggtaaagaacaggggctgtataccactgtgttgggccgggccatggtctctacaaactccttgaccttgtgtatgaatccggctcttgcgcttgtgggcacttcgccaaaaggtgactgggagaattacaggggggttaagcgcaaccgtgtccgtggccagcagaatagagctatatattaaagtcctcattcctattacctggactggatgtaaaaaattgtttgcaggaggtccttgtagcattaaaatttggaaacacgggggattaaagtcaccttgaatg

SEQ ID NO: 450517 - DNA, 815 bp, Homo Sapiens; identical to SEQ ID NO: 151488

SEQ ID NO: 450518 - DNA, 1160 bp, Homo Sapiens
cacagcactgcagacatgcagagaaggtgctcagaaaatatctgtcgaaagtctggttagaggagatgagaaggaatatcttccaagtctcatgatatcacaaactgaatagcagttttgcctcacatccttttccaaagaggtcgccaatgttgattcatccctttcttggtgaagtttgcataaatgagggtgggactcaggagaatgtgtcaaggaactggcccaaaggtctctctctgttttggccccattgtgcctctctgatggccttttgggaagactctggcctgagacccaggccttcccctgcatctggggaggcactgtccctccagctgtcctcttgatccaggatggggctggtacatgagtcagtacatgttgccctggtgaattctttgtcagctgagagttcaggtgtctgccattcctgctccatctcaggcagcgcacctggagggggtcggcaaaggaggagcgtgacttcctgtggggcccctctcagtaaatgcagcacctcctggaagatgaggccttccgtggaccttccattcacggccaggataatgtcaccagctgcaatggccccattctcctcagctggctgccccggaaagagcctcttaatcctcacaagatcacttttgagatggctgcagctctctttctccatctgcacgaaactgaatcccaaaccattggcattcttttttagtttgacttcaaacttaggaccatctgtcaccgagacacagctcgaaggcctgccaggcaaggctgttaccaaggaaacagccgtgcgttcatctcccatgctgtcattagcagaaggacactgctgtgtactcctggggactcttctctctaagaccagtcttgcaacctgcccaggacccttcaggcactgcacagcctgcttgtgggtgaggccgcacagaatcactccatccacctgcaggagtcggtcacctgggaaagggatagatgtcatgtcatgacctggtgcttgaggctgcaggaggttcccttccaggaggcccctgcccggcacccctccatgcagcctggagaagtgggaaaggaagctgaggtgccaggtgtccccctggagtcagcaggaatcctgcctctctgagcagtctcactcccttcttcca

SEQ ID NO: 450519 - DNA, 1094 bp, Homo Sapiens
ccgcgctcacttcctcggggaggggttggggccgcgctcccactcgcccacacggtccgtctgcagtcggcagcctcgccggcagctcgctcggcccccgcttggcccggcccgcagggttctctccccttgccaccatgagcgagtcatttgactgtgcaaaatgcaacgagtccctgtatggacgcaagtacatccagacagacagcggcccctactgtgtgccctgctatgacaatacctttgccaacacctgtgctgagtgccagcagcttatcgggcatgactcgagggagctgttctatgaagaccgccatttccacgagggctgcttccgctgctgccgctgccagcgctcactagccgatgaacccttcacctgccaggacagtgagctgctctgcaatgactgctactgcagtgcgttttcctcgcagtgctccgcttgtggggagactgtcatgcctgggtcccggaagctggaatatggaggccagacatggcatgagcactgcttcctgtgcagtggctgtgaacagccactgggctcccgttcttttgtgcccgacaagggtgctcactactgcgtgccctgctatgagaacaagtttgctcctcgctgcgcccgctgcagcaagacgctgacacagggtggagtgacataccgtgatcagccgtggcatcgagaatgtctggtctgtaccggatgccagacgcccctggcagggcagcagttcacctcccgggatgaagatccctactgtgtggcctgttttggagaactctttgcaccttaagtgcagcagctgcaagcgccccatcgtaggactcggtggaggcaagtatgtgtcctttgaagaccgacactggcaccacaactgcttctcctgcgcccgctgctctacctccctggtggggccagggctttcgtaccggatggtgagaccaagtgctctgcccagggctgtacccaggcaggggcccctaagccagggcctccctgggaacccaggcttttcccatacccacgggccccaggaacgtgggctcctttttccaaaccccctcctggggatttaaacttcccccccgcc

SEQ ID NO: 450520 - DNA, 963 bp, Homo Sapiens
gggaggagggggcgggccgatggcggcgaaaggaggtgggtgcggggtctggcccccgcggcgggctgggggtgccggggtgcgtgtggtccgggctgtgggctggtgccctgtgctcacttcctcggggagtgggttggggccgcgctcccactcgcccacacggtccgtctgcagtcggcagcctcgccggcagctcgctcggcccccgcttggcccggcccgcaggtaggagcctgccgagggacgcggcgcccggttccctggccccgcctgcgccgcgcgctccccgctcccgccgcccgcttcgagggttctctccccttgccaccatgagcgagtcatttgactgtgcaaaatgcaacgagtccctgtatggacgcaagtacatccagacagacagcggcccctactgtgtgccctgctatgacaatacctttgccaacacctgtgctgagtgccagcagcttatcgggcatgactcgagggagctgttctatgaagaccgccatttccacgagggctgcttccgctgctgccgctgccagcgctcactagccgatgaacccttcacctgccaggacagtgagctgctctgcaatgactgctactgcagtgcgttttcctcgcagtgctccgcttgtggggagactgtcatgcctgggtcccggaagctggaatatggaggccagacatggcatgagcactgcttcctgtgcagtggctgtgaacagccactgggctcccgttcttttgtgcccgacaagggtgctcactactgcgtgccctgctatgagaacaagtttgctcctcgctgcgcccgctgcagcaagacgctgacacagggtggagtgacataccgtgatcagccatggcatcgagaatgtctggtctgtaccggatgccagacgccctggcagggcagcagttcacctcccgggatgaagatcctactgtgtggcc

SEQ ID NO: 450521 - DNA, 903 bp, Homo Sapiens
  misc_feature (764)..(776): n is a, c, g, or t
ccattttcagttgttaaggacaagagccgaatacctgtccttaagcgtagctttggatttgcaccatttgaggataaattatgttctttccagtagtcccaaattgtacaatggatcaaacatgtgtgtataagaatttaagcttgataagaagcttggctccacttatatgggacatgacttacgttcattaaggtccacgacattattgattatctggctgaagtactagataaataaagccagtaaaatgacacccagaatcatgctggaatccctttggtgattatgagtgagttggacttagtagtgtgtgcctagaaacggatggctgctgtgggccaggtgagagatgatgaggtccatcctataaggcgactcctatgtgaatgatgatgagaaaacagtaaagaacttcacggatttggtgactaatttgatggagggtaatgagatggaagaaacgaagaatgactcatataatgctataaaatctcattctcctctatcgtgggtagttctttctatctagatactaatatactaataattgtttccctccaccttaatctttcccttcccttcccatttatctcaattattctctttcctgttccctaaaagggtctcttttccttcccacccctaaatcatctacttcctctcctttatcccctgcccaatttctttatgtgtttcagttcccttcccatcttagcacagtacagatttagatatatggtacctcagtttacggatgaagnnnnnnnnnnnnngtctcatactactgctttcttgctacgtgaccttggacagggcaatgaacctttctctacagctcttcatttggcacaacaggatgatagtgtctcttgcagacggtatgctctgagggtccagggg

SEQ ID NO: 450522 - DNA, 1097 bp, Homo Sapiens
  misc_feature (85)..(94): n is a, c, g, or t
tatccaataatttggggttagaatcccagttggtggccattcccgggggggccacagagggtgtagcaagctttccccttccttnnnnnnnnnnagagttccctccttttggaagagggagaagaggggcaatgcagaggaaggagcgagggagccacaggctgtcttaccaatcttgcagatctcaggtggcccacagccgcagcgtcatgagcagattaaaccccggccactttcagagggaggattcggaacccaatcactgacaggttttgaaagtttagtttcgtatctgtttcaaagctttttctcgaccagcttgacatcacagggaactttctgggctggggaagaaggtgtcttctggaataatgctgttgttgaaggcgtttgcacatgcaaagtcagatttgttgctccaggccacagcactgttgctcttgaagtccatagacctcatgtctagcacagttttgtctgtgatatacacatcagaatccttactttgtgacacatttgtttgagaatcaaaatcggtgaataggcagacagacttgtcactggatttagagtctctcagctggtacacggcagggtcagggttctggatattgggtatgatggtgagtcttgttccagtcccaaaggttaatttctcatttccaaagttagaccagaggcctgtatcaccaggctgggccgcagtgatgtggagagaactgtcctttcttgcatcaccaaactgaaaggttagtctcttcagcttcttcacttctccacccgtaactactgtcaccaggaggacaggaccttccccaggctcctgtctgtaccattgtaagctggaaaaaacacttgaggagttgcagtacacagtgagattttctccctcttggatgcttagaaactgagggctctgctccagcagctgggtgctcacccatgccaactgaatccaaagaatggacacggagaatttcaggaccatcttgtctttctatcacatggtggacatggcccctgactttagctgctcctgaaagagcccgtcctggaacagacttctctgggctagaagagtgcttgctgccacccac

SEQ ID NO: 450523 - DNA, 1143 bp, Homo Sapiens
  misc_feature (157)..(166): n is a, c, g, or t
tacactcgcgagcggaccgccacacgggtccggtgcccgctgcgcttccgccccagcgctcctgaggcggccgtacaatcctcggcagtgtcctgagactgtatggtcagctcagcccggcctccgactccttccgactcccagcattcgagccacnnnnnnnnnnctttgaaaactcagaaaagtgactccttttccagggaaaaaggaacttgggttcccttctctccgtcctcttttcgggtctgacagcctccacccactccttccccggaccccgcctccgcgcgcaggttcctcccagtacacctttctccacccccacgaccccgaacctagcccagccgcagcgccaaccttcgcaacctgactgacgcgggggcgcatcggaggaccatgcgcagcaccgtcaggaaccgacaaccacccgcaccagagggcccgagagggagcggacgatggagccaacatgacccaccaccacccgaccaaggggacgcccgagggtgcacgagccgtacatgagacagctctcagcaggagccacaggcacgcgcaatgacgagctgcaccaacggagaaagacaaacgggagatcagcgtccggagaagcgatggaaggagaaacgtccccaggacaatcgccatggctcacgggataggcaccgggacggagacccccactagagaagaccgacgacgagggcatgtacactacaagaaggacgtgggagcccattaagacgcacagggcccatacatagagcaccctcaagaggtggaagaaggcatcaccaaagtcgatggggacacaagagcgaccgctgccagaatggcaaatcggccgcgactaatgggcaaacacgtatcaatgctcgtcgaccaagattgtgttgacatagtccaaacaagataataaagcccatccccatcctcgtccacacaacactagtgtatggcacatcgtgggaaaaaccagtctgtttcccgagatacgtgcagcatcaggaggttgtgcacgccacagtgagcagcatactctgtggcaccgacacccattggatcgccactatgcagaagagtcacactctgggacaagcggggtcttacataatattcaccacgagatgtgggttaaacccc

SEQ ID NO: 450524 - DNA, 1059 bp, Homo Sapiens
ctcttggttccgatgtccccatgatgattcctggcagtgggttggtcctgaagactccgattggcccaataaagcgtgcatgccccgcctggctcctgagcagatcactgggcctggaccagggcatgggtgctgaccgtcccaagtctccagccaccatttggtgcatgtcagcgtgggcctgtgtatcacaactcctggtgcctgcgtcataggtggcttcagtctccaggccctgaagatatgtcccatgtcccaactctgtctgtgcatacgttgcgatgatctggatgtttttgcagagttgggtcccatgttggcaatctgctccttctgagcccaggctcctgagggctctcacgaagactctgtgtatatttaaggccacgtctccaggaaagtgctctgtaagcgtagcctaattcacgaccatcttctaaccgacccaggcgccgagctatcaaccggatgtggaatgccctccgcatggcagccttataacgctcattctgggtcatgaaataattgtccttacagctaaactccgggtaactgtggatgatgctctcaactttcctgcggagtgcagtgttctgggcacctccatcaaggatgttggtgagccgttccacgtccaaggactgcatatacctctcgctctctatgtcgggggtgcatttgcctgctccaggtatccccccactgacactcggtgcactgggctgcccatcctatcctggatctgtctggtgactgtggagagacacttccaacccggctgctccgagggtctgctctcagcattggtccgtgcaaagaacctggctcccctctgtcctgtgtccgcactgtaggccgggctggcctctccccggctgtaggccgcagcctctggcaggcttgtggtcctgcccttctctcctcccacagaggggctggaacacagaagctgagagaaactgcttggccagctctcaagcccttgtctgctctcaagcccttgtctgctctcaagcccttgtctgggcttatggagctcctctccttcctccctctctt

SEQ ID NO: 450525 - DNA, 1026 bp, Homo Sapiens
ttgaatctcactttaaaaatgaaccacacaaaacttcaagaaacgaaatagaaatcaacatttactgcccgtaatattgctcatggttatagctagtatctcatagtgatttacaaaccatgaaattccagatttaaatctgtatgcactacaaaaatgtctaaatgatgtctgctaaatttgtgagttatagaagtacagaaataagtcattttcatttcaaatgcagtgaatttctaatttcatggtatcatatttttttcctttgcagttttggtaagactcccccattactttgctaagacttgctttctcaaccagtgggatgaaacgagtgccagtgtgttgactgagccttcttaggacttaaggggctctgggagaggccaaggcagcagttgaaaatctgcagcttcacctggcctttgggctgttttccctgggcccacacagtgtggctggttaaaacattctgaactttggatgccaacatttttaaaaattgggagatttgcatgaaaatccagaattcgggtaacttttgaatgatctgaaggatctgggcaagcagtaggacctgacccagctttgtgcagggggacttaactgaggaggatctgagtagcagacaccctaagagcatgtcattgtcttactcaccagttaactttccagttggctaggagtcccctccgagccacacctggctagtccttccccctttgtaagcctttgacttgtaatccctgggcttaacggaaacacatttataccaccacaacgttgtgttcatgttctgcccactagttgtaggggcgatgactacagggtggtgacgttgaatggcatggggctatcctttaggggacccatatactctaaatggggcaaagggtgacagaccaaactagttgtaacttctgtcctggcaaatgaaaattaacctgggaccgcactttcgtctacagcccaaatgaaaatcttccaggcaagggaacacgggatctgcaagtctgccacaaccat

SEQ ID NO: 450526 - DNA, 769 bp, Homo Sapiens
  misc_feature (653)..(653): n is a, c, g, or t
cgcgagcattgggatgctgtctatgagagagaactgcaaactttccgagaatatggagatacaggtgaaatctggtttggagaagagagtatgaatcgactaataaggtggatgcagaaacacaagattccactggatgcttcagtgcttgatattggaactggaaatggcaaaatttggtttctctaatattactggaattgattactctccttctgcaattcagctttctggaagtattatagaaaaagaaggtttatctaacattaagttaaaggtagaagactttttgaatctctccacacagctgtctggatttcatatttgtattgacaaagggacttttgatgccataagccttaatcctgacaatgcaattgagaagaggaagcaatatgtgaaatctctctccagggtgttgaaagtaaaaggcttttttctaataacgtcatgtaattggaccaaggaagagttgctaaatgaattcagtgaaggttggagtacagtggcaggattttggctcactgcagccttgacttcctgggctcaagcgatcttttccacttcagcctcccgagtaggtggaactacaggcacacatcatccatgcctgggataaatttttggtaatttttagcaggagacgaggtttngccatggttggtccaggctgggtctgggaactcctggggctcaagtggattcctccccacctgggcctcccaaaagtggctggggattataccatggcaaggccctcggttgggtg

SEQ ID NO: 450527 - DNA, 875 bp, Homo Sapiens
tgagggcctggcatggtataatcccagcactttggaagccagtgggagaatcacttgagcccaggagtttccagaccggcctggacacattggcaaacctcgtctctgctaagaatacggaaattatccaggcatgatgatgtgtgcctgtagttccaccttactcgggaggctgaagtggaaaagatcgcttgagcccaggaagtcaaggctgcagtgagccaaaatcctgccagctgtactccaaccttcactgaattcatttagcaactcttccttggtccaattacatgacgttattagaaaaaaagccttttactttcaacaccctggagagagatttcacatattgcttcctcttctcaattgcattgtcaggattaaggcttatggcatcaaaagtccctttgtcaatacaaatatgaaatccagacagctgtgtggagagattcaaaaagtcttctacctttaacttaatgttagataaaccttctttttctataatacttccagaaagctgaattgcagaaggagagtaatcaattccagtaatattagagaaaccaaattttgccaacaagttcaaccaggaaaacaccatttccagttccaatatcaagcactgaagcatccagtggaatcttgtgtttctgcatccaccttattagtcgattcatactctcttctccaaaccagatttcacctgtatctccatattctcggaaagtttgcagttctctctcatagacagcatcccaatgctcgcgggtccccagcgccgacgggacgaaaccgtcctccccgggactgcccttgtccgaccgcgccgccaccgcagcgccaccgccgccgtcagcgcccgagctcatttcgct

SEQ ID NO: 450528 - DNA, 1094 bp, Homo Sapiens
  misc_feature (74)..(74): n is a, c, g, or t
  misc_feature (281)..(281): n is a, c, g, or t
  misc_feature (292)..(292): n is a, c, g, or t
  misc_feature (336)..(336): n is a, c, g, or t
gtcccagggggttcagggaagtttccccgtgcgggtttcccagattgaaagtgggggaggtgccttgggttctncgggtttggaggcttctttccagggtgttcaaaggaggttccaggccggtccaagctttggtggcccctggcttttctcgtcacttttcataatccaacatcagttttattcttgggggtaccatgtatttcccggcccacccccccatggatcacgtcaatgtcccctgatgttatgcatgagctggtaggcgatgtccttacagnccctggctcanaggcctcaggggggcatctcgttttctgagtaccagtcccggtncagccgagtgggcgtaggcggcgctgggggtggcatggttcactctcgtggtggtcacaatgcccacagatttcccagcgtccttggcccagcgcaggatggaggtgacctcgttcccctgggtggtgttgcaccgggaacgctcagtggctgcgcttacccccacggtgccctcattggccttcaccccacacaggtaggcggtggcggtgccggcgctgtcagggacctgggcattggtgttgtacgtcttggagagggccacgaaggggaacttgtccatctccagcctggtctcctccccagggcttgtggtggagctgacccttgaggatgcgggcagccgtcactgtggagacacccatcccatctcccaggaacatgatgacattcttagccacgttggtgttgagcttctgaagctccagggcatatttcagtgtctcttgcgcttggtctcgccagtacttggggtctttctctttctctggcactaaggagttagtaaggcaggtgccaatggccagtactaagaatggtgaaatcatggtgcaccccaagacctgctttatccctggagcccagagatgcaatcgacgtgggtgggagggggtgggctggcagtggtcagatgttaactgatgttccaatcctgcgcagagcactggcgagggtccgtccaggcacaagcgcgtgggagcacggagccaggatagcgggcgcggagtggcgatcccgggaattccggaccggtccac

SEQ ID NO: 450529 - DNA, 910 bp, Homo Sapiens
tctatccataaagatgaagacattctttcgcagggatttaatattggggctgcatgcctggcccctgagaaagcccaagcttcctcctccttttgaatcgaacccagtgcagctttatgcgctccagacgagcctgcattccccctaatgcccctggaattgcttactcacaccaaaatccgctgcctcaggcgtttccagccagaggtaagccttcttttcatgggcaatcaggcagtagcctggagcacagaggggaaggggggcacctgcatgcccggctgggtctctgtagacagtggatcatgcgaggcctcccctctccttgaccctgtgtgatgagccctgggaggaggcacccaggccagggaggagctgcgtagtgacagaaagggcatctacatctctaccacgtaagtggggaaactgaggctgggcctagcaccagatcactcatgttgaaacctaggtttgaactgggtctctgaatcccatccagagctcactgccttaaggctgaggtgcctgtgagtgtctgaggacccttactatgagacagtgttatcgctgacttacagtctgggtaaagaaggtgaatgcagtcagaggagtagattcaggtgtcagatatttgcataaaataccaattgctcctcatgttggggaggtaattcacaagcttgaatctctaaaaggctgcatctggtggagggcggggctatgtgtcttgtgcacgtctggtctttggagttcttattcagcaaatatcgattgcaagcccaccatgtgccaggcatcatgcctggggcttgggatccagaagatgacgagacagtcaaccaagtccatcagggctctgccaaacccctgtagtgtgagtgggaggtaggagcacgtggttataccccca

SEQ ID NO: 450530 - DNA, 732 bp, Homo Sapiens
gtgctacggtctctccaccccctgctgctgctgggcttgcgattgccgctcgctccagctgagctaagtgtagcagcagcaccagggcagggactgactccagcccttggactcaggacatcgcagaccttcccttgcgtgcgtgactcattcgcacatccatttctgtttatgcctggggtggggagaaaaatcccaaaccagctgtgtaaatgagtatggaagattatgatttcctgttcaaaattgttttaattggcaacgctggtgtggggaagacgtgcctcgtccgaagattcactcagggtcttttccccccaggtcaaggagccacaattggagttgattttatgattaagacagtggagattaatggtgaaaaagtaaagctacagatctgggacacagcaggtcaagagagatttcggtccattacccagagttactaccgaagcgccaatgccttgatcctcacctatgacattacctgtgaggaatccttccgttgccttcctgagtggctgcgggagatagaacaatatgccagcaacaaggtcatcactggtgttagtgggcaacaagattgacctggctgaaaggagagaggtttcccagcagcgagctgaagaattctcagaagctcaggacatgtattatctggagacctcagccaaggaatctgataatgtggagaaactcttccttgacttagcatgccgactcatcagtgaa

SEQ ID NO: 450531 - DNA, 958 bp, Homo Sapiens
caggtgtgagccactatgcccagcctaagtcaattaagtcaagtctaagactgaacctatttttaaagtttactgctttaggttgtgagaatataattttggtcattctcctttccttaccaattctggttctcttaagagtttcagaattgttgtattttacttaacctttacaaactgaaattttggccatagtgctttttttggggaggggcagcaaattgtcgtagggagatggaacattcatttgtcatgttgacacacctatgggaatcagtaagttctttctttagccgtatcatttccttggcataaccagctccataactgcagcaacctctttctgcaaggagacaaactgagctttacaaagtttgtggcctaaactctggtagcaaatgctggaccaatttaaatgagggtttgcaagcagggtgacagtttacaaatgccgcctgaagcaaatcgggacattggttaacctgggagtggggagggctggggtgaggaagggagccgtgggctggtgtgtggacatatgtgcaggcatgtggtctgagcgtacacatatgtagcatgcatgtgtgtgtgtgcggccaggctgcctgagtggtccatccaatacccacagcattgctcatcccatgagcaagtcatctctcatgctcatacaaaatgatctatgtaataccatttccagcccagaaacactttcacttaagcttttcttttgcttttattacaagcatataatattacttgggcaaacactgaatacaagccttcactaatcataaaattcaaaacatttaaggcaatattccaaaacaagacttgacaaaaaactaaaccaccaagaagtacacaaaatttaacacacccaacacaaagcatataaaactgttacaccttccaacttataccaggtcaaacccatgtatcttccggaaacacctca

SEQ ID NO: 450532 - DNA, 417 bp, Homo Sapiens
  misc_feature (30)..(30): n is a, c, g, or t
  misc_feature (52)..(52): n is a, c, g, or t
tccaacctaaagggcgctggcccttggaantaaaaagctaaatctgctccanggtcttcatcttgctcctgaaccggcgggcctccctcttgtgcttgtttggtctcatccctgctgctgctcctaagtacttcatctgctttttcagtgtggagcacagcatcctcggccttgcccaaggcctgctgcagagataccacagtagcattgcgttcttccagcgtatcccgcagagtgtcgatgatgacctggctgtctcgtttctccttgtctggagcaggggtagagggcggaggaaagggaaaggcctgtccatccatcagcagaagaacttgggcccttggattcagtgcctcatccctttctgggaaagctgggctctgacattgtccagttcattctttaagaattctgcat

SEQ ID NO: 450533 - DNA, 1121 bp, Homo Sapiens
  misc_feature (922)..(934): n is a, c, g, or t
ataaatgtacccacaaagtgcgtacgcgcgacctactccaaaccaagccacccgcgccccacagcggtaccatcccccccactacagctggtccggtccggaatcctggcaattggttctgagtctattaatttaaattttgggatcattacattcagaatgaaatgaaattgaccttgatactaactttgagagccaaaaaaatgaatgggtaaacaaagcctaagggtcatgttaattaatttaacaaaacacactattttcagtcctttgggcttgtacattttatagacaaaattagtatttattgatttggaagtgttcaattgagagtaaatgactctgtgttttgaaactaatacctttgcatttaaaatactgaagtattattttgttagttgaagtagatcttttcctgtgtagcatgatttaatgcagagcagttattcacttatacttctgaaaagccataatattgaaatttaaaatgaatagtcttactttaaggtcacttttactttacattttactttaaaggtcgtttttagactttatgcactagtggtattgaaactaacctttaatatttgactaaattgcttgtgaatttttggaaactatgtttaatttttaaagacattgttatgtgaattatcttactaaattatcacttaagaactctctcatagcagtaatttcattaacacatatatatactaaccaatttgctaaatgaattggtcggttgtccctgcttaagtactagggcccaagctttgaaaatgacttaaagtgatctggaattttggatttgagaaaaaataaaccgggcctttctaatccaaatggtttgaaacttttaagtggatggaacccttcaacaaaaagttttcaccccctggcatggaaagccagaaaccannnnnnnnnnnnnaaaaatttacccaagaaggggggctcttggtaaccccaaaaaaatggggccccccaagggaaatattttccccttttgggaccccatattttttttggaacccaattaaatccttttcccccaaagggggggcttaacaaaaacttccccaattacctataagtctccattttaaaccaggctttaa

SEQ ID NO: 450534 - DNA, 736 bp, Homo Sapiens
  misc_feature (37)..(37): n is a, c, g, or t
  misc_feature (47)..(47): n is a, c, g, or t
  misc_feature (107)..(192): n is a, c, g, or t
gtattttaaaaaaactggaccaatttggtagtatcangaaaaaatcnttaaactttccatagattaaaagagagaatacaatccagtgtagagatcaacaaaagatnnnnnnnnnnnnnnnnnnnnnnnnnnnnnnnnnnnnnnnnnnnnnnnnnnnnnnnnnnnnnnnnnnnnnnnnnnnnnnnnnnnnnntagatacctgatttctttttaattatgcttgaaattcaaattacaaaatactaagtaacccatgcatagaggaaacaaaaattgaagattattttatttgtaaaataatgacaataccaatttcataggactttttattagtagtatcataggcagtcttctgacaaattaggaaaagtagatagggtctgtccttagagtagtggcttgggctgattacctaacttctctgcacctcagcactgtcatcattacattgaaggggtccctatggtgccttaaagtgctcaagctctattattcaccacactattttgtcatttttaaattatcataggatattcaacctgaagttttactttacctgcctacgtcatctctacatattctcatgagatgcagttcatgaattctaaagcagtatcatttaatgtattattttaaaaagatatttagaaaggtatattcatttcaaacatctttaagaataacagtatatccacttaataccaaaaagcatctctacagcattatttcatttata

SEQ ID NO: 450535 - DNA, 1063 bp, Homo Sapiens
  misc_feature (35)..(35): n is a, c, g, or t
  misc_feature (53)..(53): n is a, c, g, or t
  misc_feature (73)..(73): n is a, c, g, or t
  misc_feature (453)..(462): n is a, c, g, or t
aaaaaactgcctctcccctcgaaagggccagtggnctgccccccctcccaaangcctgcctccccattcaaanctccaagggccacgtgccctttcccttacctccgtggagtgtcccgtccctatccaggtggttgtttgtaaaaccaaagtacagtcattcctgcctttcctgatacagactagagccaagaggacaggaagaacccagtgggctgtcaagagacacttggtttttgaaacaggacatgaaagcaaatccccacctaaattcaaaaattgaggaaaacgtcagtgaaacctgttaagttcgctaaaaagttggcagatgtttcgtatgtctttaaaggattttggccaacaacttaaaaccaccatattaggacatggtccaggcagtcattagaatatactggctgcacagggcctttcctctgggacatcttttaatgnnnnnnnnnngttttactttgttcttcaaaagtcttctactaactagtctatttatgattaaaacagcaaaaacagatcctggtttgagtgcaggtacattctttgggggagggcacctcaggaacatgcatttatacccttcctgtgactccgtgtagagggaagactaactcacagtccataagaatccaaaagtgagcggcgacttcactcagcaacccatcctgcctccaagctgacttggctatagagtatcttgcgtccttttgttctcttctgactacctgtcactcatgttttaaataatcttcttttgaaataataagccttagctggctttgcaggcaactaggcacttccagcaggacatgagaatgtaagatggccactacccgaacttacaggtgccaaagaagaaagggtataaacggagaccacctatcactcatcagaacctaggatcatcacattcctttaaatggaaaagcccaccctacaactttcttcttaatgttctaaaaagtgacacctaggtttcctcaacagaaagctgtgcttcaatcccaaatccccttgagaccaacatgccttaaagggggtttgggtttaa

SEQ ID NO: 450536 - DNA, 1347 bp, Homo Sapiens
  misc_feature (288)..(288): n is a, c, g, or t
gaaaatagggtcttaaccaattaaaacccagttccttttccaggaatttttcggggggattaccatgtttcaaaatggccatttaggagtgtttttttattccaagcggggaaaggaaagaaaatttttaagcactgaaaattgcataaaaacacggcaaaaactccccaaacttattagagggccagaaaacaatgggaaagcccagacatttctcggaatccaaacaaagaatgcaatattttgttttatttttgaaaggggaacagaaggggaagagtgtttccnaattaagttgttccacctcagctgggctgcctaactactgattttggtgagcatcttgttaatggcttgcttgacatgcgtggtggagctgcgtcgcctcgtcttgccctgcaccatcctccggcgacgcacctctcgacacaattcatagaatatctctgtgatgttcccttctccagtgcaggcagagcactcgtaaaaagcacaagccaattctgtggccagcttctctccttcttctgtgctaacctgcctggagtggtccaagtcagctttgtttccaaccaagatgagagtcacattcttgggctttttgatctcatctaggatgttcttaagtggcagcacttcctcaaaacttcctcggtcagtaatgtcgtagaccagcacaaagccttccccccatcgcatgtgcccctccctctgaatggtatcttcctgaccagcagtgtctagtatctccatggaaacaacttcatcatcgatggttgcttggtgtcggtaggttgattcgagggtgggatcatattcccagatgaaccgtttggtcagaaatctcactacaagagctgacttgcccacgcctgctctcccaaatattgccagtttgacctccgcacttttagccatgatgggtgttggtagacaatttactgttgttaaaactaaagcactgagtaaatctttttggttccagtctttggattcaccatatcattgtgaatcttggaagagtccacaatcctgttcacactctccaggccaggagagctacggtcctctgcaagttcggaatgggtcccccaagatcgcgaagccctcccacactgcgcagcccaggcttcaggttgcgtttgcgagttgctgggctgcggtcgtgggtgggactcgccgcagaagcaagtgccagtggcccggcgggggtctcctcactcgcgctcgctccgactagcggcggagggactgcggcaggacgcgagctgagcccggccaaggccgctgcgctcagcggccaggatccgctctcgacgaattcgagctcggccgatttggcctgat

SEQ ID NO: 450537 - DNA, 2443 bp, Homo Sapiens
  misc_feature (31)..(31): n is a, c, g, or t
  misc_feature (68)..(68): n is a, c, g, or t
  misc_feature (72)..(72): n is a, c, g, or t
  misc_feature (125)..(126): n is a, c, g, or t
  misc_feature (194)..(194): n is a, c, g, or t
  misc_feature (223)..(223): n is a, c, g, or t
  misc_feature (809)..(842): n is a, c, g, or t
  misc_feature (2170)..(2208): n is a, c, g, or t
ggcggagtgcatatatgttgtatgatagtgntcagacgaagcagagaagagatatcgacgcgtcgcgnaggnggggtactgataggatgtgatatcattcgtgtcgcactcgacgagatactgtnnatgtcaaccgacgtcggttcagtacatgctgcgcccgtgcgcgctgcggtatacgcagatgcgggctntagatatcggtcgtgagatgacggtgtgntcttcgtattggcaggataggttctctgcatcgtacgttggctctcagagggagggtcgtcgctgagtagcgtcaaatgtctcgtctctctaggacgcgctcgcaccgatagtgagcgggcgtgcggggtgcgggcgtgccgtctaccactgttcgtggtccgagggaagggtccccgcgggggcgtgtgttttttctggggatgaagtggcagggagatgaaacaccatcgatggatgtggcggcgcgtgggggtgtggcgtcttagaggaaaagtgtggtgggtactcgcatcccggccgtcatatatttagggcggcggcggatcgtcaaaaggcgctgagtgtgtgttactaaagacccgcagcaggggcgcagtgttacgggcaaaggcgatgttggcggtatacggcggcgccggcgcccccagcctgagagttttgattggctttttttgcggatctgttaccggacgcccacggaaatggtcgtgtggctgcattaggtcgttcgcgcgttttgttgtagcggttgtcgcacgcgggtatggttttttgcttggctcgttgtgtccgtgtttctctcnnnnnnnnnnnnnnnnnnnnnnnnnnnnnnnnnngtcacgcataggcttgtattcaggaacaattttacaaactccagaaaaggcagcaggagatccagaatctctgtgtgccttctcttcatcctacccccagaaaaatggccagtccagcccagcacctggtgcagcctcaatattaagggactgcttgtcccatctcttgcccaggggaagtcggagagaaagctcgcccgtgtgcatgtttgatataggctgtgtgtgtaggcagggagtgggctagaggaccctggacaccttggccagcctcctaggcagtgagttagaggaaagaggactaggtcttgcacctctgccatacctcgggatccagacagaccaggcagcgtgttaatattggtgttctgcatggtggacccaagctaaagtgttgcctgcacccaagggcctgggcacggaccatcttccatcagcccagggcacaggcacagggccacccagctggggatggtggacaccgtgtccccattcccagccccggctctagaaggcactgttttgtggactgcgacccctggagggtgggcagggcctggacaggcacaggcggcgctgggtctccagtcggcagaagcggttctggttggacacccgggtggccatgcccagcccacaggtggtcgagcagggtccccaggccgtgctccattctgggcaggggacaccagggggcagggaagagacaaggccagaaaactggggtccttgggctggaaggggctgggtccccagtccccctccttggccgcacacccactcagggcagcacttgcccaggacctcgaccctcctggggtgggggcagtcccagctgggcagccgcacatcctcgctgcacagcggcacgcaggtgaagccgccgtcctcgcagcggcagcggatgctgcagtggggctggaaggtctccccttcccgatacaggcggccgttcacctcacagctgctgtcgtcctctgccaagaggcacagggccccccggccaccgggtcctgccccgggctggcagaccaggccctggctggcgtcgcagacgtggagttggtcgcagggctcccccagccgccgtgcacatacccggcagcagccacagccatccagcaccaggggtactcccagcgggcatcggggaggtggccaggggcaggtacatggtgtcgggcacagctgggtacgcacctttgagaggaggcagaggagggagaaggccaggaggtgggtcttcggtgtgcctctcatgtcccctgcagagccagctttgagcctgaaggtgaaactgtgaaggccaccaagggggtgcctgtccnnnnnnnnnnnnnnnnnnnnnnnnnnnnnnnnnnnnnnnaaagcctgagccagtgccagcaccaagagcctgtgacagcttgcagaggcctctccagctccttccagcccaagagggtcctagccctgctgtagttgtgaagccctattccagaccccctgtccgaaccccagcggggctgcagataccagaagcattcagtaaacacccctttgcagagctgacccaaggtctcctaagctccgtggcctgactctgggtagccgcggcccag

SEQ ID NO: 450538 - DNA, 830 bp, Homo Sapiens
  misc_feature (815)..(815): n is a, c, g, or t
ggggtgatgacagtccactggcccgcaggccatttcccagaagctcagacaataccttcgggcctccgctcgacggactgccttgtccactctccgcctgggaacgggggttcgtgggagcgccttagtggaagtttgtggagctcgggagttggcatgcacaggcgcttcggagcgcggccccgaggggcgccggcaggcgagaggcctgcactaaccggccgtaagcacagctcttttgtactctgttttccccctaaagacatctgatgcccccagtgaagaaaagccaacagcagcaaagcctgatggagagcatgcagcccgggaagcccagtgactgggagctggagggcaggaagcacgagcggcccgagagccttctggcaccgacgcagttctgcgcggccgagcaggacgtgaaggcgctggccgggcccctgcaggccatcccggagatggacttcgagccctctccggcggagccgctgggcaacgtggagcgctccctgcgcgccccggccgagctcctgcccgatgcccgcggcttcgtgcccgcggcctacgaagagttcgagtacggcggcgagatcttcgcgctgcccgcgccctacgacgaggagccgttccaggctccggccctcttcgagaactgctcgcctgcctcctccgagtcagcctgacattgcttctcgccctcagttgccatgagccggcgccgagcacccgctgcagccgctgccagagcgccgttcgacgattgagctgccgattgcctatcatacttgatattatatcgagtatcgcgcacccgnccggggtaaaaagcc

SEQ ID NO: 450539 - DNA, 426 bp, Homo Sapiens; identical to SEQ ID NO: 325266

SEQ ID NO: 450540 - DNA, 762 bp, Homo Sapiens
cgggcagcacattcctccgggctggcaggatgatgcctgtggctctgcgaaggggagcggttcggaggcctgggatggggtaagcaggagaggagacaccggggaggacagggctgggcactcttcccaggatggcgagctggttgctcagggctggcagcctggacagctatggaagaaagaccagggccaggcagggaaggccaaagggccagtgggcgtgggcgaaggctccatctcggctgcgtagctgttgaggtgggagagaaggcgaatccggacggggtctgcacggctgctgggcccttcaaggacccccaggtacctgatgacctcagtgaggcactcccgaaaaccaatgctccggaagtcaactgccagggctcgggcatcaaagaatcctgtcccaccagtggcatggagcattttcaagtgatccaccgtcatctgcaagacctcggctttctccagcttggaagagccctgtttctcaaaggcagtggggaccaagcgtcgcaattcagaaaggctactgttgatgcggtctcgacgccgtttctctatgatccctctgcgtttcttcctggcttgcatctgcgaagagctgggggtggacagcggcctggccatctggctcagctggccctcttggcccacgtcgatgggtccgtcggactccccgtcggagccgctcggctccttgggtcgcttcatggcgaacgcaggctgcctggtctcaagccccgcggctaaggctcccag

SEQ ID NO: 450541 - DNA, 1852 bp, Homo Sapiens
  misc_feature (55)..(90): n is a, c, g, or t
ggagcgaggcctgggtggcgaattcggcacgaggctccggggtcgaaggttctgnnnnnnnnnnnnnnnnnnnnnnnnnnnnnnnnnnnnagcgctcctccagccggctcgggccgctcggctatggatcgcctgctcgccgggcgctgaaggcatccccgggatccggagcgcagcccgggaaagaaatgcacagcggtattgatgagtagatccttggattcagaggttggctgaaacgcaccatgcctgcttccatcttttgctctgtaaagttgtgaattgctcatgcctatagggaggaaggatggcacatgggattccttctcaaggcaaagttaccataacggtggatgagtacagctcaaaccccacccaggcattcacgcactacaacatcaaccagagcagattccagcctccacatgtacatatggtcgaccccatcccatatgacactccaaaaccagcgggccacacgcggtttgtctgcatctcagacacacgctccagaacagatggtatccagatgccttatggggacatccttctccacacaggcgatttcaccgagctgggactgccctcagaggttaagaagtttaatgactggttaggaaacctgccatatgaatataaaatagtgattgctgggaatcatgaactgacatttgataaggaattcatggcagaccttgttaaacaggactactaccgtttcccctctgtgtcccaattgaaaccagaggactttgacaatgttcagtccctcctgacaaacagtatttacttacaagattcggaggtaacagtgaagggattcaggatatacggtgcaccttgggaccccgtggtttaatggatggggctttaacctacccagaggtcagtctctgctggacaagtggaacctcatccctgagggcattgacatactcatgacacatggacctcctctaggttttcgagactgggttccaaaggagcttcaaagagtgggctgtgtggagctgttaaacacggttcagaggcgagtccggcccaagctccatgtgtttggtggaatccatgaaggttatggcatcatgaccgacggttacacaacgtacatcaatgcctcgacgtgtacagtcagctttcaaccgaccaaccctccaattatatttgaccttccaaacccacagggttcctgaagctctaaatgccctattggaatgtgagggaaggtctataaactgccatttttctaattataaacttacattctcttacttatttacaaaccctgtgagttctttttgtaaattgttggaacacaaatgatgctagaggttgtgcttcttattttattttattttaaatggggcatccatttgaaatcagaggaacattgtgaatttgtaaaatgacttctgttttctcaaaggccatgccattgtaaattgttagtgttcgccaaaggacagccaagctttcttttaaaaagtgataaaagtcttattttaaatatgctttaagctgaaagaaccaaataagaaacaggccaggttttaaaaaccaacacagatatgcacaacgtgttaagagtatggtctgacatattttcacatttcaagggtccggagtagtcgtactgggtaatgcctcctttttgcagcatgtgggtccccaattattagcaaacttcttcacagaagttaggcctggcaaagacttctttcatactctcactattaaagaagctgcctgtcagaacacacatgggcggtccatacaggatggttaacatggagaacccatgggggatacaaggagccatgatggtcgctatttacatatctcgctttacaaa

SEQ ID NO: 450542 - DNA, 878 bp, Homo Sapiens
cgagtccatggagtctgtccaagcctcgccctggacgcttggaaggggtggaaagggtcaagggtccgggtctaggacaggctcaggggtctcagcaggttctccttggagggcctgagcctggtaggggtgcggtgccctgggcccctccatgccccctggtttgttaagggggacagagcagctgctgggccccaccatccacttaaggactggccgtgattcttggcaagctccgcccgccaggccacctctcacccagccagggcaccccgggcgacctccgcgccaggtgcgacagctcaggccggagacctcgtctgtggggacgggccgtgtccggggccgccaccctgagaccgggcgcgggcaggacggaacctgggggggaaacggggcaggtactggctttaggagtctaaatccccaaacgctgagcagacggaagacgttcctgccactttacctgcagttcaaagacctggcgagggcctggaaacggcgctcggcccaggccgcttgcgggcgctgggcctgcagccgctgcaggtcgggccctgagtcctggcgctcgggaggtccctgagtcggtccccgagtcagtccccgggcgcggggctcggttgggggggcccggaaccttgggctggtttcacgcaaatccgtttggggcgagcctcggtttcccggcagcggtgggaaagggcgcgagcggccagccatggcgcgcggacccttcccgccggcggcgtcacagcggcgtctcctcctgctccagcgcgtgcggcggtgcgtggcacgagggcggcagcgacgccagcttcagcagcgcagggcggcggcgcgcgcgagggcgctggaacgagcgccggctgtgc

SEQ ID NO: 450543 - DNA, 1212 bp, Homo Sapiens
  misc_feature (146)..(269): n is a, c, g, or t
ggtttcttggccccctgttcaaccccagggtttgggaaccgccaagtgggtgtggatcacaaggctcacccaccagccctcaaaattgctggggccccaaggcaatttggttcaaggcccccaccccttgctaaataaaaagaagnnnnnnnnnnnnnnnnnnnnnnnnnnnnnnnnnnnnnnnnnnnnnnnnnnnnnnnnnnnnnnnnnnnnnnnnnnnnnnnnnnnnnnnnnnnnnnnnnnnnnnnnnnnnnnnnnnnnnnnnnnnnctggttttaccttctgcttaacacaggattcgatcttgatggtgttctcctacagttcacaaacttagtgactccattgctttagaaacaaagccataaatgatttgatgttagaaataatttggtttagaaaccaaaccattcccattattgcagcattatcatcagtcactgactgctaatgctttttatgcttcttttttcctgggatgtgtgaacctggcaacttttcttcctgttcttctatgttcttagcaaacccacatcaagggtgtctgttcgtgtttgaaactcatcagcatcagaaagagctaacatgttggcagtatctagaaaaccatcaacatgatcatgggacagttcatttcgctttgcagctgatgccaccatagtgagtgagtactctgctctgttcatctgagcagtcactttgcttttgcaaagcagttgtggattacttcctgggatgtcagtgtccccaaatggcaatgagatttcctcatcacatcccagaatatgccacataatgtactgagcattttcagctcggtacattataatttttggtaatttattgtcctcagcctagtggctgcacacagccatgctgctggcaggtaaaaaaggctactcacttgttttaacgtccaatgaatgtgtgcagtacatttaccagtaacagaacatttacattctagcaagctatttttctaattgcagaagccattcctaaaacaactgacggacatcactgcattaataaatattttttatttatacacagtaaagttgtgtatataaagggaattttcaaatttccaatgtaaatgattctaatttcttgctatgcttagtactgcagcaaaagaagggtgatagcctatctttatatatttctttttctcccagggcaacatttctctgcaggagtgaatgtctggtt

SEQ ID NO: 450544 - DNA, 542 bp, Homo Sapiens
  misc_feature (28)..(28): n is a, c, g, or t
  misc_feature (35)..(35): n is a, c, g, or t
  misc_feature (40)..(40): n is a, c, g, or t
  misc_feature (45)..(45): n is a, c, g, or t
  misc_feature (144)..(144): n is a, c, g, or t
caacggaacggctaaagccttttaagcntcttttnccccngggangtgtgaacccgggcaaacttttcctccctgttcctcctatgttccttagcaaaaccccacatccaagggtgtctgttccgtgtttgaaaactccatcangcatccagaaaagaagcctaaacatgttggcaagtatcctagaaaacccatccaaacatggatccatgggaacagttcattttcgctttgcagctgatgcccaccatagtgaagtgagtactctgctctgttcatctgagcagtcactttgcttttgcaaagcagttgtggattacttctgggatgtcagtgtcccaaatggcaatgagatttctcatcacatccagaatatgccacataatgtactgagcattttcagctcggtacattataatttttggtaatttattgtcctcacctagtgctgcacacagccatgctgctggcaggtaaaaaaggctactcacttgttttaacgtccaatgaatgtgtgcagtacatttaccagtaacagaaca

SEQ ID NO: 450545 - DNA, 800 bp, Homo Sapiens
  misc_feature (761)..(761): n is a, c, g, or t
  misc_feature (788)..(788): n is a, c, g, or t
tgcacatctctgactccataagacacaggttggtcttaattattcagagttactgtttagtaaataaaataataactctctcaataccaccaccaggctgtgaagccaatttgagtgagcacattttgatggcagcattcaccccgccatcgcgcaccagctacctaacagcatccttcaggctgccctgagtgtagttcacgtctggactgcgcacccctgtgcatcgccagcttgcacttctcgtcacttccagcagcagctatattacccaggctgggtacgggcccaatgctcaagagcaaaaatcgcagtgccataagttatagggaggacagcagcttcttatagggagaccttttctggaatctgccacaggtccttctggtcagtgacgcattcttcagccatacaattaaagtttcttgtgccaataactctatctccctctttaactgtcctgacatctgtgcctgtctccaatactgtcccagaaaagtccattccaggtgtgaagggaagatggggcctttcctgatattgatcacggcagatcaaaatatcaccaaagttaactccacagaaatggacatcaactctgacctcgtgaggcccgacggggcgggggccacctcttcaatggtcaggggcttcttcagctctgcgcaatcgcagccggtagtgccgccgctgccctgtccggctctcctgcagacccacgcccgaggagcactgcctgcagagccgccatcccggacttnccacgggagccgcggggtttaacccangacactagcctt

SEQ ID NO: 450546 - DNA, 821 bp, Homo Sapiens
tctgaagagccaagagtcctcctagatgtgtcaggggacttgctattggacccttctgggtggaagagatatctgaggaaccatgacgggctcgcctaggaggagagggatctggtgaatcatgacggactctcctaggagatgcacctgaagaattatgctgaggcctccttgggggagaaggatctggagaatcatgacgggccctccttgggggtgaagtgtctgaggagtcatgacggatcctcctgggaggagatgtgtctgagtcatgacgagcccctctgaggggagaaggatccggggtgtcatgacgggccctcctaggagatggatccggggtgtcatgacggtccttcctaggagatggatctggggtaccatgacggaccctcctaggagatgaatccggggtatcgtgacgaaaatgtctgtttgagggtaggtcttcgttgtggcctcccagaagcttccatttggcactggaacgaaaggcctccatctgctttacctcttctggccgctcatccacaaactctgccaccacaggcaaatctccatcatcttcctcttcctccttttctagtttggttgtggagatagctgtccagctcacatcatcatccacaatccgcattcccttgccgccggccccgccaggcttcggccgctttttgcgacgcttgcgaccggactcagatccccggtcgacgccggcatctgccccggacaagtaacgcttcagatactcggccttggaaagcggcggagctgccgccatggcagcggcggatcccatacactccagaccagtaccagcc

SEQ ID NO: 450547 - DNA, 1480 bp, Homo Sapiens
ggaacttctcctttaggtcagtagcatccccatattcgacgtcaaggtctaacacaggtctttgttaacacagcatgagtcacaaatgttgcccaccagagcaggataagtttttgagcttgtaatagccagaactgggtttgaagaaaatcttgcagttataaataaagtgatttttgtgaaatgtgttgttgagagaagtgatttgtcaatgtagttatttattgtatcagttattttgcctggttaccctgatatcccacctctaacctcagaactaaacattttatttgagatctgtttatttgcttctctgattcttggccatatatctaatttctacatcctcttggtcaggatttcgtgtgcatcttaagcttgcttccggtaagttatccccaactgccaaacatcttatacaaaaagaaggtacagtctctatcccaccgcaaactctctcctatttctcatagctggatcatcctgtcactcactcatttcataacacttagcacttgcacaccaggaattaagctaggtctaattttggtctttgcccttaaggatcccagtgtgatgctgtaaggacccagtgaacactgttgagcccaggagcgaggtgactaatccgtgagccaggtgctctaaatatacagtaaagggccatttaatttttgcaccaaccttaaaagagaaggacttttgtcgtcatgtttgccagattaggaagctgaggctcagggaggttcggaaccttgccggaccgagttggcaggaggcgagacgaggctctaagccctgctcccagagctctttctcccccatcaagctgcgtccacgcggttaggaagcatcgcttgggccctgggggatgggcagcggcaaaggagagctttttcctgtccgctcggggaagagcgcccaggggaaaggggttgtgggtcccggcacgcggcactacgctccccgtcccccgcctcgtctttcttcggctcggcccgtggggcttccgccgccctgggcttgcagctgggactcatttccagatcggtcgaaggcaggtcttccttctagggaccggtagctcagaggaaggaccggcggcaaccgctgccctgtccgaaagtgcgtctcctttttcattccgaaatgaaattcgtagttggttaaaacggggcttgccagcacgatttacaaacaagacgagcgctcgctgcaatcacatgaggagaaaaggaaaggactaattcataatgcggtcactagagcctcgatgtgcccaggggagcgcccgccgagcgccagcgggaacagcgcatcgcggacgctgcagggagtgtggcccctccgcaggcgcgtgcacaggctcgcattctggagggcagcgcatctcagccgtgcgcccggtccttgccaccccaaactccggcagcgaacaacgcgtcctgggggcggatcctaaactccggaccggaccagc

SEQ ID NO: 450548 - DNA, 895 bp, Homo Sapiens
  misc_feature (878)..(878): n is a, c, g, or t
ggggggaaaaagggtgtttattaaccaacggcagggggaggagctgagcccaggctccccactctgtcacatgcctgttccacccacctggttgtaagtgggggcattcctaaagaagtgtagccattctcacaataaatacattcattgtggggtggaggtgggagaggttgggtgaagggcagtaaaaacccgtgggattccacgttctcagctacaaaaataacagtcatcctcacccgaggggaatgggggagctcagtcagaattgattgtcccatataggcctagagacttcagaggccctggaccctgaaagtgccccggtgaggtaggacaggggtaggagctaagcgtccaaactcccagcctctgccctttgcatagttccaagaatgggcttcatgtgccagttgagacatcagatttctcctccctttccctgctgtagtctagaggaagcaaatgcttgattcccccaaaagagaggctggctcattgagtgcagtgttggtcatccatcctaggcaagggcctgtgaggacagttaaatgggagggggatctccctctgaaatgtccacggactaaacccaacagacaggtccaagacagcaagggaggctcagaggtgcatgtgagtggaaatgtaagcacatgtgtgatacaggtgtgtgttaccacatgtgcatggggatgggacatgcctggagctctgtctctcatactcttgagaatgaccaaggagagtggggaggctgattcacaagggccacacaggaagggagaggaggggagtgatgcagtcttacctccccaggctggcccgttccccagctcttgacaaagaggtcaccacatggggctgggatccctacntcctcgaccgtacagcc

SEQ ID NO: 450549 - DNA, 765 bp, Homo Sapiens
  misc_feature (387)..(387): n is a, c, g, or t
  misc_feature (660)..(660): n is a, c, g, or t
ttttgtttcttcctactctcgatagccatgcatgctgggctggggtattctggttctcgccaccctttggtggttcttcccgcttcatctcgccggccctttgcccattcccccctccctgccccatcgtgctgcggattagccgcatcgtcgctccacgtgaccaggctgttacttgatgtccaggagcaagaaggtatccttggatacagcctgataggtcgtccagcaagatagagaaatttcgtcagtgacgataggtcaagaagatgtcggtgtcggctaggtcaggggacagagaggcgctagacactgtgtgtttggttgtacaccggctgtgtacggggtgttgggggagcccagaaaggctggtgggcccgtggggtnctccctgcgggcttggccgcccttccctcaggaaagagcaggcagccgagcaaacaagcaacagccaagctgtacgagaccagcccagcacagcctgcagagcatcgccggtccctttggtaaaaggccactcactaccgccccttcccatggtgggctgcggaaggctggggaggaagcatgaacggcagctggagactgtctccgtgctcaggattccgggcggcggcggcggcggggtcgaagcgagatgagtctcaggctgtgcgagcnaccgcgggctgcgcgtgacgccggggtacgggcgtggagctcgtgcagcggagccagggcggatggcgcccaggtgcgcggagctctcggggctcgatccggtaa

SEQ ID NO: 450550 - DNA, 1128 bp, Homo Sapiens
gggaggagcgtttttggagaaagctgcactctgttgagctccagggcgcagtggagggagggagtgaaggagctctctgtacccaaggaaagtgcagctgagactcagacaagattacaatgaaccaactcagcttcctgctgtttctcatagcgaccaccagaggatggagtacagatgaggctaatacttacttcaaggaatggacctgttcttcgtctccatctctgcccagaagctgcaaggaaatcaaagacgaatgtcctagtgcatttgatggcctgtattttctccgcactgagaatggtgttatctaccagaccttctgtgacatgacctctgggggtggcggctggaccctggtggccagcgtgcatgagaatgacatgcgtgggaagtgcacggtgggcgatcgctggtccagtcagcagggcagcaaagcagtctacccagagggggacggcaactgggccaactacaacacctttggatctgcagaggcggccacgagcgatgactacaagaaccctggctactacgacatccaggccaaggacctgggcatctggcacgtgcccaataagtcccccatgcagcactggagaaacagctccctgctgaggtaccgcacggacactggcttcctccagacactgggacataatctgtttggcatctaccagaaatatccagtgaaatatggatcagggacgtgttggactgacaatggcccggtgatccctgtggtctatgattttggtgatgctcagaagactgcatcttattactcaccgtatggtcagcgggaatttgtgcaggattcgatcagatccgggtgtttaataacgagagagcagccaacgccctttgtgctgggcatacacgttactggctgtaacactgagcatcactgcatcgagtggaggagggttcttcccacagtgcaaaccccgtacagtggtggtggaaatatctcccgaccttggacctgggatggcactatggaaactcacacgttaagtagcatgcttgcagtcgagagactatcggaagggcggatgtttccttggtctatacactcaaaaggatctctgctgctgtcaggcgcgaaaccgatatacaagcccg

SEQ ID NO: 450551 - DNA, 1139 bp, Homo Sapiens
ggcatcgatggggccctcgatgccccagacatctcggatgagcttggggtacccaggcctcactgccttttcgtccagttcatagcagtactgccctcggaaggcaaagagggaaccgttcttgaggtcggtgaaggcgtcgaagggcttcccactgcacagctcctcctctgctgggggctgaggtctccctggatgaagggtctcaggccttgagtctatcccctcaggcttagaggcgcccacctcaggcgcaggggcctcttcctcaggtttcagaacaggtgtctgctcaggattccctttggactgggcctggaggtcagaggtcagggaggggccccccacctgttcatggacagtggcattggtttttctcctcggccatcgtcatagaccgtgtactcatcctccggcatagtgaacacatccccgcgagtcacttggggcttgcactcagccgtatagtctgtgcagcagctctggtagtaagagcagagctcgtcacactggcacttcttgtccacgttgaagccctcagtgcagcggcccttgcatgactcttggtcagccagagcaacccatgccagcagggccagtatgagaaggggtctcaggggtgccatggcagggcttctagctcagtgcctggcaagctgggctctgtctccctgaagtctccgctctgatgcctgaggaagggagggagaggcagagacagggaaggagggcactggagaagaggaactgccttttctgctgctctgtttgctcaacctccagcccatcccctctgccccctccagcggctgctgcagcaaaggtcacattcctggaacactgggcctgggcgagctgggagataagacctttgccaagctcagaatcattaggtcatcggaaggggaattagcaccgtggatctggagggcagaaagaaggctcattgggcacagctttatctctctgagtcttagttcattttcagtaaaataggattaacaagccttgcttcatggggtgttgggagattacatgaactggaccagacaaatgcccagtagctggagcagccacaattccttctccaacatagctattgatccatgattgatccctacttccgggccgtaccagcc

SEQ ID NO: 450552 - DNA, 466 bp, Homo Sapiens
  misc_feature (21)..(21): n is a, c, g, or t
  misc_feature (118)..(118): n is a, c, g, or t
aaagaagtgcccagtgtgaanaactctgctcttactaccaaagctgctgcaacaagactatacggctgaagtgcaaagccccaaggtgtgtttcagagcccaggtgggtgggctgggntgccccctgctgctggagactcactaccatccactctctgcagtgactcgcggggatgtgttcactatgccggaggatgagtacacggtctatgacgatggcgaggagaaaaacaatgccactgtccatgaacaggtggggggcccctccctgacctctgacctccaggcccagtccaaagggaatcctgagcagacacctgttctgaaacctgaggaagaggcccctgcgcctgaggtgggcgcctctaagcctgaggggatagactcaaggcctgagacccttcatccagggagacctcagcccccagcagaggaggagctgtgcagtgggaagcccttcgacgcc

SEQ ID NO: 450553 - DNA, 668 bp, Homo Sapiens
catggcaaaagtaaaaagggtcagcagaatgatgttccatgggaaacggcgtctgggtccctggcagcaggcaaggatcaggtaggtgacaacgaagacagcataggacacgtagtagacagccacatttctcctcacaaaggcgctgacaggttccacaaaggtgaagatagcaatgatggccacagtgatgagcagctgcacggagatgatggagtaaacctttcggataaaagtgtgtcgcactttccggtcatcccactctccaggcccgaagctatcactcaccgctctctcctccccatcatagccatggcctgggccgtagttcatgggcatcgggtgggtggggggcatgggctgtgggtagccagcagggtgaccgtagccaggctgcgggtagccagggtaggcaggataccctcctggcaggacagatggctgcccatagcccccagggggcggagggcctgggtacagggggttgcggtcttcatatggtggtggggcgctggggttggacatggccgctcacgggctgacggggaaccccagctgctgggacctgcgccgttccagacggagcgttcctggcctcggagtgttgcaagtcctccggggccgggcagggctaggctcggctggggctccgcgccccgccccgtcgc

SEQ ID NO: 450554 - DNA, 1782 bp, Homo Sapiens
  misc_feature (443)..(488): n is a, c, g, or t
  misc_feature (530)..(594): n is a, c, g, or t
tgtttcgtcgtgtgtcttgggtactggggtcggtgtcggtgtgtggtgtggccagtcgtgttggcgtgtggctgttgggggcgtgcgtgggggtcggggcgtgcgctcgtgtgtcgtggcggcgtcgcgtgtgtcgggtggttggctggcggcggtgtgtgttgtggggagtgcgtcggggggggttgtgtctgcggcgtcgagtgtggcggctgtgttgtccccgtggtgcccctgggcgtgtgttggttttgcctccgggtggcttcaattattgaggtgggttggttgctctcggttttgttcccgcgcagtgggttggggtgttcttgtggcaggggttggctcgggtgagtggcgtgtgtcgcggtcgggaggcgtgtgttatgaagtgctggccctgtcgtgcgggggtgttgtgtgaggggcgcgcgcgctttgtnnnnnnnnnnnnnnnnnnnnnnnnnnnnnnnnnnnnnnnnnnnnnnggtaatttggggggtgtccccccggcggtgtgtagttctttnnnnnnnnnnnnnnnnnnnnnnnnnnnnnnnnnnnnnnnnnnnnnnnnnnnnnnnnnnnnnnnnntttgtttttttgaatcattgtaagttaatttaatttcagattgtttgtttagaatgaagatagtgcctttaaattatgaccttccatagccccattatccattaccattcattcatccactcatttgttcattcatgaattcatttagttcaaataatatagaggtggagatggggagaaatcactggggtgggggtggatgtcaggaagtaagcaaatgtaagactgcagctctagtatagaagagatgatgaacataaacaagtcttaggagaggacaggaagaaaaccttccctgtaggcccgtaaaatgtgcttgaatgaagggaggttgggcgctaccagtggaacgttaacaccacagcaaatgtgcgcccacaggtagagggttacatgttcgcctttgtagttaaaaaagaaaggtatagtccttttccatgtacaaagcattctatcattcattaccaaatgtaatcctcacagcaacagtgtgaattaggagtgttcccatttaacaatgaaaatgccgaggccttggggagaatggctggtccaatgttgtacaaccggtaaggcggcgatagaggagaaaagactaaaacccagatctttctctaaattaggagctttgtgcacaatcctgctaccaccaaatgttagaatcggaagggagcttaaagaccaagtctagtcctttcattttaaaggagttgggaatgggccctgatttgccccagctggtacataacagagtggagatccaagccttggtttcctgacagctcccagtctttccactctaccacctggcctcaaaatgaaaagaaacacaaatgttctacctataaatcagagctcgccaaaaggtcactagaaatcaaacagcaaacacctattctctttgaaattcaccagcaaagctggtggcagcaacatttcctctattcccaggaatcttaaggctttggagaaatgagaataagcacctccacaaaaacagaaccgctgaataatccatttagaatcttggccagtatgtgcatactataggcctattaagtcaaacttattaatagcttttcttcacagagaaaaaagttcatatatacctactgactacatttgatcagtaagatatcatgtcagtgtccttcttacctgaagtacatttaggcgggtcatatcgtg

SEQ ID NO: 450555 - DNA, 735 bp, Homo Sapiens
  misc_feature (18)..(18): n is a, c, g, or t
  misc_feature (29)..(29): n is a, c, g, or t
  misc_feature (65)..(65): n is a, c, g, or t
  misc_feature (463)..(476): n is a, c, g, or t
  misc_feature (578)..(641): n is a, c, g, or t
ctacccaccccggccctnaaatggaaaangaaaacacaaatggttccctcccctataaatcaggngctcgcccaaaaaggttcacttggaaatcaaaacaggcaaaacaccctatttctctttgaaaattttcacccgcaaagctggtggcagccaacatttccctctattccccaggaatcttaaggcttttggagaaatgagaataagcacctcccacaaaaacagaaccgctgaataatccatttagaatcttggccagtatgtgcatactataggcctattaagtcaaacttattaatagcttttcttcacagagaaaaaagttcatatatacctactgactgcatttgatcagtaagatatcatgtcagtgtccttcttacctgaagtacatttatggctgggtcatatcgtgacataaataatcacattttgtagcttgctttagacggaatgcgannnnnnnnnnnnnngagacggagtctcgctctgtaattctgtggatgaaaaagctttctgggaccctcttgaattattcgctgtaacaaatgaagtgatgtggtttctattaaaannnnnnnnnnnnnnnnnnnnnnnnnnnnnnnnnnnnnnnnnnnnnnnnnnnnnnnnnnnnnnnncagccagtctgccagattacagtgacccagattctccagtctcctgcctgggacccaaaaagatacatctggctctacttttttttgttaagga

SEQ ID NO: 450556 - DNA, 479 bp, Homo Sapiens
  misc_feature (362)..(362): n is a, c, g, or t
  misc_feature (431)..(431): n is a, c, g, or t
  misc_feature (466)..(466): n is a, c, g, or t
ttttttttatcattgtagttatttatttagattgtttttaaatgagatagtgcctttaaatatgacttcatagcccattatccattaccattcattcatccactcatttgttcattcatgaattcatttagttcaaataatatagaggtggagatggggagaaatcactggggtgggggtggatgtcaggaagtaagcaaatgtaagactgcagctctagtataggaagagatgatgaacataaacaagtcttagggagaggacaggaagaaaaccttccctgtagggcccgtaaaatgtgcttgaatgaagggaggttggggcgctaccagtgggaacgttaacaccacaggcaaatgtgncggcccacaggttaggaggggttaccatgtttcgcctttgtagtttaaaaaaagatagggtatagtccnttttcccttgttaccaaaggctttctatccttccnttaccccattgtt

SEQ ID NO: 450557 - DNA, 541 bp, Homo Sapiens
  misc_feature (11)..(11): n is a, c, g, or t
  misc_feature (88)..(88): n is a, c, g, or t
gagcttaaagncccaagtcctagtccctttccatttaaaaggagttggggaatggggcccctggatttggcccccagctggttacatnaacagagtgggaggatcccaagcccttggtttccctggacagctccccagtctttcccactctaccaccctggcctcaaaatgaaaagaaacacaaatgttcctacctataaatcagagctcgccaaaaggtcactagaaatcaaacagcaaacacctattctctttgaaatctcccgcaaagctggtggcagcaacatttcctctattcccaggaatcttaaggctttggagaaatgagaataagcacctccacaaaaacagaaccgctgaataatccatttagaatcttggccagtatgtgcatactataggcctattaagtcaaacttattaatagcttttcttcacagagaaaaaagttcatatatacctactgactacatttgatcagtaagatatcatgtcagtgtccttcttacctgaagtacatttatggcctgggtcatatcgt

SEQ ID NO: 450558 - DNA, 1029 bp, Homo Sapiens
gctggtacggccgggattttgggattgacattccttctctttcctggccctcaaccacttccttcctttggctcttaagacctagcaggttctgtgaactctcaggccttggccagcactagttaggggaggtcaggtggtcaatgtcctggtgattttatgagactgccccactgagaaaacttacttacttcaggcatccagtgcccccacccaggttcaggccctgtctaaggtgttgcttaaagacaaaaaggcaacatgtgcctcactggtggtgtgccactgttctcatgctgcctcctaagtgactccgattttcagccctggtagaataaggaagacagctgatgcctccttagccccttagcacatgttcctaaggtgtgttgtcaagccaacctgaattctgcctccctgttatagtccctgtctcccccacagagacctgtgggtgctcccagcagagttgagactggctccgttgagttaatgactagaatatagtgctttcactacttgattgttaacctgttttcttctgatgccatcagtaccagcagtcagactattccactggttaagtgtttactaccattaaagcgaggcatgaagcaaagagctgagtgagtcctctgctctccagaggaccaagaaatacctgtgtgacacaggcccacttcagtgtgtacagcaaattctatagtgcttctgagcccagcaggggctttacctgcccctggagagtttagccggctgtgttccttgtttacttcacaaccaaatttgtcccctcttctctctgttaaggggacgagcaagtcactttagctggatatacctatgtacaaactgagcagctggtaatagcgaccaaagcacaggcagacagaaactagggccacaatccatgggggacaggaaccaggaggggcgggtgatgcaaggtggaatccggacactgccggggacaccaataacacaggcccactaggggccctgaaaacctcaaaagcaaaagtcctacca

SEQ ID NO: 450559 - DNA, 1014 bp, Homo Sapiens
  misc_feature (46)..(46): n is a, c, g, or t
  misc_feature (708)..(716): n is a, c, g, or t
ccttccaagtggtcagtcccaatgtaaggtaccagttctgaagaanaaggctccttcatttataatctcaggaggaataccatgaagttagaagctcatacagccctttcacggaccttacaaggagcctttctgggaatttgctgacgtgaccatagccatttgccagtctcccctcagatacacctccccaatctgtctcagggatttcttgatcttgccagtaaaaggatattgttgcactctgcaggcttcacacattaagcagggctttttctgagatttcgtacaagacttctctgcaagtctatgagccagttgtgaaggaagattcagaccttccgttcttacacacaggtagattacacgtggcaaatatcttcaatgctgggagcaggcacacgaaccgccaagcacctactacgaataggtgggatcactttagatgtagaattgcagcacaagatcaatctgcaggtagacatatatttttccatggttcttcgcaaggcatgctgagcatctttggtgagtttgtcaacttctgtcaataataccactttaaaatccctttgagagtttgtttcaagttgttgtgattgtgccactgttttcaacatctcctgaatgactactcggtcactatttccagcatcactaggattaacttcaaggtggtagttacttgcaatggtgctaatttcaagnnnnnnnnnagatggagttgtgatggtctgatgttcaattctcaatttttccactccaacaccataaagttcacgtagaatacacataattcttgtcttttttccagcacctgatggtccgtacactaacagatgaggaaagtcaccacactgcaccaggttccgcagctgggccgcctgctccttgtgatagtccagccgtcccaaggagcagggccgatacttgtccacccagaggctcatggcagctcgagttcccgggggcctacgcttgaaaatcccgcgcgagcgcgcgtcctcccccaca

SEQ ID NO: 450560 - DNA, 1086 bp, Homo Sapiens
agacggcggcagcgcgccgcgggccgggaggggaggcggcaggacggcggggcaggggctcgagcgggcgccgaggaagcgcgcgtaggacgaggggcagggtgaggagggaggggcgttgccagggtcggcacggcgaagggagccggagatgcgaggcaggagacggggaagagacggcagcaccgtgcagcgggggccaggccacgggggcggggtcacgggcgccaagggccgaaccaggaggcagtcggaggtgcgggcagggccagccgggccatgggccacgcggggatgagaaggcggcgaggtcggtcgtgcccataggtgtcgttgacagggagagaggatagccgggaggacctggtacaggccggtgtgggtagggtgagtcgtcgggccacctgcggacatgcgcaggtgcatgttgggtgatggggttaaaggaggccacaggccaggagcaccacaggtagttcggctcttcatcttggtcaggcacatccacaccgtgttgcagtgggccaccctgcttattaattgggagacaaggcaagagtgaaaagcagatcagagtgggagccagggagcagcagtccgcttcatggcaggatctaggctgaagcaggtagctgctatttgcagggctcagcaacggcgctcggcgagtctcgggggactgcgggggactaggggacctgctgggcctagcaggggctgtcggtcagcgcgcggcccggcgcccgaggtccgagagggaaacgacgtttggtctcgggactcaaggctgcctccggcccgggcagcctcaggtctagaccccctagtacctgagctggaggcggggccaaggcgaacttgaccttgcgctcccttagcggccccgggcagatggagtctgagggaaacagatctgcgccccgccccttcgctggggcgggccctaaggagacccggccctggccccgcccagggtcctaagccccgtccttcctcttccccagcctgtggcaaccactcatccactttctgtctctgtggatttgcttgtatctggacatagggaataaatggaatcatacagac

SEQ ID NO: 450561 - DNA, 1206 bp, Homo Sapiens
  misc_feature (1102)..(1139): n is a, c, g, or t
acccctatgtggatttttgacggaccccgtgtgtaaaaagtgtcacaaatagtggttgaaagtattggggacacatgtgccaagattttttcacaggacacatgtggccccccattcggggtataaggtagaacctttccatgggtattaacccaggggagaatattctttccaggaaaaagaggtattaacgctttcttctactggcatcttcccttcaggcactgagatttgcaccaatccaccaaatggggaaggccagaaagagggaccccccaaaaggtcgcaataatacgtcagatagctactttttaggcaagtgtggcaatgagatctttccattctcccctctttctttgtgatgtatgcaggggtgagtagctgcagcagtgattctgtctgttgcctaaagaagttctgacacaaggcctcagtgttacatatcacgtacatcccacagtcatagctgttttgttgggcaggggctttctcttccacaaaggccagtttgtctcctgtttctgcctaagaaagcctccagtttctctgctacctgctttgcgtgaactgagttgctcctgctatgggaatcataatgaaaaaagctatttttatcttggaggtagaccaataaactccagtgggttcctccagctgcctggttggagttatcattgatggctaaaaatacaactctcttgttggggaggtccagtggttcaaggaacatggcaatctctgctgggttgctagtgcacttgatgaactgggtgacttcagggctgatgaaactgacgtgatcagagcagtcatgaaactgactgttggcaaagtactcaaacgcaaacccaataatatggtcattgagccagcttggcggatccaatagtgagacatctgattgccgcagtagactgtccatgtaactcaagactacggggtccatcttgtactgacgagggctgctcagaaattccagaagctgaacaagagctgcctcgggcctcaccaccccaaccagccttcaggcacctctgtgttggccggaaagcgacagctacccgctctcgacgaattcgagctcggccgatttggcctgatnnnnnnnnnnnnnnnnnnnnnnnnnnnnnnnnnnnnnncggccgcgcacaaaaatgcgctccaattcgcccatagtgagtcgtatcatccccgggtggggtgtgt

SEQ ID NO: 450562 - DNA, 887 bp, Homo Sapiens
  misc_feature (65)..(101): n is a, c, g, or t
ccccacgcgcaccccatccaccccgccctgctgtcttgggcctgcgattacgcggtggctggcgnnnnnnnnnnnnnnnnnnnnnnnnnnnnnnnnnnnnnaatcaggccaaatcggccgagctcgaattcgtcgagagcggggggccaggtgccagggcggtgggcgccgggaccgcggagctgaggagcggggcccggccagtgtctggagactttgcgcccgggggcaccggggctgctgcgcggtcggcacacattccacctggcgcggcttccctcggcggccctgggctccgctcatcctgctggcggtcggcgccgtctcaggggcgggaagaggaggcggtagacgcgaccacagaagatgtcgggccaaacgctcacggatcggatcgccgccgctcagtacagcgttacaggctctgctgtagcaagagcggtctgcaaagccactactcatgaagtaatgggccccaagaaaaagcacctggactatttgatccaggctaccaacgagaccaagtgttaatattcctcagatggccgacactctctttgagcgggcaacaaaacagtagctgggtggttgtgtttaagggctttagtgacaactcatcaatctcatggtgcatggcaaatgagagatttattcaatatttggcttctagaaaatacactacttcaatctcagcaagttttttggcacaaacagtggatcccagtggttatgatatgtctacctttcatcaggcgctatagtacgatattttgactgccccaggctttttcttaacagaacgaatggctctttgatttttgcacggtgtacaagggggccgattggtgctaatgaaggcatggcttccggaaggtgctaaagaggtg

SEQ ID NO: 450563 - DNA, 1652 bp, Homo Sapiens
ctggaacgggccgcccgtaaagagggagacggcggtgggctcttccgggggaaaaaccaccaagttttttgaaagggggtcttgtgcaaatatcacggattttccggggcaggcctcgaaaagacacgggggggtcctgctccacaaaagagtgctttcccaagccctggggaagggttagggggttcccccacggagcctcacaagccaaggaaattctttgaagattgttaaaaccaggggtgtaggtggacagtgaaaccgtttggtagttccggaccaggggacttacaagaagcggtcatcacaaaacacgggcggtccaagcggacactgggcaggcggtagtgggtgtagatgctctgagtgaagggcagctttggggtagaccactgaaccacagcaatcaggggaacttccaggccctccttggcccctggagggggctgctcaccccctctcagctgaaacaggaagttgtgttcctccagggcattcagcgggcaggggaagcagccagaggtcccgggtaggcggcagaaggagcccatggagacttccccagactggtgacagacattgtccaccagcagcacagagccatcgggcatgacaggtagataactggcgttgaagttggggaggattcggatatcccagatggagatttcctcctgagaggagctgttcagcaccttgagcacggtcaagtgttttccagccacagtgaactgccggcatctcagaaccggagggggcagcagagtcagcagcgtgctcacttgggccttgaaagcgctctgctcgccccggaatgtctccccaggagatcgggtctgcagcaatcgcaggtagccttgatctctgacctctggtgcctcaatctcccgcttccacacagtcactacaatcttggccttaggtgtccctgggggcagtctatccagtgaaacggtgagtgggaagatgacctcatctgtggacacaatcggttcctccacaggcagcgtggtcgctccccctgaggtagcagggcccgggccgtgggtgagaagggggctgcagcctcggaccgaccccccacccgccaggatcccctcccctgggggctccgaatcctgttcgccggcgccgccgccccccggcatcccgcctccggcgctgaccgaggccagggcggccagggcggttgccagttctgcccaggctcctctggagcccaagcccggccgcccccggtgccggacccctgctaccgcccacggcagcgcaacaccagcagaaaacggagcagtctcccccaagtacagatggttgcgccggggcagcagcccaggtaccggcccggatcccctgccagctccgcgcagcggcggcagcggcacggccgggaagtacatcgagtagtcgcacatgggactccatggggcggcgaggacggcgcgactgggagcccggaccggaggccgaccgccggcggggcccgctagggtgggtccagagggtcccgacacctccggctgctgcgcccggctggggcggccggagagaccggcccggtcccggcaccggggcaacgaacccgaaccgagacccggcagcgccggaaccggggtactgagccgatcccaaaattccagaccagtacagcc

SEQ ID NO: 450564 - DNA, 1307 bp, Homo Sapiens
  misc_feature (95)..(95): n is a, c, g, or t
gctgtgtgggctgccctacttcactgttgaagacctccagacgcagtgaacgggggtatgggtgggtgtggaagaaggtctcccacatgctttcnaaacgcctgaggagttcgactgcaccacaacaaacaaggatgagactatgtaagactgcagaagtagttccttagagaaccaggagaaaacaatcctactttcctaaaaatgttccatgagtcttaatttcctatttggaacctatgggcaatcaacagtcttaaggagcgtcattgaaacaatatccccccaaacctggaaactagtaggaatcaattagtagtaacagtaagcattgagattttctccactggacttttcatgaccttcagattccttttcatatttcaagacatgggctactttcctatagacactatacaaatcccctgaattgatttttacttaggaacactgtatatcagaaagtacaggtacacatttcccagaaataaagagacctactggtgtcaaacacctgttacagatttatattcccaaattctctgtccaatgatttgcaaaataatccagagaaatgaaaagaacctggtattgaacataaagtagtaataaaaatttgctcattaagttaattaaaattaatttctcaaagtgcttcaaaaaacaaattaaatctgactcctttttgtttaactgataatatagtcaaaaaaatctttgatgttttcataataaactaacataaactaacataagccaagaactcccactgatgcagtgcttaaaactatatatttataatttcctattttattggcatgaatatttctaaacttaaaaaccttcctggtaagttcttttaatttcttatgacaaaaatttctcacaacacacaaatatttacaacatatacattgttttcagttctttacattgaatctcaaagacaaactttttttataggttaccacagaacaaaagctgtgactcatgtttttatttcataaactattataagttaaagtgaatagatttttttaatattccttgtagcattttacaagtgcaacagaaaacttgaagaaccaaattaagatagctgtagttcattagataaatgttgcttgttgtcatcacgttgttcacagcaaatttttgaaaaaataagcaccaatcattcttgcaaagaacaattttatctaaaaggattgaaaagagttaaatacaaggtttttaatttacatgacaagcaataaatacgctgtatcgaacctcatcccacacactgctaccctcgtacatataat

SEQ ID NO: 450565 - DNA, 461 bp, Homo Sapiens
  misc_feature (81)..(190): n is a, c, g, or t
cgatttttattagttgtttgttccttgacttactcattacttattgttatttatttatgtttattttccctgcgtcttccnnnnnnnnnnnnnnnnnnnnnnnnnnnnnnnnnnnnnnnnnnnnnnnnnnnnnnnnnnnnnnnnnnnnnnnnnnnnnnnnnnnnnnnnnnnnnnnnnnnnnnnnnnnnnngttaaattgtatcaaaatacatgttcatggatgaactcattaataccaggaaacccttgaaaaactgcctatttctcctggaggcttctatcctctgtctggtccaacagctgcctgcagtctcctttcttgaaaacttgtaaataattcatttggctgatggggctcgttgacaacctatgccagtgcctgcctgcagcactccagcagctggtaccgtctagtccagcgaagatccatacccgcggggggccgggtttaaccagggccc

SEQ ID NO: 450566 - DNA, 938 bp, Homo Sapiens
tggaaaagcttcttgagggccgaaaggggcccggccaaggggtttggggtgggatattagcaaggggtttccaaaatattctgaggtgggggcacttcccattgcgggacattccatcccgcactgggtaccgcatcaagcaattcctgtgtttttggagctttctcaataaacacagggggttttgtgtgctttctttagcagctaccacaagctccaggctgaatgagttctgtcctgctcggttggtagcttatacatgtgtagatgccggcatcacgtgacgtgactggctctatgatcagagagtgcaccccgttctcacgcaccagcatcttgtgagcactgtcagggcgtacgggctttccatctagttgccagcttagatctggggttggtaacccactgactttgcagtccattctgcagagttttccttcttgaacagtcagatctccaggagcctgcaagaagtgaggtctgaagaatcgctcctgaattggttcattttcgtctccactgtcccttgatctagaacgaggccttctgacatgaggatggcctgagggagaccggggacttcgacctctttggttgacagcctgtaccattagccgtccagtacaactgatgcggccctgagggtttgcagccataattgtataattcccatcatcatctagggtggaggctgtggtatggagggagcaggtcccatcgagatctctttgaatggtgtagtgatcactctttggagagatctgcttcccatctttaaaccaatagatctttggctttggatttccagccactctacatgtgaaagttactggcattccctcaaagatcttgtaatgtttcagcttcatctcaaagaatggtgccattccattttccacaggcacatctccatactgaacttcatcacctgatatcct

SEQ ID NO: 450567 - DNA, 970 bp, Homo Sapiens
gtttcttcggaagtctgtccaacctgtttcagagacatctaacacagcaggttcttcagatgtcctatttcctgaggtaattctgacagttgatttccatgccaaccagagatcttttagatgtaagagggctccaattgattctggcaaattaatatatttcattgtttcctaaatcaagttcttctagtcttcgcagctgggtaagagagtcaggaagaatatgtaagaagatttctgttctcagtttccagtgaagccaggttataaaggttgcgcaatagttgttcaggtagagactgtagtgagatgtcatttacagaaagacatgttaaattctgtaattcaggaaagctttctggcaacctagtcagtgggtttccgctgaagtcagctacctgcagtgctttacagaatgaaatgctttctggaatttcaggaatctcatttcgagacacatctagttccaccagctgcatgaagtttgctatttctggagggagccgctgaatttcattatcactaagtccaagctttcgtaatttgactagctggaaaaattgctcgggcagctcgcggagctggttggcgtccagcagcagctcctccaggctccgggcatagcggtagatctcctcggggacgtagaccagcgagcagtggcgcttgtcgatgctctccacatgacggttgcaccgccacagggggatgcagtggaacatcgccgcccccgccgccgcctagccgggtcccgagtggcggagacccgggctccgagcccgctctggccggcggctccgctcagtccgctgccctctccgcgctcgttgttggctcttgggttagctcgcttctcgcgccgggcttcgcggtcggaagtgcttcaaggaacctggagcgggagcccctgccccgtcctgtacccccgcccgccagccggtgcctccactcccacccgccagtcgcatcc

SEQ ID NO: 450568 - DNA, 1475 bp, Homo Sapiens
  misc_feature (304)..(603): n is a, c, g, or t
ttttcgaaataaactttccattaaatagtacattaagggtaagaggacactttggttaataaatatgtgatctcaagattaagacttgttaaaaagacaccaaatgggaaaaaggagaggggtaggaaatcagaggctagaaaggagaaccattctaggcagctgcagactaagaatgaatggaagggagagtaataagggaattaaactccagacatcctgaggagcaagaggaggacagtgttatttgggtgtttaaacagctactatatttaagatttttttgtgtagggggggcaaacgnnnnnnnnnnnnnnnnnnnnnnnnnnnnnnnnnnnnnnnnnnnnnnnnnnnnnnnnnnnnnnnnnnnnnnnnnnnnnnnnnnnnnnnnnnnnnnnnnnnnnnnnnnnnnnnnnnnnnnnnnnnnnnnnnnnnnnnnnnnnnnnnnnnnnnnnnnnnnnnnnnnnnnnnnnnnnnnnnnnnnnnnnnnnnnnnnnnnnnnnnnnnnnnnnnnnnnnnnnnnnnnnnnnnnnnnnnnnnnnnnnnnnnnnnnnnnnnnnnnnnnnnnnnnnnnnnnnnnnnnnnnnnnnnnnnnnnnnnnnnataaatatctgacacttgatacagcaaaagtgaattgtacatgcatgaaattcacaataaaataccactgttttctctgcaactgataccatacacctagagtgtattgagggcttcctgtcttcttctgcctcctgagagtttaagggcagaatttttaattagcaagtctaatggcataaagattaaacatcagtgtacatttcagaataacaccaacttgctggctgaacaggtgtcagctagttgtcttctgcttgccaatattttcaggtagagactgtagtgagatgtcatttacagaaagacatgttaaattctgtaattcaggaaagctttctggcaacctagtcagtgggtttccgctgaagtcagctacctgcagtgctttacagaatgaaatgctttctggaatttcaggaatctcatttcgagacacatctagttccaccagctgcatgaagtttgctatttctggagggagccgctgaatttcattatcactaagtccaagctttcgtaatttgactagctggaaaaattgctcgggcagctcgcggagctggttggcgtccagcagcagctcctccaggctccgggcatagcggtagatctcctcggggacgtagaccagcgagcagtggcgcttgtcgatgctctccacatgacggttgcaccgccacagggggatgcagtggaacatcgccgcccccgccgccgcctagccgggtcccgagcggcggagacccgggctccgagcccgctctggccggcggctccgctcagtccgctgccctctccagcgctcgttgttggctcttgggttagctcgcttctcgcgccgggcttcgcggtcaggaagtgcttcaagg

SEQ ID NO: 450569 - DNA, 1829 bp, Homo Sapiens
  misc_feature (74)..(75): n is a, c, g, or t
  misc_feature (178)..(210): n is a, c, g, or t
  misc_feature (212)..(212): n is a, c, g, or t
  misc_feature (364)..(422): n is a, c, g, or t
aaaaaatcccaaaaaatttggcctggggtgtggtggtgagccccctgtagtccccagttactccaggaaggagnncaggagaatcgcttgaacctgggagaatgggggtttgcagtgagcccgagatccatgccactggcattccaagcctggaatgacagagcgagactccgtctcnnnnnnnnnnnnnnnnnnnnnnnnnnnnnnnnntncccatagaatttgtccaagttattatcacccagtgtgaaaagcagattttatagttaaccgtttttaaatgaggggcctaagagagggcagtggctggttagtcctatgttagatattaacaaatacgtgtaggctggatgtggtaggtgannnnnnnnnnnnnnnnnnnnnnnnnnnnnnnnnnnnnnnnnnnnnnnnnnnnnnnnnnnccataacagcctgggcaacatagagtccgtctcctcacaagcttccattcttggctcaggtattagagtcaggtgccacaggtatataatgaaccggcagatctggagaggactgcggtgactgccccctcctcctcttgcacagcacataggaaagggctgcggtgaggatgaagatgatggccaggaggcacaggactggcactgtggctgatgtcctggctgtgggaccagcatttttttccggctgcttctggttctccccagcctcaggcccagctgccagactgtggcccgcagtgtgaatggtggtttcattgggacgagtgagctctttgtccgaggacagtgatcctactgggagggtggggcgctgagtggactgcaaggtggacaggagcatctgggcaggggtgtggatatctgaagatgccccctctgaggcctgagaaattggggggctggtaggaagtaaatgcttctggtgggccacaatccccgagtaagcatgtccacattctttgagatcaagacagctcatcaattcctgaacccatgggtccttgttgcccccacacacgctccaggaaaggagctggaacctcgtgtagtatagacaccgatggtaagctctcaggtgtttccggagacgattcatgaactgaaccgatggcggggagtcggaagaaattcttttaccacaatacaacttccagtgacgctgccctcgttgccattgcctggctgagtcaggtacaccagcaggagcagaagcaggagcaggagcacgcgggacccgggccgcaagtcccgtcccatctcggggctccgcggactctgcggggatggagccacctcgctctgactcccagacatgctccggcgcgtgacgtccagctggtgtctcaatggctttcgccggggaccggaggagacggcggccggagaggaggcgcgagccagctgcaccccccggccctgctgtgccccgaccgtgcgctcagtactcggcccgcgccatgccagcctctggacgcagggaaagccgaggaggtggagctcccgcgccctgcgcccccgcactgggcccggctccgtcgagggaaggccaggaatcttggaagaaaccgaaagaaaactccggcggcgggcgaggaggggcgggaggacgacggcccgaggagccgattcggttcggttcaggaggccgcccgcctggcccgtccgccgacctgtgaggcggctgcactgccggaccggccctcctcctccgaggcactttcacttccccgatccgggcgccgcgggacccagccgcgctgcatgagcctcccgggcggcccggtggagagagtcgccgccagccccggccgcgcgcacctgcggggcagccatcggaagaattcc

SEQ ID NO: 450570 - DNA, 784 bp, Homo Sapiens
gtgactctagcaggatcttacgggggccttaaccctacccgcacacacacctgcacgtgaccctgatgccagtgctgggcgcccaagtcaggcagtccgcacagcagtggcaccagggtgaaaacctgctgctcaataccatcccggttaccacaaagagcctgccctggtggcccctgcgttcttggaggaggccaagtcagagcaacttctcaagtgggcgggcgatgcacttgaccctgaggacatcaggtaccaggcccgccagctgacgccggcatcggagccgcagctgcagtctagacgtggtgcaccggcagtaagtgactggacactccagaccaggcccgcccccgcagtagcgtggatcctgaggccagacccccaggcggcaaaatcaggcgacgggccccgccagcagccgctcagtttcatccgtgtggatacagagtgcccagcgcccgggcccaggatccagagagatgtccaagaggagcggaccttgaggccaggtgggctgtgcgctctgcggccctgaggccatccaaaggaagctccgccatcctgcgccagtgccagatctgcagctgcaaaccgcgcgtgtggcactggcagcagtgagggcgggtgggggaaggagcagcccctgactctgcctccatccctctccagctacctgacactagccacacagacttcagggccagagcctcagcgttcagccaatccgcgaagccactcaggtggccgcggagtgcccttgcatcccgggaattccggaccg

SEQ ID NO: 450571 - DNA, 1793 bp, Homo Sapiens
atgagccactgcgcccagcctggaaacactattgacaagtgaggaggcctagtccattgagtatcagctagggctacaaacttccaaatcggtgaattaggtccagagagggacaagtgccccagggttacacaatcatttgctgaagcagaggttgctgccatctttggcctcacccaactggaccacttccttgggcactgagtgacatagctccagcaggtctggattctgcagcttggtccttatcttctggctcagggtcagctccgggctcggcctgtgctgcttcagggcctccaaggaccgagcgggccttctcaaagggggggatcttcagccggtacaggatctctgcccgcagatagttgccaatgccatggaagaacctctgggtccaggagggcctcgcagatggccggtcaaaggccttatccgctaggtttcgtagcacattctccctgaactgctggtactcctgcaagacacagggcccgcggcccggctgccactttcccccaaggtcccagcggccgaaccggcggatgtccacgaaacatagggcgagccgggggccaggcggggccgtgataaaagcgcaggtgggcatggcgtggcagctcctcgcggggcaccagctgaaaagagccggacatgccgaagcggaagaccagggccagtggctcctgttggggctgggccccaggcagagggctcagtatcaggcgcagctccttgccgcgggctgaagctgagatgcggtaggcactgctctcaaagggcacctcagggttgcggctgacagaggacttctccacgcagccgccgaacaccagcgccctgcaggcctcattcacaaactggctggccaggtgcagctcggggccctcaggcatcctgagggagggtggcagagtcctccgccctccctgctttgccacttgcctctgtccccgggcggttcggaatcggaggcgaaggtgtgccttaagtggaagggggcacttagcgacggcagacgcccgtaccttgccccctccacacctgggagccgcccctggcctggcacccacagggctcgttttgcgggagaacgtgaggctccaaatcctagcttttggggaggagcggcgctctcgggcccgtcctccccatgcccccgctgcgaccctgtcctcggttaatcctgactcccctcctcctcagggccccccaagctcatcttctccttagccctacagctgcaccccctcataatccgatcctgacacgccccctacccaaggaacccgcaaatccagttccagttcgtcagcactgcagacactaaagggttaacgcacagaacgggcaagtgaccgggagcgcgctggagagcccgcatgagagaagagaaaatcacatcataggaacgcaggtcgccgaatatctaacaaagacagagaatcccccgagctatggaagagagtaccagagactttgaaaggaaagcacttcaaaaggccagattacctaggactgaagacgacctgggccgaaggaaaatgtaaaaccctttagaattttcaccactagcttggtacctagtggctagcccgagaccaaagcaaattaccagagagagagcacgaggtcccacgacacagggaccccccaaagagagtcacgacccagacttttggattcaatcaatgtcacgcgatatcgagaagggtagaaaacgatcaaaaccaccaagatctaaagacagcatgacgaacaaagaggggatcacagggcaaaagccccacaag

SEQ ID NO: 450572 - DNA, 1072 bp, Homo Sapiens
tttacaccatttgttttacaatgcagctttagggtttctgacaggtatttttgtaacaattacctataaaatttttttcactccccctctctgccccaagactttgcattttgtgctaaatcaaccaagtagcaaaattgaaaggtatgctttttttggcataaattatatttttgaaattaaatattctataaagaaagtaaaacaaatgtgcaatttatgcatgctgtggtgcagctatccgatacttacattacaaaaatcctccaaacaggaaaaaagtccacattctgtgagtcatataaacctactaggaatgaaaaataccctggaacttggaactaaaagaagaaaagaatgctcctagaaagattctcacagatttcagtgttctttgataagcactgctattaatttcactggtatgcttttaaatgagattctcactgtaatgacactcttgagattaagatagtaacagtgtattttgttaatgcagagacaatggagacttcctaacttacattttggaaaatctgaaatgttggttcattccaaatagctcctctaacaaaagtctctcaattttaccttttcttttttccccatgttttaatggattgtgaatctgagacaaaagtggaagcataagactaaaggagaaaaaaccttacttccaaagaacatttcccaaagtagtttacaaagttcatctcacacaaaattagcacctcactcttaccatgcaaaaataactgcagttataatttgaatgacagacaatttggtttttattgcttaatgatctgtgctttaatgtggggataaaaggcatcctctgaatggaataacattttatataaatagcagtaggaaaatgtaaataagcattgatatcccactgctgaacactttgccgttgtgatatgccctgaaaaactcagcttgaattatctcaagctctagataaaagagctgaaacccattaaagttgtcatttcaaaaggacttgtacacattatgttaataatgtatatacttccaaagagcctcttttaatatcccgggaatt

SEQ ID NO: 450573 - DNA, 1031 bp, Homo Sapiens
aagagatttttttaagcgcccccaccttggttccacccctggcggattttgggccaagggttcggggggcacaggtttggccaatcccagaagttttcaatagggccgtggaatcaccttcaagaccatggaacaatggtcttccgggcgggcggatatttggcaaagggaagccccagcccctgtggtacaggttgaatgggagggaggatggccaggggtgcccccatgaactttaagcagctgctcccaagggctgccttgcccttcttccccataggcacgttgtactggatgtagggggtggtcacgagggatgcggtccaggctgatatcatgctcctggcgtcggggtatctctgagtcagccatgcggggtgacagggtgacaatgaggccctccacaaacttgatggcgtgggtgcggatgccgtcattgtcagagtccaatagcaggatgatgtcccccgccatggcagataccatgtcccagcaggcctcctgtagctcgctaatgacccgtgactttaccatccactgcagggccaccttgtagagctgggtcatggtgaggatagccttcttcaccacgttcacattctcgtccctcaagagcatgttgaggtttgcaatgagtttcagcagcaactcaatgtctcgcttgcatgcctcctcgatgaagccgatgacaaattttcgcacttcgattgacttgtctgcttggaatgcgatgatctcatccaggaagttgtccagtagtgtggggtctttgttgatgatcagctcctggacctgtttgagcactgtgatctttgagtcattggtgatcagcgccgcctggttcagaagatccaccaccctctctgaggtggtcatgccatcgatgcccggcccctcctcttgagtgaaaaactgtgatgccacgctccgacgggtgacgctgtctccactgccgctcgccatggctgctgtcagcgcagctctggcctccgttcccctcgcgccccctcagcagtgcctcttcctacact

SEQ ID NO: 450574 - DNA, 967 bp, Homo Sapiens
  misc_feature (23)..(23): n is a, c, g, or t
  misc_feature (32)..(32): n is a, c, g, or t
  misc_feature (133)..(133): n is a, c, g, or t
  misc_feature (200)..(200): n is a, c, g, or t
  misc_feature (237)..(247): n is a, c, g, or t
  misc_feature (497)..(544): n is a, c, g, or t
ccgactgggaagcgctgccttgncgtgggcanagtcgccccctgcacaggggctgggctgcctcatgggtccccctcccctttcccagaggtgcccaatggctgggccctgcctctccagtaaggatgcttcncctgccccacacacagcatcgggctgccccaagtatcaagtcaccgagccgcagctctgctcttacntaggtgccatttatacactgctaatttggctggaacnnnnnnnnnnntcagttccaaggccctcaagcactcaagatttctttaaaaaatgaaagcaggagggcaacgaagggccgcacaggaacggctgttctttggatcgagatgtcctccaacagcaatacattcatagtaatcacgggcaggaccccgcggctctcttccctcttccctgaaacgtcggtttctaaaaaatagcttgtttgctgtacacagccggtaaatgttacattgcctaaacaacactggcaattttgnnnnnnnnnnnnnnnnnnnnnnnnnnnnnnnnnnnnnnnnnnnnnnnnacttgctgagagggtcaaaggatgtctcttccggggcagcggggagtgtgccggaagccaccttcactgttcagtgccacagatcttttgcaacttcaagtgcaaagcatcggagctaatcgaagaccaaaacgtctttctatgtaaacgccctgctgtgatccggggagtgcactgctgagtggcggggtcagcaggagctccctgaaatgactgcttggagaatccctgttcactggattcactgtttttcttcatgattggaaacagcagctcaggacccaggatttgaataacccatgtaataacccgaagtattctccacagaagccccagctctgcaggaggccacggcgtttggcttcttcgtgtggccacacacctttccgttgttgtacaggtggggactgagagcctcttcct

SEQ ID NO: 450575 - DNA, 987 bp, Homo Sapiens
  misc_feature (558)..(640): n is a, c, g, or t
ggcgaaggggttttaattaagttgttcctaattcctgccaagggaaaattgaaatcacattccattattcgttcaagttttaaaattcttaaagttcctggaagctggccaaaactgccacaggggagtgcccttgattttgttcttgcgtgaggtccaaacttccgaaggtgacttctggagtgtagaatgacacaaggctacactaaatgactccaagtgattgtcattcaggttaagttcttgaaggtgtatgaggtctccaattgtagctggaagcttttttatatggttgtgactcaagtctaatttcctaaaggctttttaagcaaagcatacgcatatcaactcggacaagcccacagtaagaagtctgaagatgttccaaggaatatggaaaattcttacttagaggatagtcttttttggatgtgataaccattttagttttaaagttttcaaattctgaagtcttcactggtgtgagcgttgaaactggtgtatcaacattacagcctctatgagccagtctcatagctgaaaggaaaccttttaaannnnnnnnnnnnnnnnnnnnnnnnnnnnnnnnnnnnnnnnnnnnnnnnnnnnnnnnnnnnnnnnnnnnnnnnnnnnnnnnnnntacttagacagatatccacaggaggctcctttaaccgaacagtggctttcccctcatctacaaatttggtgaagaattgctcaatgttctcccttagctcatagcgggtcccgcgcttgtccttcagggtggagatgagcaggaaggctcggaccggcggctgactcctggaagtctgctgacagaggctcaacacggctcggacgcccttgccccggttcctaagccccaaggcgggcaagtgccggctgatcacctccacctcacagtgtagcttcatctcgcccaacggccacaaccacgtcaagctggctttgaaacttcctccttcccgcatcccgggaatt

SEQ ID NO: 450576 - DNA, 968 bp, Homo Sapiens
ggaacgggcttgtgggcaccggttggggggccggcacgagcccaggtgctcagtaatcgaagtatggtcccattaagcggactttaaaatgtggacccaagcaaattcaaggcttttaaccaggcatacgctttatcaactcggaccagcccacagtaagaagtctgaagatgttcccaggaatatggaaaattcttacttagaggatagtcttttttggatgtgataaccattttagttttaaagttttcaaattctgaagtcttcactggtgtgagcgttgaaactggtgtatcaacattacagcctctatgagccagtctcatagctgaaaggaaaccttttaaactgctggaaatggccttacttagacagatatccacaggaggctcctttaaccgaacagtggctttcccctcatctacaaatttggtgaagaattgctcaatgttctcccttagctcatagcgggtcccgcgcttgtccttcagggtggagatgagcaggaaggctcggaccggcggctgactcctggaagtctgctgacagaggctcaacacggctcggacgcccttgccccggttcctaagccccaaggcgggcaagtgccggctgatcacctccacctcacagtgtagcttcatctcgcccaacggccacaaccacgtcaagctggctttgaaacttcctccttcccgccacccggcgccgccatcggggtcctcgcgcacgcgggctgcccactgatctgcctgcctgttggactggtccgcgactcgggctgtcttagcaccgtgtctgtatgaagcccgcgggaaacggcttcccttctcccttagcagggccgggttctcgccgtggttgcgtaccgggactgaccacctggatccgggctcgcgcccgggaaaccggcagtcggcgggggcgcaacgtcttttcccccgagcgcgcagctggcagcggtggtt

SEQ ID NO: 450577 - DNA, 1521 bp, Homo Sapiens
  misc_feature (1078)..(1160): n is a, c, g, or t
gcccggaattcaggggcttattggggggttcaggtccccccccaattttttctacttaaggcccccagtgtggggcaaccggaatgcagatccagggaggagttccctgaaggaaagagttcagacagaatcttccccaaacacaaatttttgcgggtatccaaatcttggcagagatgaatggaatgatatgagagccctatggaatcctttggtccgggatctgggatggccctatttgcaattttttaaattttttcataaaaagacttattaatctgttgcttaagtaaccatttttttaaaaaacttctgccaggggagtgtctcccaccatgtttaccattaatctctttcggatagatggttctattatgtaatatggttcgtgcagaagattccaataaagttaatggtgcttgcagctttattactggaaggacttttggttgttcaaaagtatttccaaaaagatccaagtattcaagggataaatttctaaattcactaggcaaaaatggaagcttatttcgagctgctgacaaaaagcgaaggtttattagttgtcctatcttgcaaggaaattgaatcaattcattatcgtcaagttttaaattcttaagttcctggagctggcaaaactgcacagggagtgccttgattttgttcttgctgaggtccaaactccgaagtgacttctggagtgtagaatgacacaaggctacactaaatgactccaagtgattgtcattcaggttaagttcttgaaggtgtatgaggtctccaattgtagctggaagcttttttatatgtttgtgactcaagtctaatttcctaaggctttttaagcaaagcatacgcatatcgactcggacaagcccacagtaagaagtctgaagatgttccaaggaatatggaaaattcttacttagaggatagtcttttttggatgtgataaccattttagttttaaagttttccaattgtgaagtcttcactggtgtgagcgttgaaactggtgtatcaacattacagcctctatgagccagtctcatagctgaaaggaaaccttttaaannnnnnnnnnnnnnnnnnnnnnnnnnnnnnnnnnnnnnnnnnnnnnnnnnnnnnnnnnnnnnnnnnnnnnnnnnnnnnnnnnntacttagacagatatccacaggaggctcctttaaccgaacagtggctttcccctcatctacaaatttggtgaagaattgctcaatgttctcccttagctcatagcgggtcccgcgcttgtccttcagggtggagatgagcaggaaggctcggaccggcggctgactcctggaagtctgctgacagaggctcaacacggctcggacgcccttgccccggttcctaagccccaaggcgggcaagtgccggctgatcacctccacctcacagtgtagcttcatctcgcccaacggccacaaccacgcccagctggctttgaaacttcctccttcccgccacccggcgccgccatcgggtcctcg

SEQ ID NO: 450578 - DNA, 795 bp, Homo Sapiens
  misc_feature (172)..(254): n is a, c, g, or t
caggaatatggaaaattcttacttagaggatagtcttttttggatgtgataaccattttagttttaaagttttcaaattctgaagtcttcactggtgtgagcgttgaaactggtgtatcaacattacagcctctatgagccagtctcatagctgaaaggaaaccttttaaannnnnnnnnnnnnnnnnnnnnnnnnnnnnnnnnnnnnnnnnnnnnnnnnnnnnnnnnnnnnnnnnnnnnnnnnnnnnnnnnnntacttagacagatatccacaggaggctcctttaaccgaacagtggctttcccctcatctacaaatttggtgaagaattgctcaatgttctcccttagctcatagcgggtcccgcgcttgtccttcagggtggagatgagcaggaaggctcggaccggcggctgactcctggaagtctgctgacagaggctcaacacggctcggacgcccttgccccggttcctaagccccaaggcgggcaagtgccggctgatcacctccacctcacagtgtagcttcatctcgcccaacggccacaaccacgtcaagctggctttgaaacttcctccttcccgccacccggcgccgccatcggggtcctcgcgcacgcgggctgcccactgatctgcctgcctgttggactggtccgcgactcgggctgtcttagcaccgtgtctgtatgaagcccgcgggaaacggcttcccttctcccttagcagggccgggttctcgccgtggttgcgtaccgggactgaccacctggatccgggctcgcgcccggg

SEQ ID NO: 450579 - DNA, 1033 bp, Homo Sapiens
ccgagttcctgaaaaactttattgagctcatggagaaagtgactccagactccaagcagtgtgagtgcctggcagggcagctggctctgggcagtgcccaggcagcatggggccagcccagaggaacccagaggccgggcaggtgtggaaataagcaggcacaagctaagggctgggcctgggccagggccaggtcatggaggaggctcctggtggagctttaagggtgggggtgagggtgggcaaggagctgcaagaagatgcccccacccccacccctcccctccttttccagggcaacaacttccttctgcacaacctgatcttggacacgggcatcacgcagcagcttggtagagcgtgtgtggagggaccaggatctcaacacgtaggcatcacccagttctgtgtcctcattgatgatggaggattcttggtgctctgacatttgataaagctgggggtgacctagggcgaggggcagcagtggcagtccacgcccctctctccactgcagcccaccgttgcagatttccttaacctggcctggtggacctctgctgccgcctggtgagtcctgagcgggaggtgggtagagaaggtgctccctggccgggagggcttcagaagagaagtagggcatggcatcgtcctctgctgaccacctgcactcggctcccccgtgcgctgcaggtccctgttccagcagcttctctacggcctcatctaccacagctggttccaagcaggtaggtagggctttggaggcgcctcctcaagtccgggtccccaatctgagctaagacgactccatggggagggtggggtctacgactgagggaggccggagaccttgccagggtctgtgggcggagctgaggcgctctgggccctcgcagaccccgcggaggccgaggggagccccgagacgcgcgagagcagctgcgtcatgaaacagacccagtactacttcggctcggtaaacgcctcctacaacgccatcatcgactgcggccacgtgccaagcttggcg

SEQ ID NO: 450580 - DNA, 675 bp, Homo Sapiens
  misc_feature (69)..(80): n is a, c, g, or t
ggtttaaaaatgtgttttaattatattttcatgaattccaggaagaacatcattgcagttaatgttacnnnnnnnnnnnncaaagagggacatctgaacatgcaataaaaaagtgaattcacagtgaaaataatgcatgtcagtactaaaatagagttgcttggttccctgaaggaaaagggtttcttctaattatctgttcacttggattttattatgagaaaatattctgtgaaagctttggggaagttttcaatttgtgctactattatcattagagtctgatggaagtccctcattctgaaagccgttgttcgcagtctgtaattcaatcagaaaattcaaaagtacaacaggtagtttggcaactcgcttcttgttacatacaaagccattagcaaaaatatgtaacaaaatttatgtaaaacaaacaattttgtccttatgtacaaaagacagccttcttcctcacaccctcacggcctattccaaaaagtgggaagggcatggggagcagctatccatcccctttcaactctcattatgggtgggataagaacatcctaaaaggcaaggtaactattttaaagtttttaaaactgagttataaaaatgcatctgggcttctgaacaaagagggaaacataggaaaaatatcccgggaattccggaccg

SEQ ID NO: 450581 - DNA, 998 bp, Homo Sapiens
  misc_feature (69)..(78): n is a, c, g, or t
  misc_feature (103)..(145): n is a, c, g, or t
gggggtgggcgcccacccctttgtgaggaaggggcccattgccccccccaccaaggtgggccaccgggnnnnnnnnnntctgtgggaggatattaaatgtggnnnnnnnnnnnnnnnnnnnnnnnnnnnnnnnnnnnnnnnnnnnagggagaaaaatgtgatgggtttccccaaggggtgtttcttggggaaagggtgacccaaggggcttggaaaccctttccccctttcggcgtgaaaaaggttggggcccttcccgggacaagggtttccccgcgccaagggggaaatattcccctcccctgggctttcttccccatgggggccaaggggaaccccctggggatttttccatcaaagggccctttgggggccagttttgggaaggcgttcttcctgggatcccaggagaaagaggtggggcgaaattccccgttcgcccagcccagggggttcccgttccagacgcaggaagcgcagcgcgggccagcgcgcccagggcggccccgctgaggctgcgcaggttgttgtcgttgagctccagcacctgcagcgactccagggtctcgaaggcgtcctcgtgcacgcccaccaggttgttgttagccaggctaagcttcaccagcctcccggccgagcggaaggcgccggcgcccagctgggtcaagttgttgtagctgaggtcgaggaacacgagcttggccgagccgctgaacgtgccctcctccagcgagcgcagcgagttgttcctgaagtccaggtagaccaggtcgccgtagaagatgaagaagtcctcggggatccgctggatgcggttgccggccaccagcagcttgcgcacgtccagggggaaagggtctggcacgctgggcagcccgcggtcgcggcagtccacggtgtgcgggtcggtgcaggcgcagcccgcggggcacgcgtgcccgggcgcgagcagcagcagaaggctgcagagcccgagcgccgcggatcccggatattcc

SEQ ID NO: 450582 - DNA, 906 bp, Homo Sapiens
caggggtatcaggccggggccagcgagcggggattgtggctggctccgtttgcggtttatcgggtgcagcattcttctgggcagagatggcctcttccagggccaagaagatctcattgccttgccgggtttcggaactcaaagttgccctctccagagacgcagcgacggcctgcctcaaaggaaaaggttaccttgtcccgcccaaagcgccgcagaaacctgtagggccagtcgtacagctgggtccctggctcgggcccaccccacagctccagggcactctccccagcccggagggtataggacccccgcaggtggcacctctcactggcttctgtaggtctcatggtcacagcaaattccttgtgggggccgactgtgactgcgctgctgtacaattcattttcctccatgcagggccggctctgctttccctctggccccgagagctccttcctctgcccggggaaggccaggaggcagatggcctgcacccagtcgccgcgctccgctgcaggggccgccaggaggtacaggcgctccttggtctccaggaagaaggcactggtgtcccgggggctgctggcctctccgccggcctcggccacccgcaggcagtcactgaggcggatgaccttccgggcagcctcacaccgacgaggcttctccgggccctcctgcagctccagccgggccaaggcgcagtccgaccctccatacagtgaggcgccgaagcggcgccatttctttccaaacgtctgctgctgctgaagatacaagaagccttgtttcactgccccgtctcccatcctctgaccatctcggagccccaggcttcagctctctccttcactcctgcccttgcctctctcttcttagccgtggatcccgaaattccggacc

SEQ ID NO: 450583 - DNA, 761 bp, Homo Sapiens
  misc_feature (578)..(692): n is a, c, g, or t
ctgcttcctttcttttgttagcctcggcttctgttgctagtgtcttttttctcttcccctcatatccgtgtcacggatgtattgtcctgttgctggcttgtctttcgtgtctctgaatcacccgcgggccctggtgtccaggaccttgggggtggcagtgaggccagaggagatggggtccacttttggatcgccggggctgagggtgtcgctgttaggatcgagaatcaggggtacggggccaatcacatctggatcgaggtcgaaactcgaagacatggggtcgggatcttggggttccgagcccggagcttcggcgtcggggtccagatcctccgagacgggctccagatcttcatagctggggtccacgtcttccgggacagtgttgaggtcttcaggatcaggctctgggtcttcagaaaccgggtccagatcttcaggattggggtctaggtcctcggagtcagagtcgagctcttcataaacgggtctcaggcctttgtggcctgggttcctgaccaggactgagcgccgcatttcaggcgtggatgtgcccgcagcttctggggcaagannnnnnnnnnnnnnnnnnnnnnnnnnnnnnnnnnnnnnnnnnnnnnnnnnnnnnnnnnnnnnnnnnnnnnnnnnnnnnnnnnnnnnnnnnnnnnnnnnnnnnnnnnnnnnnnnnngatccggaaaattccggaccgttaccacctaggggggcaggggggcggccgccgcgcgggccccccccg

SEQ ID NO: 450584 - DNA, 1102 bp, Homo Sapiens
atgttacccgccggaaattggggtccagaatggggcccgcccaagttttggaagccccctttcccgttttcccccttccccaattttttacattctcatcaaaaaaatcccggggatattaaggttggaatggcggaatagaagttccacccaaaaggccattatttacggggccctttcagtgttttcaaacattttccagttctcacatccccttattttagagttttatcatctgaggcagaaacaagacggcctggaatctgatgagcaggcaacatccgatatttccaaattatgaccatagagtgtttttctcatattttccatcatatgctccccaaattatgattagcctatcagcagaagaacttgctagccattctccattaggactaaacttaactgatgacactgcttccgtgtgtcccacaagagtacatttgagagcatagtttgggttttcaggcacttccttgctctgattggccgatgaggagagggccaactgtgctttggcgtctcttgactccttggttgccatggctctgaagctccaagttagcaggtgtactaggcgttcagccctgaaccaggcagtccagtactttggctttctgcccagcaaaatgaagataaacgcacaggattttaaaatgtacagttttgaaagcttaaagtttctggacagtctttaaactgtgagacggaatcagcagcacggcttggacttcaagttttcatctttttgttaagtacttgagaaatactgttagaaggatcctgtgcgctgtcagcaagtaggacacaaatgttcggcattccgttaatacataaagccttcaaagcaggggcgacgcgaggggcactctctacagaaagtattctttcaccgccgcccccctccccaggtcgaaatgtttcggaatgtctgagcagccctaccagtcaggctaggtacttgaagatgaatgaaccgccgcttttagcggatttcagaagctaaaagcctacgaagccaccgaaactggaaactctggcctgtcggctacttttgctcgtaccagcaggtgtgcactccgcgatcccgggaattcggacc

SEQ ID NO: 450585 - DNA, 515 bp, Homo Sapiens
aaccagtcccagtacttttggcttttcctgccccagccaaaatgaagataaacgcaacaggaattttaaaaatgttacagttttgaaaagctttaaagtttctggaacagtctttaaactgtgaagacggaatccagcagcacggcttggacttccaagttttcatctttttgttaagtacttgagaaatactgttagaaggatcctgtgcgctgtcagcaagtaggacacaaatgttcggcattccgttaatacataaagccttcaaagcaggggcgacgcgaggggcactctctacagaaagtattctttcaccgccgcccccctccccaggtcgaaatgtttcggaatgctgagcagccctaccagtcaggctaggtacttgaagatgaatgaacccggcgcttttagcggatttcagaagctaaaagcctacgaagccaccgaaactggaaacctcctctgtcggctacttttgctcgtaccagcaggtgtgcactgccgcgtcaatctcc

SEQ ID NO: 450586 - DNA, 1402 bp, Homo Sapiens
  misc_feature (1018)..(1036): n is a, c, g, or t
taccccagttaccatgaccgcccgctttccattgatgttcttggaaccaaaagaaaaactaaccctatagtgatagagttccttatcaatggctgccaacaattgggagtgaaaggaactgactgagcaggtatacaagagaaccttctggggtgatggaaatattctgaagcttgactggagtgttggttacatgggtatatcaatttatcataactcactgaattgtatatttaaagtaggaacattttattgtaaataaattacacctctataatgtttgttttaaaaaatattagatacatcagctggaaatcacttggttttaacaacaaattttctctgtaatcttatttattctagcacttttcttgtcttcaaaagcaatgcaatacttcactgtagctaagcctatgttagactcttacaaattcctaaatagtagaattagttcaatgagtaatttttataaaataattctagatttactttaccctacatgaataactgatttgctacatagagccacattaatgcttagtataaatcatacaacatgatgaccatgctcacgtatatttaaatataaacatatttggactttaaaaagtaagtacatcttaggagatgatccaattctgggagttagcaaatgtctaagtgctcccctccttccacacataaggagagaaaagcattcatcagctgtgtgagtctgttaccagtgcacatgtgaggacagaccacagcacagtgagatgaggctgaggaaacgactacaacagcattggctatatcaggttttcttccttcttccagccacctggaaaaacgttcacagagagttatagtggttacaagaccaaaacttggaatcaaaaaaattaaataatgcaaataacccaattaatctgctaatatctattaccgcagaaatagtgttagaggtagtttattaaagaggcgtttttaaaatcatcccactcatcatatcctgcatttcaaaagtatcatcttnnnnnnnnnnnnnnnnnnntactttttagagcataaagcataacaggttgaagtggttttcaaaaagctacttctagtgttcttcagctttctattatggcagcatcatcttgtgatgaagacactggctcacttggacacacggtcagcatgcataaatacatctcagtgatgatcaagttactgccatctacaggaccgcttgcaaataagatgaagagagctacctcagtgttagcagcaaggcttcgaggtctgtactactcaaaccactcctaagggtatggccaatgcacagtttgaatgttagggaacacaccaggtaatgtaaagattcaccagttttcccctggaattaattctaataatcatccggattccgacc

SEQ ID NO: 450587 - DNA, 767 bp, Homo Sapiens
agaaggatttcgcgctcctgtttccacggaatggggtaagaggaaggaggatgttcgttggggatggtgagaggtcttataagccgttgaggggtggggaggatcggacccaggagcacgagggagaaagggggaggagggaaggggaatggaaaacggcatggagggtaaaagaagcgttgtaatcgttggtaccccagcccagcggagagataggtgtttacacagagagtttattaggggttacaaggaacgaagggtgggggtaaaaagaaaagtgaagggggcgaaataacccaattaatggggggaatatctgtgaccacagaaatagtgttagaggtagtttattaaaggaggcatttttaaaatcatcccactcatcatatcgtgcatttcaaaaagtatcatcttagaaaggaaaattgaaaagtactttttagagcataaagcataacaggttgaagtggttttcaaaaagctacttctagtgttgttcagctttctattatggcagcatcatcttgtgatgaagacactggctcacttggacacacggtcagcatgcataaatacatctcagtgatgatcaagttactgccatctacaggaccgcttgcaaataagatgaagagagctacctcagtgttagcagcaaggcttggaggtctgtactactcaaaccactcctaagggtatggccaatgcacagtttgaatgttagggaacacaccaggtaatgttaaagattcaccagttttcccccc

SEQ ID NO: 450588 - DNA, 456 bp, Homo Sapiens
tatctctaacattatgctgatggaaagaaaccattcataagaatacacagtacatgacgccgctttcatgatgttctggaacaaagaaaactaacctaagtgatagaattcctatcaatggctgccaacaatcgggagtgaaaggaactgactgagcaggtatacaagagaaccttctggggtgatggaaatattctgaagcttgactggagtgttggttacatgggtatatcaatttatcaaaactcactgaattgtatatttaaagtaggaacattttattgtaaataaattacacctctataatgttcgttttaaaaaatattagatacatcagctggaaatcacttggttttaacaataaattttctctgtaatcttatttattctagcacttatcttcttgtcttcaaagcatgcaaacttcactaatgttagagatacggggatacctct

SEQ ID NO: 450589 - DNA, 800 bp, Homo Sapiens
agggcaggctttttttcaaatgggatttcggcattataatcgagtcctctcttcctgttgtcttttcttctgaatttctatgccagctgctcgaagttctcttcttttttggagggcagcaagacgtcttgcttcttccaattgtttctctcttgctttcctcttggccttctttccctgagtattagccaagcgggctctggcttcagaaagcatctcaagttcatcctcatccatatcaattggatcaggccgcgctggttttgtttctggatttggatctatttctccaggtttaagttttcgtggatcatctgttgtttcctcttcattgtctctttgggcagctttatccagaagaaattcatagtgttctaagcactgggccgctgttcttccaatgattggagcaatggtcctccactgagttggcatcaacttggccaagtgcaagagtttttcctcttcttctctggaccattctgtcttcttaatgcttggatccagccattcataccatctggctttgcactgctttgctgattttctatgcagcaatgaggcaatcctagaccactgatttttcccatatttcattaccgctgctttcagaatttcatcctcggtattcctccatacgccccccttgatcataattcgaggcatcttggcggcagggtgtctcggcaagcagccgagaggagcttcagagaagtagtaacagcgattgggccaccggactcaaagccgccacttcctccaagcgcgaccttctgctttgaagatctgcgcaagcgccc

SEQ ID NO: 450590 - DNA, 584 bp, Homo Sapiens
tgccattttttaattttccattttgtttttcctcgtttcttctcctcctgaaggatgtccgcaatagtgtttagcaaataatttaaaaattcatgagcatcctgctgcatgtagttatcaaagagatcattctcttttctcagccttgaaatgaacttctttggtgggatgacgccaaccttcttcttctgtgtggcaatgctgtggaaaaggtccgccaggcacgtcagcaagttttccttcttcttttgctgggccttgtatgccaacacattctcccggaatggacggcagaagtacaatgcctgaagcacggagttacagtagcatgtgtttccaaaattgaccaatccgaaatagtgttcattgattggaaactgctctggaccaatgtctttttccgagagcagaggcattggtgcccatattacagatggaggcgatgtttcggacagtcattagtctaaaggttgcagcgatccctcaccgccatctttacaaggggaaaccgggactgcccatggtggcgcgctggcggggaggccgggcggcagcgcggcggcctggggtccggctttcagttt

SEQ ID NO: 450591 - DNA, 1256 bp, Homo Sapiens
  misc_feature (830)..(860): n is a, c, g, or t
atgcaaacacacacagccacatatatacatgtgtagcacagcgctaaacactgtggaggctaaaaaaagtcaaagacaacattataactaaaagtcgaaagcacacaaaatataaataatagtgtatgcaagttaatgtacattatacatgcgtgtaagggacataaatggaggggtgtgaactttggttaggcaaagtttactggaggaggggtttttgagtcaaatttggaaggatgaacttgttagatagtcagagttggaaacaaaacaatccaagaatagggatataagcattgctagtctagaatagtctattccttgtgaaaatataaatttaattttcaggaatccagtatattccaaacatcacatatttagcatgaggaaaaattgatttgtgattgtgtatatgagtcattgttattgggagacaagctgaactgccacatgccacccaatggaacctttacttcaatcaaaaaggagggtatgattggttcaattatattaacagaatatcatgggcatttctctatgatggtcattcaaggtagtaggtctctttcaactgagtgcaacattgagaataatgatttggttcagggcaactacaaataatcacttactaagccttaaataaagccattatttttatatcaatagcacaaaggaaaaccaaaagtccttaaccactgaccatttttatcatattttaggcctttttttaaaaaatcagggtatagtaggcactaagttttattaggaaatatttaaacctgctgaaggatttatttataaaaagtgcaatttttcaaaacacattattnnnnnnnnnnnnnnnnnnnnnnnnnnnnnnncaaattgtaccacaacatagaactgtgatattttgctattactttcatgtgaataaataaggtaaagtatatcatttattgagtgcccatgctgtacatttaaaatatgcattatttaatttaatcttactcccagcaaccaaaagtaattgaccagccccaacacaattttggacaaagctagtaactgaacacaggtctgtctgccccacacttctctttctcttgaaaactgccaatagcagaaaattggcaagatgtattttttacttttcaagatgccgttgtgtgcccagaattaaatggaaatgatggttaaagcctaattataaccttttcttttaaaaagctttttccaaatatatttttcacccccgaacagtgaaccccttgaaa

SEQ ID NO: 450592 - DNA, 687 bp, Homo Sapiens
tgggtcgcactttcctgtccatcgacattgggctcctccttcacactgcagctgagctggacagacccctctattctggtgtcctggggaccttccccaggggactccactgtccctgagggctgggggctcccaagtggttcctctgtcttctgggctgcagggagcacctcctgcttcaggacatgggctgtgatccagcccaacagttgcccagggtcatgctgcagtccttcgactagggcagcggcctcctcaggactgcctggccgctgaccgcgcacccaggcctggatctcgggaggcagtgtgcccaggaactgctccagcaccagcatctccagcatctgctccttggagtgtgcctcaggctgcagccactggcaacacagctcacgcagccgggccagggcttctcggggacctgccacctcctggtagcagaaccctcggaagcggaggcgggcagtctcaggctcctcaagggtggtctctgggtccatgacgggcaggcatgggggacccagaggggatggcattcttgctcaaggggcgtggtcttggaatcgtcaagatgggcctggacgggcctgagagaccaggcctgacacccggcctatccgagggatgctcgaacttcgggatctgtccccaaaaggggaaggcaagagggaggcgttccagagc

SEQ ID NO: 450593 - DNA, 908 bp, Homo Sapiens
  misc_feature (437)..(489): n is a, c, g, or t
ctaataccttatttttttcacaacacaccccccctttttctgtatacacaaaaaattggaaaaccctgcttccaaaccactgaaaaaacttaggatattttggatcaggtggacaatggctatggaatgaaagatgcagagaaacactgctttaaagagtatgtagagagttacagagtttagggatgcagtagcgtgaacacttctgagtttacaagatttaacctcatggccccatcttaaatcttgcgggctgcaaacctggagtaaaatctgttcagggaagctcatatgctttcttacaagttcattgggtgatatgtctggagttttccctttttgcaactgacttggatttgtcggaatttcttcccagcacctacaggctgaactaaaccagtatccagtacatttctgggctgataaatggacatcannnnnnnnnnnnnnnnnnnnnnnnnnnnnnnnnnnnnnnnnnnnnnnnnnnnngatatgcgtgcaactccttgtatgacgttgtctagacctgttgtaggaggaaaaaaagttctttctctttatttcttcccttgtagagccaacacttagatctttatgtttctgaaatgtagttgagtgtctttttaaagatgctcttcctcaattatcagcagatctttttttggctagcagcattctcttaggagaccttggggtggaggaggtctcacttttctgtcagcaatcttacaggtgaagaattgtggcacctgctcaggagcacatcctcggcattgcctcccctcccttccatgaggtcccatttcttgaggttgatggagacaggactaaaacccaggtcttccctccacgtgcgtgttaaccgcgggacagcattcctttctctctcatcccgggaattccggacc

SEQ ID NO: 450594 - DNA, 1072 bp, Homo Sapiens
  misc_feature (814)..(814): n is a, c, g, or t
  misc_feature (891)..(891): n is a, c, g, or t
tggcacgaggtgataggtgggccttagaggagacgccgccgagcaccgcaagaactggaaaacacacccctctctgtctgcctgggagagccacggaaattggcacttctctgagtgaagctgaggagaaggctgtaaatctgccaaaacagccttgaagtattcttttgtcatgaggaagtgacggctgctggagggaggtgaacaccacaaggagagatggcatctggcctgggccccgcctagcagcagctccacctcctaggccaggccctgtgggatgcgccactagaccaccatggacggatcccacagcgcagccctgaagctgcagcagctgcctcccacaagtagctccagcgccgtaagcgaggcctccttctcctacaaggaaaacctgattggcgccctcttggcgatcttcgggcacctcgtggtcagcattgcacttaacctccagaagtactgccacatccgcctggcaggctccaaggatccccgggcctatttcaagaccaagacatggtggctgggcctgttcctgatgcttctgggcgagctggagtgtgttcgcctcctacgccttcgcgccgctgtcactcatcgtgcccctcagcgcagtttctgtgatagctagtgccatcataggaatcatattcatcaaggaaaagtggaaaccgaaagactttctgaggcgctacgtcttgtcctttgttggctgcggtttggctgtcgtgggtacctacctgctggtgacattcgcacccaacagtcacgagaagatgacaggcgagaatgtcaccaggcacctcgntgagctggccttttcctttttgtacatgctggtggagatcatttctgttctgcttggctgctctacttctacaaggnagaagaacgcccaacaacattggcccgtgattcttcctcttgggggggcgttactttggcttccatgaacgtggtggacagttcaaggcccgtgggctggggatggcttggccttgtcccattcaagggggaacctgccagctttgactaaccccaatctttctacacgggagggttccgg

SEQ ID NO: 450595 - DNA, 1119 bp, Homo Sapiens
  misc_feature (818)..(925): n is a, c, g, or t
  misc_feature (928)..(991): n is a, c, g, or t
cccaagggaaaggttcccccccggccttgggggttcccaaagcttttggggggagcctccttccaaattgtgggccaccagggggtggccctttttttccccaagcccctttgagagaccagaaccggtttccccccgggccccaagaccccccaggccaataaaggagaccccctatgaggccctgacttcccagaaccttagagattgccttccctgtagccaaaggagggcaaaggccaggccttccctggttaaatatgaattcttaactatccttcctctccagggctttcccaggaggtagcatcctaggcttaacacactccctgaaatcagcaaatattcattgagctcagttctgcacaggacccaccatgacacgctgagaataaatccagtcatgcacaaagagatgagtcatgcgcgaagagatgagtcatgcgctaagagataagggcctcccctttggcatccacagtcagaagaagactgaccgcacacaccagaggacacccaagtcagccagggaccacacatgccccgagccttggaagaaccaggtgctctccccacagtggcttctctcatgcctccaactccctcttccaggcctgaacctgggaacgagcaggaggacaggcccactccaggttgctcacactgaatgcagctgcccacaacagccctcttccagggggctcagacagctacttagagattgctccaagttgcagagacttctttttcttgagaggactctgagaaaaaggatggttcctcaggtctttgcaggatggcaagtccgtttattattnnnnnnnnnnnnnnnnnnnnnnnnnnnnnnnnnnnnnnnnnnnnnnnnnnnnnnnnnnnnnnnnnnnnnnnnnnnnnnnnnnnnnnnnnnnnnnnnnnnnnnnnnnnnggnnnnnnnnnnnnnnnnnnnnnnnnnnnnnnnnnnnnnnnnnnnnnnnnnnnnnnnnnnnnnnnnggctagcgcatggagccgggggccgggggccggaggccgagtccaggaggcgccgccgcgcacgcatgtggccgccgctgccgagcgcttcccagcgccgtgatcccgctcctctaatccaaagaatc

SEQ ID NO: 450596 - DNA, 1103 bp, Homo Sapiens
gagtttccccaagggaacttccagccctcttgggccgtttttttcccacaaggttcatccattggggaggaggagtttgccccccttttccctaatggcattattgaaaaacctgttatgaaggaattagtccttgggagtcttggcttgccttaattaaccagtgtttgttggttccatgaatgttgaagttctgttttcttggtgcaaagacattctggaaagcttttttgttactgaggtgcagctgtccaaggcgattgaggcgctggagtggcgatcatcatgaagaaggggctcaaagttggacttgtagtccagaaagtctcaaggagacattagccgtgacatctgtcaggtagtccacactatagttttcaccatgcttccgtgcctttcccattgatagacagggtgtaattataatacttagaattcttttccaaggcataccagtaactccaacccagaggaacgtgttctagtccacctgcatctggggctccgtactcatttaaatatttccctgcaaaaaaggtctgataaccacacattgatctgagaattgctgggaaagtatttggttcttggatcttctgccaggacttactactgcagttcccctccagagtgttgttcacaacgtgatgattatgtgggtactttcctgtcaggatactggctctgctggggcagcagagagcacttggcacataagcactggaaaaagtcatccccatctctccgatgagagctttggttttctttagtggtgtcatgccgccgagcacttcgtcctggtcgtccgtgaggagcagcaccacgttgggcctccgggttcccgcagccaccccgaagacccccaggcagccgcccagcaccagcagtagcagcgctgggctgcaggagggcaggtggcgggggctgccccgccggagccgacctggggctagaggcaggagccgcatagcggacaggctccggggtgaccccgggacgggacgggacggagggacgcacaggtagctgaagggcgagaggccgaccagccgaaggaataaaaagccgtgccttgaaggccggtggctggagtcagacttttc

SEQ ID NO: 450597 - DNA, 867 bp, Homo Sapiens
  misc_feature (142)..(153): n is a, c, g, or t
ttttttttaaagttctgattggctactgtaaaggcaatcttagaagatgcatgtaaatataatataaatcaactttcttatcaattagacattttccccactcacatctcttagtttttagggtattcagtcccagcaaccnnnnnnnnnnnntgtaaatcaatatttttgtttctggctaatgttcaatcagtttttcttttataagagcttttgatggtactgtttctacggttctttaggcacttacacataaaaacattcagagggtttttccccttaacacacaacttttaattctcatggaaaatgttgcacagttagggaatttgtcttgcataggggtaaattctgtttataacatggactctgataatccaaatattaacattcctaatatagggaaaaataagcaccattcatagctaaaaataatagaatcctgtcataacccaatatcataattacaaggatctggatatattctagaccaaatcacactccctgaaacattaccatgtacaataaagcctgaaatagccaactaattgaatgttattcttaatcctttacactggcactaaaaatagttcatctgtaataagcatgaatacgaccatgtaataattaatagcactaattgaaaaggaataaaaaaatctaaccaccatagcaaaataaggggtttaagtattattaatagccctggtacataatccataaagataaaaacgaaccaaattcaagccaagtaatttccaatgatattctaaggctaagtctaaaagatgaatgttctgtaactttggccataaatcattttcttctatgaaaattttcttctagaataaatatcccgggaattcc

SEQ ID NO: 450598 - DNA, 1331 bp, Homo Sapiens
  misc_feature (44)..(44): n is a, c, g, or t
  misc_feature (53)..(53): n is a, c, g, or t
  misc_feature (74)..(74): n is a, c, g, or t
  misc_feature (89)..(89): n is a, c, g, or t
  misc_feature (100)..(100): n is a, c, g, or t
taagccgttacttcatttcacgtggcccttcgtaactgcccttnaacgaattncgtggtccttaaggtccccanaacttgatctttccnagccatgtctnaagcccatcaggttattgctcatcttgggaggaatcccgcaacagaggtcactgctgaatcatgaaacaggcgggtggccttcccatccccttgccttgatttcccacaacgcagatcaatggcaaagatttcccccagagcggcagccattaaacagcagaggagccatgagagcaaactgctgggccaagacatcactgttggtcccaaaggactgccggtgtcccgtcaccacgttggtcaacaggacccgccgagacaagcctgtactgaagcagttatttgcttggatattcagggaccaggcacaggaccaggcaccagggatccggaaactgcagagcatgccaggccggtctattcttgctgggtgactattgacgaacagtgatgctgggagcagggtggcacagcctggagtctctgcgagtcccatgaggcatagcagaatgtgggaatccaagtgattcagcgaggcccagcacaccgaattcaccttccggttggtgaagtagaggttttcgtgcatgaacaccttgagcgtaggggtcttcagactttgcaggttgatgataccatacttggagcctccaactttaacatcgttcactgtgaagagccggtcactgttggtatctgccagtatgaggttaaatcggtcgcttgccaaggcggagggatccatgcttcgaatctggacctttttcctctccatgcagctgagacgcagctcgtgggctaaatggcagtaattggtgacgttgagaaaacccagctggctttttcgtagcatggaagatgcattaaatcccatcctggcaatctttttccgtctgtcttcttcctggagcagccgcagtctcttgctctccatctccttctgccggatgctctctttcgtcagggggttgcagttgttatgtccagggagcaagcggaagtagcgtttcttttcagggtcaaagtaaaacccaggtagctctggcacagaggaggtcccagctgtgccagacgaggttgacggagactcgtcatcaccgtggccggaatcgtgagcgggctgtgctgcccgggagtcagacctgtcttcagaatcacggagtctgaaccaagggttctgctggtggcttcttctcccatgtcgtcttctactctgccagcgacttttattcatttctgtgcctgttcagcgtgtccctcgtgccgaattcgccacccaggcctcgctac

SEQ ID NO: 450599 - DNA, 1459 bp, Homo Sapiens
  misc_feature (1429)..(1429): n is a, c, g, or t
tggttaatcccccaatctttcccttttgcacccctggaaattactgccgggtttttctaagttacagaagttcagcttccccaggtcggctacttcttggagatgggcccatttcctggaacgtctttgttctaaagccaatgggtgagacccgcagccagggggccatgattaaatgcctttttaaaatggaatgaaaaagaggatcaggtcaaccactggggagaagacacaggacacattcttgggtcaacaaagcctctttccaggaatatgccctagaagactggctccctgcagtccgaggtcctttttctgttgtcgaaatgaaaatcaaaatgcggctacttcctgctggtggaaagaacaacacttgaaaatctgagcagcacctctcatgtgatgtccgggagttgggggtgtggatgcttccttttaaacaggaggagagctcagtgtggtccccgagtcaggctggagaatctgggctgtgctaccggtttgcactccaatctctatcagctttaaaagttctgcttcctcactggagtacacggtggtgtctgtgtcatcggagtgatatccggactggtagccgcttgttctggtttgagccttcgagatgcccacagactccctgcttttgcttgggcaccattccaccaaaagatgggagataattttggttctgtcttcccaaagttttcagctcttctgaggcaagaaccataccactgtccgtctggttgtcatctgggattacttttacttctggttcttctaacgggatatcttcaaatgtttttacactcacaggccggctctttcgcttactgttctgcagatactgactgattcctgctgtgttgtcataatggaatttggggtcacatacttcctcctcctccatacaggaaacaggtgaggtaggcagagagagtccagaatcctcttccatgctcaaagtctctgatatcggaagaacaatgtagtctttgccatcctgctgagcattagcttgcaagagatttcccaaatgttccaccaactctgaaaacgtgggtctctgactgggctccccgtgccagcagtccagcatggtctggtacatttctggtgtagtataatcaggggccctcattctagttccttctttcaatcgcctacaaaattcttcatcaatctttaccccaggatatggagaagcacctaaggaaaatatttcccacagcaaaacaccaaaagaccagacgtcactctggattgtgtacactctgtcaaaaattgtttctggggccatccatttcaaagggaggcgagcatctccttttctgacataatctggatctttataaatatcccgggccaagccaaagtcacagattttaaccacgttcttctccgataagaggatatttcgtgccgccanggtccctgtggatacactatcccgggaatt

SEQ ID NO: 450600 - DNA, 893 bp, Homo Sapiens
  misc_feature (24)..(24): n is a, c, g, or t
  misc_feature (47)..(47): n is a, c, g, or t
ccgaacactttacattgccctggnttaatcctcctagtttttacaanaagtgttcagctcccccaggtactgcctacttccttttgaggatggagcccatttccttgaaacgtctttggtcctaaacccatggtgagacccgcagcagggggcatgataaatgctttttaaatgaatgaaaaaagaggatcaggtcaacactgggagaagacacagacacattcttgggtcacaagcctcttccaggatatgcctagaagactggctccctgcagtccgaggtcctttttctgttgtcgaaatgaaaatcaaatgcggctacttcctgctggtggaaagaacaacacttgaaaatctgagcagcacctctcatgtgatgtccgggagttgggggtgtggatgcttccttttaaacaggaggagagctcagtgtggtccccgagtcaggctggagaatctgggctgtgctaccggtttgcactccaatctctatcagctttaaaagttctgcttcctcactggagtacacggtggtgtctgtgtcatcggagtgatatccggactggtagccgcttgtctggtttgagccttcagatgccacagactccctgcttttgctgggcaccattccaccaaaagatggagataatttggttctgtcttccaaagttttcagctcttctgaggcaagaaccataccactgtccgtctggttgtcatctgggattacttttacttctggttcttctaacgggatatcttcaaatgtttttacactcacaggccggctctttcgcttactgttctgcagatactgactgattcctgctgtgttgtcataatggaatttggggtcacatacttcctcctcctccatacaggaaacaggtgag

SEQ ID NO: 450601 - DNA, 1217 bp, Homo Sapiens
cggtccattaggcgcgtctgcgtgtgttgcagaacagaccatagagcacccgcagtgtgctcttggcatccttgtttcacgatatcttcagggctgacagggcagctgagcaggccctcgtccttcagcagctccagcgccagggtgacgttgtgcagcatttctgcaggagagttgggagtgaggtagaattcctttaagtgcaggaagaagccttcaagttgtccaatcagcaagagtaagatgaccccatctgcaaactgggtgtccagattctgcacagacaggcccaggcggtccagcttctggttgacaaagttcacgatggcctctttcactgcgttcactttctccggagccagcttaaataattcatcaaagacgtcctttggaggctcgtccttgtctgtgctgtattcagtgagctgttccaccaacttctctgacttcagaccacttttggtgctctcgatagtgatgacctccacctggacgttggttgggagggagagttcgggctggaagcgcttggccagggccacaaggaggtgcagggtagacaacaggtccttgttgaagatgctctccacgctccacttggccatgccactcctccagctgcagactccggttcacggcctccagcaccactgtgagcttgtgcttctggcttgtggctgtcagggcgatgtcctgctgcttccagcttgagcgccgccagcctctggaataggtggtgtaggatgagcccgtcgaacatgtcctcctccaggctgcggaccacaatgtgctcggggagaagagtggcattgatccactccatcaacaccttctgcagttcttcaaatttggggtccttccgggaagtgggtggcaggtatttcttctttcctccttttgagagctcctcctccgctgggggctccacccccttggggagctgcagcaggtcgtacaagaactccggctccatcgcctcccaagcccaaccgctttccacgcaggaaaacaaaggcctactgagtgcaaagggtggtccctggattccgaatggaagcaagttccgggttcttctggggtcttcggggaccaggccgggaggcaggagccccgctgctcacttcctccaggcccgctcagccggcaggagcttcctcctctctccacactccgccccgggccaggccccttcctctcccgggaccatcaagatgcga

SEQ ID NO: 450602 - DNA, 1034 bp, Homo Sapiens
cggtaccataaggcgcgtctgcgtgtgcttgcagaacagaccatagagcacccgcagtgtgctcttggcatccttgtttcacgatatcttcagggactgacagggcagctgagcaggccctcgtccttcagcagctccagcgccagggtgacgttgtgcagcatttctgcaggagagttgggagtgaggtagaattcctttaagtgcaggaagaagccttcaagttgtccaatcagcaagagtaagatgaccccatctgcaaactgggtgtccagattctgcacagacaggcccaggcggtccagcttctggttgacaaagttcacgatggcctctttcactgcgttcactttctccggagccagcttaaataattcatcaaagacgtcctttggagaaagtgaacgcagaacgcgcctattaggcgcgttctgcgtcctcaaatgagagggaaaaaactccgctagcgaactcagcacatggaccctgacagcgaacgtgccgagtgcccatgaggatgggcaagtcacaggcattcaggggccatcccaagggttagactatggagaggaagccagggactcctggctgcaaattcgtctgctagtgggccaggcttgaagggcttctgccacaaaacagcaacttcatcttgccccaattactcttaaacttgaaaccaaatgtctttttaaaataccttggtgtttctattttatcacgcactttccctccgtctgaatgaatgtgattttaacacatttacatggcatttcatggagatgtgcctgatctttgttggtactaagtttctacagtacctaagatttcaattatgtttccagaattaaatagataccagagaccctgccctaaagaagttacagattatgaagacgcaaaccgtcactaagccagctagggaagaacacacctttgatcttcagaggagcttatggcaaacactgggacagcccgctgctccccacaacacacacagcacgcagacgcgcctaatggtaccgagctcgatt

SEQ ID NO: 450603 - DNA, 2086 bp, Homo Sapiens
  misc_feature (2032)..(2032): n is a, c, g, or t
taaataagggggttttgttcgcgcaaaaaagtttaatttagggagaatagttctttgacgccgcctttagaggctgggtttgtatacctgagagaggggaagagggggttttaatgggtctaggttatgagggccacctttgttttaaaaaaggttccgagagaaaaaaagatcccattttgtttctttggtaagaaaatattactaaagcctcctgttgggtagataacaaggtgatgcccttttttcagttaccgggagggcttcgttccggggggtgcggtaggctcctagccaggtgtaacttccctttaagagggtttgcccagggtaccaggacccaagtgaatgcggacaggggaattattttcctgtgttgataattcatgaagtaggaacagtataatcaagatcaattgtatcatcattagttttccactgcctcacactagtgagctgtgccaagtagtagtgtgacacctgtgttgtcatttcccacatcacgtaggagcttccaaggaaagccaaatcccagatgagtctcagagagggatcaatatgtccatgattatcaggtatgctgactatttccaaggggtttttcagttgcttcatttgcttgtaaagcaggtaatcctcttgttgtcttttctttttctcgatgagccgtgtacaagttacattgatggttggtctgggtttctgattcttgaaaaacactcgagcagaacatttcccctaacgtccctcaccttcctgaagtaaagactctgggttgtagcgctctgtgctgaagaccacgtgaactttacatccctcttttggattaatccacgcgcggccctcctgcacctcggccagcactcgtagcgcgctgggcgagccggaccggaagttgaagaagtgaagcgccgcgcgcgccgcctgctgcaggagcctgcgcgggaccccagcatcctgaggctgcccagggtcgtcggggtccccggaccccgcgggcgccgccaccggggcgagcaacagcagcagcgcgagcagcggggcggtggggcgcgggcccctgggcccggaccagggagcaggcagccgttgccggcggggctgcatggacgcaggaaagttggctcggcacccgacagacacgggctcggagcgggcagtgccggcgctcgcggaaataaggccgtggtgggcccctcccctccgcccccagggcgaagataattgtgaaacacctgtgccaggccctgggggaatgagggtgaacaatcttaaacatctctgccttcctggagcacaccttctaggaaagaggctcaggatggtgtcgactcagtggaaggcagagatgaagcctggaaagaaaccaggcccttgtgggtgttactaacccactggtacgtgacccatctgaagcctgccctgtctctagactcagaaccagcttgcatcgtggcttcacagactaaactttgtagccaggccttgcccgctttttagtccctgctttgacatggtgtgatcccaaaatttatcccttgtctaatctaccacaagtcttgcagacttcccatttgacttcttctaaaaattgtactaatattgctcccaggtgtcccccacagctattttactccccctactataaccccactcacatattccttcattgaaatttcaacaccccgcatcaacattaatcatcctcattattctctcctactcttcacctttacgttcccactttcactcctatttagaccgacttatcatattatccattaagttttatgtacgatttcttgttttgtcttttaactataacctatctcttctatatccacaaatatacgtggctcgtatcgctcatacataatacctccgtgttctattagctatgtagtatattctagcttacagacttgttcatcactattgtctatgcatgtaatactcgattctctcccatcacactgtgtacgtactatactggtatttcagtgcaaatgtagacccattcttgatgatgagngcacctgctccccctcatgtcatctgtttccccccacttagctacggcttcctg

SEQ ID NO: 450604 - DNA, 1683 bp, Homo Sapiens
  misc_feature (1395)..(1459): n is a, c, g, or t
  misc_feature (1587)..(1587): n is a, c, g, or t
agcccccctccctgccccgggacccgggtttttaattttttcccccccagggtgggtgagcccaaggaagctttggagtattaaaccccccggggggaggttgccttaattcccttcccttccttccccagggaaaggcaagaaatttacactccattcccctttttccgggctcccctgcccacgtggtgctggattctgacagaaactgtgggccagtctgaggtgtccctggctccccacacgcttggtgcccctgggggtgcctggaccagtcttgcaggaggctgaccgctgggggctcctccatccgcacgcggataacctggagatccagtgtcccgcggagccccggagggggagctggagaggggctctccgcccggggaaggcctccttctgccacttccctgtctttgggtgagtccttgctgtctgggcccctgagctgggtgtgggagaagagctgcaagacgaagccggcggggaagctgccgtcagtgaagtgtcggacctcggctggtgctgcgaaagtctccgtgggcgagtctggcgatgggggctctgggtcagggtccaggtttttggtcataggtctgcctcttttctttctgactggctcttcccctgggggttccttgccatctctgaccacggggcttcttatttcctggctctgtggcagggacagcaggaagctcgaagggggcggagtcccctgggcctgctcccttttaagggagggatgggttatcctcagagtcaaggagaacgacgatttcggctggcattctggcagcgtctgggttggcgtctgggtctgggtgggcatcctggcccgagtctgagttgggtggggacggctgctcagctctcacgtcttgcaagagggccaccccttcactccaggcctccaggatattgctcttctcagaagggctcaggtccaaggtgtgagggtgctgctccaagatgtgcgagcgagctgtgtcggccgagggtgcccggatctcagcgccacacaccatgcacagtgcccgcccgctgcctcctgggctgctgcccaccaggaactcctgctcccaagacacctgctgcttcggctcctcacagccatcactgcctgcctctagcgggctgggtctaggcggtggggtcttctcctgttgggtcactctgagcatcggctcgggccgcggaattacggccaccaccatggcctcctcctcgtcctccccttcctcgcatttcagcgtcacctcgaagcagtcgagtgcggcgccctcggcctttagggccatggtgcggccgtgggcgatagcagtggccggaggactggcgcgcaggcttcggcgcgcagccggcaaccgcctcccgcctcctggccggaatagnnnnnnnnnnnnnnnnnnnnnnnnnnnnnnnnnnnnnnnnnnnnnnnnnnnnnnnnnnnnnnnnngcctgcgaccggcgcgtccgggcctccccgagacctcggcgcgtcgggagcccgggcggggagggctcaatccggggcccctgccccccgccgctcccttttatggaggctcattgtcggcggcaacnccggccggccagccgcggattccggatattccggaccggtaccatccggggtttttcggctattgggtctttgttggaggtggtaggggaagggga

SEQ ID NO: 450605 - DNA, 1264 bp, Homo Sapiens
  misc_feature (150)..(150): n is a, c, g, or t
acgcggattgcatatagtgaggctgcacgacgccatccccctcaagagcgagggacatcgacggtccggcgccgcgcttttgtatgcgacccccggggctgtgtgtgcgggagaggcgccattatgtctgcgggcgacgtgtagcgcgtncttcgtcattctaggtattgcccggcgcgttatatggatatcgtcacggcgggtgctaggccgttttagtattcacgtttctgtcaagattgggcgctcgcggcaggatgttagcgttccactttcgtaggggacggcggaaaacaccaacgatcctctgctcgtccctcctggggtgtccgctcacgaggcggggggcgtgtcacgagtttgcaaccgggtgcgtgggcgcgagaggataataggggggaggtcaggagggcacgtagtcgcccacgttcgatgggccgcgagaaaattgggcggggtcggcggttcggtttcaggtggggaggctgcagtgggatccactcgaagagtataaagatggatgggaggcggcgattggctgggtcgggggtacaatgggtgcgaagaaaaaagtggacggtctgtggggagggggggttccgggccgttcgccggcgggcccatttgccgtatggcggcaaacgggcaggtcttgcgcagggggcgactataatcccgaggggagggaggaacacagcgatgcgccgcacttaggagccttttcgttgatgggctccgggccagtaagacgccatcattgggctgcgggctggggcctaattaccccgagggcaacgtggtgggctgagcgaatacctcaatgtgcgagagaccgaaaagctcgaaccacgaccgtgcctagggaccaggcttttcctgtggccgatgcggggcagatgcagacccagaggccacccttgcgcgcgatctccaacccgacggtgcggctcctctcggacctggagctgtggggagaaggcagccttttagtgaggagccgccgcgtggcgggacgcaaggaaaaccacccgagccgctgaacagtattccgcgactgcactccagggcaccgggaccgccagggtgaggagggactctgcgttctgcaaagctagcggttcccactccacctcccactatctcagcgatgggcacgcgagcgccagcccgggcgaccgcgggggaagaagcggtccacgccacctcaggcccccgccccaggctctgccagctgggggtccaccgatcccgagaattccggacc

SEQ ID NO: 450606 - DNA, 1301 bp, Homo Sapiens
  misc_feature (264)..(272): n is a, c, g, or t
  misc_feature (357)..(357): n is a, c, g, or t
ccaaagagtgaaggtttacttccttctctttccaacttcttccccattctccaaggaaaagaacaacaaaaaaatctggtatggtccctccttaatagtgatttcagaattttggaaagcaccaagatccaagatggtagttttaatgtagttactcattcgcacacattttttaaatttaatgggtcacctggcatatattgtagataacatatcttttctataatttgtaagtcaataatttttttaactgctacatgatannnnnnnnngcccaaagattttaaaagacttgaagttggtcagttcaaaactcagatttttctacacattgtctgccatgtccattaggagttntggggaaaatactctcacacagacccttactttgcatgcagtttagagggtaagatacgtgcttcttttggggataaagatttccttacttaattgtcaaatttcatggagccattctagtctgttggggaaaatagtgattaaaagcacttccaaaattaacattttttgacaattcagatatgataagaagcaggggaaaataatacactttactcttttcttgcttaaaggcaaagaaatcaatgaaacttgaggacacactaaacatttgataactgcaaatgtgctttaaaaattggttcaatggtgcttacacatgaaacggtaacaaatggggttcctaggacgtcagaaggaatctttagtttgtatgtaaattacacactagaggaggaggtgcttttaagccagtcttttatttttaatcatctcaaatatgcaaccatacatgcagtaacattaagggtcgtaaactggtgggaaacaggaacttcaggggagaggcttaaatgcctctggttagagtgggggtttttggttgcttgtttaatggtggggtttcaacactgagcatcatttctgggatcaagtttctaactggcatgtggttttgatcctgaggggttaccattatcttgcccatacccgaccaatggaagatctaagtttcctttgggtccccaaaaaaagaaaccctttctaaaattaaaatctaccctggaaattttcttcagcatttggttcttgttcaaggaaatggacacccctaatggggccttttaagggaaaatggaaaattttgcccggggaaacctttaataatttaaacggaactaaatagttctaaaggccttccccggctgccccttgggaggaaaagcaattttttagggggggcgaaaaaggggcattaaaggccattttccctcccgcccaattag

SEQ ID NO: 450607 - DNA, 433 bp, Homo Sapiens
atcctacaaatataatgcccaggtgacccccattaaaatttaaaaaaatgtgtgccgaatgaagtaaactacattaaaactacccatccttggatccttggtgctttcccaaaattctgaaatcactattaaggagggaccataccagatttttttgttgttcttttccttggagaatggggaagaagttggaaagagaaggaagtaaaccttgactctttggtacagccctgtatagcaaacttcagcctggggcacatttttatggtcaaattaaaaacctttgagaataggagtttatcatagaaatgctgacagatcctaacccagagaagggctaagagcaacacaagtaatattaagaaagctctccctcagcacgattgagcttcagcgcaagggatagagttgtctagtggacgcccttggccag

SEQ ID NO: 450608 - DNA, 1293 bp, Homo Sapiens
  misc_feature (168)..(211): n is a, c, g, or t
  misc_feature (430)..(467): n is a, c, g, or t
  misc_feature (739)..(791): n is a, c, g, or t
  misc_feature (1161)..(1161): n is a, c, g, or t
  misc_feature (1165)..(1165): n is a, c, g, or t
  misc_feature (1197)..(1197): n is a, c, g, or t
  misc_feature (1220)..(1220): n is a, c, g, or t
gcacaattgtaattgacaggtaatgaagctatttgttaaaatatttgcctttttaagtaaaaaagaaaaatcagaacagggctatttgaagaattattttatacacagattctgccttgtttcatagtatgagggttgaagacggaaaacaatctaagggtctctcannnnnnnnnnnnnnnnnnnnnnnnnnnnnnnnnnnnnnnnnnnngcgctgctaagaagctaaagtcatccatccttattcacgttgacagtacctagctgtaatgtttcacagagtgtgctgctattttataaacatttttataatatattattttactgcttaaattccaagtcctgaagtagatggttgagatatgagttcttcgtactggaaaagcccttccgtagtttgttttcttctggtagcatattcatgggtggnnnnnnnnnnnnnnnnnnnnnnnnnnnnnnnnnnnnnncgccactgacacattctttcaaaagccggctttttattccgtccgtgttcgcgccacacgcccggtcccacggcccaggccacgtccggcccgccttttccgctacctgtccacccaccacccgtctgagatcggttgcttcccgcctccgctcaccagagtcaccttacgctcctccctacgcccggcaccttatcatgaccataaaagccgccctgttccggaatctagtcactcactctgcgccgcccagtttaggcgcgcataactannnnnnnnnnnnnnnnnnnnnnnnnnnnnnnnnnnnnnnnnnnnnnnnnnnnngccactcgtcacccgcgcccagatgtagcccgatcaagctccccgcgacgcctcgataggccaccgaccgatgaccgccactgtctccacccttcccctgttcgacacgatcctctcggtggtcacacggccctatcgcgctccccccgcggaccaccacacacatcgtattcacccttccgggtgtcgcgagacgatacgacgccagctccgtccatactcactcgccctagcttgcagcaagacaacaccccgcgcaccgccatcgccgtatccgcggggtcacccacatggtagatcaaagacgcccacaaaggtgatgttcatctacggcccttcaacttctaatatgtcaaaagactatgtacgncctntctgaaccctctcccctaacgtgagcatccgnccgcccacggtgagacaagcggncgcccgtcacacatccacgatgaatcgctctctgtagcccataataaacgctcttgtacaatggagatcagcg

SEQ ID NO: 450609 - DNA, 1093 bp, Homo Sapiens
ccagttcaagcaagaaaggcttccttaaaagctttttgctttgaaagggaaatctgaagacttcttgggcctgctgtgtgaagaagggtcccgggcccgagttatccacctttcaggcccaggtatgttccctttccccaggaaggctgcagggctcttggaaaatttctgcagaggctcttataaactgtccatttacttggtggttccattcgcggggaataataatatgccagcattgccttcatttcctcatcacttctcactgtaattggatcaccattttcatcttcatattcaaatgctgtagttgttgcttcaggcagaccctggcctatcacatccagcacatccctgaagagtaactgcggcccggagtgcactgtccagtccaccgcgccactatttgggatcttgatgcgaattaccagcacctggttctccatggcaggaaaggggccaagggctagccacagcattacaggttaaagaggctcacatcctggggtatgggaaacccactggccgctggttaggagggggctccaagaggtgacaaggggagtgacgggcagaggacagagggtgaaaacaagggaatggaggatgagggggagggaagaggggaggggtgatcaggaacgcacccgcaggcaccgagcctgcccaggctgtcgggggtctgaggtgtctcccggggagggtgcaccgggaagcgggcaaaggcccgcaggaactagcggaggtcggaaggttctggagttgagcgaacgctatggtgaaggtctctgccgccgtgtgggtatgaggaggcagcagggcaaggactcggtttgggggagatacagcggcaggtgtccaccgctcgtcagtggactaggagagggtcctcgactggaggggactcagtccggggctattaagaaagagccccagggccgccacaccacggagagtccccgcgggaggttcaaggggcgagtcttctgccccacccggagacacagggcgcggcgcgcgcaggctgagctccggccacccgaggccgcgcggaccggcggcggctgcggcgagatcccgggaattccggacc

SEQ ID NO: 450610 - DNA, 1242 bp, Homo Sapiens
  misc_feature (1166)..(1202): n is a, c, g, or t
accctttctttgggttgggagggcccagactttccccccaaagttagaccaatttttttgaagtttagaggatcccctttttggaaaactgttttccagggccggaggccccccattcccttttcctttgggaaagcaaaagctcaaattaccatggccgccctgttcaaaccacccgggagccttaggaggtaatttcaggtgtttccagcatcttgcaggcattcaataattttttggtgagagcaattccattcttgaaggtcgggtttattaagcagtacacctccgtggagtgacattattcccccttggttcctctaaagggcacctgcaatattccagccagttgtttggccagctgcatgtggtactgtgtgcctgagccgtaggtttctctggtaactgggttagctattcccatgctcaagcaagtaggatttaaacctgatggtctcatcttctgtgatgtcaccttgtttgtctttaattttattagcaattgattttgataattccaccatttccttagccttgatcattagtttgctgaggtcttcaaaggcctcagaaatgtttttgtcagtttcttttcgtgtgtttcttccagtttccttttcaatacctacaattcctacagcccttattcttcctggctggggtcctctatttgtttgtaatgactgggaaactggcatattctcccatcttctttgtgtcatttcctctgataaacgcctgtaaaactcaatctggccatgttctttgaaggagagtttgatgtaggagttcttactactctggaatgggccaggttctttgttaggaggagctgggtgaagatgaaccactattttggcactcttcccaattccagccgcctgttcttcaatgaacacaatttgggaaaggagaatggccatgcaacactcatgatttttctgatctctccaaatcagtcggtgtgtactaagaaggagagtcccagcatcaaattttatcttctcctcgccatcgtagattcgcaccccgcgctgctggatcaccagggtctcgttgatctccaggaggccgctggtccaaacgaagcggtccatggccgctgccacccagccccggccccccccgctctcgacgaattcgagctcggccgatttggcctgatnnnnnnnnnnnnnnnnnnnnnnnnnnnnnnnnnnnnncgccgccaccgcgttcacccgagtcgccctatagtgattt

SEQ ID NO: 450611 - DNA, 1467 bp, Homo Sapiens
  misc_feature (789)..(798): n is a, c, g, or t
  misc_feature (871)..(1032): n is a, c, g, or t
  misc_feature (1156)..(1156): n is a, c, g, or t
  misc_feature (1260)..(1260): n is a, c, g, or t
  misc_feature (1331)..(1331): n is a, c, g, or t
gctgggtggcgaatcgagacgagggcggcgcgaacggcccttgtccctcccaggccggagcacaatcggcggcgccctgggcggccgcggagtcatggacggcagtggacccttcagctgccccatctgcctagagccactccgggagccggtgacgctgccctgcggccacaacttctgtctcgcctgcctgggcgcgctctggccgcatcgtggcgcgagtggagccggcggacccggaggcgcggcccgctgcccgctgtgccaggagcccttccccgacggccttcagctccgcaagaaccacacgctgtccgagctgctgcagctccgccagggctcgggccccgggtccggccccggcccggtccctgccctggccccggagccctcggcacccagcgcgctgcccactgtcccggagccgtcggccccctgcgctcccgagccgtggcccgcgggcgaagagccagcgcgctgccactcgtgccccgagggcgcggccctgcccgtcccgctgacctgcccctcctggctcgcctccttttgccctccacacctgcggcctgcatcaggccaatgcccgcgcctccgcggacactctcctggcgcccgcccgttgcgcccgcctcccatgcatatccctgtgccttccggccctctaccgacccccgttttgccacttcttgcccgcgcgcaatcacgacgaacctatctgccccggctccctctgactctcgcagcacctggagccagaccggcaaagccccctgccgtatggagactcannnnnnnnnngccctctccgctccggttccccctgcgagcgaccacgttccccttccgccttcgcgattcgggcccgaggacnnnnnnnnnnnnnnnnnnnnnnnnnnnnnnnnnnnnnnnnnnnnnnnnnnnnnnnnnnnnnnnnnnnnnnnnnnnnnnnnnnnnnnnnnnnnnnnnnnnnnnnnnnnnnnnnnnnnnnnnnnnnnnnnnnnnnnnnnnnnnnnnnnnnnnnnnnnnnnnnnngggcgacaggtgccgcggcagcgcccccgccccgttcgcatcccccgcccgttccgcaacgggtatctgcgtttgcggcaccccgcgcgcatacgctgaggcctccctcgcaaggctattgaangctacggtccccctgtcagcgcgggggcgaacatacgccccccgattgcgctaacaggacgcgcgccgcaccccggacggagtaccgacggagcaacccgcggnccgggccggtcactccccgtcccatcgcgggccgcctctcggagacccgagtgcgcctcagcccctatctnaaggcacctccctccaccttatttcacccttgcttcggcgcgcgcaggcgcagtctcacgtcgcggctggtgccccacgacgggttggccccgcctaatgtgccatccccgcacgaagcccctaccccaaccggcg

SEQ ID NO: 450612 - DNA, 1125 bp, Homo Sapiens
ctaggattgtgtccaggcgggcccaaaacagggccccaatttgaacccggggactccccaaagattggcagggaagcccacagggagcgttcccccctatttttgaaagggggcatccctttcccctttttccagcccccttggcaaaaatttttttaaaaacttcccttttattggctggaaaaattattctggcccccaggggagcccaggaatattcccctatatccttaccccccctgatcccccaaagttcaatacattcaaaaaatgtcatcacatatcgctcgccttctgtcaaaatctgtttcaagaaagactgtttgaaaaaactccaagtcagtttagcctctttgcagtttataaacgctccatttcttggtaatattgggtaacagatctgttattctggagacaggaagagtttgaagcttggttgattctggggaacccagtaactttgtgaaataaataacatagcagagcgccagaactgtggtatagaaaagctgggccaaagagaaaatgtacaatccccagtgaggcaaccacagcacgagaaaagctgtcagaacgctcttaagaattaccgacaggctctctgcaatcaccttgagcttcacaaacatatgtgcttgtgccaagacccaaaagggctctcctagaagctccaccactgccgagagaccaaacagcaccactccagttgcatagtgagggacaacattaggatcaggcacttcaagcagctgcaaccagatccagcccaggaataaggaccaaaacacacccagggggactgttagccacagcaggttgagggtctggctccagtctcgctgggtgcccccactgagacatgctctgcggaaggcctctctggccaggaagagggtggttgagtaaagcagcgttagtcttacatttactacgccaacgatttcctttgacaggaagcgaagaataaatgcattcaagacaaaggtgatcaaccgaaacaacacctgcaggaggagaccggaggaggccagccgggccgcgtggcccagcacctcctggctgcccatagcctccgcgccaggctcagacaccaggaaatgccgccgccactccgatcccgggaat

SEQ ID NO: 450613 - DNA, 975 bp, Homo Sapiens
  misc_feature (85)..(85): n is a, c, g, or t
ggccctcggtggtagaaggaaagggcctctcttcccgggaaagcttctggcctgttacctagctggggcccagggcaggcccggnctgaaggcggcccccgttgtcccaccgggtggttttggacacgaatgatgccctagagatgaaatggctgcggggggcccaagtagtccacgatctcatactgaccaggacctgggaaaggttgctttcggaggcagaggcgaaggctgagcagagaagttccaggatggggtttttcgggaaaaagagtcttttttggaacttttgtgcaatcacctggggttgtaataaccaggtcccgggcctgttgacgtcagttttaaatccacggttggtttttgatttaaaacaagacattaatgtatttggcgactgcttcacaagggattcgttgatatcataatgccctgggggaggtcctttatcagcaaaagcgaaagatcctctttgggtttttgacataaacccggctcgagtacagacgttgtttctctgcttgcagcaagagacagaggcattgtaatagtttggtgcaggagtttcaaacttgagagctttcataaagcttggcaactggaacatgctggaacacgaattactaaagtctctcttggaaataaaatccgatgggatagtgtatgcgttcgctgcagggtatttagaaacgatggtgtccaatcgggcgcacattgagggaaacatgcaagttcctttcttggacaatgagacactgttggacaccggtgactggtgaataacattgtagaacccaggtcctgggatatcattctttctgtacttcactggcacgtctgggatgtttgccagtgcgttcatttttctgtgcagagttgtccatgttagcaaaattctgtgacgtgttccatttgtttgatgaaaagttctactgcatgttctcctaagcacctggatccggagaattccggacc

SEQ ID NO: 450614 - DNA, 903 bp, Homo Sapiens
gattcgtgatatcaaatgcctgggggaggtcctttatcaagcaaagcggaggatcctctttgggtttttgacaataacccggctcgaggtacagacgttgtttctctgcttgcagccagagacagaggcattgtaatagtttggtgcaggagtttcaaacttgagagctttcataaagcttggcaactggaacatgctggaacacgaattactaaagtctctcttggaaataaaatccgatgggatagtgtatgcgttcgctgcagggtatttagaaacgatggtgtccaatcgggcgcacattgagggaaacgtgcaagttcctttcttggacaatgagacactgttggacaccggtgactggtgaataacacttgtagaacccaggtcctgggatatcattcttcttatgaggaaatctcttggcttgactattgaatccttttttttctgattctgggattactgaagcttgagatttaaaaggaatggaggattgtgttggatatgcagcagtaaaaccttaaacaggctgtcccggagaaaaggaaggagatgatagtaaagacattcttgccaggcaggaaggagacagcaaaactattctgggagcagcctggacgaggcgcggtcaggacagaggaagcgtcctcactgctccttggcctttctgtacttcactggcacgtctgggatgtttgccagtgcgttcatttttctgtgcagagttgtccatgttagcaaaattctgtgacgtgttccatttgtttgatgaaaagttctactgcatgttctcctaagcacctggtccggtcccggcagctgaatctggccagcccaacctcccggtcgctatggcacccacaggcctaacattcgcgagtccaccttccgccgtccgcg

SEQ ID NO: 450615 - DNA, 967 bp, Homo Sapiens
  misc_feature (25)..(25): n is a, c, g, or t
  misc_feature (347)..(485): n is a, c, g, or t
ccccagtgctcctttgatgacactnaagggcctggctacaatcgcaaacacgcagccacgtctctgattcgatctttggggcctggtgtttttcccagtgacaccgttggctccaggacactcaagacatgtgatacacaagactctcagtcactgagctccctgccctcctcggccccgagactggaagagcagctgccacgtttgggacccaggcggcgcccaggctgaagggagctgctgagggctaagctccaggacacaggacgtggctggccctcagaacagggaactccaagagtggaacatgcatgttgattgagactttttcagggatacagcagatnnnnnnnnnnnnnnnnnnnnnnnnnnnnnnnnnnnnnnnnnnnnnnnnnnnnnnnnnnnnnnnnnnnnnnnnnnnnnnnnnnnnnnnnnnnnnnnnnnnnnnnnnnnnnnnnnnnnnnnnnnnnnnnnnnnnnnnnnnntgcaggcctaattattaagggtctttccatgatcagcaaaggagctgggcactcggttagaataggaaggaagtgggaagcttctgaaataccatcctggtcttaaatccataaatgcccagaggccagaagtgtgccatgctcagcatgagaaatgaataaagaggggctctgtgccagtgtagggccaaagtgggaagtaggcgccagtcctcaggtgcctggtcttcacaggtgcctgctctccacaggtgactgaccctcaggtggctggtcaccccatggctggcccctgggtagctctgtccccatcgtgactttaggcatcagataagggagagatggcagtggaaggccatgagcacgtctcacacccacgacagcacagcatggaggtcaccttttgaaagacgccccctggctaagcagagagtgagtccccctcggtagggcttgggggtcatcccgaggaattccggacc

SEQ ID NO: 450616 - DNA, 1096 bp, Homo Sapiens
  misc_feature (249)..(257): n is a, c, g, or t
  misc_feature (356)..(384): n is a, c, g, or t
ccaaaaaatgttcccaataacccccctggaggaccaaaaccgggaaattaattgggccagaaaatggcctttaaaccggtccccatttcaaaggatttttccagtaataacctggcttgaagaaattggatataatataggccccttaataagccagccagtagccaggtggcccttttggatgttcccactatggcatcccggcctgggaaaccccccatgggagtttacattcctaaaatttaaccnnnnnnnnngtggggattggagggtgggggataatagtttccagatgccccttgaaccatgattccatcaagtcagccagttcacttagatttcttcttaaaaaggcnnnnnnnnnnnnnnnnnnnnnnnnnnnnnctctccattatgacaaaggtcatgtgggatgctgcttattctggcaacacttggggcttcctgaactggtttactgtcgttgccagctgaggaacatgatgtgtggcgaggtttaggcaccgggatgccactggaaagctggttcatgctacaggatttctccaaaatgccattgtacacctttgcttgcgggactcggagatcatactccttagtttctgtcagacctacaccagtcgggcagaaccccacaggacacatccacagttacaggcgaatcccctcgggaggaatcctctagggacacctcatctcttgatatctttcgcggagataatgtttggtatatctcgaggcttaaaggaggagactgtttccttccaatggaagaatttaaggagtcacattctgaagctgtgtctggcacttcccattgcttttcagcagagaagtaaatggcctcttcctcctcttcatttcgataaagcgcagggcaacttgacactgagaggatatctggatcaggggaaggcaaggagtgtggtgtgtgttgcgggtggtgagggtgccgagggtgtgacgggtggggggcgtgtggagcaagctgagctcgcgtagccaccctggggcaaggagttgtgaagggggatcaggaaaggaccagacatgaccagggaataataataatgatgataataagagagtgcatacc

SEQ ID NO: 450617 - DNA, 473 bp, Homo Sapiens
  misc_feature (359)..(359): n is a, c, g, or t
  misc_feature (444)..(444): n is a, c, g, or t
  misc_feature (451)..(451): n is a, c, g, or t
attatggtttatgttaaaaatccagcattgagttttgagaagccatattatttaaagaagtaatgttctaattttgctgaaatgtatatagaatcatatcatttccctcttttaaatttcaaaaagcaatgaaagttgttttagttagaatgtctgctagtactcttaagaacatactgatttaaaatttgtacctttgtttgtgtttcattcagggaagtgccagacacagcttcagaatgtgactccttaaattcttccattggaaggaaacagtctcctcctttaagcctcgagatataccaaacattatctccgcgaaagatatcaagagatgaggtgtccctagaggattcctnccgaggggatttcgcctgtaactgtgggatgtgtcttggggttctcccgactgtgtaggtctgacagaaactaagggtatgatcnttcagtncctgcaagcaaagtgttaccat

SEQ ID NO: 450618 - DNA, 497 bp, Homo Sapiens
  misc_feature (409)..(409): n is a, c, g, or t
  misc_feature (469)..(469): n is a, c, g, or t
  misc_feature (476)..(476): n is a, c, g, or t
ttatggtttatgttaaaaatccagcattgagttttgagaagccatattatttaaagaagtaatgttctaattttgctgaaatgtatatagaatcatatcatttccctcttttaaatttcaaaaagcaatgaaagttgttttagttagaatgtctgctagtactcttaagaacatactgatttaaaatttgtacctttgtttgtgtttcattcagggaagtgccagacacagcttcagaatgtgactccttaaattcttccattgggaagggaaacagtctcctcctttaaggcctcgaggatatacccaaacattatctccggggaaaggatattcaggaggatgagggtgtccctaggaggggttcctcccgaggggggtttcgcctggttaactgtggggtgtgtcnttggggggttcttcccgactgtgtaggggtcttgacaggaaacttagggagtattgatcnttcagtncccggcaaggccaagtggtta

SEQ ID NO: 450619 - DNA, 1473 bp, Homo Sapiens
  misc_feature (409)..(421): n is a, c, g, or t
caaaagttgtggagaataaacaaaaaaagttggtctcattgggggaaaacaaaacgaggcgcagttgtttcacaaaaatgcccacctctgggggtgggttccaccaaggaacccacatcttgggcgtctgcgcttgtttcaccaacccaaggcgctgtgccaagggtgtggggttaaaaagtggacccccccaaaaagaaaaccccacacccttttcttggcccaatatttgtttatttttttgccccaaaatccttctgggaggggacccttgtggcttttcttggacaggggttggccaaggtacatttgtgggggtgtttttcattttcaagaaaggccgctaaaccccccgtttctggttccaaaaagttggttgggaaaaaataggccaacactgggggttggnnnnnnnnnnnnnacgagaataaaaaggattggtccccctaaatccaggttccccaacggccattgaattgggttggcgagggggacttttctgccttcccccggaggtttcaaagaaacaaaagggcttcaggcttgctcccctgcaggacctttcttccaaaagtgtggctgtctggcaaggattccttggggtgcttgggggacaggacagccttgccgtcgcagtctcagaatccattttatggattaccaaaagccctgcgctaggtccctggcaccgcagcagtgctgtgtgtaatggaaatgtcaatgtgcctccccagagttagacagatctaggtctaaagatgctgcaaccccccagtccaccctccagtcactgctttaactctggcagggccccaacccattttaggagtcacagattgctccttccttggaaacctggggcccatttggcccggaggggtgggaacaatggagatctcctccaaccgaaagtgtgaaattagcatccaggaaactcagttaatctatgacaattaagaaaacttaccaaaggggagctatgccacagaggtgcctgaaaggaccaacatgactacagagcagcggggaggggaacaagagaggtgaagaggaacacagaaaggaagggaaataagacagaagacagttcaagcaacaagaaactaacagagcaggtagggcaggacaaccaaaggtagggttaatactgagccggtttccagatctgaaggattttgagtgtcattttatgtcttgccatgaagctgctgtgcccagggctggtaggcctgtggtaaatgagaacatacactaaccaggtctttctgagactttcagtgattcatcacattagatggacttcaggacagattggcctttatactaaattccataatatacctggtattagtacagcctgaatccggggctggtcacagaaggaaaaaggttgtagtccctgacaccatatcgtatgaattccggaccggtaccagcggggggcgcgcatgctgtgttggatgcgtcggcgga

SEQ ID NO: 450620 - DNA, 411 bp, Homo Sapiens
gctacgcgcggcgtgattggtccgtactgttaaaacaaaaagctggtagcgggccggaattctttggatccccaccctgcccctgcgtcgcggcgcgtcgcgctgctgctcccgccccagccggggccgaagatggggcggcggctgcggttttccacacgacttccttggatctcggggcacacgcgccgatagttcggacgcgagtccgggctggttttgctccgttttactgcgtttgattactaatttaaaagctttgcgttccccgtcgccccggcccgcttttctcctgcattctcccctcggcccccgtccccgccctgcgatcgctggagggggcgtcggggctcgcgcgccagaacccggctcctccgaagccctcggtggacgagtaagtgggtcccgacg

SEQ ID NO: 450621 - DNA, 1690 bp, Homo Sapiens
tcatacagacagctgtggcctggggaatcagtagggaatataatcacaagcccataatgcctttcaagattcatagagatccattgaggcccgcctgtgggcaacacagttcatccattcctccagatgaacaggccctgagactagatgcagaacttgttccagagaagaggattcatagtttacatctcatctcccattagttccatggcctcaagaaggtgatttgccttaaagaagcacaagcttgccgttccagattggggccatgcacagttgctctgcatgcaggcagtcaccatcagctgtttttaagtggtgtttgaaacagccctgtgaataatccggtatttaatgatgttgtcccgtcctctaggttccagtggaggactttctcttttctcagtgcattctcctgatacttgttttactcttgctgggctttctggtggcggcgacgttcgcctggaacctgctggtgctggcgaccatcctccgtgtacgcaccttccaccgcgtgccccacaacctggtggcatccatggccgtctcggatgtcctggtggccgcgctggtcatgccgctgagcctggtgcacgagctgtcctggcgccgctggcagctaggtcggaggctgtgccagcttttgatcgcgtgcgacgtgctttgctgcacggccagcatctggaacgtgacggccatagccctggaccgctactggtccatcacgcgccacatggaatacacgctccgcacccgcaagtgcgtctccaacgtcatgatcgcgctcacctgggcactctccgctgtcatctctctggccccgctgctttttggctggggagagacgtactctgagggcagcgaggagtgccaggtaagccgcgagccttcctacgccgtgttctccaccgtaggcgccttctacctgccgctctgtgtggtgctcttcgtgtactggaagatctacaaggctgccaagttccgcgtgggctccaggaagaccaatagcgtctcacccatatccgaagctgtggaggtgaaggactctgccaaacagccccagatggtgttcacggtccgccacgccaccgtcaccttccagccagaaggggacacgtggcgggagcagaaggagcagcgggccgccctcatggtgggcatcctcattggcgtgttcgtgctctgctggatccccttctttctcaccgagctcatcagtcccctctgctcctgtgacatccccgccatctggaaaagcatcttcctgtggcttggctactccaactccttctttaaccccctgatctatacggctttcaacgaagaactacaacagcgccttcaagaacttcttttctaggcaacactgagggagaggaccaggattgaacaaaagtttcttcccataattcagtggaattcccagttcatccatttcccatccccacccaacagccatgtggacgggatgaatcctcaccattctccagggtcatcttcagaactgcactggccgcttttccacctcctcagtaggaatatgactcttcctagagttttggtgacatgatgtatctaagcttgtctactatcccctttctctgtgctggccagtcatgggcttggccgcaagtgtccttcctcccaaaattcactctggcatggtgatcgaaatgtctacaagaaa

SEQ ID NO: 450622 - DNA, 1476 bp, Homo Sapiens
  misc_feature (55)..(55): n is a, c, g, or t
  misc_feature (222)..(222): n is a, c, g, or t
  misc_feature (267)..(267): n is a, c, g, or t
  misc_feature (274)..(274): n is a, c, g, or t
ccccccagtgaatggggggggcttccaagcccggttccaattaaggctccccttncccggggaaaaggcctcctgcctggaagaaggctctctccctggaagaatcttcctccctagggaggtctcgccgtgtgaaaagttctggccagtttccctgttttccacaaggtggagatcccagtttttctcccaggagcccctttttgcccctgccatccaaancggccaccccactgctttggtttctggatgcctcgtgaaaatctnccacgangggtcacaatctccttgctgctcattggacatcgatgcctgacccgagcctggatctccgggggcaggatggtcaggaactgctccatcaccagaagctccaaaatctgctccttggtgtgcagctcgggttgcaaccactgacggcagagctgtcggagctgggagagcgcctcttggggtccagacacctcttgataacaaaagcgtctgaagctctggcggcagagctcaggatctgggcagtttttttgcagaggagggccccgtttctcttctagtttggctattatgtgtctctcttgcttggaggaagctttcagtgttggagcttaaagttatctccattttagctgccattttgggcgtcaggagacaactctctccttgtaaacgggttaagcctttgggatcatgaccctggagaagtctctgaatactagaaagattctagaaacgaaggttctctgaggatgttagggggaacgggatgcagagacaaagcctcacttgctagcctttactagccaaactcaagacaacgcggtccctgggagtgggaagagttttgtcttcttgtcagttttttgcagtcttgcaaaggagaaaagtcataacgtcctaaaaggactctggggaaaaaatacttcttttatttcagtagcaagcacacaggtctcggatttaatgagcaatacgctctaaccggcgggtggagcggaatccctaggaaaagttcaagctgtcgcaggtagcttgccccaactctcccgcatcctggcggaaaccgaccgggtgcatgtcgccgggtgctaaacggtagagctaagcgaggccacagcgccagccgggggtgtgaggtagcgaacagcctcctgcacgcgagcaaagcggctgctcgctgccgaggcgccgcaggcccagtggctccggcctccagggcggccccgcggcccagccagccccaggcctggcgaagctgccgcaacccgatgcgcagctgaactccacgcccggtgtgagctcggactggcgactgcgacaccggtaccccgaacagcccggcgccccgcacccacctgcagccgactcacctctccgggaacccaagaccgagggacttaggacccgacaccggcgagcacgggctgggggcggggccgatgccactcgctgcgatcccgggaattccggaccggtacc

SEQ ID NO: 450623 - DNA, 814 bp, Homo Sapiens
ctcttgttgtcgtcctccttcgggcttttgctttcgtcgtgatcgcttttttaaaggaaacaatacgtttgctagaaaaacctcaaaaaataatgattatatacaaaatggttatctgaatgtggattctgtactgcagcagaagcaacccagctccggaactctatttgcgcttcctcagtatcaggtacatcatgccgctgatgaaggtgcaggcgaaggccacccacgccaggatgtaggagtagccgtagctgccttctctggtcacgggatagaatttcgcgtttttgtcgtgaatgtcttcacgcctgtctgtataaatggaggccgcaatcatgacacacagacatgacattagctggatgatggaggttaggacaaacctctctccctgcttcaggcggaagagctggagcacgaagatgaagaaggcgatgcagcagagaatggtggagaggatcatggtggcctggaccgcctgcagcgtggagtactcttgaaagctgtcattgatgactgtgcaattcgtgttgttggtacatattctccagacatctgcaaaaaactcatctcctacccaccaggcattgtcgacggtggcaatgaacagcaaggctgcagaggtgatgtggaaggcgatgatgaaagcaagaagcaccaacattttcacagggcagggcgagtcgaggcgaggggtcacgtttaaagcccagagcgggatgtgccggcgctggcggctgcgctggcagctggatcgacggactggctgggggtgcgaggcgaggccgccgggctgttttgaagctctccc

SEQ ID NO: 450624 - DNA, 1112 bp, Homo Sapiens
  misc_feature (1021)..(1021): n is a, c, g, or t
cgccccgccccgagccggggccccgcgctccgctgcagtgaagggcgttgcatttcccggggtaccccgagctgccctcttgtgactccttggcggggcggctggtcagacaaagtgtgcctccgggccggagggcgacccagaggagggggaagatgccgccggccacgggcggaggcctggcagagtccgagctgcgtccccggaggggccgctgtggcccccaggctgctagggccgcaggccgggacgtggccgctgaggctgtggcgcgaagccccaaacggcctgcttggggctcacggcgcttcgaggcggtcggctggtgggccctgctggccttggtgacgctgctgtccttcgccacccgcttccaccgcttggacgagccgccgcacatctgttgggatgagactcactttggaaaaatgggaagttactatatcaaccgtacatttttctttgatgtgcacccgcccctgggaaagatgctgataggtcttgctggctacctgagtggatatgatggtacctttttgttccagaagcctggggataaatatgagcatcacagctacatgggaatgagaggattctgtgcattccttggctcctggctggtcccctttgcctacctcactgtactggatctgtccaagtccctctcggcaggactgctcacagctgccctcctcacctttgacacgggatgcctcactcctgtcccagtacttcctccttggaccccatcctggatgttcttcatcatgggctgcccaggctgagcattggtcaagtaacaatttttggcgccgaagggccctttctctgcccccctgggggggttttggcttcaagcctgactgggccctaagttttgttgggggctttagggggccacgtctttgggcccctcttttacaccccttcaaggcggggggtaacacccgttggcaacaatttgcgtccacgtcctgccataccctcctcctttcctatgggcggacggcgggagaaacanaccttaacgcccctccggggtaccggggcccccaatgtagttgcccgccatgtgcacttctgaaacgacaacgcacttggtgggctgtcca

SEQ ID NO: 450625 - DNA, 1158 bp, Homo Sapiens
  misc_feature (610)..(619): n is a, c, g, or t
  misc_feature (1066)..(1066): n is a, c, g, or t
  misc_feature (1078)..(1078): n is a, c, g, or t
  misc_feature (1085)..(1085): n is a, c, g, or t
  misc_feature (1096)..(1096): n is a, c, g, or t
  misc_feature (1128)..(1128): n is a, c, g, or t
  misc_feature (1138)..(1138): n is a, c, g, or t
cctaaggttttccagttggagactgggcctaggactcagggccgggatgcctaggccagctctctttcataactggctttctagtgaaaaatgaaatgagctgtgtaaaacccaacatccttaagtataataggacttattattttccttgagcggatcagactagtgctatcaatccataatgttaatgtccatgctgcatggcagctgagatgaataattttctgaatcgttcatgtgtttatacctacaacaaaatgactgttttccattttggctctgcctcatcttaattttaagtcaccaatggccgctgagaaatgacacactgattagatttcattgacttaagtcttctattacacggtggtatctataatggagccattaaacttacaatctgatttcttactgaaatgaaaaagagttttatttattgattccctctgtgcacattagcctggctatacccttcagccataaatagtatgttctcttttatgccttttcgatagttgtaaaaataatacattttgcaattggatttttaaaaacctttatactttaaagtgaagagattttttttcaaggggataaaatcaaactttgnnnnnnnnnngctaagtaaaatctcttgcttttaaataaaagttaattttattgggaataatccctgtattgcattactcttttcagttaagaatttaaaagctgcccaatcgctgctggcccaaaagtctcgtcttatacaataacatgagagaaagggtgctgatccatcattattcactccacatgggaccataatggatttttctcttccaggtgattcagtttctctgagtttcatttgtttataagtagtactttaagacgtactgaaatttaacaaacagtaatggggacttggtatgagagccacttgaaaatattgcaatgggccgtttaaaattccgtctttaaattccttcagaaaagcactaagggaaaagtgacgacgttttacttcatgcctggaatctggtcaaataatatattggggttaggggtaaggaggtttgtcccngtaggccaaaantaggatnttcccaggttnaataaccggaaagggcattccccctaaaaggntcccagggtnatttccgttggacagtacaa

SEQ ID NO: 450626 - DNA, 1112 bp, Homo Sapiens
  misc_feature (26)..(26): n is a, c, g, or t
  misc_feature (591)..(708): n is a, c, g, or t
ctaaggaaaagtgaacgaacgttttnacttccatgccctgaacctgtccaaataatatattggattaggtaagagatttgtccctgtagcaaaactagatgtcctcagttaataacgaaaaggcatcccctaaaagctccaagataatttcgttgacagtacaaaatgtgggcattcattcgaaagcatgaaattggatttttcttctgattttctaggttaattttacagtatacatgttcgctacttggctgttagaggttgacctcccatctcctcttagaaatgggtctccataatggactagaggcagatgcagctgggaatgcatgctttgtgtgtaggcagaagaggatgggtactttaacgaccagattatccctgcaaattgctcttggggattttaatgtggaccaattgaagggatttttaaaaatgtgcattccctctcccagctggcacacgaatagtgcaggtcatcacagacactccctcagaggtggagctctcttctcttgccctcttgcagctccaggaaggctgcagactccagaaagtggtgtaattctcaaacaaaaatgcgaaaggctnnnnnnnnnnnnnnnnnnnnnnnnnnnnnnnnnnnnnnnnnnnnnnnnnnnnnnnnnnnnnnnnnnnnnnnnnnnnnnnnnnnnnnnnnnnnnnnnnnnnnnnnnnnnnnnnnnnnnnctaaccccctaaaagtcagcatagcaattgacagtgcctaatatgaccagtgcggggcagttccaacatcctgcaggaaataggcgcaaaagctttgtcactagttgaagaaaagctgcgatccaaaagggaaggagcatttggaaactcctgtcttattttttgttaataagaatggctgcagtgtctctggaacatttgggtcaaagaaatgagtccgaacttccagaaaaagtgcacacagaaccatccctttccctctgaaggactctggcaactccaatgcagagtagaatgcatgcacctttccacgtgttgtttggcccgaaactagtatgtgtgtggtcctctcacagatttgtccccgctctcgacgaattcgagctcggccgatttggcctgat

SEQ ID NO: 450627 - DNA, 491 bp, Homo Sapiens
  misc_feature (24)..(24): n is a, c, g, or t
  misc_feature (30)..(30): n is a, c, g, or t
  misc_feature (92)..(92): n is a, c, g, or t
ttccaaaaaatggttgttaaatcntcaaanaaaaaattcggaaagggcttaattgaatgggcacaccccctgcagtccccagctgcttgaanaggctgaggcaggaagattgccttgagtcccggagttcgaagaccagccctgggcaacatggtgagaccctgtttttcaaacaaacaaaaaccccctaaaagtcagcatagcaattgacagtgcctaatatgaccagtgcggggcagttccaacatcctgcaggaaataggcgcaaaagctttgtcactagttgaagaaaagctgcgatccaaaagggaaggagcatttggaaactcctgtcttattttttgttaataagaatggctgcagtgtctctggaacatttgggtcaaagaaatgagtccgaacttccagaaaaagtgcacacagaaccatccctttccctctgaaggactctggcaactccaaggcagagtagaatgcatgcacctttccac

SEQ ID NO: 450628 - DNA, 1166 bp, Homo Sapiens
  misc_feature (47)..(119): n is a, c, g, or t
cgggtttttcttttctccaaaaaaaagaccccgcggggggaaaaaannnnnnnnnnnnnnnnnnnnnnnnnnnnnnnnnnnnnnnnnnnnnnnnnnnnnnnnnnnnnnnnnnnnnnnnnggtgtcccccttttctttttggaggacggtttataaaacccccgggaaggggtttttccccgggggctctttccgggcgggggggccaaaccaaagcacggggaggttttccccccaaaaaaatcccccaccccgcccggcccggggtttcccttcccggggggggccctcaagggttgggaatgggatttttaagtgggccccgattcaggggggcagggggcaagttcaactttcttttggagacgccgagagcgaacaggctgctcggaaaccaggacgaggggagagacttgctcaataagctgaaagttctccccccgagagggctgcgacagctgcgggaatgtgcctgcagcgtccgcctcttggggacccgcggagcgcgccctgacggttccacgcctggcccgggggtctgcacctctcctccagtgcgcacctggagctgcgtcccgggtcaggtgcggggagggagggaatctcagtgtccccttccagccttgcaagcgcctttggcccctgccccagcccctcggtttgggggagatttcagaacgcggacagcgccctggctgcgggccataggggacctgggtggaactcgggaagccccccagagcagggggcttactcgcttcaagtttggggaaccccgggcagcgggtgcaggccacgagacccgaaggttctcaggtgcccccctgcaggctggccgtgcgcgccgtggggcgcttgtcgcgagcgccgagggctgcaggacgcggaccagactcgcggtgcaggggggcctggctgcagctaacaggtgatcccgttctttctgttcctcgctcttcccctccgatcgtcctcgcttaccgcgtgtcctccctcctcgctgtcctctggctcgcaggtcatggcagcgccaggcggcaggtcggagccgccgcagctccccgagtacagctgcagctacatggtgtcgcggccggtctacagcgagctcgctttccagcaacagcacaagcggcgcctgcaggagcgcatccggagaattccgga

SEQ ID NO: 450629 - DNA, 902 bp, Homo Sapiens
  misc_feature (92)..(185): n is a, c, g, or t
ggagagagatacatattttagtacatgtagcaattgattaataaatgtacagtttaagtcgcatgcaaaaccttggagtgatagcaaacttnnnnnnnnnnnnnnnnnnnnnnnnnnnnnnnnnnnnnnnnnnnnnnnnnnnnnnnnnnnnnnnnnnnnnnnnnnnnnnnnnnnnnnnnnnnnnnacctctggaggcaaaaaaagccctttattaagaaccagtggtatacataagtaaaacatacacaagagattcctcccctcttctctgtatgtgaataaaaattgcaaagttcatgacctggattttccttttaggtttcttctttagtggttcttaacttcattgggtgaagtaagcctttgaagatctgttgaaagctgttgactcattcacttctcaggaaaacgcacatgctgactaccatttcagagaatttgcatcagggttctctggggaggcgttctgagttctgtttccaggagctcgtagaattgtcatggtctgcatatgcaaggcaggtggattacggaaggttgatgtacagaggtctgtattttggagcctcttctgtatttacttcagcaacactaacaatcaggcgagaatgttctggtttatcaaacccttccttctgcctttcatcttaaccatgcattagttttaacaaagttcatcccaacagaagacaaaacactgatgaggtaggatagctccagctcctcctccctctcttctagtcttgatttccatgtagtccagtttattccttcccgcgtgtcctccctcctcgctgtcctctggctcgcaggtcatggcagcgccaggcggcaggtcggagccgccgcagctccccgagtacagctgcagctacatggtgtcgcggccggtctacccgct

SEQ ID NO: 450630 - DNA, 1013 bp, Homo Sapiens
  misc_feature (741)..(751): n is a, c, g, or t
atgtggagtattcaccaaagcagttagttcttgtccttccttatgatgaactggcttcaaaacagtttgtacctcttgagcaagatcttgtgcgttggagataagaggaaatggaggactggccttgttcatgtgtactgtgatggcattgtgtatcttaaatgcattctggaaatccttattttgaacaagttgtaaaagcagtgaaatatcctcctggctctgagaatctaccaaagtatgttggatatgtttaagtgaagaaaacaagtcttctatttctaatattttcacagcataatgaggactttctaagacaattccttcctctgtatcaaacatagggttatctattccggtctttggaggaatttgggctagtttcttaagtctcatggaagaattaaggtcaagttcttgctttttcccttcttcctctctcctacgcctcatgtcctcctgttgttgccgaatacgctccaactgtgcacttcgacgtattggcatcatcctggtgcccaatctccagggcagtcaacagccatctctcggtgcttctgatgttcctctggtgatgcacgatcaacattttttacttcgctgtctgattcctctgtaacatgcccattcatatgggatgttgtcatggttatctatgaaaacctgtaccactttttataaatcaatttttcctataagccaattctcttgattctgtagtataaaatccatgttacttcnnnnnnnnnnncttctcacatcacataataatgctatgaaaaagtatccatgaaggaaatattatgcaaactggaaaagccttttctactgtccttttagtttctcttctccggtttttcacaaaactcaaggctttcttattctccacgcctcggctccgcggagcctcccgccccggccgctcctacgcactgcagaagcgacagccctccggcggcccttaaattccggataaagaatccagaaactcccatcccgggaattccggaccc

SEQ ID NO: 450631 - DNA, 1062 bp, Homo Sapiens
  misc_feature (52)..(63): n is a, c, g, or t
  misc_feature (276)..(289): n is a, c, g, or t
  misc_feature (292)..(296): n is a, c, g, or t
  misc_feature (298)..(298): n is a, c, g, or t
  misc_feature (301)..(366): n is a, c, g, or t
gggcgccttaaaaaattcctggggagggaggagtgtttccccaatatagtgnnnnnnnnnnnnaagagagaaaggggtcccctttcacaaaaattcccccacggtgaccgcgtttttccccccgcccccggggcgtgttaaaaaaaagcgggcgcccggcgcccaagtattaaaaaagcggccccccctaatggggggccccctttttcccaagaaaaaacgtggggtcccggtaaaacttgggccccccccggggggggaattttagagggcggnnnnnnnnnnnnnnttnnnnntntgnnnnnnnnnnnnnnnnnnnnnnnnnnnnnnnnnnnnnnnnnnnnnnnnnnnnnnnnnnnnnnnnnngggtattttatggtcgttttattctataattttaattagtgacgttaaacatctttcctatcggccattttacatatttttcccttatgagttgccttcacttatcttcagcaaaattatctattgagatatcttttttttcctgtaatttggaagtgctcttgatatgctgaaatgtctgcactgccacattttgccctatttgttcttcagtttgcggtttgcttgcagttgtgcttatggcgttcactgtatggaagtgttgttgtttcatcaaaagcaaatctattgagtcttttttcttcatggctcctgcctttggtcataaactcttacaggtactacaatgaacactcgccactgtggttaccatggtgcagatgtcttttgtatccttccagaaaaccatttgaggagtgacttttgcaaaatgtaccagtctgccaaagtatgcagtcaggcagagtacttctgctattgaggtggccaagaaaggcaggggaagcaactcaggctcttcaaacagggcaagagcgaggtctacacaaataaagaagtatgcggcaacctgcgttgtctagtggttataaaaatagtaacgtctcatgggtctgcggctcctcgccgggctgcgggcgcaggcagctcaccaccgcggctaggccggccccggacatcgcggatcccgggaattcc

SEQ ID NO: 450632 - DNA, 2079 bp, Homo Sapiens
  misc_feature (346)..(346): n is a, c, g, or t
  misc_feature (351)..(351): n is a, c, g, or t
  misc_feature (357)..(357): n is a, c, g, or t
  misc_feature (893)..(1149): n is a, c, g, or t
  misc_feature (1151)..(1181): n is a, c, g, or t
cgtagtactgcactaacagggcggcgaagaggacagtatacgggcgtcttgtgcgtgtgtatatttatatacaagcgggcgcaccactagcgagagacgatggcgtgcgtggcatgtctcgcgtcgcgcatgtgaatctctgagtgcagatggagttctgtgatcgtctgcgtaattgtagatgacgatgcgagcggcgaagataacatttttgtatgtgcttcgtcctacgcggtgtcgtctgagcgagttgttcatgtattccatgtacatcgactcgtgcgatggccgcgcgtctcctcttattcggccctcgatcgtggtgatcatacggcgcgtactacanagagnccgggncgtgaggggggtttataccccggcgggatgccgctaatacggcgcatctgcgcgcccaccggcacctacgatcccggcgcaccacgcggcagtcaccggtggccgctctcaacaacacccgcgcgcgtccgtggcgtgaacgctccacagaccgcacagcgacgcgtgtcaccgtcgctcctctccgcgagcctttcccggcggcgcacagcacacggccatcactgtgaggcccggaccacgcgcttacccccgccgggtctcaaccgaaatgtgtccagttgggcgggagagtgatcagctctcgccggtttgtcgctactattgattatcgcgcgtcgtgcgggccgggtcagtctatccccgcgcaaatgtgcggggggtcggggccttttgcgatcccgagggcgggtagataagttgccagggggcacggggtcggcaacaggtggggttaaaatctgagaggccatggacacgcacctatttcaattggaagggaatccagagcccgggcccgggtggctccagcccgnnnnnnnnnnnnnnnnnnnnnnnnnnnnnnnnnnnnnnnnnnnnnnnnnnnnnnnnnnnnnnnnnnnnnnnnnnnnnnnnnnnnnnnnnnnnnnnnnnnnnnnnnnnnnnnnnnnnnnnnnnnnnnnnnnnnnnnnnnnnnnnnnnnnnnnnnnnnnnnnnnnnnnnnnnnnnnnnnnnnnnnnnnnnnnnnnnnnnnnnnnnnnnnnnnnnnnnnnnnnnnnnnnnnnnnnnnnnnnnnnnnnnnnnnnnnnnnnncnnnnnnnnnnnnnnnnnnnnnnnnnnnnnnngatcagactgagtattcccctagacctactctagggaagcccataggtgaggcaaaatcccccaaaacagacttggcattagtggggctaggattctccattagtggagtgagggctttgatgtgagttgtctagaagagcaagttcatggtcagataattccaagagacagttgtttttcccaggcaaaagaaaagcttcctcctagttcagcagagtgaattttaaatgtccaaacaaagtgtggtgtcatcgctcagtctgcaaggacgttctgttaatcccgtggacgttttagtggatcttccgtttgtcatccagatggcaaacgttggaagctgcttttggggaccaataattggagctttcaaagagcatttgcccccttggcctggcgcctgtgcatcagtggtaatagatgctgaaggcatggagaatgtagagcagcgtggcgatgaaggcgaagaacgaggctgccgaattaatgtagtaaattcttgggtccagcagtttctcagaaacaatcgtggcatgtacttgtaggacggcagcgctcatgtacaggatgccagtggtcccgtggtacaggctgtccagaactctccaggattcaaatcttttgtaaaatccaaacaagtaagacaacaggaacatcaaggagatgagaaacgaggtgagcgagacatacatcacccatccttgcagcaaggggtatactatgtgggtggcggctaccatggtccagaccaagaacccaaatatcagctcgggcaggaagaaggcgaaagggatggtgaggaacagcgcgacccccgagggcacgtcggacggggcgtagctggtggcgggcgggtcgggcgaggccatgctgtcagcccctgccgggtgctccgcgccc

SEQ ID NO: 450633 - DNA, 1738 bp, Homo Sapiens
  misc_feature (81)..(117): n is a, c, g, or t
  misc_feature (1642)..(1650): n is a, c, g, or t
ggggaatgtatatacgaactcaacctattaaggggccgaaaatttgggaggctgccgttttttgtcgtggtgtgccggcgnnnnnnnnnnnnnnnnnnnnnnnnnnnnnnnnnnnnnatcaggccaaatcggccgagctcgaattcgtcgagagcgggcgtcctgttcccgcctctccagttaaggccactggtgtgagccggggctctgcgcgagcgagggacgacggaagggacgggcaggtgtgggcgcggggccacgcagcccgacggcgggagtcgcaggtgctgggtgcatgggccagtgaggacgcacagagatccctcgccgcgcggaggaggagcagcgcgggagccaggcgctgccccaagaccctgcctgcgtccgagcgagcggaacctcgcgcttcgcccggggacaatccgaagtccgcgctatggaagaggagaaatatttgcctgagctgatggcagagaaagatagcctggatccatcttttgtgcatgcgtcgcgccttttggcagaagaaattgaaaagtttcaaggttctgatggaaaaaaggaagacgaagaaaagaagtatcttgatgtcatcagcaacaaaaacataaagctctcagaaagagtactgattcctgtcaagcagtatccaaagttcaattttgtggggaaattgcttggaccaagaggaaactccttgaagaggctacaggaagaaacaggtgctaaaatgtctatcctgggcaaaggatcaatgagagataaagctaaggaagaagaactaaggaagagtggggaagccaaatatgcccacttgagtgatgagcttcatgtattaattgaagtgtttgctccacctggggaagcttattcacgtatgagtcatgcattggaagagattaaaaaattcctggttcctgactacaatgatgaaattcgtcaggaacaactacgtgaattatcttacttaaatggctcagaggactctggtcgtggcagaggtattagaggcagagggatcagaatagctcccacagcttcttcaaggggccgtgggggtgccattcctcctcccccaccacctggacgaggtgttctcacccctcggggaagcactgtaacccgtggagcgcttccagtgccacctgtagcaagaggtgtccctacccctcgagcccggggggcaccaacagtgccaggatacagggcacctcctcctccagcccatgaagcttatgaagaatatggttatgatgatggctacgggggtgaatatgatgaccagacctatgagacttatgataacagctatgcgacccaaacacaaagcaccagaagaatgggccacaacccgctctagcttgaaggcaccaccgcagaggtcagccagagggggatacagggaacacccctatggtagatattgaaggtcctttccaccttgtgacctcacctcaaagacaattcatagcctgtgggcctcccccataacccgccaacaagacaaggtaatagccccttttttttggttggtttgggtccaattcaaggggataactggcccatgaataactccccaaaaattttccaagaatttccccccctggactggttggcgggggaactttggacccctaagaannnnnnnnncccaaacccgaaactggaaaaaagacctttaaccaaggctttaggctttataaaccctttttcgaaaagggagggaatattcccccct

SEQ ID NO: 450634 - DNA, 1038 bp, Homo Sapiens
  misc_feature (80)..(141): n is a, c, g, or t
ggtaaaacaaccgccctttaaagccaaaagggtttataaattgagggtgggatgggagaacgctcaagaaattgtgtttnnnnnnnnnnnnnnnnnnnnnnnnnnnnnnnnnnnnnnnnnnnnnnnnnnnnnnnnnnnnnnaaaggtgtttccccgcaggaatggaaaaaccaacccaagagaaatttcctcctactgaaaggtttatagggtatgcttggtaatgtctttttcattctgttttgtaaaataatattggtgtcaatgtcacgccaacagtacagagggaaattctagaaatatatgggagtaatcatgagcagttatccgtagaatagaaacaaacaaccaaaaaaaaggactattacttgtcttgttgctgtttatgtggagaccacaggctatgaattgtctttgaggtgaggtcacaggtgggaaggaccttcaatatctaccataggggtgttccctgtatccccctctggctgacctttgcggtggtgccttcaagctagagcgggttgtggcccattcttctggtgcgtagctgtcataggcatcctcacttactccatgaccgtagtcatagtattcaggcacactttgtgtttgggtcgcgtagctgttatcataagtctcataggtctggtcatcatattcacccccgtagccatcatcataaccatattcttcataagcttcatgggctggaggaggaggtgccctgtatcctggcactgttggtgccccccgggctcgaggggtagggacacctcttgctacaggtggcactggaagcgctccacgggttacagtgcttccccgaggggtgagaacacctcgtccaggtggtgggggaggaggaatggcacccccacggccccttgaaggagctgtgggagctattctgatccctctgcctctaatacctctgccacgaccagagtcctctgagccatttaagtaagataattcacgtagttgttcctgacgaatttcatcattgtagtcaggaaccatcccgggaattccggaccc

SEQ ID NO: 450635 - DNA, 1255 bp, Homo Sapiens
  misc_feature (702)..(711): n is a, c, g, or t
gatctggcggatgaaaataaccagaatgaaaatagctagaaaactcagcaagcaggaagctccctttctcacccttttgttcccttgccgatagaatcagtcactattaaaaaaatgaaagacgctctgtttaaaacaatgatgacagcagtacttaatatgtatttcgaggtgaacttatatagattgagagaggctgcatttggcagactgatgtataggaagacccatttgtttctagcttctccctgcagggaaaatgctttcgtcattatagcctctttacacagactggccattctagtgaaacaggtggtaaacctttgggctgcccagaaacattttatctgttttcacttacctaggaaggggaaagattagcgggtcatccaaaatctgtatgtaagctatcttcattttcttccccaaccttctcctcctgggaaacacaaatgctatctcatctgacaaaaggttttagaggataaagctgaaaagattggattgggatctttttgtggcttggggcggagccttttgctaaaatctcaagaatgctgctttgagtttagctagggtggctctcagaactggggtgcctggcattctcagcatttctcaggggcctcccacctctgacaactgcagtgttagctaatacataccttgagcatagaactgaatgctgtaattcagagccannnnnnnnnncaacttgaacattgtacaattttactgcaatttcctttgaactttcttgccactgtttggaatcttaaaaattcattagccttctcctttctgacataaagctactcttcatcagagatgagttcctatgtatgtcctttgttccttcaatagctaattaatgtgcttgaggatacttcagtggaaaaaaaggtttaaatatgcaaattactaataaatgtgtaaccttatgtaacttgtgttacatcaagtaacaagctaatctagtttgtttcactggactaggcttgtgctccctacttcagtattttgatgctttccttgatctttgtttcacaaaatgttgtgaattttgggtatcctttcaaacaaatgacattttataagtttcatttttgaacgatgtacagacaagtccccaacttagaaaacgggtttgttctttaaggttcctgcgtccacccatagaaagcccactgacctccaccacagccccaaatggaagggctgttgataacccaaatctgggtggggctttttgggg

SEQ ID NO: 450636 - DNA, 1265 bp, Homo Sapiens
  misc_feature (271)..(271): n is a, c, g, or t
ggggtgggttcatcccagttgctgcaggtcccctggacgcccccccggaagtatttctgggatggaagtaccacacgatggccagggggcaggagggcccccgaggaacaacagtggtgacataggagatgacggccagggctgagacacagagccagggtggagcggctcaggcactccagcgtggatgggatgtgctggtcgatggtgttacagtcagatgaaaatctgttcaggatgctcccaaggggcgtggtctcaaaaaactcantgggggctaggatgatccggtttagcaggctgcggtgcagtctcttggccaccttcagccctgtccactccacagtgacagacgtgacgaggcacagcacaatgcccaggctgcagagcaccgtgaacaccatggcatagacagtctggtcgagggtgcactcctggctgagggagcagttcctggctgcaggggtcagggtcagggcgctgtcggtccacttggccagccagtagtcgatggccaccaggaccatgtgcttgagcagctgtgagaagaccagcaacgacaggagcaggatgccggcggaggacaggtacttggcgcaggctcgccatgggatctcagcacgctggtgcagcatggacgacaggttgtcatcctcctcgctctcagctgcctcctcttcctcctcttcctcatcctgcagaaggccatccctcgaggacatggcacgagataggccctggggtggctctgtggcttttctctctgtgacagtctccttctccagctcttggtcctgtcggttcatgagggtcttccagtgctcaaagagctggcattcagacctctggaagtccttgagggtaccctccctctggatggtgccatccttcatggcaatgatccagtctgcatggggcaggtactgtagcttgtgggtcactaagaccactgtcctcttgtcgtcccggagcagctcaaggatgccggcctgcattaagtggtcactcagatggatatccagagctgagaaggggtcatccaagaagacaacgttggcgtgctggtagagggctcgggccacactgattcgctggcgttgaccaccagacaggttgatgccccgttccccaatctgggtctggtctccatggggcaggatgtcgatgtctggctgcagagagcaggcttcaatgaccatcttgtaccgttgtttgttgaagggactctcaaagatgatgttctcctccacagtggcatttagcag

SEQ ID NO: 450637 - DNA, 1800 bp, Homo Sapiens
  misc_feature (45)..(45): n is a, c, g, or t
  misc_feature (76)..(76): n is a, c, g, or t
  misc_feature (86)..(86): n is a, c, g, or t
  misc_feature (90)..(90): n is a, c, g, or t
agtgatggagactgtcactgccacatgctccagggtcttcagccntgacatctccaggtccatcctgctgacattncacaggactnccanggaacggggggactgcggaatcgccttgttttcttttaacacgggactgacgtaggatgctaagtaagggacagatgtccagatcttggctgcattcacgagcctccaggcgttgaggaggccgaaaccgtgctggtggctatggctgaagcctgcctcgttggtgacccactctgcacggcgatcctcataccgggtggctgtgaagacaatgatgtgctggacgtcacgccacgtgaggcaggggcggcacttgcagcattagggctatcatgccagttgccagaggcgctgcagctgaggtccctgtgtggccctcaagtgcagccagtgcctttctgaaggtcccagtcagtggtcaccaatgctccgaagcatcttgtcccccaccactgaaggtgactgccagcatggaggcacattcttctgcatagaaagggcatgcgtccctcctcatccacagctcctatggtgacggtgtagatggagttggcgtagccatcgtagttgcagttgtcgttgtgttggcctccgttgccactggctaccacaaagatgctcccaaagccctggcgaccagcaatcaccccatgttgtaaggcagcctttccaagctgatgggggccatccactgtcttcccatcgtcatctggtccccagctgcagctgtagatgtcattgatctgatagtgcttgttgaacgctactgcctccatgctgtctgtgagaggtccatccagtacccggatacctgcgatgcggctcccgtaggccacgcccacggcacagaagctgttgttgggcacagccgcgatctctcctgcacatcgcgtgccatggtggttgccattctccacatccgggtggggcatggggtcagggtcattagagttgaggtcatagctaccctcagggctatagttgggtgcaatgtcctggatggtgtgttccactccgtcatccactaccaccaccgtcacccctcgcccagtcacattgcgttcccacacacccgtcacgttgatgtccctgcccgggctccgtcggttattcaggtgccattgctgcgggtacttggggtcgttgaagtggacgctgcgcttggcccgccttagcagcctctgctctgagtgccagcgcacagcttcatgcccagccaacacagcctccacctgctgccggatggcctccacctccagggccggcctgtgcccagcaggctggacaaagaggtagtgcccctgaagctctccgatgcgtccagcattcaccagccctgctgcctgggccaaggcatccgcctgctgctccagagtctcttcctccccgtcaccttccaggctttccaggtgcacagcccagctcggcccccctgtgccctggccatcaggcccacctgtccctgccaggcccatgacccagggaaccagtaagaagagcccggctaattccagccagaggcaggtgggcaggcccaggggggcatccaagtgtggcactttctgcctccccttcggcatcagagcagtggactggattctacatgaggttgagctcctggtctggctaaccacgtcacactcatgttgtgcaaatggagaaaaggcatcactttcactgtgagtagtgttgactcagcaaaggctacagaccggccccgccgcagctgccgccgcctccctgcggaaacatcccgggaattccggaccg

SEQ ID NO: 450638 - DNA, 1881 bp, Homo Sapiens
  misc_feature (1036)..(1036): n is a, c, g, or t
  misc_feature (1069)..(1069): n is a, c, g, or t
  misc_feature (1086)..(1086): n is a, c, g, or t
  misc_feature (1117)..(1117): n is a, c, g, or t
  misc_feature (1165)..(1165): n is a, c, g, or t
  misc_feature (1203)..(1203): n is a, c, g, or t
  misc_feature (1212)..(1212): n is a, c, g, or t
  misc_feature (1277)..(1278): n is a, c, g, or t
  misc_feature (1421)..(1421): n is a, c, g, or t
  misc_feature (1546)..(1546): n is a, c, g, or t
  misc_feature (1565)..(1565): n is a, c, g, or t
  misc_feature (1579)..(1579): n is a, c, g, or t
  misc_feature (1588)..(1588): n is a, c, g, or t
  misc_feature (1634)..(1634): n is a, c, g, or t
  misc_feature (1659)..(1659): n is a, c, g, or t
  misc_feature (1726)..(1726): n is a, c, g, or t
  misc_feature (1825)..(1825): n is a, c, g, or t
atattactttcctttcctacccctccccttcttcgtcggaacccggccgcgccgggccggactatcccggatggatgccgagcctcccggttccgccggccccgctgctgctcctcgggctgctgctgctcggctcccggccggcccgcggcgccggcccagagccccccggtgctgcccatccgttctgagaaggagccgctgcccgttcggggagcggcaggctgcaccttcggcgggaaggtctatgccttggactgagacgtggcacccggacctaggggagccattcggggtgatgcgctgcgtgctgtgcgcctgcgaggcgcctcagtggggtcgccgtaccaggggccctggcagggtcagctgcaagaacatcaaaccagagtgcccaaccccggcctgtgggcagcctgcgcccgctgccgggacactgctgccagacctgcccccaggagcgcatcagctcgctagcggcaggtcgagcgggcctggcccttcagtattcgtggtaacccggagccatcgacgttatcattcaccgcgcccggacccgtgtgtgttgtgggacccgccccccgtgggtcacgggctcagaccaccctttctatgactttccctggatctcgccccgccgctctttcacgtcctatctcatccgccccgcttctagaaatgctattatcgcttagacaggacccgtcccccgggtcctttactcattttcctattcagggcgcccgcgccgcccagataatttaatcagcatgccacaggcccccctttgttttatctcattaccccgcccctgtcgccctcgtcttcatgcagcacttctcttcaggagactcagtgtgtcacacaccgtgcttcccctcgtctaccctccatactacatatccgtcaccgtacgcctgctaaccccgcctgcgtgaacacatgggtgagtgagggatgccccgctagtagagtcctactgttgtggtatccgcgccgatgcattcgcgcagccgtggcaggaggttactatgcnagtaaacttgaatcaccaccaccctcactggcnaccaccctccttgcaancacgcctgtaattccgccccccctggatgtnggcgggcgccactttgggccgtgttgctgtcacgccttcagcccgagnctctccaattctctccttaaacggagtattgttgcttnttgcccccngacggcccagccccggtcgagtttttatggattttgccgtgcccgcccacccacgcgcgcccatnnaaattttttagtcctaccgtttcgcttcccttgttaccccggcttccccgtggcaggcatatgatcgaaccaattactcacatattccaaccccgcaactggagatctgcaataatccaaccaagtgtttcctttcggctacncaaatggttgcccggcgactctctaactgggtaagggattggcttgcccccgcgagtctcctcccgtgtggccacagtgacggtggctcattcgcgtcccgccaaccatcctatgggggtcatancggcgccagggccctcacnattctgggtcgatnccgtttttngccgccctccactatgcctcgccccccgcttttcgttctttccacncgttcatcctttatgtatataagcnccacgattcacgaacaggttcatccccccatgctgaccctttgtctttcgcgcccgtaatcaggcgnccacccgggtgttttgttgcgccactgtggggattgtgtgattggcacgcgcgcgtaatattgcgcccccccatacgtactataatggtccccgccaanaactacccggcgtcgtggtgtgtccggcatggtagaccccccatccctccccccga

SEQ ID NO: 450639 - DNA, 1269 bp, Homo Sapiens
  misc_feature (57)..(93): n is a, c, g, or t
  misc_feature (1028)..(1091): n is a, c, g, or t
cggacctgtatacgatcactatagggcgaactggagttcatccgcggtggcggccgnnnnnnnnnnnnnnnnnnnnnnnnnnnnnnnnnnnnnatcaggccaaatcggccgagctcgaattcgtcgagagcggaggtacgactgcgaaggcaagggggcaccagctcaggactgcatctgcctgccatttcccttccactcctcctttctggagtctgacattagaaagccagcgagaaggaagattcaaacaaccaaccctgatttcctgcttctccttttcatgagtgttcctgtggtctctgcacctcctttctgtcccccggcagagggcagtagagatggccggcccaaggcctcggtggcgcgaccagctgctgttcatgagcatcatagtcctcgtgattgtggtcatctgcctgatgttatacgctcttctctgggaggctggcaacctcactgacctgcccaacctgagaatcggcttctataacttctgcctgtggaatgaggacaccagcaccctacagtgtcaccagttccctgagctggaagccctgggggtgcctcgggttggcctgggcctggccaggcttggcgtgtacgggtccctggtcctcaccctctttgccccccagcctctcctcctagcccagtgcaacagtgatgagagagcgtggcggctggcagtgggcttcctggctgtgtcctctgtgctgctggcaggcggcctgggcctcttcctctcctatgtgtggaagtgggtcaggctctccctcccggggcctgggtttctagctctgggcagcgcccaggccttactcatcctcttgcttatagccatggctgtgttccctctgagggctgagagggctgagagcaagcttgagagctgctaaaggcttacgtgattgccagggttcagttccaaccatggtcagaggtggcacatctgctcagccatctcattttacagctaacgctgatctccagcttccacgaatggaaaccccctacagaagaagggnnnnnnnnnnnnnnnnnnnnnnnnnnnnnnnnnnnnnnnnnnnnnnnnnnnnnnnnnnnnnnnnactttccttagtaaaaagaatgggcctgggcctttcaggaaatttccaaaggcttcccaaagaacttccccttaaaacaaggccagagttatttgggcaacaccccatttcccgggcgtttaaatttaaaggggaatctggaagccaaaatctttcccttctaggttttaggggaaga

SEQ ID NO: 450640 - DNA, 1266 bp, Homo Sapiens
  misc_feature (471)..(480): n is a, c, g, or t
  misc_feature (691)..(699): n is a, c, g, or t
  misc_feature (716)..(725): n is a, c, g, or t
gggcggagagggtggtggtgtgggaaaacaaaatatgcaagacgagcgcggcgcataacaagagatgtgtaataagcgggggcgcgagtctacagcgttatatagagcgtacaggaggcgtgagaaaaagggaagataagcggggggcgcatatagaatagaaacaccgcggggggcgcgctgtagtgttgtatagagaggatacgggaacacaagcgtgggaaagcgcgcaaagcgaggcgcgcacgcgataggatgaagagtgtgttcacacagaaataaacggggcgcgcggctaaaaacgggagatattgggtgtaagtgcgggcggaaagaataataaaccggcggataggtcggcggggcgcgggtatatatcagggtggaaggaggatgtatatatatttgccgcctaaggaagttattgagaacctttacggggaggcgagggggtcccgggttggttttggnnnnnnnnnnggggaaggggaatttttccgttgtggcgaaagatccccaaaagataaacggtttgttccgcgggggggcggaatttataaaaagggaaaagccaaaggcgcttagaggtttaataacaaaaccgtatgggggggacgcccgtttgggccaaaaaagggggggataagggaaaagcttgggcgccccctaagaggaaatttttgaaaggggnnnnnnnnnttgttttggcggtaatnnnnnnnnnnaacgaaaggggaaaacggggtgattgggggattgtaagggagtattaacttttatttacctgttaatgaaatcatcaaaatacaatgagtaggcaccttctatgtacatctgtcctagtgcttttgagtgttaatctaaactcatacatcaacaaacattctagccggacaagtaggtggctactcagtccattaagaaacttaattactagtttctagtagccttaaagtctcatttaacatttaacaaatcaaagagcatgtcagaggctggacatcaatggcagatgatgccaaagtcatagggttttgcctttgtgtacagtgcataggctccaaagcatgacctgcacgtcttgatactcaggaatttttggaaaaagaaaatcacactcttttgtccacttttaaaaagtgaaaagtagagccttcattaccctagtagagcttaacgtaatacaatacaatgaaccaaacaggaagaaaggcatcttctacaaaccatattcaaaagtcattggccagctcttaaatcccggga

SEQ ID NO: 450641 - DNA, 389 bp, Homo Sapiens; identical to SEQ ID NO: 325329

SEQ ID NO: 450642 - DNA, 961 bp, Homo Sapiens
gaaaagggtaccacatgggtttaaaattacggcagctgggggcacggggtttttggctcgcatttctagcacttcccatgtaatgaggtttcttctcagtccccactggaaaggcctgtcaagttcttagtacttgcgttttcttctgactgttgttcaccttggtccgcaatggtgatcctctgtaacctgtcaataaacaggttgtcaaagctgctggaagtatcttccgcttgacttgaaacacgatgccgcgggtgatgctcactagcttcagatgaaggtggtaccctgtctctattgctggaagctgggcccttattcactgtgtactcaacctctgaagtctcttcatcaccttcaagagtaggacgtccaagtccctggttttgtgaggtttgagatgacttgatgttatctacagaggaacatccaggaactagtgatgaagtatcaagtatcgggtcagaattctgggccttatctgtacccacatcaacttctgcaattgctttttgccttagcttacagtctaaactaacagggttaaacagttcactttttcttctaacttcttcacattctgcaatagcagctttcagtttggcaaaagagtcaaagatctttttacctttgtcgggcaatttgcaaatgaatttttcgttgcgcaaaagtctctcctggcgcttcaacatttcccgcagctccaccaaacttcgctgcgccaagtcctcgggagcttggggctcgaagccgcggggcagcgagcacattctgcgcgggctgaggctggcgcggcggcgggcactcggcttcctcggcaggccccgctactagcgccggatccgcggacggcggtgactccggggcacgagcgggagtcgccatgttcccgatccgggaaattccggaccggtgccggcggtgggtaacgagaagagcgggaggaaaagaggcagag

SEQ ID NO: 450643 - DNA, 1445 bp, Homo Sapiens
ccaagtgagtggaggggggatccgactccagtccggggccttgtgccagcggagccgcggtattcggaagcgggaatcccactcagagcccgggcctgtaggggcggggcgtcccgggcacccgggattggggcgtctcccgtcgtgcaccggggcaccggcgactcacccggaaggagaagccgtgatctggctatatggtggggcgcgggcggtgtcgctgtggggagctggtgctgttctcagatgtttccttccaatgggcttttggtgtaggatgtcggagaaccaagaacaggaggaggtgattacagtgcgtgttcaggacccccgagtgcagaatgagggctcctggaactcttatgtggattataagatattcctccataccaacagcaaagcctttactgccaagacttcctgtgtgcggcgccgctaccgtgagttcgtgtggctgagaaagcagctacagagaaatgctggtttggtgcctgttcctgaacttcctgggaagtcaaccttcttcggcacctcagatgagttcattgagaagcgacgacaaggtctgcagcacttccttgaaaaggtcctgcagagtgtggttctcctgtcagacagccagttgcacctattcctgcaaagccagctctcggtgcctgagatagaagcctgtgtccagggccgaagtaccatgactgtgtctgatgccattcttcgatatgctatgtcaaactgtggctgggcccaggaagagaggcagagctcttctcacctggctaaaggagaccagcctaagagttgctgctttcttccaagatcgggtaggaggagctctccctcaccgcctcccagtgaagaaaaggaccatttagaagtgtgggctccagttgttgactctgaggttccttccttggaaagtcccactctcccacccctctcctcaccattatgctgtgattttggaagacccaaagagggaacctccactcttcagtctgtgaggagggctgtgggaggagatcatgctgtgccttttggaccctggtcagttagaaacagtttggaaaagtgagctctcggttctgctctgagatggtcagagaagatgcgggccaggagacttactcaggtgggactgggcccagggcaggtatgtgggaggctgggctgcttagtgtcttctagtcacctctgcttgggctgattgacagaggtcagtcattacagccccttatgcctcttccatgggaacaaatactgtgcagatgttgtaagttaaacataagacacaggggctgttgcttttgaacagaaccctatattactctcctgggatctgaggtttctgcaggtcattgtatgtaggaccaggagtatctcctcaggtgaccagttttggggacccgtatgtggcaaattctaagctgccatattgaaacatcatc

SEQ ID NO: 450644 - DNA, 1353 bp, Homo Sapiens
  misc_feature (38)..(38): n is a, c, g, or t
  misc_feature (891)..(899): n is a, c, g, or t
  misc_feature (1120)..(1129): n is a, c, g, or t
acctcagctgagcacctgtttcccaataataactcctncaatttgtatttgaggacccccaatgatgctcagagaggttaagtgatttgaccagggtcacacagcttgagggaatggggtagctccaggattgaagcaggccatttcatgctctcatcccaggtatgatttagtaaatacagaagcagagtaccttcatggtgtctgggacatagtgagtgctctgtagcgggttgtcagtgaaaagactgagtggcacgtccagtgtattctgtttaataccacagaggcgtagccacagttgtttggaagtccttggtcccttccaccaatgattaagtgctggctgtgggaagactggctcctggggaggggaggtgggctcagcaggtggccctggtgtagcgtaaccttcaacctggcacacctgggacagccttggatgttggggccactaacctggcacataagccccttctctctcccagtgcaccggctgctgacccatgccctgggccaccactgtcctgctacgcctgctcctgaccctgctgctcccgcccactgtgggctggccatacgattgccacctgggtacgctgatattcctgcctgccccattcctgctcgtcctggcttctgggctgctggcattgcctgcctggcacgccccgcggctcgctattgccttcccgtacctgtgcgacacatggcctgtccatcccctcccctacctgccctgggtgatcggacccctttccctattacccgccccccacgggggccactggttcccccgtgttttcttccccttatggccccgctgcttttttctcttaccccccccttgcttcaaatttttgaaccccacccccttttcttgtcagattnnnnnnnnngcggtgcttccctctgttcgtgccctgcgcctcacacgaatgcctacctcggggcccccttcccgttgggctccgcaaatcccttcctacatcttctccgcttccccacgcttccttccacagaacgagcccgcccttgtcgcgctttggcccctcgccccctagatgtagccatttgcccgcccgcgccaggcgtccaatttatgccccgccctatcttnnnnnnnnnntttttttttccgccccgcgccctttttctcttacttacccacccctttgcacccgcttttcctctttttcgaccgccccacccgtccatttgtatcaaccctctgactctcgccggttgacgttttttatctatagttctcccgccccccgctactcaatccctccttctcttgtttttatagaacccattatttccgcgcgactcactgccaagaaatcataa

SEQ ID NO: 450645 - DNA, 434 bp, Homo Sapiens
tgagtcaccctcgtggcagtagtatcaagtagatgaaaaatctcatttaacattcattcattctttaacagctgtttattgcgcttctactatgtcagacactggggatacatgaacacaaagatacagtccccaagaagatgtatgttgggtgttgaggagagagcttccctgcatcccttaattcacataatattccagttccaactaaaaggagataagactcgttctctgtactcccaacaagaaagtgacaagctgatttttaagaacatgatttcaaatctgattttcatgacacagcatctccatcctaaagtcaactagcccagaattttccatcataggtaccatctcagtctcatttacttaatattttctttaaaccacatactcttcttccacagcctagggatcctctagatcacccgcaa

SEQ ID NO: 450646 - DNA, 1144 bp, Homo Sapiens
  misc_feature (1033)..(1041): n is a, c, g, or t
ggcctatgtttaaccccccactgggtgtaataaggtagcgaggcctgggtggccgtgaagtacggaatgcggaagggccgggctcaaagctccgcctctggcgcgaccgacgactggagcgcaggcaggggtagaggctcgtagatggaactggtagtcagctggagagcagcatggaggcgtcctgggggagcttcaacgctgagcggggctggtatgtctctgtccagcagcctgaagaagcggaggccgaagagttgagtccgttgctaagcaacgaacttcacagacagcgatccccaggtgtttcatttggtttatcagtgtttaatttgatgaatgccatcatgggaagtggcatccttggcttagcttatgttatggctaataccggtgtctttggatttagcttcttgctgctgacagttgctctcctggcttcttactcagtccatcttctgcttagtatgtgtattcagacagcctacttgggcccatgaactaactacttcatggttctgcctgcacattgactcacctgtcttccgttgattgaattccttcaatctttgtaaaattctctgtggagctgtaacatcttatgaagatcttggactctttgcatttggattacctggaaagttggtggtggcaggcaccataataattcagaatattggagctatgtcatcttatcttttaattattaaaacagagcttcctgctgctattgcagaatttttgactggagactatagtagacatataaaatgaagttgttgagccagatgatctctaagggtctcttccagctctaacatttccataactgtgattctgagttactgctgggagggagatattggtatcttgatggacaaaccctactaataatcatatgtgttggcattggggttccctcctgcactttcttcccaaaataggcttttcttgggctacccaagttaagttaataatttttcccctccggagggtccctttgctcttgtcggcaataattaaaaaaacgggnnnnnnnnntttgtcctctggcatttaaatttatgtaccagaaaagccttccacaacttcacattgctaccaaagtgattgttcggcccccagcctctttttatttcccccc

SEQ ID NO: 450647 - DNA, 1196 bp, Homo Sapiens
  misc_feature (141)..(141): n is a, c, g, or t
  misc_feature (298)..(298): n is a, c, g, or t
ttgaaaaatttcggggaaaagcctttttcttttaccgataaatttaaaggtccaagagggaccaaaggggaggggacccatttttttaaatatgttcccccaaggagccaagggagcatcctaaaggaaaaaatgataaancttcttgggtagccaagaaagcctattttggaaagaagtgcaagagggaacacaatgccaacacatatgattattagtagtgtttgtccatcaagataccaatatctactatagtctccagtcaaaaattctgcaatagcagcaggaagctctgttntaataattaaaagataagatgacatagctccaatattctgaattattatggtgcctgccaccaccaactttccaggtaatccaaatgcaaagagtccaagatcttcataagatgttacagctccacagagaattttacaaagattgaaggaattcaatcaacggaagacaggtgagtcaatgtgcaggcagaaccatgaagtagttagttcatgggcccaagtaggctgtctgaatacacatactaagcagaagatggactgagtaagaagccaggagagcaactgtcagcagcaagaagctaaatccaagacaccggtattagccataacataagctaagccaaggatgccacttcccatgatggcattcatcaaattaaacactgataaaccaaatgaaacacctggggatcgctgtctgtgaagttcagcagtgagtacataatcctagggccgctcatcccatcatgttcgcagcttccactcaacgctgcatctcttccacccgacgcttttcatcttttctttctagagtatgctaggctgctatcacgttcataactgcgccaatctcatctgaatctcggcggctgccttcagaccccatcccccagggttcaggctccagcatctcccctgtcccggtgcggtcctccttttctgggtcttatttggcaggcacttgagggaagccggagggcgtcagcgcggggaagcgaacacagcccacttacgttgcttagcaacggactcaactcttcggcctccgcttcttcaggctgctggacagagacataccagccccgctcagcgttgaagctcccccaggacgcctccatgctgctctccagctgactaccagttccatctacgagcctctacccctggacctccgct

SEQ ID NO: 450648 - DNA, 874 bp, Homo Sapiens
tgggcgaaccagagggcccaaggccggcgaagtaaagggctcgccttggggacagctcgtcagatggagtagggagaacgggacgctcatggggccccccgtgcccccgagaggcccgggccccggcacactccgtccagctgcagccagcaggccccccgctgcccggctcctccgcgacccccgccggctctccgccgtgccgtcctcagggcaggctccagccccggctcgtcggggggctcccggaggaaagcggggagcagcaggcgagacacgctctgacgccgctgcaacgaccgctgtcccccggctgggccgccgcccccgccgggtcccccaccccctccaggcccaccgcagctccccagacccccgccgggacctcccgccaccgttcggcccgccagctgcgacgtctgcttcttcagaaatttctccagcggcttcatgcccccccgcgcccctctcctaggggtcgccgggggacccaggtatcccaggcgcgggcggggggggcggcgaagacacgatgctcagagctggaggagcagagtagagggccgtgccaggcgccagactgggggccagaggggccgagcctcgctggccagagtccagtggccagtagccgggggaggtgccagaggaaaggagtgctcgctctcagcaaccccccatgccggctgcagccggcacgcggcccgaagagtgggcaggctgcggggccggtgcgcccggctctgcgctgcggcggcagaggcagcgggcggagcgcaaggctgagaggacgcggcggcggcatcccggaaattccggaccggtaccagcttgtggaatacaagaaagacgggggacgaccaacaggtcgcgg

SEQ ID NO: 450649 - DNA, 808 bp, Homo Sapiens; identical to SEQ ID NO: 151467

SEQ ID NO: 450650 - DNA, 1127 bp, Homo Sapiens
  misc_feature (217)..(218): n is a, c, g, or t
cggcatttttttggaacctttgcatgcatttcagggagtccctggttttcccacattttttgtaggaggagcctcttcatagggacgctgggtttcccgtggaggaagaaggagttttggcccccaggtgcctctcctgggcagcagaccatggtagagcccgatggggttgcagtgggcctgaggcagaggatgggaagaggccgggtgggggtannacctggatccccgctcccacacagcaactggctactcaccgccaccacagaactcagaatttttttcttcttcttctgaatcttgtcggacaaggattccaggacctttctgcgcatctcaccgaggtcatccagctcatcctgctggctgtccttaacctgctgcagctggcgcataagagtggagatctggacagacttgatggaatactcatggtccatgtaagtgctcaggaagttcacttcctcctgggtcttctcaatcttggcattcagctgctctgcctgctgctcaagatagctcatcttgcatttcttcttttcttcccactcctgaagctcagatttcaattgctgcagcctcttcttgtttgagtactccaagatgtcgatgatggtcgccagggtgtcctgctgctgcagcagggcccgcacgtgcagggtcgtgctgttctccatctcctggatggtctcgatcagctcccggttgagcttgctgaggaagttctcacggcttcggagctctcgcagagcggccctcccgctcctgagcgacgtcttcattaaccagattttggcatgcatcttcccagggtccaacttccgccttctatgtagttctcttggattcttcggctggcagcttgtcaccaccgtagtgggcttgaagtgaaacactggttggaccctagtcaaagtcttcattttgcttgtatgaaggctgttggcttgttggactggaggcagagtagatggcttggtttcctgcttggactgctgccatggaacataatccggaacctggaactcctggactatggagtgagtcccagagtgcttgggtctggaaagagttgggaagggaaagaacttccattatccccagcccaaggggcagcaagcagcaat

SEQ ID NO: 450651 - DNA, 1148 bp, Homo Sapiens; identical to SEQ ID NO: 151470

SEQ ID NO: 450652 - DNA, 672 bp, Homo Sapiens; identical to SEQ ID NO: 142055

SEQ ID NO: 450653 - DNA, 941 bp, Homo Sapiens; identical to SEQ ID NO: 151472

SEQ ID NO: 450654 - DNA, 806 bp, Homo Sapiens
  misc_feature (68)..(68): n is a, c, g, or t
  misc_feature (74)..(74): n is a, c, g, or t
  misc_feature (85)..(85): n is a, c, g, or t
gaactgcgtgtggagtcagcccagtctggtgctcggttctttaatgggaggcttcacgacacccagtnccgggntggggctgcanctgctggccaacgcagtcatcttcctgtgtgggaacctgacaggcgccttccacaagcaccaaatgcaggatgcgtcccgggacctcttcacctacactgtgaagtgcatccagatccgccggaagctgcgcatcgagaagcgccagcaggagaacctgctgctgtcagtgcttccggcccacatctccatgggcatgaagctggccatcatcgaacggctcaaggagcatggtgaccgtcgctgcatgcctgacaacaacttccacagcctctacgtcaagaggcaccagaatgtcagcatcctctatgcggacatcgtgggcttcacgcagctggccagcgactgttctcccaaggagctggtggtggtgctgaatgagctctttggcaagttcgaccagatcgccaaggccaacgagtgcatgcgaatcaagatcctcggcgactgctactactgtgtatcgggcctgcccgtgtcgctgcctacccacgcccggaactgcgtgaagatggggctggacatgtgccaggccatcaagcaggtgcgggaggccacgggcgtggacatcaacatgcgtgtgggcatacactcggggaatgtgctgtgcggggtcatcgggctgcgcaagtggcagtatgacgtgtggtcccacgacgtgtccctggccaaccggatggaggcagccggagtacccggccgggtgcacatcacggaggcca

SEQ ID NO: 450655 - DNA, 832 bp, Homo Sapiens; identical to SEQ ID NO: 151476

SEQ ID NO: 450656 - DNA, 542 bp, Homo Sapiens; identical to SEQ ID NO: 151477

SEQ ID NO: 450657 - DNA, 1008 bp, Homo Sapiens
tggatccagcgtcctaggccaggaccatgttcaggcaaaagccagtcgcctctgatgtccaaccggtccagtgtcgaacatgcgctctccacagcacagggcaaggcagccaagcaatccacacttcctggcccaccaccaatcccgcagctcaggtaattaccaccagttgctaggccttgcctagaactgggacttgttttaccttgagatgtcagcactggaattctcgttggccctcttcccccgtcaggaactccacttcagaggtctcggtggagacagagctgggccatggccattgggcctcgcaggcttcttggctcggcgaactgaagagcctgctgctgaggcgcccggcgggggcggcctccccccggccgcttctcccatgccatttcggctgggtgcctctcgggatttgggcttcaggtctctgtgcatgtgagagaccatcctgccatccttctggctcagctctcccaaggggatgggctccacggggggcagcacctgctccaccgtaaccaggtctttcaggaagctctccaggcgccaggccgactcgccaccgctggcgccctcctcctgcccctccgggttgccgcccgcctcccgctgttgccgggcagcccagcgcatcatctccccaggcgggtggcggcagcctgacaccaaggcgtacttggggttgataagctttcgagccacagtggaggagtaatggaggccaaccctgcccgccaggctcagctgccggtacaagtccacctcctcggagatggcgtacagctcccggaactccgtgtcaaagggctctacgttctgtcctgtcaggagcaggaggaggtttctgtccacatgggaggaactccaggtgaacctgtaagatccagtggccactttgtcaccgtccaccatcaggaaccttgatgacagggtccccttgatcctccccatgggcatgtagaagccgacgcctgtcacagagcggacacggatgttccg

SEQ ID NO: 450658 - DNA, 525 bp, Homo Sapiens
cgaggaccccagcccgcctggcggccacctcgagggctacccatgcccgcacctggcctatggcgagcccgagagcttcggtgacaacctgtacgtgtgcattccgtgcggcaagggcttccccagctctgagcagctgaacgcgcacgtggaggctcacgtggaggaggaggaagcgctgtacggcagggccgaggcggccgaagtggccgctggggccgccggcctagggccccctttttggaggcggcggggacaaggtcgccggggctccgggtggcctgggagagctgctgcggccctaccgctgcgcgtcgtgcgacaagagctacaaggacccggccacgctgcggcagcacgagaagacgcactggctgaccccggccctacccatgcaccatctgcgggaagaagttcacgcagcgtgggaccatgacgcgccacatgcgcagccacctgggcctcaagcccttcgcgtgcgacgcgtgcggcatgcggttcacgcgccagtaccgcctcacggag

SEQ ID NO: 450659 - DNA, 820 bp, Homo Sapiens; identical to SEQ ID NO: 151479

SEQ ID NO: 450660 - DNA, 1267 bp, Homo Sapiens
  misc_feature (943)..(960): n is a, c, g, or t
gctattttctgcacactctgcccttcacagaaggcacccccattgagtggtgccgggttggtacaagtccttgtacgtttctgataccctcgtccacagcggctgttacacacagaccactccgtccaggtggaccagccaccgttgacatagactatgacagtggcagttgtacttttcctcttggcaacaatgtttttggcaacacaggtgtaatttgcagtatcagagagtcgggcctgctttatgatgaggttgtgatcaatagtaatataaaaattccgatcttcaacgggatcaattatgtcttcatttttcaaccattccacctcagccactgggatcccttcaggtggtcgacactggagtaagacttcctgttccaaagacacttcctttcctaggggttcctgctcaaatgtcttccgtagatatgcaatgcgcacatacgccttccggctctttgtggtacccgcggagctccaggccacacactggcaccagtaatcttcaggtccaaagagttcttccacttgctggcgcgaaatctcaatgctcacttcccggacaatgagaccggaagtttcatctactctttcatctactatgtggtccttctgatgaacccattcgctattacacttgaaatagatctgggtggcagggcttgctttaccagtacaggttcacaggcttattcttcacaatataagcttcttcaggctcaataaggaaatgtggcagaggctcaggtggatcagaaggaaaagtttctgggagttcatgaaaaaagtcatcatcttgggcggcggagccagtgccgctggcgctgagcagggccagggcaggtagcacgagcatttgcagcaagtatcccagtcccagtccgcagcgggccgctgtcgcccgcagacctttcctcatcgtagacagaggtgtgccnnnnnnnnnnnnnnnnnncagagagacgcgcaaacagctgaaagccccactgggcagaagctgaatccgtgcaccgcgaagcagtccgaagaaataacgacaaccaagcgccacactccactttctccaaaggcaggggccaaaagggggaggagaggagacgccgaggaggagtttgaaggtccctctttcccaatgccttctaactgacgtctcccgcgagcgactgctctgcccccacttgggaagtccagggaggcgcaaggcggccacctccgccgctccccccagcagcaggagcagccgcagctccgccgcacgccga

SEQ ID NO: 450661 - DNA, 952 bp, Homo Sapiens
  misc_feature (227)..(227): n is a, c, g, or t
ccccccggccctcttggcatagacattcggccctctcacagggctcatgggagttgtagtgtggccaagtccatcccccaaggctgtaaggaaggaccagctcctccataagcccaagcagaacgcattaggggaatcatcctcagttttacgccctgcctgttcttccaggagagaagtcctgagtgagaggcccagctgttctccagatccactcctcggggttntccacagagagctggtatcaaggcagctgtcaggggcggcgtgcctggtgatgcggcatcttaccttcatccccatctcagaatgggcagccagtctcagattcaaggaggaggaatcctgaggtgtggcgttcagtcctgaggtagacctgaggtccctggaaattgtgttgatgctgagatggatgaggggtgctcattctctcaggtagacagtgaggagtcctggttcagccgagcctccatgtctgcatggatggttatgaccctgattgtttttggaaacagccaagctctctaggtgtactcagcaaatgcaaggtatagtgggtcctgcatacccagggtattatttgagccatggaagcaaaacagagactgcttagcctccctaagagtagttggtgggagtggccagcaaccatggaggcaggagcagctcctctttgcctctgagtagtccccacatgttccctcttccagagatttcaactgccaggcctggtcacctctgtagcctactcttatgacacatgggtggaggcaagggtaaccagagtccttgttctttcttttgattggggtcatccagcccttccgatgtgtggtcagggagcagagtcactgataggatgttgagacttggagatcaggaccagacttttccccattcttgcatctggcctgtgcttgggcaggacctcgggtgaaggatgatcttggaa

SEQ ID NO: 450662 - DNA, 605 bp, Homo Sapiens; identical to SEQ ID NO: 151492

SEQ ID NO: 450663 - DNA, 792 bp, Homo Sapiens; identical to SEQ ID NO: 151494

SEQ ID NO: 450664 - DNA, 994 bp, Homo Sapiens
taggcaacaagaccggcttctcacaggaagaacacaaggggagttcagaaagtcacctttagtactgacactaccgcgggatccgctaatactgctcagttactttaaacgctcagatactcagggacggaaggcccctcctgccgcggccatgcctaatgcttttcagcttattatcttttttccacttcattctccggttttggaaccagattttaatttgtctctcggagaggcaaagagcatgtgctatttcaatcctccttctgcgggtcaggtaacggttgaagtggaactccttctccagctccagggtctggtagcgcgtgtaggccgtccgggcccttttgccttccggccgcctatgttgtcatgacttatgtgcagcttgcgcatccaggggtagatctggggttgggcgggcggcgccgggctcggctcgctctgcgcactcgcctgctcgctgctggcaggggcgtcctcctcggctccggacgccgtgccaaccccctctctgctgctgatgtgggtgctgccggcgtcggccgaggcgccgctggagttgcttagggagtttttcccgccgtggtggctgtcgctgccgggcgagggggccacggcggagcagggcagcggatcgggctgaggagagtgcgtggacgtggccggctggctgtacctgggctcggcgggcgccgcgctggcgctggcagcgtagctgcgggcgcgctctccggagccaaagtggccggagcccgagcggccgacgctgagatccatgccattgtagccgtagccgtacctgccggagtgcatgctcgccgagtccctgaattgctcgctcacggaactatgatctccataattatgcaactggtagtccgggccatttggatagcgaccgcaaaatgagtttacaaaataagagctcatttgttttttgatatgtgtgcttgatttgtggctcgcggtcgtttgtgcgtctatagcaccc

SEQ ID NO: 450665 - DNA, 933 bp, Homo Sapiens
gccctgggaaaggcaggacctcgaggcgcggccgcgcgaggtgaccggagtcacagttcccgcaggcggcgacagcagagcgcccactgcctccagcagattaatattaagattggaagtttgtgtcttttgctggatattggaaattgaatgtaatggcaacagaatttataaagagttgctgtggaggatgtttctatggtgaaacagaaaaacacaacttttctgtggaaagagattttaaagcagcagtcccaaatagtcaaaatgctactatctctgtacctccattgacttctgtttctgtaaagcctcagcttggctgtactgaggattatttgctttccaaattaccatctgatggcaaagaagtaccatttgtggtgcccaagtttaagttatcttacattcaacccaggacacaagaaactccttcacatctggaagaacttgaaggatctgccagagcatcttttggagatcgaaaggtagaactttccagttcatcccagcacggacctagctatgatgtgtataacccattctatatgtatcagcacatttcacctgatttgagtcgacgctttcctccccgttcagaagtgacgagactgtatggatcggtttgtgatttaaggacgaacaaacttcccggttcccctgggctaagcaaatctatgtttgatcttacaaactcatctcagcgattcatccagagacatgattcattgtcccagtgtacccagtagttcttcttcaaggaaaaattctcaggggagtaacagaagcctggataccattactctatcaggacgatgaaagggacttttgggagactgaatgtgacactgtttataattcttcagtagaacagatctggatcacagtttaccgtgccgagatttaagttggcctctattatgggacactcga

SEQ ID NO: 450666 - DNA, 915 bp, Homo Sapiens; identical to SEQ ID NO: 151496
  misc_feature (42)..(42): n is a, c, g, or t

SEQ ID NO: 450667 - DNA, 708 bp, Homo Sapiens; identical to SEQ ID NO: 151498

SEQ ID NO: 450668 - DNA, 1271 bp, Homo Sapiens
  misc_feature (62)..(78): n is a, c, g, or t
  misc_feature (128)..(128): n is a, c, g, or t
  misc_feature (289)..(290): n is a, c, g, or t
gattattatttgccccccctggcccccgggggtttttgggttgcccagggccacccttcctnnnnnnnnnnnnnnnnntgcccctttcaagggggcacccattcgggccctcccctggtcattctggnctgataggtatctctttcctcccacctttacctggtgaaaggagaccattcttttgaaaactttcccccaaacccagggggttggaccctgctgtgtctggaagcccttcctggggaagcagcacagccagcaacagacttgagtgagtgacctccagacnntgggccccccaaagggcgcagcctggtgggcaggggctggaaggcaggcaggggcagcaggaccatccccatgtgctccacagaggccagcccgtggcgctgcctatcattgaggtatgagtagagcaggcggcagttctgggtgtcccgggccccatgtgggcacagtctgaccacgcagacgtccttggccttggctgggcagatgctggccagaaggtcccagacaatgttggaggggatgcagcctgccgagcggatcacggtgggcagagcctggacaagccgacagctgtgtcccgagaccagctgggccctggcccggaaccgcttgatggagaacatgtccagaacaccttcccagggtggcaggcagggcagggcctttgtgggtgcagcaggcacatggagcccagatggagggaccctgtcctgtggttccgtgggagacaactccctggttttgggcatctctggagcaggcataggagtttggcttagggctttctggaagatattgtccctgcagctcttggcggcttcgaaggagcctagcagctcattcgagggctcccagtccttgcagatgtggcagttggggtctaagaagtggtggtcatgctgccccgtggtgtcctctgatgcgatgggcagggcctgtgggctgcagtccatgaacatctgcggtccccttttctcctcctggtcccgccagcgggccagctcctggggggccagctgcatcgagctcatccgcaccaggtcgtagggggtgacatctccatgaaccactttgagaaacaagtccaggttcctggggtcccgcaggttgaacagcaggctgcgatacttggtcttgtaccggccattggtgccttgtgtcaggtcccagagggctgcctcaatgccagcagcaatgccctccaccacctcctcactcagcactgggtctgggagctcccgaaggctgtggaggccagg

SEQ ID NO: 450669 - DNA, 971 bp, Homo Sapiens
tgtccgggcccaaaggctgacataagatatgactacatatgcctaggctcccgggctttgagacctggcctctttcaggaattgccaacctgcagacgtggtcacgatttctgtgggttttctgaggccccaatgaagtcaaagctgataagccgccatggttttctggtcaactggcctccactgaatttgtgtcgccatctataatcatttcttctttgggatagccatagctggagaaaatcagcgggcaggagtgttcgtccatggggaagttgtgcagctgcagctggcactcagcattgatggtgagcctcaaagtgtaaaggattttcccgtcattccgaatccgtggaggagctgattgggtgtggtgatccagtgagcctctgcggttttagaattgcggaagatggtgtctgggatccagattaaccccaccatgttgctgttcagagtaagaattttcattgtgctgttgaatcgaaggcgactatctgtccaggtctgagcaaaaatatgtcaatttggtattccatgtttattgatgacacaggaccaatgctgttaacataaatgtcaacgtcaattacggtcggttttattccaatatctggcctcagctttttatcatattctcttagcaacttgttgagaataagagtcacgtcggtgtcttgggattttggagccaagacccacttttggtttgatgatgaatcttcatattcatcctcttccacctttctggaccgcgcgtgcaagcccgagaacaggcagaggaggagcagcagcttcggggccatggtgccgtggagctcggggcgcagggtccggggcctcggccgggcgcggcttcctccggcgcggacctggtctccgccggccctctttgcctggcttcctccgaggctgctggccgcggcgggcgggacaggtatctactctggcgctggccgcgcccccgcggg

SEQ ID NO: 450670 - DNA, 1222 bp, Homo Sapiens
agctcctggggcctaacaaaaagaaacctgccatgctgctcttcctcctctctgcactggtcctgctcacacagcccctgggctacctggaagcagaaatgaagacctactcccacagaacaatgcccagtgcttgcaccctggtcatgtgtagctcagtggagagtggcctgcctggtcgcgatggacgggatgggagagagggccctcggggcgagaagggggacccaggtttgccaggagctgcagggcaagcagggatgcctggacaagctggcccagttgggcccaaaggggacaatggctctgttggagaacctggaccaaagggagacactgggccaagtggacctccaggacctcccggtgtgcctggtccagctggaagagaaggtcccctggggaagcaggggaacataggacctcagggcaagccaggcccaaaaggagaagctgggcccaaaggagaagtaggtgccccaggcatgcagggctcggcaggggcaagaggcctcgcaggccctaagggagagcgaggtgtccctggtgagcgtggagtccctggaaacgcaggggcagcagggtctgctggagccatgggtccccagggaagtccaggtgccaggggacccccgggattgaagggggacaaaggcattcctggagacaaaggagcaaagggagaaagtgggcttccagatgttgcttctctgaggcagcaggttgaggccttacagggacaagtacagcacctccaggctgctttctctcagtataagaaagttgagctcttcccaaatggccaaagtgtcggggagaagattttcaagacagcaggctttgtaaaaccatttacggaggcacagctgctgtgcacacaggctggtggacagttggcctctccacgctctgccgctgagaatgccgccttgcaacagctggtcgtagctaagaacgaggctgctttccatgagcatgactgattccaagacagagggcaagttcacctacccgcacaggagagtccctggtctattccaactgggccccaggggagccctaacgatgtatggcgggtcagaggactgtgtggagatcttcaccaatggcaagtggaatgacagggcttgtggagaaaagcgtcttgtggtctgcgagttctgagccaactggggtgggtggggcagtgcttgccccagtaacccggcgggcagtcaagggt

SEQ ID NO: 450671 - DNA, 736 bp, Homo Sapiens
  misc_feature (97)..(190): n is a, c, g, or t
  misc_feature (217)..(307): n is a, c, g, or t
ctggctctctgtgtggcgctgcgggctgtgtggtggtggtccggccggtgtcgtgcgggggtctagtggctgtggcttctgtcctcatgcggcgggnnnnnnnnnnnnnnnnnnnnnnnnnnnnnnnnnnnnnnnnnnnnnnnnnnnnnnnnnnnnnnnnnnnnnnnnnnnnnnnnnnnnnnnnnnnnnncctgtgcctcgccctcgcgtcggttcnnnnnnnnnnnnnnnnnnnnnnnnnnnnnnnnnnnnnnnnnnnnnnnnnnnnnnnnnnnnnnnnnnnnnnnnnnnnnnnnnnnnnnnnnnngatgcttgtggtttattgaagagagcaaggctggtgggcgtggactcaaagcatggcagcggcagaggctggagcagttggggatcttcagcttctaaatgctaattacacagtgagctttgggctattttttccatgagcttaatgatgctttctctgggcttttgggggagggtgtccaccagcttcttcagctgagcccctgcctccctcatgtcttgatcagggctgaaaagttccatggcagcctcataactggagggtgtgtccatgaggagggtttcgatgacacgctgaaagctcgggcagatctctgcagaagcggagctgcagcagagagccagtgtgaccagggtgagggtgacagcgagtttcatggtggaggagggggatgctctggcccgtctctggttccgtctctgagtctgg

SEQ ID NO: 450672 - DNA, 1228 bp, Homo Sapiens
  misc_feature (1113)..(1113): n is a, c, g, or t
  misc_feature (1191)..(1191): n is a, c, g, or t
tgccgtgcgcgcgtcagcaagaacgccagggacggggtctccgcgcctgcgcagtgaagctgggcgccttcggggcttgagcttctgagggtcgggtccagcgcgtgggctgctggatggcggaaccccaggcggagtcggagcccctgctgggcggggcccgcggcggtggcggcgactggccggcggggctgaccacttaccgcagcatccaagtcggccctggtgccgcggccaggtgggacctctgcattgatcaggctgtggtcttcatcgaagatgctattcagtaccgctccatcaaccaccgggtggatgccagctcgatgtggctttaccgacggtattactcgaacgtatgccaacggactttgagcttcaccatcttcttgatcctgtttttggcttttatcgagaccccatcctcactcaccagcacggcggacgtgcgctaccgcgctgccccctgggagccgccctgcggcctgaccgagagtgtcgaggtgctctgcctgctggtctttgcggccgacctctctgtgaagggttacctgttcgggtgggcccatttccagaaaaacctttggctgctgggctacctcgtggtgctggtggtgtctctggtggactggaccgtgtccctgagtctcgtgtgtcatgagcccctgcggatccgccggcttctccgtcccttcttcctgctgcagaactcctctatgatgaagaagaccttgtgattgcatccgcgtggtcgctgccggaaattggcagcgtcggggctgctgctggccatccacctgtgccctcttcaccatgttcgggaatgctgctgttccgctggtggggaagcaaggaaggatgggccaggacacgggcaaaggcttgaacttacttcccaaaaccccgccctgagagactcctggacttcccctccctgagggcttgctggacacaagggccaaaaaacccccgcatgggaaacaacccctggccgaatttaaagcaaccccgcccccaatggtcaacctctctctccaaacccttttcctctgtatactaggaaaaaacttttctatcttctatgaacattgtcttccacgagtgccaccgaancaacagctgccgataggcccggcgaatacccgtcaagaggatgaccactcgcggcgcaccccgcatatatattcaccnaccttccactccgatcaaccctgctagactcctctac

SEQ ID NO: 450673 - DNA, 833 bp, Homo Sapiens
ctgggctttggaaatggcgacagctctgggggaaacggcttagagaactttgatcaggctctggtaccaggagaccgtcatggataggaagcagtccagctggggctcgatgtccccaatggatttggcatggactgcttctaggagttcctccagctctgccagggccaggcgcccccctagccgcagtcgatcaggccccggtggctccagcaagaagaggcgcttccaaagggtgtcccgacggcagtgccctccagccagccgcaccagctgagccagccgtgctcgtgccatgcccacctctgcagccagtggtgggaacagaggagccggtccaggcgctagaataagccctgaggcctccccagggctgccagctgaactcccaggagcctctggctcagggggcagtctgggtggcttccggaagcggcgcatgtcagcagtgagcctggggaagagctctcgctggctggtgagcaccacgacgaactgtagccgcagaacgtgccgctcagcctctccttgctcctcaaagggtgcagcacagtgacagacaagcagagacacatcaaagtcatcctggtgtcgaagtccctcagagtccaggtaggagccagaactgtgccatgccgacaccagggcatactcgttgtgttctgggccccctggccgggccattcgcaatggcttcatgtggtaagagctggcgtgatcagccacgtagttgtatagctggtgggcagcaatgagtggtgtggggagctccaatgtcccttggtaaatgtgattgcggccaaagtggggtccgtcagggtggtgggccagga

SEQ ID NO: 450674 - DNA, 931 bp, Homo Sapiens
tagtaatgtcagaatggggctgcactgaccagacagtcctcttcatcctaaactgtgggcaatttggtctgggaagtctcttcttattggaagggtaaaaccatgttaccattgtgaagttcgtctcccacaattcctataattaggttagtccagttcttgctcatagctagagacctcgttgtggctctgcctccttggttcttctataaggccataggtggcctcaaggtcaagacatctggcagaatagaaagcttcacgctgagccatataagcccaggttccgggcagcttgggagatcctgggtgttttcctctggggaaatggatagtaagctggtttgccagacctgtgtgggttctttatggaaagaggacattgagtgctgaattttaagccagattccactgcctttgtttgggtattgcccacctggcatggaagctgggcagcctctgggattccggttccttgctgagtcatctgattggtttcaaacaagtgtgtgtctccttcaggagggagcctttggtcagatcccacaagcttgcccctatgatgtacttgatgactggtgtcctggggggaggtttggaccaaacaatgcatctccaggtgcgtgtgccatggagacttgggggcctgaaggcagccctgggcagcctcctccagcctcccctccacctcagaatctgcctcttccagggacagtgagcttcttctctccttgttaatccaaacagcattgaccatcgattctgcaggagcaggtgtgtttcctccttttggaagcaccaggaggtgggcctgggtcctctgctgcctcttcaagccttcatacctgggcttcgcaggaactggatgctgagtgggggccctttcccaggggcctgagtcctggagccctcagccattaagtgagatcca

SEQ ID NO: 450675 - DNA, 795 bp, Homo Sapiens; identical to SEQ ID NO: 151506

SEQ ID NO: 450676 - DNA, 705 bp, Homo Sapiens; identical to SEQ ID NO: 151509

SEQ ID NO: 450677 - DNA, 872 bp, Homo Sapiens
gggatgtgagcttcggcaggtctctgatcccaccctgactcaaccccgttcaaaggaacgtgccgctgagatccaggacttcgagcgtgaccaggggcgcgccatcctgctccagcgaacgccgcctcggcgatgccccccctgggctccgcgacccagcgcggtgcaggagaggttgaggagctgcagcgcggggaagcaggcgaaggcccggggctgcagcgcccgcagcggattcccggcgagcgccagggcgcggaggctgctcagcgcgggcccggtgcacggcggcagagcggccagctggttgtagctgaggtccagggtgtgcagccccgccaggcccacccgggccccagcgcagcgcggcgatgcggttgtggcgcagggtcagcacctgcagctgctccaggtggccgagctcggaagtgctcagggcgcgcagcaggttgtggctggcgtcgaggctgcgcagtgtgcgcggtaggcagccgggcaggcgctccaggttgcggttcgccagggtcaaggccgtcgcatccgcggcgggcagcccctcgcagggcgagtcggtggcgttgctgccactgctcccccaggggccctgctgagtgacccggaagagcgggaccttctcctggggagggtctgcccagctggggcgcagcaccgtcagcagcagcagcggtagggtttgccgcatggcgtctggaagtggtccttttggagtgtggcttctctggatgcacctctgaagttctcagctttgttttatagattctagggaccactgatttggacagcaactcagctatgaactccagagggaggcctgtctcccagctgcctctctcccacaacccccatccact

SEQ ID NO: 450678 - DNA, 1258 bp, Homo Sapiens
  misc_feature (56)..(56): n is a, c, g, or t
  misc_feature (244)..(244): n is a, c, g, or t
ggttaaaaagtagaattttctttaaactggatgatttttcttcttaaagtgggacnataatcctcaaaagggatgcaatcctgaaagtaaggacacctggaagggatggaatactaagaacggttttcttgggtttaaagttttcccccacactttctagattttgcatagtacagagcccagccgtatttctaagcagcacgctgttattttctgacatttttttctgagaagactttttacncagggaaagtcataattttagcttaccaaattggattccagttgttttattatatacccttcattagttccaagtatgcttctgaataatctaaaacctctcaaaatttgagtttataagtataatgaccattatctttccaatatcccctgaaagaaagtcgatacattccaggtttataatgcacaaagcctttacagaggtggggctgggatgtggaaaaggggaagaggagaagagaacaaggacctgtttgtatcatgccatggagaactacagttctgaattcagggaaagggagggaagatagtctttgtaaaaatgagagttttttaaaaagataagtgacattcagtctagtaagacggtttcttgttcctttttgatggaagctaacactgggtggtcaggctccgttacttccgagtccccactgcccaggagaatggatcgcccttcgtctagggcaaaaacatccgagttctggttttggcatgaatgtttaacaacctcattgggagtggagaatgttttgtcacacaagttgcatttgtagggtttgtttgtttgcaccagcatgttgtccatctgactcccttcttcaaatgtgcagagttccagagtctgtttgtccaccatggtgtaagtgtcgatgctctggttgaggcacacgtggcgggcagcctggttggccctgcaaaagcttttgtcacaagtgctgcacttgaaaggcttcccggtgtgtatgtacatgtgttccctccagtggcttttctggataaatttgcgtccacatattgtgcactcgtacttccgcctcttcacctccctctcctggtcggcctgctccaggttgtcaatgtcagcaatgtctgaggggggtggggtttccgactgctgctgcccatcgatgatgggagaatcagagatgtgctgcagctcactgtcacttatcatcccggcttcaggcacttccatggcatctttcccgaggtcagctgcattgctacagag

SEQ ID NO: 450679 - DNA, 842 bp, Homo Sapiens; identical to SEQ ID NO: 151513

SEQ ID NO: 450680 - DNA, 746 bp, Homo Sapiens; identical to SEQ ID NO: 151514
  misc_feature (728)..(728): n is a, c, g, or t

SEQ ID NO: 450681 - DNA, 740 bp, Homo Sapiens; identical to SEQ ID NO: 151515

SEQ ID NO: 450682 - DNA, 1349 bp, Homo Sapiens
  misc_feature (540)..(631): n is a, c, g, or t
  misc_feature (1210)..(1210): n is a, c, g, or t
  misc_feature (1221)..(1221): n is a, c, g, or t
ggcatacgtgattctctcctgtgtactgcactctctctcgacgtagaggcagcagtaaaccttcttgccttgcgcgcgccggtcgactcgtatgcggtcgtccttgtgtttgtgctaccgcctcactactgctagtcgctcggctgcgtgcgcgttgtttttttgtatttccctgctcgacggacagcttcattcttcagtactgctctctcgtcctgtctggcgttttggcttctccaaccgtacggtttagttcttgcgcccatccctagctccgagcaggtatggttattgttcctcttctcaactaggtagtctgctcctcctcgatactgcttttgttgtcacactgctgtatacacatgcgtgttacatatccagccgcccgctctcgccagcccgtcatcaaaagtcgtaccactccacattctagggtccccacttttagttgcaataaaccgtggtgttgtcgccgctgctcgtgttgcgccctctctgggggcctttcttttcgatctcgccccgcccccactcttgtgnnnnnnnnnnnnnnnnnnnnnnnnnnnnnnnnnnnnnnnnnnnnnnnnnnnnnnnnnnnnnnnnnnnnnnnnnnnnnnnnnnnnnnnnnnnnatagctaaacaattttattggctttttgtgaaataaaaaacacacaacaaaccaccatggttaaaggccataatcagcatcaaccaaatgaaccagccacttggttacagtagctgataacaacactagtggatattattgcttataccccaagttcatttatacatccattatattttggcaagattacaatcaaatgggagctttggttgtaaaatttcaactatgactactcattgaaaactcatcttctaccattttatggtgggatacatgtcaattcttccacatcttgtctcctttctccttccatcgataagatttacaagcctattgaaaataattaagatggatgcatttgtaactatccctactctactgccttctcttttgtcatgacaaggtgatgcatttctgggcctctcctaagatcttctatctggtgtttccactgccagtaataaatgcccatctgtaatctagatagattttcaaatgcatatggctgtcagcattggggtttggactcaactgtctcatttccatcttctgaaaagctagaagaaaaaataaaaatanaaacaaaatcntgaagtccttggcattggtaatttgacctcccaacagaatgagccccaccccctgccacattaacatcccatggcaggggtggagctgtggccttgaaatgctctctgtgtgtgtatgtgtgtgctgt

SEQ ID NO: 450683 - DNA, 982 bp, Homo Sapiens
ctcaggaggaaggaaggaaaaacagccgtctctggcctctggcctctccaggctctccaccctgggggcagaatcaattctgtagccctctagcaccggcagtggctccgcagtcagctgggcagtggccgtgactgggtcactctaccctaggaagtgagtgcagggctgctggagagccagaggctggcagcgactatgtgaagttctccaaggagaagtacatcctggactcatcgccagagaaactccacaaggaattggaggaggagctcaaactcagcagcacggatctccgcagccatgcctggtaccatggccgcatcccccgagaggtctcggagaccttggtacaacgcaacggcgacttcctcatccgggactcactcaccagcctgggcgactatgtgctcacgtgccgctggcgcaaccaggccttgcacttcaagatcaacaaggtggtggtgaaggcaggcgagagctacacacacatccagtacctgtttgagcaggagagctttgaccacgtgcccgccctcgtgcgctatcatgtgggcagccgcaaggctgtgtcagagcagagtggtgccatcatctactgcccggtgaaccgcaccttcccactgcgctacctcgaggccagctatggcctgggacaggggagtagcaagcctgctagccccgtcagcccctcaggccccaagggcagccacatgaagcggcgcaagcgtcaccatgaccgatgggctccctgctgacagggtcaacccgcagcgatggctgccccaccagtacgtcgctgccccgcctcgggactccatccgcagctgtgccctcagcatggaccagatcccagactgcatcacccatgtcgccatctccgagagcctagtccctgctacagcagtgaacccgtgtccatgccgccctgagcccttctgcacagattgctgcctccttgtgccgcgttcaagtgagccag

SEQ ID NO: 450684 - DNA, 1168 bp, Homo Sapiens
gtcccctggttaagctgccggaagtaaatggtttaccggggggagggcctttgcccaagggttttttggaaggggccctggttttgggggccccccttgttggactttcccccctggggttcttttggggccacttcccggggaccacaggctggggcctccactggaaccggccgggcgacagggggaggccagggcaatgcctgtgccagaaggggcttccagggggcggccatggaacacgggtttccagtgctgtaggcagggggagctagggctctcgggagatgggccgacatgggtgagtgcaggtctggggatctggtccatgctgaggggcacagctgcggatggagtcccgaggccggggcagcgacgtactggtggggcagccatcgctgcgggtgaccttgtcagcagtgagcccatcggtcatggtgacgctgcgccgcttcatgtggctgcccttggggcctgaggggctgacggggctagcaggcttgctactcccctgtcccaggccatagctggcctcgaggtagcgcagtgggaaggtgcggttcaccgggcagtagatgatggcaccactctgctctgacacagccttgcggctgcccacatgatagcgcacgagggcgggcacgtggtcaaagctctcctgctcaaacaggtactggatgtgtgtgtagctctcgcctgccttcaccaccaccttgttgatcttgaagtgcaaggcctggttgcgccagcggcacgtgagcacatagtcgcccaggctggtgagtgagtcccggatgaggaagtcgccgttgcgttgtaccaaggtctccgagacctctcgggggatgcggccatggtaccaggcatggctgcggagatccgtgctgctgagtttgagctcctcctccaattccttgtggagtttctctggcgatgagtccaggatgtacttctccttggagaacttcacatagtcgctgccagcctctggctctccagcagcccctcgggaccccagcgcggggcaccttcggcccacagcagtcatgcttcccccgctgtcgccgccggcaacccggggacctcctaaacccagcggctcctgcctttctcgggccactgagctgcagagctcagtgccggactccatcccgggaattccggaccg

SEQ ID NO: 450685 - DNA, 1183 bp, Homo Sapiens
  misc_feature (41)..(49): n is a, c, g, or t
ggggggattattatgtggggtgcgagggcgaggattccacnnnnnnnnncgccgtatttgactagtggtgctcgcgcaccctgctctgggcagaggcgcgacctctatggtggtctcggcccccgcgtggggtccgtggggggcgggtttccgcgggacacaacagtgtaatgatttcaagggagatcgggggcgtgtcgacaaaaggcgcggcccaggcaaaggggagaggccccgaaggggtctcacaaggggcgggccatgggtccccgcggttgggcgtggcggtaaggccagggaaggatagggggctcttcggagtacgggagcgcccttggggtcagtgcacagttctggggattttggtcccgttgtgaggggccacagtttgccggatggaattcccggaggggccggggccaggcgacgttacttggtgggggcagccatcggctgcggggggacctttgtcagcccgtgagccccttcggttcatggtgacgctgcgccggttccatgtggctggccttgctggcttgaggggctgacggggctagcaggcttgttactcccctgtcccaggccattagctggcctcgaggtagcgcagtgggaaggtgcggttcaccgggcagtagatgatggcaccactctgctctgacacagccttgcggctgcccacatgatagcgcacgagggcgggcacgtggtcaaagctctcctgctcaaacaggtactggatgtgtgtgtagctctcgcctgccttcaccaccaccttgttgatcttgaagtgcaaggcctggttgcgccagcggcacgtgagcacatagtcgcccaggctggtgagtgagtcccggatgaggaagtcgccgttgcgttgtaccaaggtctccgagacctctcgggggatgcggccatggtaccaggcatggctgcggagatccgtgctgctgagtttgagctcctcctccaattccttgtggagtttctctggcgatgagtccaggatgtacttctccttggagaactgcacctgcacgaaggagccgcggtagaagcagcaggcggcggccgacagggcactccacaggctgcaccgctcggtcatggtggggccaggctgccggggccgggacggtgtgggggggcggtggccggcggggcatcccaagaattccggacc

SEQ ID NO: 450686 - DNA, 1144 bp, Homo Sapiens
  misc_feature (66)..(77): n is a, c, g, or t
cacccaaggttttccttaattccccccatttttccccgggatgaagggaccataaggcttcggggnnnnnnnnnnnntttttccaaacgttccaggggatttacccttgggccccaccgccagggaccatattcctaaggacctgggcccgggataatttttaatggaaatatttggggtgaatgggattaatgaaaagggagaaagccagagcccattggtgtgggggggtggtgtgaatgccccactgaaatctgaagtaggggtgcagatttgttcatcagttgaaagttacttcgggtcacatctgaagggcggctctaggtcaccctagagggcctaggctggctgtcttcaggtcagggggctgagttgccattcaaagactcaaaggagtgaatcgtacacatcaatcatggggttggcttggccaccaccctgctggaacactacctggccttctaacctcatggagagcctgaccaggcctgccacagagacctcagagtgccagagaatctccactgtgtccttagctctgcacagtcagggcttccccgaagtctgcctctctctgtcattatgcttggccgggattgctcatcctgatggcactgggcaggcagtgggctgcagagggagagctgaggggaccaggaggcaggcactttgtgtgactttggagggtccttctaccccaagacctcactgctgccatctgtaagtgaaggaactggaccagatggggaataagggagggctccatctcatgtcgaaggccaatgctaagagtggctgcctggggtgcagtgctgggatggtttgcaaggggagtgtcaaggctggtcagtgattatggggaagagtcagggcccatcagaggaatgaagtggctaagggtgcctccagtcccaatagccacaagtgaattctgttgaaagggagttctagcatctcacagaccaagtggagcctcaggatgggaggcgaagggcaaaagagccgtccctccctgtcccatggctaaatgcctctcaagaactccacagatggtcagtcgggagttacaggcaggtccctgtctattccacttgccatcttgtgtactctccaacactggtctttccccgaacctggggtccct

SEQ ID NO: 450687 - DNA, 530 bp, Homo Sapiens
  misc_feature (138)..(180): n is a, c, g, or t
ccatgccaccggctccactttccccttttattaatacattcacccagataatcattaaaattaacatgtgccaggtcttaggatgtgtcttggggtgggcacagtacccggtgactcttggggatatttatttatttnnnnnnnnnnnnnnnnnnnnnnnnnnnnnnnnnnnnnnnnnnncttgttgctgtcacaattattaccatctctccagctagcaaaattactaccagagccgttactacacacaaaggctattgaccgagcacataccatgtgccacacaccttgacaaaatcttttaatacagtttattatgtactattcaatctttacacaatgtcacgggaccagtattgtttacccaattttttataaggacactgaagcttagaggagtgaaatgttttgagtgttatttcagagagcaaatggcaaagactggatccaaacccatcttcctggacctgaagttcatgctcccagccaccccacccctgagctgaataaagatgatttaagcagttaac

SEQ ID NO: 450688 - DNA, 1531 bp, Homo Sapiens
tacagtttattatgtactaaaagattttgtcaaggtgtgtggcacatggtatgtgctcggtcaatagcctttgtgtgtagtaacggctctggtagtaattttgctagctggagagatggtaataattgtgacagcaacaagtatttttatccccatttcacagatgaagatataggctcagggaaaataaataaatatccccaagagtcaccgggtactgtgcccaccccaagacacatcctaagacctggcacatgttaattttaatgattatctgggtgaatgtattaataaaaggggaaagtggagccggtggcatggggggtggtgtgaatgcccaccgaggtctgaagtggggtgcagatttgttcatcagcagaaagttactcgggtcatgtctgcagtggggggctcttccctagaggccttggccggctgcctccaggtcagggggctgagttggcatccaaagactcaaaggagtgaatcgtacatgtcagtcacagggttggcttgggcaccaccgtgctggggcaccactgggccctctgaccacctggagagcctgaccaggcctgccacagagacctcagagtgccagagaatctccactgtgtccttagctccacacagtcagggcttccctgaaatctgcctctctctgtcattatgcttggccggtactgctcatcctggatggcactgggcaggccgtgggctgcagaggcgagctgagggtgccagagaatctccactgtgtccttagctctgcacagtcaggcttccccgaagtctgcctctctctgtcattatgcttggccggtactgctcatcctgatggcactgggcaggcagtgggctgcagaggcagagctgaggggaccaggaggcaggcactctgtgtgactttggaggatccttctaccccaaggcctcactgctgccatctgtaagtgaaggaactggaccagatggggaataaggaggcctccatctcatgccaaaggccaaggctaggagtggctgcctggggtgcagtgctgggatggtttgcaaggggagtgtcaaggctggtcagtgattatgggcgaagagtcagggcccatcaggggaatgaagtggctaagggtgcctccagttctaatagccacaagtgaattctgttgaaagggagttctagcatctcacagaccaagtggatcctgaggatggaggccgaaggccagagaggatcctccctgtcccatggcctaaatgcctctcagaactcacagatggtcagtcgggagtacaggcagttcctgtcattccactgcccatctgtgtacatctccacacactgctcttttccccgacctgcaggctcccctcggtaccagttggtgtagtttacaggggtcccatctgagtagcggaagtctccagggctgggaccctcagtcaggcctacataggcatatgtgttgtacttcttcacgaagcttgcaatggcctcattttcctctggattccttgggacagcaatgcggcc

SEQ ID NO: 450689 - DNA, 790 bp, Homo Sapiens
cccgaatctgttgcttgcggcggccctcgggcgctcaccgtgggccaggagggacgggcaggcctccgtgctccagggccactgcccctgggggtccacgcgacagaatgcatgggggacagcgcctgaagcagagggaagcaaagcaagctcgaagcggccgcccaaactcccgtaaggatggcgtcggccgcccggcctgcccctccctggccccgctgccctgcacctccgccttcagccataggcgctggaggttgtgctgacgctcgaaggtccagaccagggcctcctcgcgactgcgggcaaaggtgcaccggtttcggtggcgccggcagccgagcccagggctgtagtagtggcagacttggtagcacaggggccttgggaaggtgggccggcagcccaccacgcgccagaccttgctcttggtggcctgcttaaagcgggccagcaggatctcgcgggagcagtcatgctccaccctacggaggacgtaggtgctttcattgagccgctgggtgcagcgggagcagcccagacacaggtccaccagggcacacagccgggccagggacggccctctggtggccgcggggctgttgggcagcagggtggaccctggaggcgccacctcgaacaccagcttggctctccagggaggcgtctgaggctcctgagctcacgggtccacgcagtccactggaactgttggccacggttcgaagccctcctggagctgcctgccctgccgagcctgcccaggagctctcagtttcgatactccgct

SEQ ID NO: 450690 - DNA, 896 bp, Homo Sapiens; identical to SEQ ID NO: 151522

SEQ ID NO: 450691 - DNA, 851 bp, Homo Sapiens
tcttatctgttggcgctctttccaggttcatcaactggaaagtcagaaagaaaggacatcatggtcatctgcaagacctcccagttgcagcagatattccaaatgcccttgtgcacgcgataatcatatgttgttccactttggccacaaagttcataatcatttgttatcctggtgtaaagccattattgatcattactgtcagtgtgttctggtaataggtaatctttgctcggacaggatagggtttcgttgcggaagtccctctggcaacttgccaaagcttgactagccccgtcattttgatggtcataatggatttgtccattgttgcctataattactatagcaggattatttttctttccatcattgtcaaaagaatcaaaaaatattccaacaccattccacagatcagctgatccaaacacagggccctccaagccttgattttctgcataccaaattgctaggccatcagctccaattcgacctcttccagtcactcgaaatgtcacctcaacttcccagttctcaaaggccgcttttgtctttgtccacactgagcctctttggctttttaaagatggtgctactcgaatttgatctgaacttggaatagcattccccgcgtgggcccagaagggcacggtcccgtcgctctgcaccaggtgcggccccttgaagctgtatttgtactcgaaacggcgatgtggcaacgcgaccgcggggtctcctcccacgccgtcgccccggacgaagcgaccgagtgacagcagcaaggcgcagaacagcggccgaactctggcccggagacccctttgcctggatcccgccatcttgattctgac

SEQ ID NO: 450692 - DNA, 748 bp, Homo Sapiens
ggtattttaggccaagtgtgcacccacatccaatggtgctacaagtgactgaaataatatttgagtctttctgctcaaagaatgaagctccaaccattgttctaagctgtgtagaagtcctagcattataggatcttgtaatagaaacatcagtccattcctctttcatcttaatcaaggacattcccatggagcccaagattacaaatgtactcagggctgtttattcggtggctccctggtttgcatttacctcatataaagaatgggaaggagaccattgggtaaccctcaagtgtcagaagttgtttctaaagtaactatacatgttttttactaaatctctgcagtgcttataaaatacattgttgcctatttagggagtaacattttctagttttcgtttctggttaaaatgaaatatgggcttatgtcaattcattggcaagtcaatgcactaactcaataccaagatgagtttttaaataatgaatattatttaataccacaacagaaattatccccaatttccaataagtcctatcattgaacaattcaaatataagtgaagaaaaacattagtagatcaacaatctaaacaaatccctcggttctaagatacaatggattccccatactggaaggactctgaggctttattcccccactatgcatatcttatcattttatttattatacacacatccatcctaaactatactaaagcccttttcccatgcatggatgg

SEQ ID NO: 450693 - DNA, 1351 bp, Homo Sapiens
  misc_feature (12)..(12): n is a, c, g, or t
  misc_feature (348)..(361): n is a, c, g, or t
gatcaaaatccngcgaggctgccctttagaatctgcccgagtagccgcggactttggtttagaatcatgtagtgtgagagctgggaggaagttcgaagatcatctaattcctcatgagcggccaagcagatgacggtgaattaattctgcaacgttgagtactcagttggcatacaagcacccagccttccaaagggatgtccttcatgtttcactgattttcgaatgacagtcggcttgcctaaacttatcctttacatttaagacatttcgtgggttcctgtatgcccaggggatttttactatttgtttatgcaaacagcaggttgcataagagccttgctggcnnnnnnnnnnnnnnagagatttcgtagtttcctgataaccattcagtcatctatttcaacaccctgacatgacataaaggcaggcacggaaccacacgttcaccatacaaacacacgccactttgctggagcattcactaggcgaggcgctccatcggactcactagctgcactcatgaatcggcaccatctgcaggatcactttctggaaatagacaagaagaactgctgtgtgttccgagatgacttcattgccaaggtgttgccgccggtgttggggctggagtttatctttgggcttctgggcaatggccttgccctgtggattttctgtttccacctcaagtcctggaaatccagccggattttcctgttcaacctggcagtagctgactttctactgatcatctgcctgccgttcgtgatggactactatgtgcggcgttcagactggaagtttggggacatcccttgccggctggtgctcttcatgtttgccatgaaccgccagggcagcatcatcttcctcacggtggtggcggtagacaggtatttccgggtggtccatccccaccacgccctgaacaagatctccaattggacagcagccatcatctcttgccttctgtggggcatcactgttggcctaacagtccacctcctgaagaagaagttgctgatccagaatggccctgcaaatgtgtgcatcagcttcagcatctgccataccttccggtggcacgaagctatgttcctccctggagttccttcctgcccctgggcatcattcctgttcttgctcagcgcagaattatctgggagcctgcggcagagacaaatggaccggcattgccaagatcaagagagccatcaccttcatcatggttggtggccatcgtcttttgtcatctgcttccttcccagcgtggttgtgcggatcgcatcttctggctctgcacacttcgggcacgccagaattgtgaagtgtccgctcggtggactgg

SEQ ID NO: 450694 - DNA, 704 bp, Homo Sapiens
aacgtgttgtgcaagccacacatgtcaacaggcttgtaagcagctccatttatttgagtaaatatcttgtaaataaatcattggtaaacaatacaaaattaaatacattttcaaaagcttgccagtatacgcaaaattcacaaacatagtttttttaaaaaataaaatatgttcagagcacccttgatataaaatgcctgacccccatccttggacaaggccacctgaagacatcttatggtaggtgggtttctgtgggagtcagcgggggcctcctggagggaagggtttctactctcacctattacccatcccacattccatctgaattttgatccttctccaaagagctggtaactgagagggctagagcacgccaccaggcctagctccaagcacggggatcagggtgcacaattagggccaggagcacccagagtcctcaacacaagccattgagagaagccagaaatgcaatctccacacttccaaaccagcaactcagctcctagagcaactgtcttgagagaatgtgaggctttctcaccttgacacttaacactcggtttactcccactggtctgatgctacccaggcacagaagctaccagaacctatttctaaggaagaagacactcgatcctgctaactttcttttgacctgctttcctggagagagaataaacacatactcggtggaaagc

SEQ ID NO: 450695 - DNA, 435 bp, Homo Sapiens
  misc_feature (374)..(374): n is a, c, g, or t
  misc_feature (422)..(422): n is a, c, g, or t
gtaagacagctccatttatttgagtaaatatcttgtaaataaatcattggtaaacaatacaaaattaaatacattttcaaaagcttgccagtatacgcaaaattcacaaacatagtttttttaaaaaataaaatatgttcagagcacccttgatataaaatgcctgacccccatccttgggacaagggccacctgaaggacatcttatgggtagggtggggtttctgtggggagtcagcgggggcctcctgggaggggaagggtttctacttctcacctatttacccatcccacattccatctggaattttgatccttcttccaaaggggctgggtaactgaggggggctaggagcacggccaccgggcttagncttccaaggcacgggggatccaggggtggcacaattaggggccggggngcacccaggagtt

SEQ ID NO: 450696 - DNA, 481 bp, Homo Sapiens
atctgtttgtctctttcttccaaaaaataagtttataaaacgccatttgctcctgttttcggcaggcttccagcttctctgggctcaggggccaatgctcccgtcaagacgcttggggcagcagcagcagggggaggtgtggggaaagggggttcagaggcccagaacctcctgctggtattgggaggcaggaggtttagcatagcagctctccagccaggctcagccaaacccgggatggggactaagcgccaaggtccaagaagccgagcagaaccctgacatttgggccatcaggacacaggcacggcagctccaatgggcaagggcacggcccttggacactggcacagcaactctgggccaggggccccatgctatcaaggtcgagcactgtgtcaggctgtggctgagccccaaggcccaaggccaccagcctatgtgcctgcacagccttgagccttgctcatgtctgcacccc

SEQ ID NO: 450697 - DNA, 1275 bp, Homo Sapiens
actgcggggggagagaaatcgcacaaaccgcggggggtcgaagaacccgggaaatagtgcataagggaagcatcgctgtctggaccaagattttcagacagaccctatgcggtgtcccggtagtggtccagaagcggaagggtgtctaaaagaacttttccgtaaaggcccgaagggcgagggagagaaggggagggtgtatccggtatggcggaatgatctcgcggtgtaaaagtaagaaatttattggatcggatggcaatatatgaagatattttgagactataaggctctatccaggcaaaaagcatcttttttataaagtaagtgggtatcaatttaaatggcgcctaaaatcacagaatgacgtttcctataaatgtctgtataaaggctttcataaaatcctcatgtattttaaaactagcgttgcaagctataacagaaaaacctataaatagtacttacaaagcaggtttcttcacaatttatgacacctacagtgatgtcactatagatcagagtattcggggggctctgtgacaatcaatacatgagctgccatgagtaagggagcgtgtcccctgatgagcagaaccgaagcacgtgcattatggcctcagcctcgagctccccgcacagcatcctaccattccgatattcttgcggactttgcagttgacgttgagaattactacaagaggaggttaggaaaccaggattgggaaagagggaagggagaggaaaccaaggcatgccagcgatcatagactatctatataagcagctttatcaatgaccacgagaaaatgggtttctatgatagaacgcaacatggtgaggccttggggctgcaacgtggcctctgtgaagaggactacgcctacgtcccgattgggcaagggctgacgctgcatgccaggtgcttgcgacttgtgagccagtcacacgcaacagcatgaaaactttctctggagtgccaagtcattacctggaaacactggggacaggtcagtgtgtagcttataccagctttccccaagatttttccagcaaccaagtgactcagcaaccaagtgactctgtctttggggccgtgatgggagctgacatggaggaatctgcagctccaggttctaagatcaggagagcttcagacaagtgggaaaaccagatataaagagggtgacatacacacactgttagcagcaaacgcaaggtgtccatgattaaaatgaaattgagtgatagggagaaatggagaagattccagag

SEQ ID NO: 450698 - DNA, 363 bp, Homo Sapiens
gaggatccccgggagtggagagagaatggtgaattggtgcctggaaggccttccagaagtgggactcgattctggttcctccgtctgctaggctgtattatgggaggtgatgcacccaggaagttttcggcgtggtaaccacttgtggggccagaagtctgcgatgacgcgtgaacaaaggtcggctccatctccatcagctcatctaggtcatcatcttgggcctcatccagtggctcctcctccacctcaccataggtgtcctcagtccctttatcctgcttgtggctctccttctggtttctggcccccatcctcatcttcatcttcttcatccttactctctccttcctcctcattctt

SEQ ID NO: 450699 - DNA, 976 bp, Homo Sapiens
  misc_feature (240)..(240): n is a, c, g, or t
accctttcaggggtttttccttccgtgcctgttttcatggtatgtagcctcccgcccatttttctgcggtcttctccccccctggtaagttctttcccccagattaatgttcatcacccttccgcacttgtagatcattgccattcattggcatgttatcataaaggcccacaacctttttcagctcacttgtggagactggtggctgctgctggctcagggcgttagtggcttttttcngagatctggtcctcctcaggcgttgggggaagaggcttttttgtcttccggtgagaactcccaggttttaagcttccattcctgttctccgaaatttggcagcccatagcatttttggctgtctgagagcagcagagatactgcccatcgatccagaagcaagggtgatatttctgaaccagatcactgttgtaccggattacgtttttgagctggtgaatccaccgcttccttagttcttcagttggggagaagacgtagagaggcccttcatcatatacaacctggaagggataagggaacctttcaatgattgaaatttgctccatttcactggactcttcacctcttctcggaatctgtctttctggaggaggatttttttcaggaaccactgtttcaacacaagtgatcttctcaacatctattgaacccttcttactgcctcttctcccacgttcaaagtcatactcatagtaggagagtttgtgcacggtcaagagaaacaggcgcttcttgaagtttagaggtgatgttttctttttctgttgggatcgcttcagaaagatgctctccagaatcactgcggccatagcttcttctttctggagttcacctgtgtgctcagtcctgacttaatgcaggtagcttcccagatgcattgagatgccaggacttggaaggtgggactcgattcgcagcagacactggccctggagacatattcttacagtcc

SEQ ID NO: 450700 - DNA, 1137 bp, Homo Sapiens
  misc_feature (53)..(53): n is a, c, g, or t
  misc_feature (168)..(176): n is a, c, g, or t
agttctgggggggtcaccatggacggccagggtgttagaaggatgccctcacnaccaaccccaattgtttggggccggggggccctttcatgaacatgcctcccgatggccgccgggggggataacgggggtacaggtgcggggtttcgagggccggggaggaagttnnnnnnnnnaggaaggcgcgaaaggccccccagcggcccctttgggaaggccttcccatagcgcgggcgggccccccttcggtgccgggaggcggttcctggccgcgccccccaatgtggcggggggaggggcccccgacgttgaaagagatcggctgcctttcttgaaggcccagggcccccctgctggcccggggcccccagtaagcgagtcgtaccagtggaagaggagcccgagggctcctggcaggggtgaggaagcgcgcatccaggaagcacagctggttgtaataggctgtgagcagctccaggcccgactcattccggctgggggtccgcatggcctgccgcagggcctccagctccctgatttctgcctcgtaggaggcgccgtcctctccaaagtgcactgagatcagctccttcagcggtgtagaccagtccagctccttggtctccttcaggcccagggggatcatggggacagtgacagcttcgctcccatgccggccagggtccacgccaccgctgagctcctccagctcctccttcagcagctgcaggttggagttgacgtagctcagctccagggcgaccgtctctctcacccggttgttagctggtggctctgtagaggttctcagcagccacgtccgcaatctgcaagctcacttgtcaatcctgctggtgaatcctgggccactgcaggctcctgcagcatggcacagcactaggatctacagtcagtggagtcacaagccctgcaagcacgcagggcatcgtcccatcagccaggcagccacagcagccagtccaggccgtctcactccaaggatctatcgcacgcacaccgctgcgcatgggggtccctcggggtcagccagcccaccgctcgcgcagcagctccgcagccagggctagggccgcaccagcaccacaatggcacgcgggctcactgagtgcccgcgca

SEQ ID NO: 450701 - DNA, 1093 bp, Homo Sapiens
agggagatggccccccaaggcattttccaactgttccttcttggtgattgtccaagatcacaactttcagtgggctcgctcatctttcggatgtcccaccacatgacctgcccatccgtggaagctgagaagcactcggtgcccgtcttcgactgcagccagatggtgccatacacaggttctcggtggctggactcaaatggtggatagctccgccaccaggcttgccctttcgggtgtcccagcaggctatctgtccattgtagcagccacccaggagtacgtgggaatctttggggttgaactccaacgtcacgagtggagacgatggcttcagagcaagttcaggcttgttggggttttccaggtcccagatgtatgaatcgctgctcatgcccacaggtgcccgctgaaaatccaagcaggagtatgccactgccaacttcctgttgccatcggggtgccaggagaggtgtgtggcagccctcttgatttcctgggggtccctgaacacattgatggttttagctgaagggtcctcctccatcacttccatggcctcctcgtcattgaaatactcttcatagatgtcaatggcattgttctgcttgatgcagtgctccatgatagagccgagctgcatgatggcgttaacgtagttctcatctttctccactttcttccggaaacggatggtctgctccagctccagggggttcacgtccttgggccagcccccctcgacatggttaactccccgggtctccatctcaaaccgctctgagttggcctcgtgttccgacatgctgatcgagcactggatgcccgtgtccactgggttccgctccacgaactgctcggccagctcagggttgggcatgatgtcgatgttcagctcggcctggcggtccgagaaattgcactgcttcccgaactcgctgcgcttcttgacgtacacgtacacaatctccatggtgccggctgcctgggtccgctccttctgcttctgggtctctggggaagcgtccaatccacccggtgctcctcaaacggcggcgtttaccggttgcttgatcccgggaattccggaccg

SEQ ID NO: 450702 - DNA, 1011 bp, Homo Sapiens
  misc_feature (789)..(901): n is a, c, g, or t
gtgcactgaacagaatagccaaaggcttaggagcagcctggcagtaatgtcattgttctcgtttcttttgagccagattgctctcctggctagggaaatatgcggtcactttatttaccagtgttcagatcaagcattcctttcatcactgtcaccttcacagagggcagtctgtggatgttactttcctgtctttatctgtccacctatctctggagaaaaaaattaagcagccatgcccttcagggtgaatcaaacaattgaaaagaagaaaatatgtcagtttctttttgcctccatccaatacttaaccacagcctaacttgcattttcatttctagagagggtagacaccttcattcctaaaacagttatcccacaagggtcccaccattgcagagagcagcaggccagtgttgtctttgtttctctgttcctgaggcttcctagaagtcatcacaatctccaatttatccaggctgagctcactttctccttgtgtctcctttgagttaggcatggaaatagacatgacagtgcatatacataatcatccttctgtgacaaattgcattgctctctgcttatctgagctctcaaaatgcaattggtagaccttgtcatgaaccaataacaagcagtttgcagatcaaactcatccatggaccacactttgctagaccactttctagatgaaggtttccaaactttttgctgggccgggtgatatttttaaaacagggaatccaacagtgagccaaacggacaaagatgcttgctctcatggannnnnnnnnnnnnnnnnnnnnnnnnnnnnnnnnnnnnnnnnnnnnnnnnnnnnnnnnnnnnnnnnnnnnnnnnnnnnnnnnnnnnnnnnnnnnnnnnnnnnnnnnnnnnnnnntcttgcggtcagtcatcttcccaccgtatcttcacatagtcagaggtcgcagatacaggttcagctcaattgtctggggaaggtaaggttaaagtcacaggaaacagctg

SEQ ID NO: 450703 - DNA, 713 bp, Homo Sapiens
agtgactcgggcaccatcaccctgtgctgtaaagaccctgcgagtgctgcagctggaaatagagggcgcggaagcgacgctgggcatcgcccgctccatcgaggttgtgccgagggagctcccgagccctttaagctctccctgtctcgcgtagaggggaataaaaaggtgcttctgttcaaagaggctccgcagccgcagctaaatggcagggggatgcagggtggtccggggtacttggagaggccgaagctgaagctacaggactgaggggctggaaagggcgcgggcgagacaattccgaccctccccagagcccctgacttccgtctccggacgctgtcctcactggaatcagtcatcacctccttccctttattctaccgtcccaagggcctgagattgggcgactcctggcacttcctcccgcccgaactctactgcaagagagtagctcgcgaagtgggcgcggtcgtaggggcccgggaaggtggaagcgccgggcctggaagaggcgcggggacaggtcactccctgggtgccctagacctggcctctctcctccctgcgctgcagaccaacgcgtggcggctgagcgaggtgaacgaggacttcagcttgtgccccagatacccccgtgcggtgatcgtgccatacttggtggacgatgatgccctggcgcgcagcgcccgcttccgtcagggaggtcgctt

SEQ ID NO: 450704 - DNA, 695 bp, Homo Sapiens
tcaggataaagtctctggcagctctgacatcctgtttcggtcctgtgtattctgggaaatagctaattagatgagagtacatgattttctcttccaaaagatccttcttgttcgagaatacaatcgcagtcgaattcagaaaccaggggtaggtgatgatggttttaaataaggctttgctctcttccatgcgattctcgttgtcacactcagccaggacctggtcatattcactcagagcaaccaagaaaataatggaggtgacactctcaaagcagtgaatccacttccgtctttccgatcgttggccaccaacatccaccatccgaaagatgatgttttccaagtcaaatggatactcaatgatgccggtggtgggcactcggacgcgaagcacatcttgttgggtaggcacgaatgatggtgtggcgatgcggtcaatgtcagtcaggtaactgtatattagagaacgaggaactgactctccttttagagcagggggaaatgtccatcctactcaaaggaagtcaccccccactcacagtgagccccacacagacacacgaattccatcaatgactttcctgagagccagtgccaggccaggcttctccatccttcctacgactgttttgaagacaatatgggtcagaaggacttccatgcgccttcttgggacatctgcagagcactcc

SEQ ID NO: 450705 - DNA, 912 bp, Homo Sapiens
  misc_feature (19)..(19): n is a, c, g, or t
ttaacgggccctggttggnaaggccctctcctcggagatgaaagagggccgggtcagggggctcttctcccagctcccgccgtgcctctcgcactgcctcgtggaagacatgctgcacgtgctcaaagtccagacaggcagagacctcgaaaaacaggcacccaaacctgcctgccaaagccacaccctctgccttggtgacttgcctgtactgagccatgtccagcttgttgcccagcagcagggcagggatgctgcgctgtgtctccttcgcgtgcaaggcaagcagctccaggtagctgctgctgctatcaaagctctggcggctgtcgacgctgtacaccaccaggaagggatgggcccagttcaggtagcgctcgcagttcctgggggtgtccaggtctgcagtgtccatgaccctcaggtggacaggctggtggtccacagtctcctcggagctgtaggtgtcctccaagttggggtcatattcactgataaacctcttggtcagaaacttcacggtcagggcagacttgccagccccgcggcgccccaggatggccaggttgacctcgaggggcgcgctctgaggcccgctgcccgcgcggggttttccaaacaccgaggacatggcgacgccctggacggccacgcaggtctgcggccggtgggccccggcgcagtgcgcccgcccgtcggggcccaggggagcgggatgcaggcatatccactggagcgcgcggccccggacccgtcggcgtccgcgccctcggccccgcgtccagcgggctgccaccccgcggggaggaggggccggtggagcctggcgggcggggccaccccaagcgccaccaaattccttgtaagggctgcggagccccccgcggggcgcgctcagccggctcctggagc

SEQ ID NO: 450706 - DNA, 618 bp, Homo Sapiens
aacatttgtcatcaccccaaactttattgcttacaaagagttctctacaacccagactctgcagtaccaaggctgcagttctttatgtgctgggggccggggctctctccccgggagcagtctgactcaatgtggacagctggacaaaggctgtcttggcaagatgtgggaatgagcttctcccacggagtctcggcgtcccctgccccaggaggttgaggctagcagacaccccctgacgattcacagctgatttaatgctacgtgagtcctgagtagctcccctgggagaagaggctaagctggggcaatggggaagggggtgctattcttagagaaatctggaagaggtttgaggagtcacatgcatgtggacagctcaagactgtgtcccttcaccccatctcctggcttgctatgctcctacagtgtcactgccctaccctgccctgccagagggcagccatgaaagtgctttgaggtcatcagagtgcaaagtgccgtcggcagtaccctctggccaggggcaggggcagggtgagtgtcagtgtgatgctgagctgtgctctggggaaccagcacgctggacactgatagtggggctggggcgccggagcg

SEQ ID NO: 450707 - DNA, 1141 bp, Homo Sapiens
  misc_feature (120)..(120): n is a, c, g, or t
  misc_feature (171)..(171): n is a, c, g, or t
  misc_feature (175)..(175): n is a, c, g, or t
  misc_feature (298)..(298): n is a, c, g, or t
  misc_feature (344)..(344): n is a, c, g, or t
  misc_feature (741)..(780): n is a, c, g, or t
cgcgcttgtgttttttgtgtttatgtgtgccatcggcaggcgtccgcatcgcgtctcccccgtcccctccgtcccgcactattcttctataacgtcattcaacataccgctaagcacctnttattactgtaacctttagatagaagaatatatactattgagacacacaanaatntatggttctcacgtatagcttctgacagagccacagaacgagagcagaaatacatcacaccagactcaatttggtattagacgactaggtgaattcgcgagctcatcttatacattttctcantattctctgcttctatcgttgtgtttttttcttacgtttgcatatnttatgttctcctcctctatcatctttttgtaaatccataaaccaacgagattagcatcaaacaaaaatccaatatctcatccttactgcccttgcatttcccaccatacacttttcgctcttcgtgttaactcctccctttttattcttctctcttatgtatgtatgttttttactatttattagggattagatgtatatcaacatcctaaccacatacattagcatattctattacttgtactcataccttcatttatttccattcaaaaaattggaacgacacgtagatatagataaattgttcttgaactcgacatctgtttttcaccatatcgcattatcctcctggttctctgtttcgcgcccgctgcccccgccatgctacttcgttgtannnnnnnnnnnnnnnnnnnnnnnnnnnnnnnnnnnnnnnnagtactactctcgttacggataatcgaacctctgctcgttacgtttctccttgatatattctcctcatcaggccagtctttgtgatcatgccggcgcccgctgagtctacggctcgcttctgctgattgtctatggaggtcgagctgttcgacagcctggagggttgggcgccggtccggcaaggcctcttcgccgatcccgagaggcaccggctgcgcttcctggtggcgtggaatggcgcggagggcaagttagctgtgacttgtcacgacctcaccgcgcagcagccgcagcggcgcgagggggccgggatggggctggagcccaaaccatccttgaaattccggactcttcccaccc

SEQ ID NO: 450708 - DNA, 842 bp, Homo Sapiens; identical to SEQ ID NO: 151542

SEQ ID NO: 450709 - DNA, 1094 bp, Homo Sapiens
ctagggaaaccctcgcccacgggcttccagggcttggatgccttggcctctgtggatgagaactcagtacagctggcatcaacaaggttcagtgtcccctgtgtcaggcatcacagggtcaggaggctcctggctcagaggcggatgcgagggagggtagtggaagaaagagagtcctggcacaggaaagagggaaccaggctgccggcccagtgcccagctgctccccatccctcacaccctggccctggagcccttggccacatgccccatcccaggaccgcctagttgtgagagaagcccccgtgggagaaggcagggaggtcgggggcacaggcagcagcctggggcaggcaagctagggggttgacctcgcaggccccagcatcctggtcccctcggaagtagatggagtcggcagagtagaaggaggggtctttcgtcaaagaagttatagggtcggaggaagaagcccacgccgttccccacagtcactgtgttaggaatgtcctctgcatgtgggatatgcagaaaaccagctgtcacccaggccaccgaatcctttgccagcaatggtctcattgttgatgaagtcactgaaatccacagtgggggcccaagggtcattctgattgaaacgctgctgctactgggctcctcctccttccgctggggtcacaagccagctggtacctctcccagctgaagcctctcgccatggagctgttttggggcagcggctctccagcaaagctgagcatctggatgcggtagccccgggggtgaccccacttgttgctgtggttgctggccaggtacaggtagcgaggggtggcgcttcccacgaggaaggcggcctgctcctccatctccagcagcttccgggtcacctgcagcctctgcagctggtgctcagggctccagggcacagccatggggacagctgattcaaccaaaggagagcaatgtattctcacgccagcaagacgggggctctgttggctcctggacgggctggggggctcccggactctgcctgaggttcccggtagtcagatgcctgggactaagggtgggaagacacaggaaggcta

SEQ ID NO: 450710 - DNA, 1643 bp, Homo Sapiens
  misc_feature (1085)..(1126): n is a, c, g, or t
cctgtttgggcccatttattgtttattttgaataggtaatacagtcacatggttcaaaattcaaaatgtacaaaaagggtgtaagtgttaagacccttccctctcctgtcctcaacctactggttcccctcccaaaagtaatcagtgttacccatttattctgaataggcatacataagcaattatgtgtttatattctactcctttctgaaacacaaatgggaagtgcgctatacacatttctgtggcttgcctttttcacctgaagattattacatattagtatataaagacatacaattattttttagctgcatactattgtattgtaaggctgtatcagaattgatttaaccagtcctttagagaaaaaaagtttctgttgtttctcatctcttgctatttctttgtccccatccccaatccagacctcaggagggacagcagtgatgggaatggagcccaagcctggaccaggccaggccctgccccacccagccaggcccctccccactaggccagacccccacctcacccagggcccagctcattcgcatgcctgaatgtgattggacagcccctcctggctgggtggctggagttgtaggggcttttgcttcttcatctttgatgcccacccctttgtttccactccagcctcccaaacaggctgttgcagaatacagagcccctggtacaaaatggccattcttcattatcattgcacccccaaatcacttgaaatgctaacttgagctgctgctgtcacgatgaccatcctcctctatagagagcatgaggcaggcagacacaaatgcacagaagcagctgtcctgaaacacacccagccccaggacaggggtaggagcaactcctactcccaataagcaacagacacaagggaacgacacacagggattggccactctgattaggggtcccgtgaccttgagacttccatagggctggagaggagacggaacttgactgaaaactgagggctgggggagtaccaggggctgggacatagggatatcccctcaggattcgggagaaattgcaggatagaagagaaggcaggaacnnnnnnnnnnnnnnnnnnnnnnnnnnnnnnnnnnnnnnnnnnaggaaaggacctggatgagagggaatgtgagcagaagcatcctttccagctcagctatggacttgcaggactggcaaccctactctggggtctccagggaatagcccccttttagagtccttggaggtggcctaaaaagattcgggaaagccagacagcaacaaagggaaccatctagggaagccctcggccacggctccaggctgggccatgcctggcctctgtggatgagaactcagtacagctggcatcaacaaggttcagtgtcccctgtgtcaggcatcacagggtcaggaggctcctggctcagaggcggatgcgagggagggtagtggaagaaagagagtcctggcacaggaaagagggaagtagatggagtcggcagagtagaaggaggggtcttcgtcaaagaagttatagggtcggaggaagaagcccacgccgttccccacagtcactgtgttaggaatgtcctctgcattgggatatgcatccggggaatccggaccggtccagc

SEQ ID NO: 450711 - DNA, 864 bp, Homo Sapiens; identical to SEQ ID NO: 325298

SEQ ID NO: 450712 - DNA, 739 bp, Homo Sapiens
tagtcaagtgactgacagacggtgggtacctcaaagcgaggctgagctcataaagccacaggtgtaagggtgcaactcaaaatttgggagttctgttcaccactggggggctagtaattggcaaaaggtcctaggacacctgggatgggcatgtaatcctcactcaggggtgtataagtctgtctgaggttgggggtagggtggagggttttgtccttgtgtaggggtggagacttttctattagagaagtccagggtgcatagttttggggaacagtgagggcaaagttgttaggggctcaggcgtgggctgggtctgggcctagtggccacctcaggccagaggacacttttcaatctggaccaagttgacttcaagtagagtgtatgctagtgaaatacttcggaaaggaaataaggcactcttgtcttcatttccgtatcgactacagtctaactcccaaggtgttgtcagggcaacggcaggtcctgctcccatggggtggccaagcataggtgggtgcagcgccgccacttgttcactgagcagtagttatggccttgcggacatctgagacagggccgatggtgatcgccatacagccgggtctgctatcgtggggttgggaagcatccggtctccgttggaaattgcaagatcgagagcaaccacggaattctatcgtgtacagtctgcgatatacagattcttgccgtagctcgtcacagcgaaagatac

SEQ ID NO: 450713 - DNA, 1237 bp, Homo Sapiens; identical to SEQ ID NO: 151545
  misc_feature (49)..(49): n is a, c, g, or t
  misc_feature (67)..(67): n is a, c, g, or t
  misc_feature (115)..(115): n is a, c, g, or t
  misc_feature (149)..(149): n is a, c, g, or t

SEQ ID NO: 450714 - DNA, 300 bp, Homo Sapiens; identical to SEQ ID NO: 151550

SEQ ID NO: 450715 - DNA, 1557 bp, Homo Sapiens
ggaacagtcatttccttgcagaataattggcttagggagaaagagacacagaaaacaaaacaagttcatcatgtacagcttggtctggctacaccccttttcagaaaccaggctgtgtaagagctgctggagtaggcacccatttaaacgaaaaaatgaagaagcagcaataaagaagttgtaatcgttacctagacaaacagagaactggttttgacagtgtttctagagtgctttttattattttcctgacagttgtgttccaccatgattactttctccttcagcgaataggctaaatgaatatgaaacagaaaagcgtgtatcagcagaccaaagcacttctgtgcaagaattttcttaagaaatggaggatgaaaagagagagcttattggaatgggggcctctcaatacttttaggactgtgtattgctctgttttccagttccatgagaaatgtccagtttcctggaatggctcctcagaatctgggaagggtagataaatttagtatctcttctttaatggttgtgtatacaccaatatctaatttaacccatgagataatgaataaaagagcacttgctcctcttttgaaaggaacaagtgtcattggggcaccaaataaaacacacatggacgaaatacttctggaaaatttaccatatgctatgggaatcatctttaatgaaactttctcttataagttaatatttttccagggatataacagtccaactttggaaagaagatttcctcaggtgactttccatatcaaatatcatgtcatggaatttttcatgttttcaacataaagaacagaggaggttgggcaacagagatgctttcaatgacacatgagaaaacagggaaagcccatttcattgctgaacttatttcaaggtcaatcgtatgttccctactacaggatgactgcaaaaattgtagagtcatccaacatatatgtgttgagcgtgcatatgcatgtgtcaaaggacacatgagtaaccaagactgacaggccccagcctcaggtgagattccaggttagcagcatagacagacattgaacaattaatgacgagtacaagaaaaagtgtttcatgggcacttagaccaggggttcctaatagtgggattagaggagtcctacctggggaaatgatgtttaaagggagaccagaatgaatagcaggtgttgaggtggctaagaagcattgtgtttcagatagaaagaaaggtaattgtgaagaccctgaggtgagaaaggacatctgttcctagatctggaagaagagcagtatagctgaacaaggaacatgaaaaggaatgtaatgggagagtgaagctgaagtcactcaagtgctacctcctgtggcatcttgtaaacctaggtcaaggaatagccactgagtcactttaatcacggcaaaagtgtaattcggtttccaaaattaggggaacactccagatatagcccggggaatagattgccaagaggctatggagaatgtcaagaaacaaggagtccattaatggctggagcagagtgtttg

SEQ ID NO: 450716 - DNA, 1023 bp, Homo Sapiens
  misc_feature (64)..(64): n is a, c, g, or t
gcgggccgccagccgtgcctcaatgctgttcccactgacccacttcgtgagtgttctcctgganccttggcttcaaatttggcaccaagctccttggaagtcagccgtggccacggcactgtcctggactctggagatggcctggccggttggcctccacgtcaagagacaggtttcttatggcctgggtaaggctgtgcaggcttttggttaaagctcctccagatggggctgaaatgcacttgtaggaaggtgtccacgtggggtagcagcacctgctccaaggatctatcagggaactcgtgccctgtttgatttgcttccatcactgcagctgtgaggttaccaggcagggctttccacaggcctggcaggctgtctgccacccggtgcacatcattctggagatctcccagcagatgttcctgctgttcctgttgcacctcaacctcattgatcactgcagcaaggtggccaggtttgaagctgactggtccatcctgaggttcctggtggctgtcaccaggatctgcaggctcagggattgccatggaatcgtggtgctcgcagttggggcccgtgtagccagggcagcacctccaggccaaagaggtcagcaccttctgcttgacctggtacactggcttgtgggccatgcggtacatgactttgactttctggcagtctggagctccctgcggacacggctgctgcgagtggatgaggaatttctctgttttgcaaagagctagtaaggtgaccagcttggacattgggtaggggcaccagttacgtccaacggggtccttgctggtgtcctcagcctctgccttccagaccccaggtgtcctggagctctgcagatcagagaggctagtactggaagcctgggcccatgcccccagcagcccccagcccagggggcccccaaggctgaacagcaagctcaggatcatcttggtggtggggcaggctcagctcacactcagccttggcaagtagctccagaaactgctagtgacg

SEQ ID NO: 450717 - DNA, 932 bp, Homo Sapiens
tgggcatggagaagcatcttccttctcagaggctgtgttttccaaggcaagctcatcagagacagaagcagggcctcctctgggggacagcaggtcagcagccgctccttggacagcagcatcagcacagccaatgggcactggaagattgatgatggccatgatccagaaggcataggacactccgggtgcctggcccggtccatttggagtcagccctgggaacgtctggttggaccaaggcttggcatctacgtggtgctggctcagcaccctggagacatggaacaggtggcctcgggaggtggtgttgccgtgctattggcaggcaagcagttggcctcagacaggaaagggtcagcaataagggggctcagcagagcaccaaagcccacgaagaaatggagcacctggaggaagacggccgagtccttcttggtacatccttaccagctgcatgttggccacggtgtcgatgcagcccatggccaagcccgccagcgccatgactgaggccagcaccttcacgtcgcggcagaaggggatgacggcaaacaccagggagatggccagagaggaggtgaacagggcccatagtgactgggccagggtccttttgaagacgcccccgagggcgctgcccagcaggaggcagagctgctgcgagaagaagacccaggagatctgggcagcgagctgtgcgtctgacagcgcaggtccagcagcgtgggccccaggaaggcgatgcacaggccgaagctgaagaagacgctccagtaggtgagcgtgggctgcaggttgcggcggagcagccccgacacgcggccgtcgcagcccatggcgcaggctgacgggctcgcggatctggtcccggcgagcccggtgcccgagtgccgcccgcgggagggccggccgggctggggaggcccgcg

SEQ ID NO: 450718 - DNA, 731 bp, Homo Sapiens
gggggatttagattgtcactgccacctcggtcggtgcttacttcgctgccagctggtcgtcgccatgaacccggacctgcgcagtggagcgggattccgccagcttcggcccggagctgcttacacacagtcctggacggcagccccgagaaaacccggcgccgccgagagatcgagaacatgatcctgaacgacccagacttccagcatgaggacttgaacttcctcactcgcagccagcgttatgaggtggctgtcaggaaaagtgccatcatggtgaagaagatgagggagtttggcatcgctgaccctgatgaaattatgtggtttaaaaattttgtgcaccgagggcggcctgagcctctggatcttcacttgggcatgttcctgcccaccttgcttcaccaggcaactgcggagcagcaggagcgcttcttcatgcccgcctggaacttggagaatcattggcacttatgcccagacagagatgggtcatggaactcaccttcgaggcttggaaaccacagccacgtatgaccctgaaacccaggagttcatttctcaagagtcctactgtgacctccattaacatggtggcctggtgggcgtaagtgaatttttcagcatttatcggatgtttgaagttggcaagacttcaaatcatgcattagttcttgcccagttcatcactaagggcgaaatgctatggatcacatgccttatcgtaccta

SEQ ID NO: 450719 - DNA, 1482 bp, Homo Sapiens
  misc_feature (323)..(323): n is a, c, g, or t
gggtccaaccggaaagtttaggttttccaggttacctcccttgccttttttctgggaatccacttcttttttgaaaggtttttgccagccaatttctaactaatctgggctgcacggagtttatatgcttcgggttagcttttcggggctgttgatatccaccatggttgcccagactgctacctgctgtggctggatgcgctgactgggcaggtcgttcaattaggacaccatgccaccacaccaactttcctgagtgcacctgatcataacttttcatcaggaacctagccgtctggagcatcatgacagtgtttctcctncaaaggtacagcttggggtgaaattgacataaatatttggaagaccactgcaatgagaatagccatgcccaccacaagccatccgacatgcttcaatgccagtgtttgcagtccaggaggtgaaagccttcagtccagcggtgagggcatgaagctcaggcagttcactcaggtccccttgaccaatgccttcgttaatccggtgataggtctccttcatgtatgcgcccacaaactggaaggcataggcagtggccaggagtggaaagagtttatactgctgggtttgaaaatccaaaatctgtggttctggttcacctggcttcatttcagactggtgcctcacagcgctgtatcggatggcaatggtgcacgccttagacagagcccgagcagcttctcccacaaggaaggacctgacaaacaccatggtcccgtaagtcagcttgttactcagcggtttcacgtatgtgccatcaggcttcacctgggcatacttcatcagcatgttttctctgggaatacgatggttgtccattttgaggtagccattgtctatctcatcataaccaaatttggggccgatgtcaccaacggtaattcctggcaaaggcttatgggtcccgatttcacgaataggtacgataaaggcatgtaatccatagcatttccccttagtgatgagctgggcaagaactattgcatgatttgaagtctttccaagcccaccaggccaccatttaatggaggtcacagtaggactgttgagaatgaactcctgggtttcagggtcatacgtggctgtggtttccaagcctcgaaggtgagttccgtggcccatttccgtctgggcgtaggtgccaattatctggagtcctttggatgaaagcagccatttctctttctgagcagtggtgccctgattcagcaaggtaggaataaacatggagtaattgaggcccacaggttccacaaaattgaccaaatgtagttttttaaaccacataatttcatcagggtcagcgatgccaaactccctcatcttcttcaccatgatggcacttttcctgacagccacctcataacgctggctgcgagtgaggaagttcaagtcctcatgctggaagtctgggtcgttcatcccgggaattccggaccg

SEQ ID NO: 450720 - DNA, 2733 bp, Homo Sapiens
  misc_feature (23)..(23): n is a, c, g, or t
  misc_feature (331)..(331): n is a, c, g, or t
  misc_feature (383)..(383): n is a, c, g, or t
  misc_feature (385)..(385): n is a, c, g, or t
  misc_feature (389)..(389): n is a, c, g, or t
  misc_feature (450)..(451): n is a, c, g, or t
  misc_feature (476)..(476): n is a, c, g, or t
  misc_feature (616)..(616): n is a, c, g, or t
  misc_feature (645)..(645): n is a, c, g, or t
  misc_feature (692)..(692): n is a, c, g, or t
  misc_feature (909)..(909): n is a, c, g, or t
  misc_feature (986)..(999): n is a, c, g, or t
cttttactctctcaacagggctntcccaacgcgccggcatcatgcgttcgagatccattctcccgccgcggttaacacgaggcgctatacacgagaggcaggcaaaggcgtgcatcgggttactcctttgagatcggccatatactcgtctccgctttacggggggtgggtgctgcgtggttagaaagaagaaacggagcgaggggtaattagaaattggggttcgaagggttatacggggcaatgtagaagaaaaaaagtgggaaaaccgaaaacgagccggtatggaaatgccggtagtcgcgtttaacctccctttaaagaggcgttnaaatgccgtagtacgccggggagaaatagcggaggggcctaaagggccccgngnatgngggtcggtctctcttcggcgtagataggcgtttgatggtgaggggggggtcaactgggctnngaaatgagtggccatatggtgtggnacggcgggttatcagacgactataatagtagtcccggggaactgcggctgatgaaccctcaatattgaacggtttgcgggataatttaggaaatttggcgcgtcatccgctgaaattgggttttgtttttttagaagaantgtaaagaagaaggggggaaggaggctangttttgggcgagatagcggggcgggcgatacaaaatagggggcgggnggtgtagaggagggatgagtatggagggtggaaagacataaaacaactaaggactggggctcacagagacgaactccgtggctaacacatgtattgttatggttggtatagaggcgaggagagtcatgtctagcatacttgctgcttcacttattatcgactgtggatatgagaaagagcattgttctgtgagtctgtgccccccgtggtagcgagnccgtagataataattttcctcgtcggtggattattgttttagttgcgcaaatatatggttggcttgcacaccggagnnnnnnnnnnnnnngggtgtccgctccgccacaggtatctatcaaatgaagaggctgtttttctccactactaaaccctttatgaaactagattggcccgcttatgtgggtaggttgttcgcgcgcaccctgtgaggggccctcttgcccgaaaaaaataaggctattggatgtgtataaaacacttccgggatgttttgttaagaccgccccctcgcttgttgagaaggactctatagtacctcgttgtgaaggccaattttatgatctgcgtgagggatgttatcctgggtcctggttttttaaagaagaactatttattattagagaaagtccagagtccagaaaaagaaggctgaatccagagtggaaagacagatacaatgccctaggagggtgcagggtcaagaggaagaggggagcccacgtgtcgaggcagcaagtctaggcggcagtggcaaagcctactctgttgttgcccaagtcgtagacggaatagtaggacctgaggaagacatccccgaggatccacaggggctggccgttctgggaggacaggtaggtgggctcgactcccacggtgcagtagccgttgttactgaggatataggaggaaggtggcagagggaactccacaccattgatgatgaaggtcaagctgggcagattctgaatgctgttacagttcacgagaaactgtccatactcatcctcctgggcccctgtggcctgcagaagagcactcatgtactgctggggcacagtgagcagagaggtgcctgtgtccacgatggcctggcaaccctcagaacaccagccggaggcctggccgccgatgaggaactcttcaatgccagtctgccagtagagttcctgggtgacaggcgcccagtagatctgccccgtgtacaggctgctatccacacccccaaagacgaccggtccccccgctggagccctgctggttggctgaggtagacgctgaagacggggctgggtgagggcgcccttcctgcaaccaatgcccagacaatagctggggggtggccgcgatccacgggaccaggagcagggtaggccccaggcgcgatggatgccatcaaagctgcgctatagacgaaacttggttaccaggctcagcctcacgtcaagcacgaagctccatggttagggagacctggaatgctctgggacagtcaaggattggtcataaggccgagaggaaggcccgggtggagggcgtgccgacgtgcctaataacgtgcggggaagaaagggacttggccatttgggttggacgtaacagttggaaccgacaattgggcgtaggggtgttacaaccgcgggatgtacatgggtgacgcgtagcctgggatactgtgcgcggtagatctagagagggcgccaaaaatgtgaaggagacgcggcgtgacaagggaccgggaaaatggtggagcagagacaccaccagggaaatcatcagacagggagagacgcgacaccataataagagaagtagggacgaaagggcgcccaggagggtaaacaaaggggagaaacacaaggaagacgacgagagaagggaagagagagacacgcacgaggggcgaaacacaatagagggcaagaaaaagatggaaacacagggggggaagcgagcgatcacaaaggagagaagaagaaggaggagagacgacgaagacgcagcgtatagcagcaacgcgcaggccagaaacgcgaacgaagga

SEQ ID NO: 450721 - DNA, 908 bp, Homo Sapiens
gcagaactcagagctgctcttcctctgtggccagttggggaccagcatcatgaagtggatggtggtggtcttggtctgcctccagctcttggaggcagcagtggtcaaagtgcccctgaagaaatttaagtctatccgtgagaccatgaaggagaagggcttgctgggggagttcctgaggacccacaagtatgatcctgcttggaagtaccgctttggtgacctcagcgtgacctacgagcccatggcctacatggatgctgcctactttggtgagatcagcatcgggactccaccccagaacttcctggtcctttttgacaccggctcctccaacttgtgggtgccctctgtctactgccagagccaggcctgcaccagtcactcccgcttcaaccccagcgagtcgtccacctactccaccaatgggcagaccttctccctgcagtatggcagtggcagcctcaccggcttctttggctatgacaccctgactgtccagagcatccaggtccccaaccaggagttcggcttgagtgagaatgagcctggtaccaacttcgtctatgcgcagtttgatggcatcatgggcctggcctaccctgctctgtccgtggatgaggccaccacagctatgcagggcatggtgcaggagggcgccctcaccagccccgtcttcagcgtctacctcagcaaccagcagggctccagcggggggagcggttgtctttgggggtgtggatagcagcctgtacacggggcagatctactgggcgcctgtcacccaggaactctactggcaggttggcctccgaccgagtcctcatcggcggcaggcctccggctggagtcctgagcgtcgccaggcatcgtgcacaccggcacctctctgctcactggtgccccat

SEQ ID NO: 450722 - DNA, 946 bp, Homo Sapiens
gttcccggtgctccagcaccctggccgcctccgccgacttctgcagcctcgatacaaagctctctacgtcgtcgaacacgtggttcaggatgtccacttcccgctccgcctgcagaaccgccaggtcaggaccccggggacccaggtccggggaggccgagtcagcgttgctcgaggtccccaccggctcaggcctctgcgcctcctctgcctcgggaatgggcttcgcctggggtcgtccgcggcccgcgccccgctctacggtgctgatcactgcgcggactgacgggcggcgctgcaggggcggggtctcagcggcgggcgagcggtcgcgctgcaactcctcctgcgtggccctgagcgccgccgccctgcgctccccgcggcccgagcggtaattgtgcagagccccctggatgtcctctcggatcagctccgccccgaggcgcaggccctggaagaagtgcacgtcgggctgcgcgcgctcgggttcctggcacacgagcagcagcaacgagcggctcctgccgggtggcatcaccgcgtcacagcgcacgatggcgcccagtgggtacgactccagctcctccttggaggccgggtcgagcagcgtgacatggtcgggagacactcgcagcagcatctcctgtgcccagactcggccctggctatccatgacggccaacttcctggaggcatcctccacggtatgcacgccatcgtcctcacccaggcagaacgtcaccaggtgattgactgggtactgggatacatcagccataacaactgtggagtaacgcttcctctgctcatagatagacttggcgcttggctttggggcaggttctgggcctgtggcggtgctcatggtgctgagtggtagctcccgcccacctggaggtgacctgcctgctcaggctctgccctgctctccgctgtcctttcc

SEQ ID NO: 450723 - DNA, 704 bp, Homo Sapiens
aagatcataggttatattatcttgcagtgttcactgcagtatgtcgctgatatccaaaatcaagttttacaaaatatcctcctcaaagccaagtctatccttctccttccaaaaacaaaaatgcgttactttcttatcccagaattcatctggctttaccacacaaacaagggacacctcagctggaacaacattctgtagcattacgactactgttttcaccacattccactgtgattttctgccatccacaatcacggtaaatcctctagccttacacttctcacttggaatgctgagtaggtagtctaaggtgacactcagctcatccatatttgtctgttcgaggcataatggaattgtcaaaatgaggccactccgtctgtcttttcctcctgaaaggaaggctagttttttcttcagaatgggtatattactgaggcctccattttactccagtgaacttccttaattccgacagggccggtcaccggtcacacaaaggacgccagtcgcgggcgctggacgcgggactcgccccgagagcagggagccacatctggttcctgcacgctggcaaaagagacccgctggaaaataaggactaacgcccaaacctgttgcacaattctgggtccctttcacccagaaatgaacaagggcgctcaggaacggaaaagcgcgcggcccggtctctccggacc

SEQ ID NO: 450724 - DNA, 814 bp, Homo Sapiens
  misc_feature (543)..(543): n is a, c, g, or t
ctggacgatgtgctcttatgcccgcaccacgggcaagctcaagacggacaatgttttctggggcgagcacttcgagttccacaacttgccgcctctgcgcacggtcactgtccacctgtaccggggagaccgacaagaagaagaagaaggagcgcaacagttacctgggcctggtgagcctacctgctgcctcggtggccgggcggcagttcgtggagaagtggtacccggtggtgacgcccaaccccaagggcggcaagggccctggacccatgatccgcatcaaggcgcgctaccaaaccatcaccatcctgcccatggagatgtacaaagagttcgctgagcacatcaccaaccactacctggggctgtgtgcagccctcgagcccatcctcagtgccaagaccaaggaggagattgcatctgccctggtgcacatcctgcagagcacgggcaaggtgaaggacttcctgacagacctgatgatgtcagaggtggaccgctgcggggacaacgagcacctcatcttccgggagaacacanctggccaccaaggccattgaggagtacctcaagctagtgggccagaagtacctgcaggacgccctaggtgagttcatcaaagcgctgtatgagtcagatgagaactgcgaagtggatcccagcaagtgctcggccgctgacctcccagagcaccagggcaacctcaagatgtgctgcgagctggccttctgcaagatcatcaactcctactgtgtcttcccacgggagttgaaagaggtgtttgcctcgtggaggcaggagtgcagcagtc

SEQ ID NO: 450725 - DNA, 876 bp, Homo Sapiens
gatgtaaaattttcattaggtattttcagaaagtcttagtgctgtttctataccttttatatgctagtcaatgtcagtagaaaaaaatggaacatccatttcattctcctgggcgatttctggaccagttagcccttgattattagcagtgggtatgctgttaaatgtttaacccctggctctccgggaatctgtagcttttgccagtgtccatggtaatactccccaccaggctgatttcaagctaccaacatgctatcacgaagagtggagttgagacaaggtgcccagtagcacaccatcatatatagtaattccaccacacaggtaccatggacgtaaattacctcaagagcatcaagatcaaattaggaagtgatatgcttggaatatttattacctttgttttaaatgtaattgatttaattataagtttgtatgatttgatttttaataatggctgcatttaataaccagctgtcaaaatgaaaattttacaatcagcttttctaagttggtatgagccagcttagcataccactacattagtataccaaagagagcaagattcaacttttccttttggtgtttgagaatatagataagctattgatgtctgcagcaggaatttaagagactttggactattaagtgaaaagcacgaaaatcctttgagcatgccagggaataacttgcagcttgttttgcttaaattgaaatatatctacatatagcaatgatcatggagctttacaatttcaacctatttttacaaacttcaatgaagaatgatctcaaacccagagtatggtccatgcatgaggtgacaaatggagtgaagcgcgcggctgtctccttccttcccatctgggtacc

SEQ ID NO: 450726 - DNA, 1298 bp, Homo Sapiens
  misc_feature (353)..(353): n is a, c, g, or t
agactcaaaaatagtatttttattgctggttatgctttcttaaaaataaaaaatattcttgatcgatgtgactttccagaatgttgaaacaccagtgaccaaggatcactatatatgtcccctaacaatgttccaccatgcttacttacatcagcattcagcaaaccagaagagaggctgggatattctaaggccaatgcactgagcatcaatattaacagaaccatgaatgatgcgacagattgaattgattttctacctcctctgtcccacccttacttcatcacacctaaaatgctttcacgtgtctgtttacaaggctacaagccctccttctggccacaggttggctngggtcacctcaagggatgttccttcattctgtagtgatttcattgcctcttctcaattaacgaaagttcagaatacagataactcaggatcatgtttaagttactgtacagacaatgctctgaagtcacggtaatgtttttacatgctgcttactgcttgacgcagtctgaggacgagaacagaagacagaatccccttggggcctgcagatagacgcagctaggccatgtacaggcagtaggctctgggctacagatgcacgaagcagagtccacagccaagcgcctagagggtggggctgacacaggagatagacctggtggtagcagtgacagaccacagtagggactaatgatccacagggggacaagcttgaccacaaagcagcatgggaaagttcctgggcacgggacaacgccaggcattcccaggaaggaagtgataaaccagtcttacgttgacaaccagttactactggagttcagtgcaggaagcccttttccgaactccctttgaccggatgaataaggggccaaagaccccccatgggaaagcaaccaggccacccaaggacaacgaaaagaacgagcacaacgccagctacagaggaaaacgatgacacctggggcaagcgcatttcaagaactggagaccccagcagaacaccaaacgggagacaacggcgggccccatggaaggcaagggggaagcatccccgacgaggacacgagctggtaaacacattcatcgcacggcctagcggaaattcacacatgaccaggaaacaagcagggaacacggaaaagcgcgcgggcgagcggaaacgtactaaaggagaggtgggacaaaaaacgccggcagagagaaaccgggaagcgagtccgaaaacacacgcggaccttgaacaatgagctagcgaaagaaaagctgtgagccgacacaag

SEQ ID NO: 450727 - DNA, 999 bp, Homo Sapiens
  misc_feature (332)..(505): n is a, c, g, or t
gacaatgataagctaacgtttattgagagcttatgtgttttagaaaacttacaacgttttatgatctttacacataaaaactcagactaggttagggtgtggcactcacctctggtacagaatttaagaaggttcaaaaactttggtaatagtaaacaatattttcaagacttaaaaaatattttaatatccaaaataatcaaattgttaaactacatcctgcagaccggcagcataattttgtaaataaagttttagtggaaccagggtgttgaggtcagtaagctcaaggcacaagtgcggggttctagcctcttcaaaattttatttannnnnnnnnnnnnnnnnnnnnnnnnnnnnnnnnnnnnnnnnnnnnnnnnnnnnnnnnnnnnnnnnnnnnnnnnnnnnnnnnnnnnnnnnnnnnnnnnnnnnnnnnnnnnnnnnnnnnnnnnnnnnnnnnnnnnnnnnnnnnnnnnnnnnnnnnnnnnnnnnnnnnnnnnnnnnnctcctcaggggcaaagacccccagttctgtgatgatgccaccagtgatgaggtcgtggggggtgacatcgaaggcaggattccaaactccaatcccaggtgctgcaatccggaccccattaacatcggtcagctcctggcccggtcgctcttcaataatgatctccttgccggtctccagacggaggtcacatgaagagctgggggcagccacgtagaacggaatgccatggtgcttggcgaccaataggccagctggtaggtgcccaccttgtcgggctgtgtcgccgatggcaaaccacgcgggtcagctcccacgaaccacaagcgtgacacgcccctatgggccaatggccagcaggcagcatgctgtcgggggaaaaagggtagcggggatctagtcatagaccagctcacaggccggagccgagactcccggttgtaaggccaagacgcatgagcagaagcgaggactccaagcagccaggctgtgcg

SEQ ID NO: 450728 - DNA, 1084 bp, Homo Sapiens
gttttacacaatgatttattttaaagcttaataggaaatcacaaagtatttaataaaaaatagttttaaatacatttttaaagtcttaaggaaagtctctatttataatcctcccacctccacctcccaagtagctgggactataggcacatgctaccacacctggcttaaaggtgcagttttaatggcagatttcagactccttaagctacatgatggctaagagtcagcttcaggacttaaaaaatgtacatttataagaacattgaggaaattcaccaaacatgttttgtaaacagttatacacaaacagtctactatataatgtgagagccagctttcaggatctatttaggaaaggtttaaatcctgtattttataatattattttataaagttactattactatgaaactttgcagttacacattctgtgtcacccttatgtgtcaccttaactaatatcaaggacaggtttgttaaaatatacgtattacactatatacatacatacacagacatagtgcttttttccccttgcataagtgctgcgttcataagaacatatgtaggtctaaggaacgaatcagagcatagcgaaaatgctgccttaattgtttaattaaatgttgtgtgtccacatggtctggaaatgctgcttcagacttctgcgcagcaacatagcttctctgcagatctccaatcttatcagagattgttgcaaaattaaaatgcggttcatacatatggggtgctaatgatgatgcagtttgtaatagtgcccttgcctgttcaacgtggcccttccgcatctccagcacagccaggttgtgtaggcctcggcgtggttgttgttgttgaccagagccagcctgaagcactgatgggccaaatttgtatctcctattcccacagctacatgtcccaagttgtaccagacatcagctgcctcttcttcattttcagccaaagaaagggcacgttcaaatgaggtcagagtcatatcatactgctgggcatagaagcaacacagccccagattgttaaaaagctggccgttataaatgcccatctgcagcagccc

SEQ ID NO: 450729 - DNA, 1208 bp, Homo Sapiens
agtgaagtcatcaccttattgatgaaaaactaaagtttaatagtcattgaatgggtaacaaccgcttgtagtctacatttaaaaattttaatcatagctaagaaaaactaaaaacaaataattctattaagaaacaacaaaaatgataaacatttaatacctaaatgtagatacttaaaatcctaaacaaaaatattaaagttaaaagggccttgaacatttgtttctaacaaatcatcttatataatcaattcctaaatagctcatatcctttgctttggtggttttatctgctatcatctaaacattaggtacagatacgaaacatcactcaggttctttttcaacatgcttaggcattataatgtgatctcatatcttatcctcaaattaaattttgctccacatattccacatgtatacagatagaacatccatgtgctgatccaactgttcattactttgggaatagtctgaaagcagaccgtagggcaataatagtctcaccagcagataaatgagaaatcatatgccgtacatggtacatgtgaactgaaggttaccaagatacacgaatggaacagacatacctggccatggcctagtgtgcatatcattgtgcagtcgcaagtgacgctctcgataaaaactgcattccagcgatggtatgactgaacaaagcgtgtatagccttaagtatgaacagaataagtgttcgtcttaaggtgacaccggttggagtaggtaatcgcgttgtgcagacgagaatagacatacaggatgctttgaagtcgtgtgcagcatcttgtcaggtgtcttagcatgatgggcagtcttaaagacatagactagaatcaaaggcaggtgagagcgtagtgtgcagagcgagtagatgtggacggaaggagaacgagaggggccgaccaaataaggggacactcagacaacaaagagggaggggcaagaaagggaataaaatcaacaagtaagcgaagagaagacaagaaggaagaagatgggacaagaaaaagagaccgagagaagaggccaggaatacaagggagaagaacagacaaagtcgtgggcccgcgctacgagactgagagacagagagagtgtcggcagcaggaggggacaaagcaaagcagggagaagaaatagggggggagaagagggagggacgggagagaggcgagcacaaggatagc

SEQ ID NO: 450730 - DNA, 1147 bp, Homo Sapiens
  misc_feature (423)..(500): n is a, c, g, or t
  misc_feature (1078)..(1078): n is a, c, g, or t
  misc_feature (1116)..(1117): n is a, c, g, or t
ctcccctcctgtgttccgcgcttccttttctttctctcgttgctgtttctttgttctccccccgcgtgtgcgtgcgtttgttcttctcgttctctcggtggtggtttgtgttttttctccacctccttgtgtggtctgccctctctcgccctcatttggttgtggggtgttctctccctctccacaggttttggcgcccgctctttctcctgcgtcgtttgctccccccttccgtgccgggtctgtttattaagcctcggcgccgcctccgtcgcgtcgcttatataatatatccctcgctctcattatgagggagccccctctgttttcgctccacatacttgctggctgcttcgctgcttggtgtctgtttgctccctcctcccgttgaggagagattcttttcttcgcccgccccccccnnnnnnnnnnnnnnnnnnnnnnnnnnnnnnnnnnnnnnnnnnnnnnnnnnnnnnnnnnnnnnnnnnnnnnnnnnnnnngtattaaaaataagtttattgatatcttgtcaccactgggagaaaggagggggttgagctctggaagtcagagacagcaatggtaggcagagaacccaacctgtacctctcccatcagaactcggcgcctcctctccctggggtatacacggctatatcctctttgtcatccgtattttgatttgtcttacaactcccacccgctccaaagtctgggttggggaggtggggagtcccccacgggtcaattctcttcaagtcaagaacaggaactgttagggaaggggagatgtgcagacccgagaggttccctccccaccccacatagggcaataataaataacatgaaattgatggcttagaagtcagggttaagggaggcagccagggcagacagcactgtaccagagaaaggggttgggggggcccattactgaggccccccccagagaatcaggcactaactagcacagggagtgggtgctcacatccctggagcagggagctagggtgcagctgggatgggcagagagcatcgcccccctcgactgcgccaagctggggagaggggttgcagncaggatcatagatagtagatttcacggagatttccganngccgcgccttttccgtgtagggaaacccgc

SEQ ID NO: 450731 - DNA, 918 bp, Homo Sapiens
tagtctgtatccagcgagtgtgttaatactaacatagtgtttcatttacatgtgtgtgaaacctgggtgaagagccagggtttctctcccccacccgcctcagagctgcttggtcctgtgaatcagagtgtaaaaccccctcttggaagcagacaccaaagactgaacttccaccgcggtcatgcggccctgcttcttcttgcttgtctagcctagatccaacatgagcacactgcaggcgaactgctttagcgatggggctctgagcgcgtgtatgacgggcctggcgtggccacgacacgcgtgggtgctgtcagggtacaagcccatccctgcctgcaaataaccttgcacagggtccttcctcattctttcctcttccttttctgtttagtgagatgaatggctcttctgctgtggctttaggggcagctggggaggcagggagctatttgggaacagcctggaaagctgaccctgcagaatctcccagaagccttggtgtggctatgggtacccaggctgtagaaatcccagatggtcctcttccagacctctccccaactccagctcacagtttcagcttcttggcactgaaaacactactaggggaagcaagagtccacttcaggtcttctgcttggcctctacccaccagggcttggactctggacctgccccagctaggattggggtttctgggactgcatggcctctggccctggagtcacgaagcagtggggagagcccttctctgctctgagcatgctaaccttctcacaccagcccacggtttccaggatttcagcccctaggatgcctgggccaggacaggagaaggaggagcagagggtggtgtttcgggctccaagaaagtcttcgtgaccttggacttgtcacttggcttccctgagcccc

SEQ ID NO: 450732 - DNA, 1177 bp, Homo Sapiens
  misc_feature (74)..(85): n is a, c, g, or t
  misc_feature (87)..(100): n is a, c, g, or t
  misc_feature (114)..(114): n is a, c, g, or t
  misc_feature (121)..(122): n is a, c, g, or t
  misc_feature (201)..(201): n is a, c, g, or t
  misc_feature (1011)..(1011): n is a, c, g, or t
gattgggccccgcgcccccaaaacgaaatgttctagaaaagcttcttcgagggccggaggccggccgaacaggnnnnnnnnnnnntnnnnnnnnnnnnnntttactgaccatcntaaaatnncagaggaggggccagcgggacctctgggcttcagcggcgtgaaggagggacccgcaccacccgctaaggcaggtaatgncaagaaggcactcgcgagggggacttcaagcccctcttctatttcttcagtataaaatcaggaggtatggggaaagctccaaagggccgagggaacgcagtagagagtttctctcccagtcctagtggaataaggaagaggtgacggaaggggctgcggtgctgggagcaagaaactgccaagctccaggacctgccctcacacagacacacactagcaccgtcacctgcctctccctctaataatctgcatccggggctgtaaggaagcccccgtgttcaagcccccatctcttctcccttctagctggtacgaagttggtaatcgccactctgggtgatgtatgcgaacccagggcgagggcctggtaaccacgttttctcaagtgatcttcatgtagtcggacctggatcccagagacggtgaaggtaggcggatctcaaacttgaccccgatggggaggccgagccctccacctcttaccttttccacactggggaggccaaagtgggctcgcatcaagtactccttgaccccccgggaaagacttaatactccagatcacgacgtttctctccaggcacatacttggacgactgcccacagctggtcttgaatctgggggagtcggcatcgctgggtacaggcacagatatctccacaccgttggccactgactgtttcttaccctgcccttggccttaccatgatctccacgcggctgtgggagaacttctctgtgacagactccaatccagatcagtggcttgaccctgggtgctgaggccggtattgacattgaggctccanagtcaccattcaagccgggactgaaagggaaatggtgccggtcgtagtccaaagcaagagagcccgccgccacggtgcgaattgcactcctcacaagcccactgatctgtccgtgctaggaccgcacctcaagagccccgccttaggccagcgcgcacggcttccg

SEQ ID NO: 450733 - DNA, 812 bp, Homo Sapiens
gaagcatgttttgagacaagttttatttgaaacaaaaggcttatttgaagaaattttcatttgctacaaaaactatttgtagacattctggagatactcatatatgggcaaaagaaattagagcaggcatgcaacagagcagaaaggatgctttatttgcaaaagagtggtgaaacatctaaaaagttgacattgtatatgattacaaagtaaagagtactcttgtgagagaagttacatgttcattgttaaggaaattatatgtaaatcacaaagatcatggtctgtgaataatgtgccatatctcacaaaatatggtcattggaatcttattaaaattatctacaggtgacttcagtttccattctccaccctctgccttaagatacgaagccttgacatgaccacatcccagtcagcataagctccttctagatggcggggatatctcagttcctgcttcatagctacgtcggccatgaagtaagcgccagttatcaaaagtaatcacatcacctggattcatcttgaaggtaaacttggattctttgctgttcatgaggtcaacaaactccttcagagcagcataaaaaggctgaactctttcaacaggtacatcaaaatattgtgtccctagttgcgttcattgaagttgatgcgaaccacttggcctttatcatctaactctataatttgtatgttattgattgtacagaaaaatcacagtaatccactccaatgtctgtaaagtccacaaaggtagaggacaaaatctggaatgcctgaggattatttttctttagtttttggca

SEQ ID NO: 450734 - DNA, 718 bp, Homo Sapiens
ggatagtagtagattgagatggaatattttccagcctcatcctggctgccctctagactccagtcctccaagccctcagcctagtgggtgtcatggatggatcctgggcggtagtcagacacggcttaccctgtgccagggagcgggcagaatgggcctgcagcttccctgcagaggaagcaggactgggtaagcagagccgggaagttgtgtggcccattacagcgggggttccccagggtgtcctctggcagggctgtgactgctgcaagctctgccttcaccagtagctggtgccaggacagagctctgggacagcaggcagaggccgagcctgggccacagctcagccactgacttgggtatcagtttccccttctgagaagtacagagtgagacttaaagaacccctagatccccaccagttcaacactccattaactgggaagcccagagtcctgtccgttctgccaagttcatcctggtggatcagcgggaggcactccgctagcgtgttctcttcttttccttattaataaaacacacaatgtcctagctcggggggtcggaaggcaaatgccctagatggtggggtcacgtctttctccttctccttcctccttctgctggctgaagcgatgacgtggagctcagcaaccactttgcaccatgaggcagcactgagcacggtagggcagcctggtgagaggggcctagc

SEQ ID NO: 450735 - DNA, 1226 bp, Homo Sapiens
  misc_feature (539)..(661): n is a, c, g, or t
gggagtgtatgtcgataggtatgcttgtgattatatacagcctggatgtggtaggttgctgttttttgtgttcgtggaatcgtctttatcgtatgtgtatattgttggttggtgtgtagacaggagtggatgtagtatgtgattgttggtgtgagtaagacaaagatcttgtggttgtttgtattttttggttgtcgagatttaatgtgtagtgtagtattcgtcgattgtgttgttgtttttttggatagtatgttaggttatgatgtaattggtctgaggttgcaatagagaacggcgagtgtatgtcattgttggttctgatgtgtgagcattagtgtgtgggtttgtgagtaggtggtactgcagtggatcactgttggtagctaatatgattattttggtggggaaggaaggggaatgatgtgaggggtggatggaggtagtgaggctgagtaaaagtgaggattcgactgaggtcaagggaaggagagggtgagtgtgcgtgcgtgtctccaatcaataagtagctgtgttgnnnnnnnnnnnnnnnnnnnnnnnnnnnnnnnnnnnnnnnnnnnnnnnnnnnnnnnnnnnnnnnnnnnnnnnnnnnnnnnnnnnnnnnnnnnnnnnnnnnnnnnnnnnnnnnnnnnnnnnnnnnaggattcatcacctaactttaatgctgaagcgtttggagatcattcggactaaccctcaatgttttacagttgaagataaatgatactggagaaggactcatcccaaatcacccgtcggtggcagagcctggacaaacctatgtctcctcccttcactcgtttggggttgttgctggactgcagggactcgaagtaagtagagaggggtacagggcactggaagaagaggtattttgcaggagtctgttttttcctgctcccaaatcggtgggatgtcagcgaaggatgggtctctggaggagaggagctaacaaggtcttctgaaaaccatcactgagggtgctgtggttgggaactcgaaaccttgccagttaaaaacgtttctgcgaatgtggtttctgagggcgaggaagccctcccccgccccagcgccggccccgcccgccgggtgcccgacagtaaccccgaggcgtgcggcagccccagctgtcttcaacgtagccataccctccatttgagagccgaaccgaaaccatcacaagatgaaacctccggactcccagc

SEQ ID NO: 450736 - DNA, 1243 bp, Homo Sapiens
  misc_feature (842)..(842): n is a, c, g, or t
cggctggtccggtccggattcctgggatacctgagtggccgggccccaggtggtgggcgcctgggtgagcgccgctccatcgactccagcttccgtcaggctcgggagcagctgcgaaggtcccgccacagccgcacgttcctggtggagtcaggcgtaggagagctgtgggcagagatgcaagcaggagaccgctacgtggtggccgactgcggcggaggcaccgtggacctgacggtgcaccagctggagcagccccatggcaccctcaaggagctctacaaggcatctgggggcccttatggcgcggtgggcgtggacctggccttcgagcagctgctgtgccgcatcttcggcgaggacttcatcgccaccttcaaaaggcaacggccggcagcctgggtagatctgaccatcgccttcgaggctcgcaagcgcactgctggcccacaccgtgcaggggcgctcaacatctcgctgcccttctccttcattgacttctaccgcaagcagcggggccacaacgtggagaccgctctgcgcaggagcagcgtgaacttcgtgaagtggtcctcacaggggatgctccgaatgtcttgtgaagccatgaacgagctctttcagcccaccgtcagcgggatcatccagcacatagaggccctgctggcacggccggaggtgcagggtgtgaagctgctgttcctagtgggcggcttcgccgagtcagcggtgctgcagcacgcggtgcaggcggcgctgggcgcccgcggtctgcgtgtcgtggtcccgcacgacgtggggcctcaccatcctcaaaggcgcggtgctgtttggccaggccngccgggcgtggtgcgggtccgccgctcgccgctcacctatggcgtgggcgtgctcaaccgctttgtgcctgggcgccaccgcccgaaaagctgctggttcgcgacggccgccgctggtgcaccgacgtcttcgagcgcttcgtggcccgccgagcagtcggtggccctgggcgaggacggttgcggcgcagctactgcccggcgcgtcccggccagcggccgcgtactcatcaacctgttactgctgcgcggcaagggatgcgcgcttcatccaccggacgcccgggcttgcgcaactgcagcgcgcctcaaacttcgaacttgaacccgccgactgctgccaggacaccgccgacgacacctccgggcggcgcgaaatccgccccgcatcaccaggcaaa

SEQ ID NO: 450737 - DNA, 1342 bp, Homo Sapiens
  misc_feature (54)..(54): n is a, c, g, or t
  misc_feature (74)..(74): n is a, c, g, or t
aaggaaactgctgcaacctcaagcaaatcacaagtcggcaattgtccgcccttnccccccttggggctctgganaagcccactggtagtcagcagagccttggagaagaggttctgcagctgatgaagctccttagcttgaaggtcctgagtagcagctgagtaggtatgaagaaatcgggacacctgctgagcattgagatggagagctgaggcttgggctaaagcagaggagtggggctgggagtcctcaccccctgagaatagctcagccatcacttccccgatattcccaaatgggatgggcaggcccagcagcagggccagcgtgggcacaaggctaacttgaggaatcacctctggctcctctggtggggtgctggggaagactgctgtggggctatacagaaagagagcagctgagacctccagctcactgtcccctccatggtctccatttgtggtcatcccatggtccccagccactaccagcagtgtgtcattctccagacgctccacaagtccctggatcacctggtccatctggctaagtttcttggccatttcagggtggtgagggccatgcttgtggccacagtggtccacacccaggaagtgagcaatcagcacgtcccattcaccactgtccatggtggggtagaggtgttccaggatgccattgtccactgtgtctaggtctctgacattgaaggatgggaagaagaaagctttggagaaagcaccagggaaaaggtctttccaggtatcatctctccatgaagactacacgcccttcctgcactggtgagctgcttaatgagattgtcttccactatggcgtggctggcgaagttactaccagcatcaataaaggtaggcagtgagccagtggtgagggccttgaggcgctgcatggtgttggtaggagggtcaacctgagatcggtagagccgggcatggtggggctgaatctccaggatcctctgcaaggagcttagtttgcccaggaagggtagggagacaggaggctctctaggcacgtgtgaatgctggggctgggcgaagtcaaatcgcagagcatctatcagcaccaacacaacccgcgaaaatcgggaagccatccagcaggccccaggtttcccttggctcccccatggcagggacccagggcctgggggctcttggcagctgctatggttggtgagctccaaacgggtgagcaggaagccactggtgaagagggcaatgccagcgtagaagaggaagcagacccaggccaggaagagcaacactgaggctttctgcatcctgcaatggcacccggaagtgcggcgcgcggcgcc

SEQ ID NO: 450738 - DNA, 1028 bp, Homo Sapiens
  misc_feature (774)..(806): n is a, c, g, or t
tcacaggtgcctgtgaaaacttcccagggcccgcccgtgcccacagcatctgaaaacatgggataagtctaccatcaatgccccaggcggttcaatttctgcccaccaccttctcacccaagtcagtcagcccgctgaatgttgttgtaagaaggagtggacgcccttagcggagctctctgccccagggtgtgttgcaggtgtgggtgagcgtcaggtagcgcactcccagcatgtagaaggtacgtaagatggagaggctattgtccagcgagtggccaccctctacaccgatgaggcaggccaatttctgagtgtcgttcagagctttagccgaggtcacaagctccagctcagaataggaggcacacatgcggcgtatgaggtcaatctgctccagggtgaggcgcagggcatcccggtcctgggtctggcatggcacataggctgaccagaactgggcgcccacgaggccatctctaagcctgtccaggctggtctggccgtagctgaaattgcgcaggttaacatcctgtagccctttctggtaaacctgccttaggaccaggggcaggtcgttgtgccgtccacgagcgggaagtcccgcaatcagggccacagtgccatgctcttgcaggccactgggtgctgggactactgagtgtggtcgagggagcgtaggtgcccggcatggtgtagggctctgggggcgcccagcgtggtgagggctctgggggggcactggcgtggtgtaggcacaggttacaggctggnnnnnnnnnnnnnnnnnnnnnnnnnnnnnnnnnggccaccgaccaaacgtgccagggaccctcgaggccggagggctgcatgttgtgcagggccgggcaggcaggcaggggtggcagtcagagagcctccttgaggaagccccggcctcgtccaggtcaggagtaaggggcctgaggaaagtcactgccacctgggttctgcagccacactcctcttatcttgtggctcctgtggcttgagctctcacagaaacc

SEQ ID NO: 450739 - DNA, 1083 bp, Homo Sapiens
  misc_feature (282)..(342): n is a, c, g, or t
  misc_feature (441)..(451): n is a, c, g, or t
ccgggggagaaccgagggccccggttccaaaagccagtttccaccaaagcaccccccccttttaaagggggggacctttttgctgggaggtgttttaagaccacaggcccaccccaacggtgaccatgccgaggactcaacattaagtcccccatgaccccagggcatgccatgcccacattccactgtgactttttcagtccctaatccattccatccaccttttttggggagataccactgaaaatgtccccccctttgcaaaaatgcaacacacacggnnnnnnnnnnnnnnnnnnnnnnnnnnnnnnnnnnnnnnnnnnnnnnnnnnnnnnnnnnnnngcaggtgtacacacacacgaggcaactccgagacacctcattcaccatgactcgaggtttttctatacgtgggacgaggggcaggttcacactaggctnnnnnnnnnnntcatttcccgtcttcgttggcaggtgcagccccatcttccaagttgtggctttggctgccacaatgtcctctcatttattgaggtgaggactgtggcattttctgcagcacctccaagattttcgtgtacctttgtgtcaatgttttttatgcctgctaatgtcgtctctaatctatcaatcttgctcctgaccatggtgatgctctgctgaacggaatcccagcctctcttctgtctctcttcgcatgcttgtacggagtttgagacattccaaagctcccttgttaaagcccagcagctccttggacatctcagcattcttcaccatgatgaaggctgacaggatgatgcagaggacaaaggccagggccaggaggatgtacaggctcaggatggctctgtacaaccagcaggggacctgggtggagtctgagggcggcctgcactgggctgggacttggctcgtgggtcgtgaatgaccaccctttgcatggtcctgatttttgaaggccaaggtgatattctcatagtctgggtcatgggcaccttgattcttggctgagaccccctgtttcttgtccctgaaggctggtgcttgcatcttgacatcccgggaattccggaccggtcc

SEQ ID NO: 450740 - DNA, 1342 bp, Homo Sapiens
ccctgttgttcgaggggccagggctgaaagaaggaccttggggcccagggtataaagggaagcctgtccctgggacttccctggggcccccaggaggagctcccgatgggcgaaggcaggaacaaaaagccctatgtctttctttatcaccactgtaatccggaatctggtttctccctcccggaggccttttgagcagctatccctgtttggtgttagaatcaaaaccccaccgaggcatagtgaaagtcctttccctgggggaggccacagtgctgtattccaccttccacctcccttggtggtgctggcttttcctgcagaggccacatcagcagctccagatttgcgtagtgcagctcactctgcgtggcagcctgcttggggttctgggacagctctgaatggtcaccagctttgatccatttctgaaacatcctccaggctagcagggaggcccccaccaacagaagcagcaacaatgccagcagggagaggagcagcgggagctgtgagttcaccacctcctcagtttcctcctggatgctggcactgtgggtggcacccactgcaaacagggtagtggatgatacaggtggaaatgcagttgtgattgttgaggtcttggccgcagtgatacttgcaggtgtcattgacgttgatgccgggaacacggacacctcaacctcgacaacgggatcatgaaagtctcggagccacggtgtatccaccccacaccagtaggtgcctgcatcctcctctgtgagattctccagggtcactgtgaagctgaggtttgcaggactgtccctgatggacactcggccgttcctttttcctgctgaccctttggtctccacaatcttgtcacataggaaaatctgtggtggtctgcaccagtatttgttgagggtcctgtgttccttctcatagggacactgcacactcagggatccccccacggggcccgccacggtcctgcatttgctcagagcaaaacatcctgggacccagagaagcaacagagcccaaggcagccacatggtcccttccccagcacaggcggcacttgcagcagctccaggccctacctggacccgaggggaaagtcacgcctccaaggccccgacttctgcttttcttggtgccgcgctgcttccttgttcagcttcttttggttctattcctggagccggtcagaaaatgcaggaagctggtgagccccgactaagactccctagaaacggcacgtcctccttaacgctggttgaggctgcaggttcttcggctatttctagtgatgagacctctccctgtagtgactccgtagcttgcaggactg

SEQ ID NO: 450741 - DNA, 2411 bp, Homo Sapiens
  misc_feature (56)..(56): n is a, c, g, or t
  misc_feature (504)..(504): n is a, c, g, or t
  misc_feature (521)..(522): n is a, c, g, or t
  misc_feature (600)..(600): n is a, c, g, or t
  misc_feature (602)..(602): n is a, c, g, or t
  misc_feature (738)..(738): n is a, c, g, or t
ggtttagtaattaagggggggcccaccacattccattcccctccccctcccgtctngcttcaccatctttctactcatttacacgcagacaaatgagtggtggcgcggtaagccgtccgcgacccgacagtacaggagtaaggatgagcaaccctttttgcctacatcctcacaccgccatacaaggcgcggggatgcgcgtcgtcctcgggcacgggttgtggttagaatcgtcgcggggtgtgtgtattagattgggggatgccgtggtggcggagggcaggtgacgtccggctcggtaatacagtagaactcccctccgaaaacccgtcacacagtccttcccctccgcctaccgccaagggctacttgaagttacccctaaagtaaacgtgtatccatgttgaagggaagacggccccccgttcccttattcaagacctcacctggtgagtggtggcgcgcccccgccggttccacacccttccagctgttgcgtctgcnggtcgaacctataggannaagtttggggtgtccttcgggtggggggaaactggtccagggaagtggcggtttacgcaactttctcgtgagggggtnanccttggtcgtcccttccggtctttctccccccattttactcttcaaccacgaaaaaaaccaacttcttggctgcttttctttctccctcctcatgccggcccgtgccgcgggcaacaggcccctgcaccctattgngtctgtggaacctctctctccttttactctctcaccctctacaccacaccctccgtatcactgtgacagtagcgggggtttagttgtaggtgccggttcttgtttcgtccgttagtgggctcgcgcggcacaccctcggcaaccactgcgggttttcgggtgggtgggtcctcccgaccattcccccaagcctatacaccatttgtccattttattaacaggttttgaagagcactcatggaaatcggccaccactcagcaaaagtggaaagcagccgcattaattcttccactcctggaccccagggagtgttgggcccattatggtggcaaagggtgcaggcggagtccctagcccctgcttgtcccccgtgaaaacgggtggaggaagcagtgccaggctcctggagaaatggaagggtgcagggagggcatccgggcactcagaggtattgcttgccggcccgaggattagctggccggggcgttgcacatgagacgtggactcacagctcagggcgtccatgtccgtcaggttcacatgtgacacatgaggatcgggcacagggaaaaggctgaaggaggctcacaaaggattccaggagatgtggagagagcagcccgggagggagtggtcaggaggtcattccagtccccccagaggggctctgttgcagcacagggccttgatggacagcagatgttactggttctcacccttgggccaattctgcctgcttctagagcttctctgaggtctgttcacccagaggacggcacccagcatgctcaggagcaggggcagctccaagaggaccaggagcaggaagcggacattgctgaacagggagccagggtgtgggctgggttcggggctgtcctttctggtcacgctgggccaggtgtgcacgggcagcttcgtgggaggacctgaggtgcccatggagctctgggggctggaggctgtggtcgtcccggccgggaacacggacacctcaacctcgacaatgggatcatgaaagtctcggagccacggtgtatccaccccacaccagtaggtgcctgcgtcctcctctgtgagattctccagggtcactgtgaagctgaggtttgcaggactgtccctgatggacactcggccattcctgtttgccctgctgaccctttggtctccacaatcttgtcacatcggagaatctgtggtggtctgcaccagaatttgttgagggtcctgtgttccttctcatagcgacactgcacactcagggatccccccacggggcccgccacggtcatggggtggctcagaggaaaatagcctgggacaagcaggaggagcagagctgaagaccgccacgaggcccaggccctggcagtcattcctgtaacacgaatgtcacctgccactgtgcaagaccccaggaggggacaaaatgtaatctcctcccagcagatctgagcttcgcttctgcttttcttctgctctctgcttccttgtccagccctgtctcaggtctgaggctggagagggtcagggtacaggaagctcagggagagagccgcctgggctgaggccggtgctgacagctctgggatggtgctagtggctcctctcaaccctgacgtctggcaaagtccagggtcccttgggtggcgatgcagccacttcccca

SEQ ID NO: 450742 - DNA, 1224 bp, Homo Sapiens
cagcccagtgcaaagtccggggtagcccaccccaggaattacggggaactgttcggtggtaggccagctccagggatttcctttttcagcctttcactgtctcggtattcagctcattatcttatgacagttctggactcagcgccccggaaaatagaggcttccccgagtacaccacagcaccccgtgctttccagtggcctaggcagtatgtgaacttagaaagggtagccctgcataaactggctgatgaggtcatactcaaaaacctggcggacatccgtgccaactgtgtcgattctccacgtggtctcctgggtgtaggggtaggtgggcttggggtctcgcatccacacaccatacttgccagtaattgtttctgcctgtttctcagcgtgagaggctctcctacccaaactagttctccacatccggtgtctccctctccactcctgagatagccagatgggctctccttcaaaattcgggaagcaggaacttcagttagctcggacttcagttcctggaaggccaaagtgtccaaattccacgtagaaacttctctggagcctggtggcacagcccgagcagtgtctcgggtctggggacactggccccttctcagccttgctacctcctggctgctgctttccaacctcctggccagattctcattttcttgccttagtcgcttcttctcttcctccagaactgacttgtctcggaggaggttgctgtaggcagtctccaactctctggtttgggtttccagctggtcccgctcccgcctcagggtgcccagctccctctgcagcccctcctgggtctcctggggcctggcagcctggtccaaggtcaattggtggaggaggctctccagggagctgagtcgagctttggtggcctccaggtctaagcgttgggtgctgctgtctttctgtaagttatggatgactgacatggcctggctctgctctgggcagctggattcattgggactggccacactgaaggtatactggcatcggccactctggtcattggccttcctgagctgagctgtcctggcccccacatcccacaccaggcaggccagaagcagcagctggacagctggcatctcaggcccaaagctgcagcaacgtgcacagaagaacctcattgcagaggcttggtgaggcttcctctggaaagctctgctgtgctgagaggtgcctggatggg

SEQ ID NO: 450743 - DNA, 1321 bp, Homo Sapiens
gtcgtgaggtgtctacaggatcttatgtcatcccccttcgtggaggaggcgatagaggaagaagggcctggctttgcatgaggctctccgcatggaccctctggaggccatccagctggaactggacactgtgaatgctcaggccgacagggccttccaacagctggagcacaagtttgggcggatgcgtcgacactacctggagcggaggaactacatcattcagaatatcccgggcttctggatgactgcttttcgaaaccacccccagttgtccgccatgattaggggccaagatgcagagatgttaaggtacataaccaatttagaggtgaaggaactcagacaccctagaaccggttgcaagttcaagttcttctttagaagaaacccctacttcagaaacaagctgattgtcaaggaatatgaggtaagatcctccggccgagtggtgtctctttctactccaattatatggcgcagggggcatgaaccccattccttcattcgcagaaaccaagacctcatctgcagcttcttcacttggttttcagaccacagccttccagagtccgacaaaattgctgagattattaaagaggatctgtggccaaatccactgcaatactacctgttgcgtgaaggagtccgtagagcccgacgtcgcccgctaagggagcctgtagagatccccaggccctttgggttccagtctggttaacatttgcccttggggatactcctgcacaaggtctcctaccaccttctgctggacctgtgcttgggcatcagcaatgagtatgccttctattgtgctttgtttttgctgacttttctgcaccctgtttcctttggatattcagttctctcaacctcaagattgagacggtggtgggtatgcttctccacttccatatgaccttcatgctgttctggaatatcacatgctacgaggtcatccttcacactacttgtaagccaagcaaatgatactgtagattgtactgcctttatctgcactgcttggaccctgtttattcccagggcctctgaactggttgctgtcacttggatttctagctttgggagcctgttccacctactcagctctgcattgagcagtatgggcacatgccctgtggacagttactggacgttaatgaactcagaggagaaaagcagtgagccacttgttctgtgtgatttatggtacttcattgctcttccttcacctctagtcactttctattgctacctgccctacattggctcctgccaaggtcccatctctctcgctgtggaacagtagggtaccgagctc

SEQ ID NO: 450744 - DNA, 462 bp, Homo Sapiens; identical to SEQ ID NO: 151592

SEQ ID NO: 450745 - DNA, 1412 bp, Homo Sapiens
ccgcgaagtggaatgatgtactgttctctgttgcgtataatggcgattggaaatatgctgagacgagctcctttgtgctttctctgtatgatgcgttcggatttatattcctccaatgcgtctcttcccacgacgggggctgtagtatttacctttataaataagacaaaagcaaaggacagtggataatactactaaagagtaagcattcagtataaaaaatcgttagaaggatgtatctactgtggtctttatcgcggtttcacccgttcgttgctgagcttgcaacgagggggaatgaaatataaggggcctcgctgtctacatctcgacttgtgtcgcttgaccggtgcggagtcggcgggggacgtggtaatatcgggttctcgggggaaaagggcgaagaacaataagcgttggggtattctttattatagctgatatatcgcgtatctgtttttgggcggcgcgaaaaactaattctccacccacttagtggttccgaccgcgctcgtcgtggcttagggcaaaccctgtgggggtctttcaccagtacccggcgctgtgggcgggatccaactggaggaagggggcgatcaatttcagggccgggtaagcgcgaccagattctcaggccgtgccactctaattttgagcacggtggcacccggtttcccatagtatacagcttcttgatgctgcggcgacctgcagtatggcaggtgcagtcaattgttgctggagctggtgaatgatcttcaccgggcagttcccaattcctggtggtttctttaaccgagtacagatgttccccacttcaagcgatttattgaaatgcttgctcgtgtgtgctgcactccggcagggtcagtggagaaggtggggcacagaaggagtagtgaggtgcctctgtcccggtttgtataggggttgttcctgagaacccttgctgctcccactggagagtcccgcagaagttggggcctgcagagagccccagatcgggggcagggacgttgggtctcggtcaggtcttcccggtgctctggtcccgcaggagagatggaggctccagctgcgtgggccccgcccggagccaccgctcttgtcgcacggaggtaaagctcacggggcgcgggcgaaggcaccagcttccccagcccctcctggccgatttccccattgggatgcccgctcctggccgcgggctgctgggttggcccagcctggggtcctcccgccaatccacagcagggctgcgtgggggccccttcctcaccctgctcccggggactggccttgccctccacagcctagagcaccatggaggggcacgcacaggagttcgggggtccggggggcggactccacctccggcggctccgcctcgtgccgtattcgccacccaggcc

SEQ ID NO: 450746 - DNA, 1320 bp, Homo Sapiens
tgaaagtcagcccagtcaccaactccgacgccgaagcgttacactggaagactatcttaggaggagcaagcaaaagagtctaatgacaaaatacaacatttctatacacatagcacagtattccagcaaagagtctacttcttaacgagaagcaactcaacagatatccctctcgaccaggaagatggaagtgctggaagagaagtgctcatctctcacacagtactttggatggacaggagtttctaagtatcatggctaccagacaagctgtagagaatgatcaccctggaacaatcaagatcaacctgtcgcctttgtaagcagctcgacatccagatgaatacaaaattgcagcccttgtctactatagctgtatcttcataatcggattgatagttaagcatcactgcattatgggttttcagttgtaccaccaagaagagaaccagggtaaccatctatatgatgaatgtggcatgtagctggacttgcatatttataatgactttaccctttcgaagtgtatcattatgcagaagatgaatgggcatttggagagtacttgctggcagattcttggagctctcacagtgttttacccaagcattggtttatggcttcttgccttgtattagtgctgacagatacatggccattgtacagccgaagtacgccaatagaacttaaaaacacgtgcaaagccgtgctggcgtgtgtgggagtctgggataatgaccctgaccacgaccacccctctgctactggtctataaagacccagataaagactccactcccgccacctgcctcaagatttctgacatcatctatctaaaagctgtgaacgtgctgaacctcactcgactgacattttttttcttgattcctttgttcatcatgattgggtgctacttggtcattattcataatctccttcacggcaggacgtctaagctgaaacccaaagtcaaggagaagtccataaggatcatcatcacgctgctggtgcaggtgctcgtctgctttatgcccttccacatctgtttcgctttcctgatgctgggaacgggggagaacagttacaatccctggggagcctttaccaccttcctcatgaacctcagcacgtgtctggatgtgattctctactacatcgtttcaaaacaatttcaggctcgagtcattagtgtcatgctataccgtaattaccttcgaagcatgcgcaggaaaaagtttccgatctggtagtctacggtcactaagcaatataaacagtgaaatgttactgaattaataaggttcttccatttcaaatccc

SEQ ID NO: 450747 - DNA, 808 bp, Homo Sapiens; identical to SEQ ID NO: 151595

SEQ ID NO: 450748 - DNA, 825 bp, Homo Sapiens
gacgctgctaggggctcaccaaaaggcacaacctgctgcatcgtcaatcctgcgaggcactcgtgtcacgacctgagaaagcagtcaccagctggagactgatactgacatgtgcatgatacttgtgtacaacgctgaaatctgctgaataggctactaggccatctggggctctgctttatttctgccttccatatcttgtggtcctgcattcttaactggtgtaatcagatttgcatccagaatactagctatacaggagtctggaacagacagttttctagttttccaacttctgcgttgtcaggaaggcttactacaaggaggaagtcgcatgagtgatagctgatcctttcccaggcacttcatcttcttaaacgatagtatattacttacaattctagcccattcttgagtggcgtcattgtccatttcgtgtgagcttctcttttcataatggcctgtagttggaataatcatagggccaagggattttaacatctgtacgtaacttttgtcctaggttagcttgtatctctcccagctcccataactgctgctgagacatctatgtttgatatcattctgacgtcaacctcccctgcaagccacgaggcagggagagcacctcacccaaagcaaccagtttattggctggtcagcaacctgtgatttctgtagcttaaaaacgatgagtggggcttattgtcttttgaactacgacaaaaaggaacagaatttccaattgggggtgggagcttcagctgagaggttttgaagtgagttggctgtattctcttgccagaccaaatgttaaatttttca

SEQ ID NO: 450749 - DNA, 683 bp, Homo Sapiens
aatgggaaagattccgaggatgtctcttctttctgagtatagatgactgtaggtaaaatacatacctataaagagcatcatgagatatattttcagcacatatgggaaatagatggataagtcaaagggcagcttggtggaataagtgccaaatgattcaaataagcagcgattgatagatggcaaatgcttcagcaagaacacacaaaggataaattggcatccatagtgtttgactgagccatgtcaagacagcataggatattcctatgactgataacatgctataagtgtacctaaccatatccatagattccaaagacgaataaacacacccacatatttctcttggacttcctcttgactggtgatcaccacaaaaggatgattattctttctgtgagctgcaaaaccttgggagaagatggtttgactcaatgccacatatatgtgcagcagttccaggagagatacggattggcaagtcgcatcacagtccatagcataaaaagtgtcaaccattgaatcttttccaatgaaaagaatctgactgtcatatttgtaaatatccaagagtggccacagaactggattaagtaatagatgcaaagatacgcattcttcctatacctgggctgcagccaggcgggcagcgccaggccccatggccgccgccgccaggc

SEQ ID NO: 450750 - DNA, 837 bp, Homo Sapiens; identical to SEQ ID NO: 151599

SEQ ID NO: 450751 - DNA, 770 bp, Homo Sapiens; identical to SEQ ID NO: 151600

SEQ ID NO: 450752 - DNA, 268 bp, Homo Sapiens; identical to SEQ ID NO: 151601

SEQ ID NO: 450753 - DNA, 914 bp, Homo Sapiens; identical to SEQ ID NO: 151602
  misc_feature (885)..(885): n is a, c, g, or t

SEQ ID NO: 450754 - DNA, 883 bp, Homo Sapiens; identical to SEQ ID NO: 151603

SEQ ID NO: 450755 - DNA, 751 bp, Homo Sapiens
tcaagttgctagggatatgctttggtaggaggcatgagggcccgggctgtctcccgaggttgggcttcactgacatgagttgctgtgggcatacagctggtggcccactgtccgggacatgcaagatccaggcgcagaagactcgtcagaacgctgcacgtggccacgtccttcaggtggactctcgttggtggccggcgtcggctggccccctcgcacccggtcccgtgtcacatgctccagggcgcagcttttgtccacctttacctcagtcgaaagccttgtttttggccttcggttaatcccttgcattgagggctttgatccaggattccttctcctccccggtagggtgcctggaatttgatagtcgctgaccttgttgccctggggatcgcagcaggataaagcggtgttttcgcttgaggagggcacgaaggtcctggcacttctcatagctgcccagctgccacagtctccacacacttctgatcatcctcattctcatagaccagcagctgggcctggcagaggagcagatatcggtctttgccagaaacccacggaggcccccactgctcttcttgatccagccagccttgtcacaccatctgtgctcccacgaggcttctcaccggcttccttcacaccctcctcctccatggcgagtccgccgaggtcccgccgctccgccactcgcttccagcgccgcgcgggctctagccaccgcgtctacgcccggccaggcggc

SEQ ID NO: 450756 - DNA, 868 bp, Homo Sapiens
ccaggaacaccaaggcctccccggagcccgcctggccccttgtgtggccttccaatgccgtcggcgtcctcctggagtcggcatttcctgaagcttcaggactctcatcgcgtgacacttgagctcacctctttcattctcaatcaggcggtcagggtctgctctcctaggcggggaggccagtttctcttgtaaactttcaatcactttggaagggcttctaagtctcttttcagagcctgccacacttggggttctttctacaaaatggaataaagtggacctgaagggtggttttgtttccacatccttttgttcgaagaacttggactccaaggggctgggctcaggctcagggacagggtctgtgctggtgacaaccccgtccacatctgagtgctcaaaagcctgaggagcccgcctggcactgtccctgtcccctacaaagagagggctcttggtccagccgcacttcctcctgccataaaaggcatcagtggacaccctggggacatctgccggtgctgggcgagatagcaactcttcctggggggactctggggtgcaggcacttgcatcgggctcagcaggctggttctgtcccgctctccggatgcccggcaggagggactccaccgccacctcaatgcccaggatccttgcagccctggcttgcaaggactcacctggggggatttctattgtgcttgcttcacccaaagacccctctagctcactggcacccttctctgcactcgtgcttccatctgctgagcagaaaggtgcaccgccaccttcttccacgcgaaagcggcccggggatggaggccaggcacgtgggtgccaggctgcagctcctcactccagc

SEQ ID NO: 450757 - DNA, 726 bp, Homo Sapiens
ccaggagggactcccaccggcacctcaatgcccaggatccttgcagccctggctcgcaaggactcacctggggggatttctattgtgcttgcttcaccctaagacccctctagctcactggcaccctgttcttgcccaggggtgagccccacagaccgtaagtctggagctgagagccctcggttcttgttagacagggacagtgggagccctgcccccctctctccaccactgtcaaacttccgagggaccgcttcacttggtttcacagagctgaaagcactggtgattttcggactttcctggggctccctaggttcagctggataggacgcgggcagtggttttgcgtcacttgatcttgaagacattctcgtcacaggaaatgggctacctgccagctcgtccattccgttgctaacctccaggtgtcccttctctgcactcgtgcttccatctgctgagcagaaaggtgcaccgccaccttcttccacgcgaaagcggcccggggatggaggccaggcacgtgggtggccaggctgcagctcctcactccagctctcagacttactctcacctcttcccgacctacacacagggctctccggcacccacatccttggctgtggctcaaccctcatttccgggctgtttccgcggaagcccacatcctcctgtctgcagtgagcacggttctcctgctgcggctccgcctcactctcctca

SEQ ID NO: 450758 - DNA, 719 bp, Homo Sapiens
cggagcccccaagcccggcccgccgctgctgctgccatccccaagcgggggccccaagcccaggaagcaccccctccagggcgagcgtagactgcagaggctggggggacaggcccgggcagccagactcctccgtactcgacacgcttggagggcggcacgatgctgacactgaggttgcccaggctggacgacttgtggcggaaatacacactgaaggtaccgttcacatggtccacgatcttgccggtcaccagcagcgacaacttgagggtatgcacccggaagtagaagtccccccagccgtagatcttttttggcgcgcgccgccttgatggacggcgttcctcttggtgcgctgcgcgggcaacgccaccggctgcccctgcccgggccagcgcccccgtgtggttggtcggtcaggcccagctccaggcgcggcccacgcctaggccgtccgtagaccttggctctgggagctgctggccgggggcacccgctccggccgcggcggggcgcagccccaggtactgcggccttccggactctggtatctgggcactgacggccttcctaaggagccacgggccaaagagcaagaggaaccattccgggagcagccgcatcttctctggcggcatgagcggggcaggctgggcgggtctcgggcaggcggagccaggcctaggacgcgggctccggcggaggcgggcgctgcg

SEQ ID NO: 450759 - DNA, 836 bp, Homo Sapiens; identical to SEQ ID NO: 151615

SEQ ID NO: 450760 - DNA, 886 bp, Homo Sapiens
  misc_feature (702)..(736): n is a, c, g, or t
ggtagtttatgtaacaaattcaaagtgaaaatcatgtttacttttacttatacttatttgataaaaatatttttgaaacgatagtacttattttattatttgatatttcagttcctattcaattgtggcagattttctctgtttcacattttagattggcgttggtaatagaaatgtcagaatgttcaaattggccttcacgttgtcggagtgaacacattgacacctagctttaagactgatttatctgttggtgtactgaaggtttccatgtaggacttcaaatgtggaaaaggaaaagcagtcaggaaaatggggcattctttggagagtcacgcgttttgattcggacatttccgtaggagctcggctcccagtgttgtgttcctcggtcgaaagggtctctgctgtttggggactcactggcctctcctagggactcctttgtcttgtgaaccccacgctgttggattctgtatcattatgctgaattctctgcacagttttccctggccaacctgcccacatccttggagatttgctttgccagtgggaatccttacattggctgtttcacagtagacgggacgaggtcagcgggagtcgtgctcctaacacacacattgaacgaaacagaagatgattgaaagtgtgaggaggctcgtgtgcaagggagaacagggttactatacatattagtgnnnnnnnnnnnnnnnnnnnnnnnnnnnnnnnnnnnggtcatatctcagatgagagtcaatgcaaactaggtgcacaactgctgacattcagagtctggattgaacctctctgtgcccattatctctgaccgtgcaccctggtccagcgagcttttgaaagcctgaactgtcaggcactacattcc

SEQ ID NO: 450761 - DNA, 832 bp, Homo Sapiens
  misc_feature (609)..(678): n is a, c, g, or t
ggcagcgccgggcaacaccgggcggccctacccgtggcgggcgcacactacaagagatggagcggcgcggccgcaagcggagaacggcgccgggaacaggcgcggatggcgcaaaaacgggacgacagggctcgggaagcgggcggtggggcggggggccggcgattgcggcgggagggccagtcataagcgcccacaccggtgtgcggtcggtcgcggcttcccccggcgcaggcgcccctttatatgcaaggctcgctcgggaagccggaccgacgaatcgccccctcgcgtcgccccgccgtcgatccaggtatgtgacctctgcgccctggtccggacccgcgaatcgtcggcgcgaacacatctccggttggggtagtttttccctttctgggcttcctcttccttttgaacagtggcaacatgcttggcggaggcacagcccatagtctcattcggtcagcttcagccgggctgaactgcaaatcatctctacagacacagggacattttttttctttaaacacaaagaaaatccaccttgctgctgagttggtcaagatgtgtgcaccttgggcgttcgcgggggggctgaaggtggcaagnnnnnnnnnnnnnnnnnnnnnnnnnnnnnnnnnnnnnnnnnnnnnnnnnnnnnnnnnnnnnnnnnnnnnnccacagtgtgtccggggctccccctcctccccgccgcttggagtaagaacccaaaaccccgaagccgggcccgcgtgcaagcgtgcgggaggcggcggcgcgcggccagctctccagtaactgagcgcggcgcgcagctcccaactaaagtccc

SEQ ID NO: 450762 - DNA, 964 bp, Homo Sapiens
  misc_feature (161)..(238): n is a, c, g, or t
ttccgtgccgcggccgccgcggccgctgcttctttccactttagttgggagctgcgcgccgcgctcagttactggagagctggccgcgcgccgccgcctcccgcacgcttgcacgcgggcccggcttcggggttttgggttcttactccaagcggcggggnnnnnnnnnnnnnnnnnnnnnnnnnnnnnnnnnnnnnnnnnnnnnnnnnnnnnnnnnnnnnnnnnnnnnnnnnnnnnncaggggcgggggggcgggaggcttgccaccttcagcccccccgcgaacgcccaaggtgcacacatcttgaccaactcagcagcaaggtggattttctttgtgtttaaagaaaaaaaatgtccctgtgtctgtagagatgatttgcagttcagcccggctgaagctgaccgaatgagactatgggctgtgcctccgccaagcatgttgccactgttcaaaatgaagaggaagcccagaaagggaaaaactaccagaacggagatgtgtttggcgatgagtataggatcaaaccagtgggaagaggtcaaatacatgaaaaatggggcagaagaagagcagaaaatagcagccaggaaccaagaaaacttggaaaaaagtgccagctcaaatgtaagacttaaaactaataaagaggttccgggattagttcatcaacccagagcaaacatgcacatctctgaaagccaacaagaattcttcagaatgctggatgaaaaaattgaaaagggtcgggattactgttcggaagaagaggatatcacatagcaccaattttaccactcaaaccaggagctactactgtgtaaataggttacaccccagttgaaatctttgcaaaggtcggttctattcagcgaacagcactatagcaaaagaagatcgttccatattgtacgccccattaaattacagtgtttcttaatgaacttgcaaaggaatattgct

SEQ ID NO: 450763 - DNA, 368 bp, Homo Sapiens
  misc_feature (211)..(241): n is a, c, g, or t
gagcggacttccggggggacgttccgtgccgcggcagccgcggccgctgcttctttcacactttagttgggagctgcgcgccgcgctcagttactggagagctggccgcgcgccgccgcctcccgcacgcttgcacgcgggcccggcttcggggttttgggttcttactccaagcggcggggaggagggggagccccggacacactgtggnnnnnnnnnnnnnnnnnnnnnnnnnnnnnnnagaaaaaagacgaggaggacagtggcggggggcgggaggcttgccaccttcagcccccccgcgaacgcccaaggtgcacacatcttgaccaactcagcagcaaggtggattttctttgtgtttaaag

SEQ ID NO: 450764 - DNA, 1075 bp, Homo Sapiens
aaaattccccttatggacccccgggtattcagaggctcttaggccatagagttggtttataggagctttttctttgggtcaacaaaagccttcccattgcatgaaggatgccccaaatagtcagctattaagcatcccgttcttgaggggcaaaaagcttttaaggaaccctcatgagttataccacttttggcatataccagtacatttttctggtagaatagcttctactattttttcaactgcatatttgggttccagaattggcaacagagaaggacagcctgtagtacaaccttcaaacattccagttttttataaaaaaggggcacacaatcgtggttttgatccccttttgtttttggacaaaatgtttctacaaatacagattcagcaaacccaaaggctgcaaatttacttgcacagtaatctgccagcccatttactccacttaatccagctgaacttgaaatgcaaaccaaatgtccatggtcattagcaatcatagcaggtagaaaggctttataagtccataaatgtgctttgaaattcacatcaaatgacttttccataagctcatctggacagtcaaggaactttttgcctgttacgattccggcattgttgattaggatggaaacatcgccgacttctttttttaacctggtcggctactctatacactccttccttttggctgcaatcgcaggtataggcgtgcactcttgtggctccagcttcccgagccatcttacatgtttcctcattcccctccttattgatatcccagagaacaagaacagatcccagccgggcaaactgcaaggctaagagccttccgagtccacttccagcacctgtgatgaggactatttcaccagcaacgttcttccgtggctttgggagtaaggcaaaaatcatagcctccagaagactaaacagtgattttcctaagaaaatgaacagtttctttgatgattgcaggttgaaagacatgttctggctgacacccaggacactctccctagctgtccgcggagaagccggcctcgtctgccccaggcacccgagtccc

SEQ ID NO: 450765 - DNA, 1645 bp, Homo Sapiens
ggtccggaattcccgggatggagcggcctaggggaggccaggggcccacctgggctggggctgtggagagggagtggctgggacgggaggaaaaagagagacggagattagatggaagaagagggatttcaagacaaattgccagagatgcagtcagagagactgactgagagacacaaagatagaaggaattagagaaagggccacacagagccagacagagagagaagagtggagatggagacagggacgaggacagagaaaggcagacagacacatagggacagaaagagaaaaatcacacaaagtcagaattactgaatgacagggaatgacacatagaacgagacacagattcagagactcagggcagggaaaggaaggctgcagacagacagacagacagagggaggctgagacacagggagaagaggggcttggagaggtggcacaggcaggcagccagtgcctcagaggcctccggggagggccctcacacacaccccgccccggggcattaaggcagggcttggaggccagtcatcctgggcccgcccagggccgcccccctgccagcccgcctgcctggtgcctggcacctggcgctccaacccagcctacctgctgtagctgccgccactgccgtctccgccgccactgggcccccagagccccagccccagagcctaggaacctggggcccgctcctcccccctccaggccatgaggattctgcagttaatcctgcttgctctggcaacagggcttgtagggggagagaacaggatcatcaaggggttcgagtgcaagcctcactcccagtccctggcaggcagccctgttcgagaagacgcgggctactctgtgggggcgacgctcatcgcccccagatggctcctggacagcagcccactggcctcaagccccgctacatagttcacctggggcagcacaacctccagaaggaggagggctgtgagcagaccctggacagccactgagtccttcccccaccccggcttcaacaacagcctccccaacaaagaccaccgcaatgacatcatgctggtgaagatggcatcgccagtctcctatcacctgggctgtgcgacccctcaccctctcctcacgctgtgtcactgctggcaccagctgcctcatttccggctggggcagcacgtccagcccccagttacgcctgcctcacaccttgcgatgcgccaacatcaccatcattgagcaccagaagtgtgagaacgcctaccccggcaacatcacagacaccatggtgtgtgccagcgtgcaggacagggggcaaggactcctgccagggtgactccgggggccctctggtctgtaaccagtctcttcaatggcattatctcctggggccaggatccgtgtgcgatcacccgaaagcctggtgtctacacgaaagtctgcaaatatgtggactggatccaggagacgatgaagaacaattagactggacccagccatctacatgccatcaccctccatttccacttggtgtctcggttcctgttcactctgttcatagcgataccctaagccatgaccctctgcgaaccttctttgggcctcctggactaccggagatgctggtccttactaatcaacctgg

SEQ ID NO: 450766 - DNA, 1080 bp, Homo Sapiens
  misc_feature (272)..(272): n is a, c, g, or t
gggaggggtttccttaattacccgggaggtgacccagggaccccaacccccccaaggtgggaaattgaggggttaattggcctttggtggggtggttcccattctaaattgtttctccatggtttccggggatcccagtcccacattattggcagacttttggggtagaccaccaggcttttcgggtgatcgcaccacggatcctgggccccaggagataatgccttgaagagactggttccagaccagagggccccccggagtcaccctgngcaggagtccttgcccccttcctgcacgctggcacacaccatggtgtctgtgatgtgccgggggtaggcgttctcacacttctggtgctcaatgatggtgatgttggcgcatcgcaaggtgtgaggcaggcgtaactgggggctggacgtgctgccccagccggaaatgaggcagctggtgccagcagtgacacagcgtgaggagagggtgaggggtcgcacagcccaggtgatggagactggcgatgccatcttcaccagcatgatgtcattgcggtggtctttgttggggaggctgttgttgaagccggggtgggggaaggactcagtggctgtccgggtctgctcacagccctcctccttctggaggttgtgctgccccaggtgaactatgtagcggggcttgaggcagtgggctgctgtcaggagccatctgggggcgatgagcgtcgccccacagagtagccgcgtcttctcgaacagggctgcctgccagggctgggagtgaggcttgcactcgaaccccttgatgatcctggtctctccccctacaagccctgttgccagagcaagcaggattaactgcagaatcctcatggcctggaggggggaggagcgggccccaggttccttggctgctgtgagacctctgcccgatgacttccagtcccgcagccacctcaacctctgcatctgcggaacccgagcgcagattcctgcttctcccagcttgtttgttttcagttaggtcccttcccttggctttcctcccctctctcccctgaccaatcccgggaattccggaccc

SEQ ID NO: 450767 - DNA, 1120 bp, Homo Sapiens
ttctttgaaactttaccggaaatgctacttttataggaaagatgattattacagagatcaaatgtgaaatctatgctttcatattagatcttgtcgaaagtaactttctttcaacaagtaacttagatcttggtgaccacatctctcacattcattgctcagtgtggaaaaatgaaatagacttggagtaaggagcaccagaaggaggcaaggaaccaagctctcccatggtaggtttgctttcctgaagagggcaagatccagcagcctcaatttgaaggaaggtcctcaccaccctgttattgataggctgtggaggtcgccagttgctcacaagaggcactgggggctcgttctcagcactggagaggaggctccgcagcttggccatctggtcagagctcacggtcatgggctccttcagcagcagccacacaatgcattcctcgcagggcggcgtggtgaatgagccctggtaggtccagtagtcccggcatgccgggaacaggcaggatgggtcaaactttgtgaagggcgcctccttgccctttgtcttaatcttgtccaatgcatcaaggaaaatctggaactcgccattctcatgtcctatcttcagaaaaatgccaatcacagcgatcccatcgcgctgcttcagggcttctttaaaagtgttatacttcgggttccagtgaaccaaatgaagctccgctgcatacttgactccatccacggtgtgctcagagccatgatcatccgaagagccccagtgaagatgaaactggcgaagtcggtagggtccagggagaggaccccctctcagcattgacctatcataagtatcatcaaatacaactcggcaggtcttcccattattcaggatggtcttggcagagccaccatcataagacacagaccatggctgcagagaagggtcatgcctgatgtctttagtatgcagctcaacgggcgactggttttcccccttggcatttgggaaaagttcatgccagtggtcaggaccgttgtgactggcgtagccccactccttggccatggtcgccttcctccgtgctggacggctcctgctttctcttcccctgcgtggtgcagagtcgccgcg

SEQ ID NO: 450768 - DNA, 1002 bp, Homo Sapiens
  misc_feature (82)..(83): n is a, c, g, or t
  misc_feature (87)..(87): n is a, c, g, or t
  misc_feature (100)..(100): n is a, c, g, or t
  misc_feature (139)..(139): n is a, c, g, or t
  misc_feature (143)..(143): n is a, c, g, or t
taagcccacccagcagggacagtggaagttggagatagcccacagtgtgtccgccgtgggcctggggaatacacacctgcgnnttgntggaggccggatnctgtgaggtccccagttctgggctgttgtctgagagggnggtnccgtgggagggactcatgactgcttatcctctgtggttcctgtggaaggtgatttgaagggcatcagctgggagcccgggacaatagctgctgttgtggccgctgtgttgtttgagctgggagatgaagctgcgggctcttttccagaaggggagaggctctctggctgtggggtcaacccctgccgtccgttaactgtggagggtggcgctggcctttggtgaacccagggcagggtctcctaatgcatttgaagactgggggttgtccagtgggcgacattcgtggccttgttcaacacgcactctgtcaggctggacgtgccggctttacgcttgaaaccagagttacaaatgtaccgctccctggagtacaagctgtagctcttgacccagatgtctgcgtgttccacggacatggggggagggcacgtgatgcccacgcaaggccgggagcctcccggtcctccgcgctcgtcgtgctctgggacctccagtgtgcactcggtccggtgtccccactgcgaagagagtgggcaaagtcatcggagagcagactctctccagccctctctgcggctccggatccacttgacctcgcccggcgctggtcgcctccagctgctccgccttcggctttcctggtctccctccggggccctgcgctcaggttgtgagcaggcacaggcctgggtgagtgcccagcggaggtgtcgcccgcggtgcggaggcgcgggcacctgcctggtgcgctctggcccgggcggagcgcagcccccgcaacctgctggctcccgcggcccccggggcccgctggggccccagctccagccacttcgccagaattcctgctgcagcta

SEQ ID NO: 450769 - DNA, 852 bp, Homo Sapiens
tatgtctctgtactttggcttccctcgcccacttgcgatcgcgctcccttcaccggttggctagtaagtgacgcgtcccgatcgtttgcaggtcgccaacagtgtcatggactccgcacgctgtgctttcccggttaccgctgctagacgcgacggactccgttgctgcgcgtaacgcctgccttccactggcgtccccgcgtccgttcgtgtgttcgcggggcgtaggtaccatgtgcaaggttttccgcgtcggtctagtgagtcgcgcccggtcacggcatcgacagttcccgggggcggcgaaatcggcctcgtatctcttgatcgtgtcggcccggagcaaaccaggggcatgttctcccccgccccgcctttgcttcgctccgcagaccattatttggttcccatggcccacactcttcaagagggcccagcgagatgttcctactggtccttggcacagcaggcaacctttcgaatcagtgtcgtaatcgaaaaggccggagccagaacgtgattcgtgtccgacatgtcttccagattcccgcaatgtccttgatccgtgcatgccccggcaggttctgtgataactccctttgggccggactgtggtccgcagcttgagccacgcacgaataacgggccgaacgcggccggggatgggtgccgaaaggtttgccggggggcgagaggagagggcgagtgcagcggcgcgggccggcgggagggtccggcggagtgcggcaggggggaaggagagaagcgaggagcgctcctccgcgccccggggtgcccggcccgccccccccgcggagccgacggcagctcgcggactgctggaactccgct

SEQ ID NO: 450770 - DNA, 1020 bp, Homo Sapiens
catgttggcaccttgtccctgggttgttctagtgggagtaagtggccagaacagcagagtttaagaaactcaaactctttcttctttggatgggaaagccactgggggactgaatccttcctgggactataggatttatgtttccaatgggagactcccacaagtggaaaagagcacttctccccttcctcccccaaggccaaaggaaagcaaagaagatgtctataagtgaagaacatctatacatatacccggagtttttccttttatttacaaagcagtaaaccaaattcctgtgtgaacataaatatccaatataatataatattgcgtatgccatttcccccctcaaatatgacttcaattttggccagttgttctgacttaagccaaaaattagtttcatctatatgaacatatgatggtaagtaacctatttattaccttaaaatgtttccccacataaaggaaatggtagagagtaaggggaaaagagaaataagagatgtgataaaacctattccaccatctttatcttcatccacagcatgtcctagacattcagtgcctgggccagtctctatagtaaacttgggctgatctggaaacgtctccacttagctctgtaaggatggcacccttcagggtgcttcagaggaaacttactgaattcaacccaagtgtcctgaacacgaaattgacgaagttactcaaagagctgaactttaaaacaaggagtagctgagcggtgaggcatatcctatcttgcagtttctgagcactctggtaccatggaatgtctgtacactgaccttcgccaaagccaagaaagccctggtaggagtcacagcagccatgggtgagctgaaaggctgttcctgcacttcctggggtctcaggacatagccagaggctacacagcatgtgccctactttactaccctaatcgcacaaaccattggtatctattttctgaatccagattccaaaggcattcctgaaaacctacagaatataccc

SEQ ID NO: 450771 - DNA, 859 bp, Homo Sapiens
ctaccagattaatatttcacaaaagtttagtagtcaccagacataagtccggaacccctttaccgaaggatcttctttcagcttcctgcgccacagacattcatacagtttcctattttaatgtcctgggaagaggtagaaacatcttgtcaaagtcactctttcagtggtgggcatctgcgctctaccatctggctgctcaaatgaaaatcgaaccttgcggaaaatttcctccacatcacaggaacaggcatattcttgcatatgttcaatgagtcttccaataaaaacagagcccattgtgggatgtctccaagaaacattatctggtgtggaagagcagaaagcgataaaatccttctctatgtgggctttcttaatagcatcatcctcaaactcttctgtagttggtaaagataggtttccagaaactcctactgaatctttaaaccacaccacaccagggctgtcaccacggcaggcctggatgatgatcaccttcggtttgtccttcaaacttgggcagttcttggtattcaacatgttaaagattgcattgagttgtagtatatctgggacttgctcagagtgtttcttcccacaaatgccttcccgaataccatgagacatgaacaccaggaacgtgctgtcagaggtcttgtgctctgggcggtgtgcaaatgcctccagctctgtagtcatgtccgaagcagtgagattttttttcacatctacgctgtaccccagattttgtagcagcattgtcatgcctgtgatgtcaacctcagctccagttcttctaggaatactgtcaaattcttcattgcagataatgagagcaagacgtgtgcggcttgac

SEQ ID NO: 450772 - DNA, 1030 bp, Homo Sapiens
  misc_feature (91)..(139): n is a, c, g, or t
  misc_feature (181)..(229): n is a, c, g, or t
  misc_feature (277)..(437): n is a, c, g, or t
  misc_feature (467)..(501): n is a, c, g, or t
  misc_feature (504)..(505): n is a, c, g, or t
cggtggggggaaggggtatcagcgggggagacttaggggaaaggtgtagggtggaagcacggccgcggctagggtttgtataggtgagaannnnnnnnnnnnnnnnnnnnnnnnnnnnnnnnnnnnnnnnnnnnnnnnngaaatgtgaaatgttgtgttggtaaggggggtgttttaaatnnnnnnnnnnnnnnnnnnnnnnnnnnnnnnnnnnnnnnnnnnnnnnnnntgaaggtaggaaggaatgtaaggagtatttgtttgagaggtggggggnnnnnnnnnnnnnnnnnnnnnnnnnnnnnnnnnnnnnnnnnnnnnnnnnnnnnnnnnnnnnnnnnnnnnnnnnnnnnnnnnnnnnnnnnnnnnnnnnnnnnnnnnnnnnnnnnnnnnnnnnnnnnnnnnnnnnnnnnnnnnnnnnnnnnnnnnnnnnnnnnttgtggtttgttgtgtttggtggtttgtgnnnnnnnnnnnnnnnnnnnnnnnnnnnnnnnnnnngtnntatatctttcactccactttattattgtattctgaacatggcacctctgcaacttttgtttccatatcctttgagcgtcttctagaaagcaaagcttgattctgccttctgggcttgagcatgtgggcatagctgggttgtcctgcactgcctgaagagctgggaaggaagaaaatagtaattgggagtcttgtgtactaagctaatttccaggtatcggacctgctgagagtcccagcgtctctgccaggtaactgtcttcttcacaaatgtatgtgatgcaaatttggcatgcctgtgcccctttcggaataacggagtcaatcaaagctcgggtcttatccataactgtagcattttcacgttttactttctccatctcttcctggttcagcacccttgtctgtaataattcatccagtaagccatttattgtaccttcacccatggaatggataaacagctttttcttctccttcaggaccttgtcggccatggcttttctctcctacccttcttgtgtcc

SEQ ID NO: 450773 - DNA, 1051 bp, Homo Sapiens
gcaagaggggggcaagcggaagggtcgaggaagagatcgaggggccagaggggtccgacaggaaagataggacacgaggccagatagacggagagagagagggcgagggaggggaaagagtccggggcagaaaggcgcaatgcagggagggacgtggaggcagccccaagggcgttgcgagtcgggacaagaggtccaacagatggtgacagggtcccacatgtccaagagtgaaaggcttagcaattaggtgatgtcctcaacgtcgcaggatgaaggtctcgtcccagacggggttgagtgtctgggtgatgaccgtgcgtgacggtgggtctcctcctcggggactggtgtgcctcaccacagccttctgccgatgccgggacccggggctgccccctggcacacctaccccctgctcaatgcccagcaggcagtaggggtcggctgaacccactgacatcttttgcccagaatgcccttggcctgtttcactgttgccttcagacaaaatattggcttctcaagctccctgacccgctgcagtgtctgctggtgctcctcgggctccacgtggaaggcctcctgcaggtatcgcagcagctcagaggcctccgtcacatggttgggctcaggatgacccaggcggtgcaagacagtgtagagtgcgtcctcgtagagcagggcccgctgctcgggggagaagtggtgggatggaggctggatctccggggccatttggggcgggggatcctgtagatctctgactctgcggcgccttatcttgatggcctggcgcaagaagggagggcgctgctgcggatgggagaggagtgtcgccatggtggccttctctgcccttccctgtccgctggtgctgggtgaagacagcgaagccacaggattatgcaaagagcctggggctgccaccctctgtcaggggaagttttagggagggtggctgggagggacggaagggtgagggtttcaccgcttcggagaggcagtctcccaggcccctgcaccttccccagctgggatccctacagac

SEQ ID NO: 450774 - DNA, 1089 bp, Homo Sapiens
ggaggggccatgactacgaggccctgggaggtcactttagggagggctgtcctaaaaccagaagcttggagcagaaagtgaaaccctggtgctccagacaaagatcttagtcgggactagccggccaaggatgaagcctcacttcagaaacacagtggagcgaatgtatcgagacacattctcctacaacttttataatagacccatcctttctcgtcggaataccgtctggctgtgctacgaagtgaaaacaaagggtccctcaaggccccctttggacgcaaagatctttcgaggccaggtgtattccgaacttaagtaccacccagagatgagattcttccactggttcagcaagtggaggaagctgcatcgtgaccaggagtatgaggtcacctggtacatatcctggagcccctgcacaaagtgtacaagggatatggccacgttcctggccgaggacccgaaggttaccctgaccatctttgttgcccgcctctactacttctgggacccagattaccaggaggcgcttcgcagcctgtgtcagaaaagagacggtccgcgtgccaccatgaagatcatgaattatgacgaatttcagcactgttggagcaagttcgtgtacagccaaagagagctatttgagccttggaataatctgcctaaatattatatattactgcacatcatgctgggggagattctcagacactcgatggatccacccacattcactttcaactttaacaatgaaccttgggtcagaggacggcatgagacttacctgtgtcatgaggtggagcgcatgcacaatgacacctggagtcctgctagaaccagcgcaggggctttctatgcaacccaggctccacattaaaacaacggtttccttgaaggccgccatgcaagagctgtgcttcctggacgtgattcccttttggaagctggacctggaccaggactacagggttacctgcttcacctcctggagcccctgcttcagctgtgccaggaaatggctaaattcatttcacaaaacaaacacgtgagcctgtgcatcttcactgcccgcatctatgatgatca

SEQ ID NO: 450775 - DNA, 947 bp, Homo Sapiens
cgcggagagcgaagcgggaaaggaggtggtgtctgtgaacaggcctaggggtttctgacccttctggtttctgtgccatggccacgctgagcgtcaagccaagtcggcgcttccagctgcccgactggcacactaacagctacctgctatccaccaatgcccagctgcagcgagatgcttcccatcagatccgccaggaggcccgggtgctccgcaacgagaccaacaaccagaccatttgggatgaacatgacaacaggactcgactggtggagaggattgatactgtcaaccggtggaaggagatgctggacaagtgtctgacagatttagatgccgagatcgatgccctgacacagatgaaggagtcagcagagcaaaacctgcaggccaagaacctgcctctggatgtggccattgagtgcctgaccctgcgggaaagccggcgagacattgatgtggtgaaggaccctgtggaggatgagctgcataaagaggtggaggtcatcgaggccaccaagaaggccttgcaacagaaggtcagccaggccttcgagcagctctgcctcttgcaggaagtccaacagcagctcaactccgaccatcggggcaaaatggagacactagagatcgacagaggctgtctctctctcaacctcagatccccaaacatctcgctgaaggttgaccccacacgtgttacctgatgtgtccagcacactccagacagtgggatgacttccgtccggttcaacaaggaccgagcggagagctgagatgcaaggcagccacagagctgcaggggagtgccactgtttctactatggctgagaccaacaacgagcttgaagcccagacagttgccacggacattgccttccggcaagcgggctgcgggcaaactgggcacgtggttcgtggactcacctggcatacattagtactgc

SEQ ID NO: 450776 - DNA, 2486 bp, Homo Sapiens
  misc_feature (473)..(473): n is a, c, g, or t
cagactactttacactatggggatgagagacataaattaagtagagtgtggatcgagagactgattatgatgtctgggggagtgcagactcgcgggttagcagtcgtcatattggtaaggagatgcttcgctttaggcatatgttctgttgtctatattgtagcagggcataaaatctacagagcgacatacgttaagaacttggcatataggacttcgactcacgaaatcgtgcgagtagtatacctagtacaccgtgggagagggcggacagtacatctgaggtggtgattgtgaatgtgagcgtcggtctcctctagtggtatttcagcggaggttgaatataatctgttgtgtgtttatttttgtgtagtgtggtctagcaatggcgaaaggttggaaaggaatctgcttactgctgcgtagccagagggggtcgtgtacagattggttctgacgtgggtggcgcgtgngtctgactgcggggttgcccttccgcgtccggggccaaggcaccagtaggcttaggaagggcataaagcagccagggttctggaggaaagagccagggaagtggccgcctcgttgcattcccgccaggagctcaatggggctttgttggacccaatcccgttgccctttgttgacgtagaatggccggtagtgagacagcatagtctgcttgccagatttccaagtctggggctggtccttggggctttggctccgcatgagggagggatagcctttcagggagaaggaggagctgccttggacgacgggcaggtcattgtcagagttctgaatgctggaggagtactcccagacccgggaggtgtagttacctttggtgccatagagattgttgaaattcttctgggtggtctccttggtgaagcggccaggagacgagggctggtatgatgtccggcccccacctttgggtgtcaggtacatggagtatctcttcatggtgtccggtgcactccactcacccccgaagctgttcgtgtagttgttcacatagcgatggtcaccaccgttctccatgtggttcctctcaatgaagttacggctcaggtccgccttgcacatcttctcaacgtggcgcatgcatacattgagcaggtcgtccttgaagttgcctagtgactgtcccaggccctccccctccagcaggacatgataggtgggcaggggtggggggagagagtaattgctcatcaatgcaccaaattcctgcagaaacaacacagagtcgctgatgctatgcagctgctcccgggtctgcttgtcctcatgcagcaccttggctctctcatccagagcatccatgatcaccttcacttggtccacagcatcctgctcccgctgctccagcgcagccctcacttcctccttttgcttctccaggtcccgcaccaggtcccggaagttctgctccaggatggccttctcattggtggtgaagctcttgatgcggtccttctccttctgccacttctcagcttcatcctcaatctcaatgatcttgagctgcagctgctccttttgcagtgacagctccgtctccttctcggccttggcctcctccactgtcacggtgctatgattcttgtgctcctggaacatgcaaaggtagcagatgcaggtctggtcggtctggcagaagagctccatcgtcttgccatgcacgggacacttgcgggcctcaaagtcccggatgggctcgagcagctggtgttctcggaaggcggcgccctccaggtggggcttgagatgcagctcgcagaaggaggcctggcacaccaggcaggacttgaccgccttctgcttgttgccgatgcaggagtcgcacagcacctcctcggagccggacttggaccgtgaaaaaaggcccgtgtcggcccgggggtagctgttccgccgggtctccccgggctccatgatggacaccgtgggcttccgggactccgagaaaatggacttgcgcagctcgcccttttcggcaaaggtaacgggtggcttcttggcagcccccagctggagccctgcgtacggcgacctcttgccttccatagagtccatgctgaagtagttggagttcttgtcgtccccggactcgacaaactggatgatgggtcgccgccactcattgcccgcgaacagggcgctcctaccttcccctggcttcagggcgctgcccaggctcttgccctcagctgcctccccgccgtgcccgttggtggtcttggcatccttgccgtcagccttggtgccattctccaggctgccactggggcccgacgggctccgggcatcctggcttctgggctcgacccgttgctcctggaggcatctgcagcttccatcgcagggtgcttggctgagctgtttcaggcttgctggggttcaggataggtgacctttctggcaggcgtctcggcagggagtggggccctcgtgccgaattcgccacccaggcc

SEQ ID NO: 450777 - DNA, 705 bp, Homo Sapiens
tccaggtgcgtgaagctggcaatggaggaaggccgcggcaggccctgccagagcaggcgctgtagggcaggggccttgtggggctccacggcacctgccacaaaggttgaccctcaggtcctggttgcggccccccgggggcctggagcaggggcgtcctctgtgaggccccatctgtgtgggcggctgccagctgaggttcatggccctggcgtagcacggcggcgtggatgctgcatgctggtgcagctgggcccgcacgggcctgctggttgccccgcacatcccgcagctcctgggccaggcgctccgtctcctcctggatgcgcagcaggtcccggggtgggggtgccggcagcctcccctttggcgggggcaggaccagcccagcccgccgcacctcctcctgcaggaaggtgaaggtcttctccagctcctcacagcgccgaacatcaaccacaaagcgtctctggaaggcgctcaccgaggcgttgaggtctctgaactccacgaggcccagctcgcccagccgactcacgacaggtgtaggcagccgctgtgggcagaaagagctggaccagggccacctcctcgctccggaacatggagcccatggtccccgggtgtgctgcgcgccagcgcctccgctgctggctgccccgctccgcgcacgccgggcgggactcagaactgcacccccccgct

SEQ ID NO: 450778 - DNA, 898 bp, Homo Sapiens
cagggaccctttcttcaccccttcaggagctgatgtccgtgcagggccccccacaagcacagccgagtttctcccacgttctccgcatctctttctgccttcagcttcctctgtgtggcctttgtttttcctgcccatctttgtggctctcaaatgtcatccctgctccacagagaaaaggctgctgagtggccaaccatcgcagcatgagggtcccctgcagcagctcgctcaggccagggccctcccaggatgctagtcctgtgaacggatggagtctcctgcctgcttggtcaccgtgaccccggtggggagagacagtcaaggagcacaggcaggatttgtgcaaaagatctggcccgtggctcctttctcagtaggggctgtgggcttccaaccttcccaagattccccatgcagagccagggcctaagccacggaccccttggtcatccaggcccctccaaggccctgggcccaccaagacctctagccttgaagcacatggtccccagcttatgtaaaacttggcatgagtgagaaactcagcctcagtgggtgaagactgctgcctctttctggcctttcctccagcacacttcggggaggtgagggggctccagcttgatcatcagggggtgctcaggcacctccttgcataggacagttgtttctcaccaccccagcatgggcttggcttccggaagcccttcctcctcctaggctgactcacctgcttggcgccaggacatgggagattcagagccaggggtggggtcctgcggttgtgggctgcgcgtagatggtgaaggagaatcagagttgaaatgcatagaggctctctaggacacggtgcaaatgtactggcaatccacccaccgattccaacccctccgct

SEQ ID NO: 450779 - DNA, 824 bp, Homo Sapiens
gcccgggcggctgcccttgggtgctcccttccctgcccgacacccagaccgaccttgaccgcccacctggcaggagcaggacaggacggccggacgcggccatggccgagctcccggggccctttctctgcggggccctgctaggcttcctgtgcctgagtggtgaggaggggccgggcgggaccacggcgagggctggggggcataggcctggcttccccggctcctcggacccactctgtccccgccaggccagatgaggctgccgtgggcgccagggccctaaggcgcctgaggtgaggccggagagggggtgtccaaggcccggagggcgtaggagagagacccccaagccggctgagcgagttgggcctctccgcggcacaggcctgaaccaccccaccgcagggctagtgttttcctttctctgctaaacacacacaccctcttacctggcccggttccggctcttttacccacaaagacccggcccctcccggaaacctcaggttttgggaagggaggggttggcttgacggcggagagggttgtgctctggggagggagcccccagcttccaatatagatgcccgggggtgggccctgaccctccagatcactggaatttgggttcccacctccctctggtccccggccccagggctggccgtggaggtgaaggtacccacagagccgctgagcacgcccctggggaagaccagccgagcttgacctgtgacctacagcacgtcggtgggagacagcttcgcccctggagtggcgctttgtcgcagctgggcaacccatcttctgaggtcccatca

SEQ ID NO: 450780 - DNA, 1437 bp, Homo Sapiens
agcgggtgggaccgctctttgaggaactcaccagctccgcgagctcgcggccgccagcgcggtccacccattggcgggagaggactcacagaccgcagctcctcaccccgcctgctccgcagcgggaccgcgtagacctcagctccccgagcagcgcaggtctgccaaggaccatgggtgccgcgctggggacaggcacgcggctggctccctggccgggccgggcctgcggcgccctcccgcgctggacacccaccgcgcccgcccaaggctgccactccaagcctggcccggcgcgccctgtgcccctgaagaagcgcggatacgatgtcaccaggaaccctcatctcaacaaggggatggcctttacccttgaagaaaggctgcagcttggaatccacggcctaatcccgccctgctttctgagccaggacgtccagctcctccgaatcatgagatattacgagcggcagcagagtgacctggacaagtacatcattctcatgacactccaagaccggaacgagaagctcttctaccgagtgctgacttcggacgtggagaagttcatgccaatcgtgtacacgcctaccgtggggctggcctgtcagcactatggcctgactttccgcaggccccgtggactgttcatcaccattcatgacaaaggtcatcttgcaacaatgctgaattcttggccagaagacaatattaaggccgtggtggtgactgatggggagcgcatcctgggcctgggagacctgggctgctacggcatgggcatccctgtggggcaaagctggccctgtacacggcatgcggaggggtgaacccgcagacagtgcctccctgtgctgctggacgtccggcaaccaacaatgaggagctgctcagagaccctctgtaccatcggcctgaaacaccagcgccgtgcacggcgaaggcatacgatgactctgccggatgagctccacgcagcgccctgtgacagaccaaccctcggacatacaactcgcctcatcccaaactcgaagcaccctcgcccaacgtgccaaactgcaccttccggccgcctcacccaaagtaccgtaaaccaagtactgccatgtccccacgaatggaccatcccaacaggaaccacccctggcaacgaccatccacgctggcccatggcacatccaatgggcccaccaggtcacagccacaccaccataccctggcacccataagggcccgctccaggacttggtgcacctccgcaacaccacccaaagcacaacgtccccgcacacacacgtacgaaacacccctaagacgctcagccccagagacgcccgcgcacaacacagtacaactacagcgaaacgctcccctcgcgcacatactcgaaaacagcacgactcacacacgggtcgcccaccgcgcacggaccgacca

SEQ ID NO: 450781 - DNA, 1641 bp, Homo Sapiens
ccccgtggccaattccatgatccttttgatctacaggccctcggcacagagagccgcgcgagattttttgtgttatttttgtgaccagccgtagtccacagggttgggcaggaaaaagcgcgggtgtgtcgctgtggaagcacctcccgccaggtattttttggccacccaggccttgagaaaatggggagggaacctttcttcccgggaaaaagtcccggaaattcctaaagtcgtgggaaccccagccagaaatttcaaggggtggtttctgtatgaaaaggttctggcccattgcaatccctggggaagttggtttgtggaacaagccccgttgtgacccagccagtcctcgaatgtgttcgaaaagtggccccaacaaaatgtcacatcttagtggggttatctgaatgggtcttccatgggggtctccagtccatacttgcaaacaaactccttggaaacatactgggcagtgaaagacttcatcagctttcttctccaagtcacctgactgcctgtcttctaccatctttttagctggtgctgggtcttctctctctgactcggcatcgtgactcagtttcctcttggaggacaatcgcctacgtttcagaggagatggaggggctgtggctgtggcactgttagggtccttctcatggatcttcatatgtctgtgcatgttcccattggtggtaaatgactggccacacacagtgcacttgtaaggcctctcgccagagtgcaccagcatgtggcgatcgagggagctggccgagctcagtgactttcccgcagatgctgcatgagtggtcggctcctccagtgtctgtgttgtgctggcgaatgtgcatggtcagctggtgctgggtagtgcaatcttctcacacaggggccagttataggaagacttctcctctttcgtttcctggttccttctgccaatccgatttggtcctggaggcttcgagggggacttgatcccctgggggctcccgccattctctgtgaccttccctacactcatgaccgccgacatcatggtgttgatggaagataggtctgaaccttccaagccagcgggcgaacttgacgtcattgggacaggggtttaagcttctaagaagcctctgctataaaactccattttctgacccactgatagactatgaaactttcccctgctgtagctatcattcacacggagtagaaaatgagtctgtgttgacctcttgtcttcttctcttggtagtactcgttgacactgttttctattgtgttatcaagctgccctccttattgggggtctgaacctggctgggcccaaacgtgggcagggtcacacctcagagccaccactcctggaacacacagtcggagcaacgcacgggcaggacgcttggctccctggcatgatgcgttggggaccggtgggcttcagggagagaccgaggagagatgcaaacttgttccggaaaaggaatcaaaatggcgtttctggatgtgcaaagttcatcaactccgcagtcacttcccctcctcctcttctcccacagggagggaggtgggcgaggagctggcgaccccggcgcacccagccgtcgtcccggcccccgtctcggccccccgcccagcttc

SEQ ID NO: 450782 - DNA, 1576 bp, Homo Sapiens
  misc_feature (46)..(46): n is a, c, g, or t
  misc_feature (90)..(90): n is a, c, g, or t
  misc_feature (181)..(197): n is a, c, g, or t
  misc_feature (290)..(290): n is a, c, g, or t
  misc_feature (428)..(428): n is a, c, g, or t
  misc_feature (1259)..(1287): n is a, c, g, or t
acccgacggagtgcggctcgcgtcgcaggagttcgaaaggggcggnggcctccctagccggggggtcgaggagaaccggcgggtggcganagcactttgttgcagaatgggcgatagcagtgtgatcgtgtaaagctaggcgtcggcgctcgccccaccagcgtttccaccggaagtatannnnnnnnnnnnnnnnnagtggtatctgtgtgggggagccgtcgaacgtggacgtagtgtagagatatgggacgtgatgcgcggacggagcaaccgtcgcatcggggggncggggtgggcattccacttaccccgtagaccaaccttctatcctggtccgtcgttcagtttatcttcgcctgaggttcgtgcgagtagagctctatactacatactcttcacgtaacgggtgtgacgcgtagggccancacacagagattgtgcggccggcattgaggcgagtcgtgcgtaagagatagtgatggctctagcctaaccgcggccgcccgagacggttcctgcgcctcacaaaccacgcgtctcgcaatgtccacggtgggccaacacgtcacatccggatgaacgttcgcgctgggagtagggtgttcagcctcggttgcggggcgtgtttggggcggcacgatggcaggtcgggtcgggggtccgggtgtatcacgaggatgccgggagtgaggtcgcggtgtaacgtacgcgtgcgccgggggcggagcaagcgtcgtgagatacccatctccctggtgttagacgggttaggcgggtcccgtggcgttagtgcgtgcctgacaatggagagaggtagccctgacatcaatccgtgggcggggcagttatagtgggagaaacggcggccgctgcgttggcgcggtggcggctacagaggggtaggcggcggcgactgggcattctgcgggccagggaaagacagtgggccgcccggggggccgggttctatgggcggttaaaggaagccgtacgcgaacgcagccccgccgggctctcttgccagggacttgtgcggcttaacctgtccagaaaggagtggttgcgaccaggggcgatcgcgattcgttggaacaagctgccgcggtgccggtccccatgttacagaggcatctgacccggggtcccctgtggagcccctgccaggaccattaacccatggtatgcgggcaccacccccacctccgcctcccgcgcacctgcatctgtcaatccggtcagttggtttcacgcttgtnnnnnnnnnnnnnnnnnnnnnnnnnnnnnaaagagcatgagggtccccacggggtaaccccagctccagcagcctccagggccagctgtgggggggaggggtgtaggaggcaggaggcggcagcctgggctcctggggctcgcaggggtcggggatggtttccccaacatttatctcaccccttctggatggccgcgtggttcagagcctgcatgggcttcaggatcctgctgtcatacctgggttcacaggccctcatcgaagaattccggcccggtaccacccttttgttggggggccgtaaggggaggacggcgg

SEQ ID NO: 450783 - DNA, 644 bp, Homo Sapiens
  misc_feature (34)..(34): n is a, c, g, or t
  misc_feature (159)..(159): n is a, c, g, or t
  misc_feature (424)..(465): n is a, c, g, or t
cccgggggaaaatcctgcgccccaggctgggagnccctgcctcgactgcttgcccagccctcacctgctggggctggaggcccatggatccctcatagtatcccaaggtttgagttcctgtttttcgccttatagttttgtgagtgtttgaggggacanacgaccaaaggtcttttccccaccatctttaaatcaaagttgtttaaaacaacattaattttaaaaaatacataaaagcaacccatgcttatggttaaaaaagagtacaggagtctggagtccgttgaagggtaaaggcctcccgcaagctgccagtcggctctttttcgcaaagccttccagaagttttctgtgcttatgaaagcgtatgtgtggcctttctcttcccttcttttattaaacacagataggtttatgctggatnnnnnnnnnnnnnnnnnnnnnnnnnnnnnnnnnnnnnnnnnnggggggggcccccattaaagaaatatcactccccggaggggggcgcccacatacgattacgccgcctctcaccccaagcgtttttttgtggtacaccaagggaggcgccccaaaattagagaagacggccgttatattataacagcgacagaggagaaccgagggcgccggcagtatat

SEQ ID NO: 450784 - DNA, 941 bp, Homo Sapiens
tcactgaggaagtaacaggtcttagctgactggattattcctggctaagattcaaggttatgggactttctgttaacatcctgacttagttcctttctttagcagcataagaacagcagaataaaattcttggcagctgctctacagaataaagtgaacaataggaaatatgggatatgaagtgcagaagcagcaagttacctcaagattggggctatacactcaagaaagaacaggttggttagccgaagtttctctagttatcgaataaaatttaaaaatacgtttgagtttatttgatgccgttcagtcttgtacagcccagctaagcaatcccatagaaatgagcaactgagctaatgttttacgaagcccctcagtctccttccagagagtggaggatttattaaggataggctattttgttatctgcaaagctctccgtttcatctaccctaatgtctcatgatcctggataaacccatttccctgtaaggtgagcgtatgctggtatgaggtgtgagccttcaggcagagtgtggtgtcattgttcttgtaggtaacttggtgtagggagaagaccaaagaccttgatgtcagaccaacatgaagttcaagctctggctctgccatcagttagccaggtgacatttaagtgattcagttcccttaagtctcagtttactcattcacctataagttgtgagaatgaaatgagatataggataaagtgcttagcctagactctggcactttgttaataattaagggccattattattgtctcttgcttattgtttagttctaccatctgtagccacctaattcttagtctagcgattctggagcaggagtcatcaagataaaaaatataagctgatttgttctttttgttggttttacataaaaacacttagacaacctgagatatgttgttcttt

SEQ ID NO: 450785 - DNA, 894 bp, Homo Sapiens
tgtgcgcaggcgacagcgtgctgtggcggccaagatcagcagtgaccgcgctagaccggcgtggaagcaggtcgagtcgatgtggattgcccggctcggcaggcaactgcaagtcaggggtcaggacatcgagccaggtccactgctgggaatgggatgtccgggtggcaaatcgtggaagagggaaggctccggtggtacccttctctgcttctcgcgctgcagaagttagaagaaaggtttcggattgcaacagggcggcgacctgatagggtttgagttcacagtggctcgtggccttggagcttggccctgtatcttcccgagaaccaaggtgttaccgtcattacaggcgcctcacccagcagttctagcagaggccccacagaaggctcagggcaccgaggtgcacttgccggcctgggaggtgtcccactgaagccccgcgcctcctcctgccagcacccccagcacctgctagcaggaggcacctggcctccgctggtgcagctttcctttttgcctctttgccatttccgttggaaagagacgtcgctttcatcccgcaagtgcaccgtccctccgaggggatttctgagaattctcctgcatttttacataaactaaatgtgaggtttgttactggtatttttttcacgtgcctgagaccagcctggtaccaggaccttttgttcacagcgtgcagcagcgagccggctgcagtgtgtctcccctggcctcgccttctgcaaaccaccgcagccaccacagcgtcagggtggagatctgggtttctagaccatcactgaacacactggaatggctgagtttaacttatttaggcattcatcttggagatgtggtttttcgggttccccagcagcatctcgcgac

SEQ ID NO: 450786 - DNA, 799 bp, Homo Sapiens; identical to SEQ ID NO: 151646

SEQ ID NO: 450787 - DNA, 1366 bp, Homo Sapiens
aagggggtttccccttggggccccctggcaatttcaatttttccctttaatgggggtatgggtaaaagggttgttctttttaaattccagggaaattccttccaaccccctgtttttcagcttttggccttccaaaacccttcccattttccccattttcaccctcccaagttttcttcaattccttggagcaaaagagctctggcaacttggatttgctaaggcatgcatgggctcatgtggagccaggggagtgggaaggatgtccttcagggcagaaagccctgtttttgggtggggaacctacgtatcattcaaacaggcttagctgtagagaaccttcactgcacctctcctccagttctgcctctcccctccactatgctgaacttgcagttcattctgcagtaaaaagcagtagccaggctgcagctggtgctccagaagcccggctgtaagcatgcgcactgtatatgtggtgtgcaaggaagccatcatcagtcatataaagcagttgctatgaaacatgtgaaaagtgagaaacatggtttaattgtggattttattagaagtgtgatactagtcagaaaggcccaggaagttggcattgcagttaccagctcagggagaaggaaagagagcagcagaaacttctataggagatccaactgatgttaacatatgtggacaccctcctgtcccccggccccctttcctttcacccagatttggtatgtggcaaatctaaacatttgcaaattcacagtcgtattcagtcatccggcacattatgaacttccactggcgatccctttccactgcagagaaagtggttgttgctcctcggatatagtaatcataattgtaggaaatcatgtccatttcctcaccatagtgacctggatattctgttgttagccagcaggaatatgggcacctcttgctgtagcgacaacagtaaaactgccactcccgatccagcactgactcgaagtagcggctctggaatcctgccaccagcccattgttggagcacgtctggtaccattccatgccagccctgttgatctcctcccaccagcactccgtgggttccccgaggctctgtggcgtgggcatgcaggcgtagttccattgtctgtcagaaccttccttcttgctgaagatgctcctcacggccactatcacctgcccctggggacactggtagctgaagccttgccggttcaaattcacccacccatcatcgctgtagtcatgatactgctggtatgggtatccataatcgccatactggccccaggccatggtgactaggggcagaagtacccagagaagactgaggtccatgctgcctgggattttg

SEQ ID NO: 450788 - DNA, 1020 bp, Homo Sapiens
gaaagggctaaaatgattttatttttaaatgtggacaggcaagcagaggtggttggcaaaggcaaggtggctgacgatccggaagctgtacaggagagataagggcactggctgccagagtgccctatcgaagcatcatccgaaccctgcggtaggggtggcccacaccacggcctgaggcccagtcaatgccatatttgtgggcggcagccttcagacactgcatagcgaccattgagatttgatcggtaacaggatgcataccaccaggcaccggtggacaatcactgcacagttgctgttgcttgaatcgtggtcagcgtcataggtggtaaagggcctcccaactgtggaggctcagggaatcccctgcagtgccctctgagaacttgcccagtgccagctggtagtggtctacctcaccgaggaggcggaaggtcgcatagtgggcgaaagtacggttaccattaaagtcttccagctctacccgcagctcccagttaccctggagagtaagctggtgcaaattctcatttcccagccagaattcagactcttggttcccaaaacctgctctgtaggaggaccaagagcggaagaaatccacagaaccatcctggcgcctctgaaacaccagccagccgcccccctcggtgtccatgtcacaaaagactgggagggccctgccctcaggtaggcacagatggtaccagccgctcaaggtggcgccctggctcaacagctcccggcagtttctggggccttcctggcaccggagcaggttcactggatctcctggctcacccttggggcccatcttgcctggtggtccaggtggcccttgaggacctggggctcccttctccccaggacttcctggagctccgggacaactgggcaggaggacaactttgctggcttccagttcctgggtcctgggcagctggggtgttcctgggtcttcaggcaggcaggccccccaagcaggagaagccacagggagggcaggatccacagtag

SEQ ID NO: 450789 - DNA, 675 bp, Homo Sapiens
gggattaaatgcccgaagctgggcctgggtcattttgtccacagagactggaattgccgtcgatggtgagagcggcaagttctgagttaacctcctgtggcgcaaggggcgtgttctgccagagcagactccaggtcttccaggatcatgctcttgtacttacgcaccacattctccaaaggtgctgcaccaaacactttaaagacagggttaggtttggagggtgagatacagaggacaatagcttgctgtcccacacgagtagtatattcatctaacgtggctcgaagtttccgaagcaaacgtgtttgttgcctcttccggatagatggattagactcaaatacatgaggccgtttccgtttctttcctgttgccacagcagcagcagcggccattcccacaggacctgcagctgccagatgagctgtcacctcatcagctgctgtggagttgagtatatctgagtcatcgtaagaggtgtcctcgggcgaagaaggcgagtcttcatcagcactcagcatactatgctcggtgtaagtagccacatggacctgctgcacttgctgggccactgcatgtgcttctatggtagccatatgttcggtcttgggtcactccgtgttcctccatgaagttctacaagttttgtcctgtttaaatgtcagcatacca

SEQ ID NO: 450790 - DNA, 781 bp, Homo Sapiens
  misc_feature (615)..(653): n is a, c, g, or t
ttgatttttctccctattgttttcttttgttgtttcttttatcttattcgtcacatctattatcatatactagtttctctttattgttcttcatatactattctacttttattatatttctctcgatcgtatttttctctcttattctgaatttgttgtggtattgtatctgttatatgcatgacccattttatatacacctaagctacccccgggaaaaaaattgtttcataaaatcaaaaactccccggttatcccccaaactttttctatgtcctgctagtcactaattagtcctctggtgagaccagcatatagaacaccctgcaaagatgttttaataatgttcccctctgaagctctttaattttctgttaagttaatgttggtccgcaactaatggttcaacaccccccacgaaattaaggggtccctcctcaccaccagatatcccccacaggtcacactgtgtttccccaacgcagcaactctgttaaaacgcgcgccccttgcctcttgctttatatatatcgtagtctctcattaggggcccccttttcaaaaaaagggggaaacaaattgggccccccggggaaatttttaggggcccccccnnnnnnnnnnnnnnnnnnnnnnnnnnnnnnnnnnnnnnnagtgtgagctgggtgagtagctttagtctgaaatgacagaatattcatttttcgtctctctgagatagtgaccacactgtcctcaccaggactggcaggggaagccccagggctttgtgacctgtccc

SEQ ID NO: 450791 - DNA, 1038 bp, Homo Sapiens
  misc_feature (147)..(147): n is a, c, g, or t
  misc_feature (258)..(258): n is a, c, g, or t
  misc_feature (319)..(319): n is a, c, g, or t
  misc_feature (582)..(582): n is a, c, g, or t
actttttcaatccaatgggggagccactcttcccccaggaaattaatcctggtagcccataattcctcttggccacttggcttttctggctaggttgctagggtgcaactctaggaagtttacagcttggagtccaactgcataaanctggttttggtggtggtggtggttggttaaaagtcaactattgcactaccagtaaggctatcttattagatatgccaaaccagctccttactccagcaacacctgcaaaangccagcagcacattcctgatgccaccttctaggtcctctacatggaagaactccacaaacnccatcccagcctctttgtttaactagccagtcccgttttgtccttacgagaacgtctgtgatactttctgctaatggttcgatgcagctttcttggtttatggtcttcaagtgtttagccacaaaggcaccaaaagaaatgagagtcacaatcctgccccagtttgttacgccgtcgctgaaaacatggatcatcactcgagacaacgatttcacatcgtcttcgtttttgatgtccagtttccgaaagcatgccttggaagngccgtctcgtggttgcgctgcacgccatccccaacccgtcgtaaggtctccagcgccttcctgctggtggccccagacctgcccattggctttgtgtccttggcgccggtggcctgctcccgaaggtaccgagagataatctccagcgactgccggtacaactcgtcctcctcctcctctgctggcggcggcgtcgagggtagtgacccgtccgtactggtgttattaccagattccccgaccaactccagcagcggcaggacagccggccgcttcccgagaggctccggctcgtacccgtccagctcctcttcgggcgacatgatggcgtcagcggccggggcttccatctcctcaagcggcgccgcgcggcgggtgggcgcgaagaaaagcagcctcgcgggggtcgcggtgacgtcggggacctcggcgccaatgggcggcggccgcaaggga

SEQ ID NO: 450792 - DNA, 1043 bp, Homo Sapiens; identical to SEQ ID NO: 151656
  misc_feature (37)..(37): n is a, c, g, or t
  misc_feature (40)..(40): n is a, c, g, or t
  misc_feature (53)..(53): n is a, c, g, or t

SEQ ID NO: 450793 - DNA, 772 bp, Homo Sapiens
ggaggttttcccctgacagtgctaaggagactaggaggtttggactgggtggaattccccactacgcagcaaagtggctgttgcagatcgtggccagactgcttcctaggtgggacccgaagccatccctcctcacctggagggcatccctgcaggaattccagtagctacagtcaggggcttacagacaagaactctaatctccctgggacagagcacctcgggggagcggcggccatggtccgaggttcagcagacttaatctttcctgcctgctggctctgaagagaccagctgatcccaaggagggttattcctccaatacagtgcaccagctctgctaagggacagtcagtctgcctccgtaaggaggccccccttccagtcccgtgcttcttgactgggtgagacttcccatcaggggtcgccagacacctcatgcaggagagttccggctgacatcaatcaggttgatgccactgtgggaagaagcttctggaggaaggagcaagcagcaatctttgctgttctgcaaactccactggtgatacccaggcgaacagggtctggagtggacccccagcaagccgcagcagacccgtccgagggtcctgggtacccaacgccgccacgtctggcacctcaactcacgtctggcacctcaactcacatctggcgtctcaactgtcgcgtggcgcctcggccagaggtcccacaaggtggcgcagcctttccgtggcgcccaagagcccgcaggcgcgggtggcttgcc

SEQ ID NO: 450794 - DNA, 492 bp, Homo Sapiens
  misc_feature (38)..(38): n is a, c, g, or t
  misc_feature (93)..(93): n is a, c, g, or t
actaggaagttttggaactgggtggaaattcccccaanaacgcaagcaaaagtggctgtttgcaagatcgtggccaagactgcttccctaagntgggaacccgaaagcccatccctcctcaacctggagggcaatccctgcaggaaattccaattagctaacagtcaggggcttaacagacaagaactctaaatctcccctgggaacagagcacctcgggggaagcggcggccatggtccgaggttcagcagacttaatctttcctgcctgctggctctgaagagaccagctgatcccaaggagggttattcctccaatacagtgcaccagctctgctaagggacagtcagtcctgcctccgtaaggaggccccccttccagtcccgtgcttcttgactgggtgagacttcccatcaggggtcgccagacacctcatgcaggagagttccggctgacatcaatcaggttgatgccactgtgggaagaagctt

SEQ ID NO: 450795 - DNA, 883 bp, Homo Sapiens
gagctgtagcacttttattgttccttgtctctctacccctgcccagggtaagggcaaacgccttccaagctgtccaagggcacccgcctggcctggttaggttctcctagttgccctctaccagcagccgtgtgtgggtgctgtcctggccggcctggcagcagtaagtgccttggtcctcaggtcgaacgtcatggatgaccaggctgtgggtggggccgtggctgcgcatctcatacgttatctcccgggcacagctcggccccctcccgcagccagcacacgtggccccccgagcgggacacagtcacctccagcaccgcccggcggcccaccagaacggtcttctcgcgaggggggtggcggcacatctggagaggcaatgcctccacttccagtagagccagggactgggcgggccccgcctggaagcggacttcaccggcgtcctcggcgcgcagctcgctaagcaccagaatgtgtttcttcccttcctgtcggatgcggacgcgggctccgggtctcagcgggcggcctccgagctcccagcgccccgtggtctcgacctccgacacggtgcactcgaacgtagcgccgtcgccttcgcgggcgctcaccgaccgcagctcggagagtaccgccacagtacgctctggggcggagcccggggcgtgagcggggcggggcagagggcagttaccggtcacgccccctccacgccccctttctagaagcacgcgcggtcatcagggtccggggaagacagctccgcaagtctcgcgcccaaagcagtgcccagcctccacatcaccccgtacccaccgcgcacggtcaggcggaccggtccggcgcgggccgtccccaccgcgcagctgtagtcccg

SEQ ID NO: 450796 - DNA, 1211 bp, Homo Sapiens
  misc_feature (377)..(388): n is a, c, g, or t
taaccccaaagagatggacccaggggagaacgcgtaagtgtgaggggcatgagtatacacgagtgtgcgtgtctttccctctcccttatttgtctccgtatgagtctctccttgtaccctccccctgcctcgatgatattactcccccagacttggaagccgctgccagagtgacgctttgatggtatctgcaagcgtttttgctgatcttatctctgccccctgaatattaattccctaatctggtagcaatccatctccccagtgaaggacctactagaggcaggtggggggagccaccatcagatcataagcataagaataatacaaaggggagggattcttctgcaaccaagaggcaagaggcgagagaaggnnnnnnnnnnnngcgatgagttcgccaaatatatggagcacaggaagctcagtctactcgactcctgtattttcacagaaaatgacggtgtggattctgctcctgctgtcgctctaccctggcttcactagccagaaatctgatgatgactatgaagattatgcttctaacaaaacatgggtcttgactccaaaagttcctgagggtgatgtcactgtcatcttaaacaacctgctggaaggatatgacaataaacttcggcctgatataggagtgaagccaacgttaattcacacagacatgtatgtgaatagcattggtccagtgaacgctatcaatatggaatacactattgatatattttttgcgcaaacgtggtatgacagacgtttgaaatttaacagcaccattaaagtcctccgattgaacagcaacatggtggggaaaatctggattccagacactttcttcagaaattccaaaaaagctgatgcacactggatcaccacccccaacaggatgctgagaatttggaatgatggtcgagtgctctacaccctaaggttgacaattgatgctgagtgccaattacaattgcacaactttccaatggatgaacactcctgcccccttggagttctccagttatggctatccacgtgaagaaattgtttatcaatggaagcgaagttctgttgaagtgggcgacacaagatcctggaggctttatcaattctcatttgtggtctaagaaataccaccgaagtagtgacgacaaacttccggagattactgtggtcaatgtctgtctactttgatctgagcagcaagaatg

SEQ ID NO: 450797 - DNA, 1030 bp, Homo Sapiens
attccattttgcacatgttccaagtcttgttaaagaaatcacaagagagagagcatcatttggacattttccttgcacaaggtaacttgtgctcgaatgggcaaagatacgtcttagctatggttaagatgatgggaattttcatcttggctgcaggtactgcatcgtcctccattttgcatttcactttttgttcttgcttggcccagaaaattttgacttgctggtgaatgtgcttggcctcgcgaagtttcttctgccactgacgcagttcttgaatctcaggatcacagcgaaccacacaggctctccagaaggattgaatgtagagggctgcttcctcttctgtcagcaggagcgagagtgggattggcggccgtgggtgttgctttagccgctcctccacaaatggaatggagaaaaattctgtgaatggctcccctgccctctttggattttggttgtataaccactcagtcagaaaatcacaggcaatgaatttggttcttttcctctcaaaacatttttctttcttcgcttggtgaagcaggctagccattccgggaagcagaacaggaaagatgaaagtttccaaatattctttgggagaacatgtttttgggttgattgtttccgatttatcttgaggacagggtgtacgtgagatcatggtgaaatgggaaaccggaaaatagtgctctgcactgaagccatgaaaaagcatttcctctactggcgcaaccgtaatcacaggctcctgtttgactttatatccttctggaaagggaggctgctcagcttcatactccttgcagatctgctcccacagattcttgcttgacggctcggtgacctgccacgacgagacaggcagctcgcgggacgcgagagacacggtgggcaccggcgtccgggtgaacgacgagtctgtagagcagctgggcttgaggcgcactatgtggctggggatttgccgcggtgccgccatggccgcggtttccaccctcgtgccgaattcgccacccaggcc

SEQ ID NO: 450798 - DNA, 711 bp, Homo Sapiens
gtgtttcatgatagcaattggaattacttgtcgtacctcctgtgcagtgaaggcctttccaatagttccactgcagcgacaagatactctgaaagtcaagtcattctgattatgagtatcaattgctttctctatgtcattctgaaattcttcttcttgaaacttttcgcttttacgtggtcaaatctctttgctccagagtttcttctcttatttgtttttccagctggcagtccctattctcttctatcttttgcatttgttctatttttaatttctttgcaatgatttcattttctcccacttttctttttagttggttatcatctctctgagaaagtttttcctctcttttgcatcaagttcaagaagatttttccaaattgaaatggcattcaaccaacttcctggatcttcatttataagtctttgcatttcattaaatatttttcagaagaaataataagtggaaactgctttttaatcagcaaaaataatctttctgcagattttaatttcttcaacatattcaaatcagaacaggtggtgaaaattacctttcctgaaatatattcaacctgcgtggccgccagccgcgcccgctacctctcgcattacgaacggctccaggccgcgacccgcagtgcagaagaatcgggcgccagcctcaggcccggaccctggctctccacgcgcctccgacatggcggc

SEQ ID NO: 450799 - DNA, 930 bp, Homo Sapiens; identical to SEQ ID NO: 151167

SEQ ID NO: 450800 - DNA, 716 bp, Homo Sapiens
  misc_feature (84)..(84): n is a, c, g, or t
  misc_feature (155)..(155): n is a, c, g, or t
  misc_feature (617)..(617): n is a, c, g, or t
  misc_feature (632)..(632): n is a, c, g, or t
  misc_feature (695)..(695): n is a, c, g, or t
agcggtttccaaacttttgtatttttagcagcagaagccatcctccaaacaaatccgtatgcaaaacctcagctacaaaacagnatcagtgggctgcttgcccgtgtggggcatgggctgggcccggagctctccctccaggcacccagtacttntttccacaaggccctatgttgagctcagtttaaaaccccagggcctttgcaggggtcaggtgggcgggagcagggggtggaccttgtagcactggagctaaagcagccagataaggtgggctagttcttaagacctctggagggtgtggctagtctctgagacctggacaacttcattctccaccagggcctggcccccatccccattgagctgtctcatgcgcaggttaatggagccgtaggtcttcctggagcccttgccggggacgaaggtcctccgggggtacagctcgcccttgcacagggagaccatgagcagcaccgacaagagcatgccgcccaccgtgagcagcccgaggcctgcgatgatgcacctgtccaggtgggagcctaggcgggcgtagtacatctccagtcgttccatctcccgcgctgtcactgtgtccggatttgattcgagcntcacgggggatggcntatgttgttcaccaccagaagattcccattcaccagggaaaacgaggggcggaaacaaagccnttatttccaccggggcggttt

SEQ ID NO: 450801 - DNA, 830 bp, Homo Sapiens
agcggatttttcagagccctaggaatccgagctgacggatccctgacaggggcgactgactcctagttatcccccgtaacccctaggggccttcagccccaaccccatcatgacatctcctctgtgcagggcggcctccgccaacgccctgcctcctcaggaccaggcttcgacgccctcttccagggtcaagggcagggaggcttcgggcaaacccagccacctccgaggcaagggcacagcccaggcgtggaccccaggccgttccaagggaggatccttccacagaggtgcagggaagccctctgtgcactctcaggtggctgagttacataaaaagatacaactgttagagggtgaccggaaggctttttttgagagctctcagtggaacatcaagaagaaccaggagaccatcagtcagctccgcaaggagactaaggcactggaactaaagctgctggacctgctcaagggagatgagaaagtggtccaggcagtgattcgcgaatggaagtgggagaagccatacctgaagaacaggacaggacaggccctggagcacctagaccaccggctgagggagacggtgaagcagcagaacgccctgcggcaccaggtggtgttgcggcagaggcggctggaggagctccagctgcaagcacagcctgcgccttctggagcatggcggaggcgcaaaacagaacacacggaggtggccaagaccatgcggaacctggagaaccggctggagaaggcccaagatgacgggcgccggaggccgagcacattaccagcgtgtacctgcagctcaaggcctatctactgga

SEQ ID NO: 450802 - DNA, 1488 bp, Homo Sapiens
  misc_feature (1476)..(1476): n is a, c, g, or t
cagactttttccccactgcccccacaaggcccgagcagcagcaccccctcggggtgaacggggcattagtacgatgttgctttggacataggtcagaccctggtagaagacgtccacacatggctggtcagcactgatgactttgaggattttggggtaggagggaatgaccctgacgatgttcctatgatactccagcagtttctgagccgtctccagctctgagatgtcctctggcaccatgagacggttctggatttcagattcgggtggccagtcaaaggtggtgtgataaatctctccagtttgagggtcgattctcttccccaagtttctctcgatcaggaccgtgtctggagcactcagcacaatgacgtgtctgggtgtgatccccagggtctggatcctcagagcctgctcacgcgtctcagggatgccatccagaatccagccctgcttgatgcaatcctcttcagccaggcgttcctgaatcagctggacgagcagcgcgctgggaactgtcttcctttgcagataaagccttctggcttcggtggccgtataggaaaactcatttaagatcaggttctccagggtgaggagactgctgttcagatgtttgcagagccacattgctattgttgttttccctgaggcgggtggacctaatattacaatcctgggcacattgtcgttgtctctatgcaagtgctggatcatgaaggggatgggatcttcgggctggtggatcaggagttgctccagcatgttctgcatcaactcgaagatgtggttctcctccccgtactggggcatctcgggggggatacggtgcggggcgatagtggcgtccatgtagccgtctcggctcgccgctccctagtaaccgcgtcgctaggccgccgcgccgactgcgtcatcagcacgcgccgcggccccgccctgcaggctccgcgccgggcccagatacccgatcctcggtcgcgcggggtcgcccccgccccgacctccccggctgacgcgctctgcggctcgggcaagttctttccccaaccccggcctcgcttttcccatttgcgcatcttagcgggggacaccctcaggtggcttccagctgggcctcctcgtatctgagacccccgtcgaaacccagaaggggcaagtcggccctccgaggggacgggaggcagaacctgcttctggttctgtcagtgctccccggtccggctccctgtgcctcagtttacccatctttaaaacagacgcgggaataaatgtgggggagggtgtttgaagggggaggggcgtccatgagatgggccggaggttcgaggatcgggtggaaatcctcagcccaactcctagagtcgagccccggtagacccctcccagctccccggctctggccaagatcccggaaattccggaccggtaccaatcatagtgttgacgaggggacgtcgccgagaaaacaanaaaaaaaatata

SEQ ID NO: 450803 - DNA, 935 bp, Homo Sapiens
tggtataataagtgccagggtcccacggggaacccaggtgaaaaaaggggcccatacccaggtatatccccaatttacaccaggcaaggctttccccccaccgggagcttcctgggctcggaagtaacaattgtcccaccaggaggccatcccagggtggtttttgaacattcgcctggttttgagctggcttttgtgaccggtctacacttgtgtttagtggcacctgggcctgggtcccctatggcctgggcaggacgagcgggctccccctggtgctctcctggtgcgcctggggctcactcacgtgctgcagcaccttgcgcggcaacttctcggagtgggcgatccattctttcattaagtctaggatgagggggatgaggctgaccacgccgccgtagtggttccgggcctcgtcacagctgaggtggttcaccacatcatgagggtattttgctctgaggctgcttaagtcgttgctttggctaacgagggttttgcatttctccaggaggttgttggtgactggggtgccagagtgcacggcctcaaagtgctggcagagcttattcagctctgaacagatgtccaggaacatgagcagaacccgccggtctgtggagctgttgcagtagtgttccatgtagctctgcacctgtccaatgctggagatgggccggatcttgtcgtgggcgttctccctgcagtgctccagagcggcggtgaaggtgagctgctgctgctggaagagcttgtacttctgctcgatgctgcgaagggattctttcacctcattcattgtcttcctctgtggtcatttacaggagaagaggaatccgagccgcagagcgcgtcagccggggaggtcggggcgggggcgacccgcgcgaccgaggatcgggtatctgggcccggcgcggagcccgcccgct

SEQ ID NO: 450804 - DNA, 1070 bp, Homo Sapiens; identical to SEQ ID NO: 151672
  misc_feature (225)..(240): n is a, c, g, or t
  misc_feature (613)..(626): n is a, c, g, or t

SEQ ID NO: 450805 - DNA, 1488 bp, Homo Sapiens
  misc_feature (48)..(48): n is a, c, g, or t
  misc_feature (81)..(81): n is a, c, g, or t
  misc_feature (110)..(110): n is a, c, g, or t
ataatatggatggaaagaaagagcatcctttttcccaaagtgaacccnccggcaaagagcccattttaagcttttaagccnagttccctgtttaaagaagattccattcncttcccatgagctgttcccctaagtgaagtccaaaggagaactccaggaaagttagctgactgagaaggccaaggaacccctgggcttgtctgagtggcttgcgtgaacactgcgttgtttcttcagatcatactttccactggtcagcagcactgaatcgcttttgacattttctttcaaatcatttccagtgttaagcatgtgagaatctctgatatgaaaagagccatcgtcacttctctctaccacaagatgatcaatatgtacagttacaggagctggtttcaagggatactgtactactccgggggactatcatcttttaaatttattttcgtgttagaaaacttgtatcttcattggcattactgttgcaacagtttcatcttccaaaaaatgttgaatattcataagagaagatgtaagaaactcagtgctgaagttttctatgtggcactgcagaaatccatttttttctgcaagtaaagagtgtattacagcaccaggcccactttcaaatctcagagaaatctcaggagaggatttggaatgaattacagctttctgatcggaaccaactggacgattacaaagggtaatgccggaaggctgatattgccttaattggtctggtgtcacctggttcacttgaagacagatttctgtatcttcccctcggatgtcaatttccccattaacaccagtaattttaaataccacaacggacatcaggtcatcatgattttcctgagcaccctctgaatttgtactgatggcatctggagaagtttcaccataattctgtaggtttgcaccagcattcacactttctgctgtgcccctgtaatttgtagttgagttctttttatttcctttttccaaaaacatatggctatcacttccatcactttctaataactgttcttccaatatcatgctgtcaagtgaaatggtatccaatgacatttgtgaagagcttcttttcatattcttataagaaacacagagaggagccaggttgggtgggcaacgttccttaggctttccacttaaagatgactgtgatttaagtgttctaactgggggggtctcttctttactgatatccaggttttcagagagtgaagctgcttctggaagcaaatcttcagctttaaagatggactctatggtttcatttcctttactagttaaagtacttgaaagtatgttttgattaccatcactatcaaatgaaagtatattcgaatcttctctgtagtttaagatactacttgaatctgtataaaatgaatcctttttgtcacttgtttctgatccaatttctcctgagccacttttgtaacaagtccactactttcatcttcacttattttc

SEQ ID NO: 450806 - DNA, 582 bp, Homo Sapiens
  misc_feature (34)..(34): n is a, c, g, or t
  misc_feature (41)..(41): n is a, c, g, or t
  misc_feature (53)..(53): n is a, c, g, or t
ggggtattgtattattacaaacagaagccgtaancctacgncggttgcacgcnacgggctttccccccagggaagtgccccctctcagagaccctgacatcagcgtcacctggagcagagtggcccagcctcagactcagagcacgaagacccaggcctgcaggcctggacccagcccggtccccccgtcccagctccattcttcaccccacaatctgtagcccccagccctgccctgtgaggcccggccaggcccacgatgctcctccttgctccccagatgctgagtctgctgctgctggcgctgcccgtcctggcgagccgggcctacgcggcccctgccccagtccaggccctgcagcgagtgggtatcgttgggggtcaggaggcccccaggagcaagtggccctggcaggtgagcctgagagtccgcgaccgatactggatgcacttctgtgggggctccctcatccacccccagtgggtgctgaccgcggcgcactgcctgggaccggacgtcaaggatctggccaccctcagggtgcaactgcgggagcagcacctctactaccaggaccagct

SEQ ID NO: 450807 - DNA, 1054 bp, Homo Sapiens
cggtttgaaagggcagtcaaaccctcaggggggtggccggattctaccggttgttgacacaacgttgggcaggccaacctgtcatgtgggtcactgagggtagcttcatccaggataaacaggtccttcaattcgcccagagagaaaggggcgttttccatcctgctcctcatccaccacacagctgctcagtgccttcttgtggctctgacactggaagatcttctcctcaatggtccctgcagacagcaggcggtagatatagcaagtcttcttttgaccatctcgccagacccgggccatggcttgttcatcattggctgggttccagtcagggtcaaacatgaccagccggttagccccaatgagattgaggccacagcccccagctttgctgctcagcatgaagacaaagtcagggctcgatggactattgaagcgttctacaaccttggctcgcttcttaatggacatcgtgccatccaggcggacgtataagtacctgacagctggggctccagggccttagagctgtaaccaggagggaagaggtccaaggcacccacaaagccatcctcctcttccacacacttatcatagattagagctggatgattacaaagcttctttagcgaggtgatggaagaaagggaagacacactcatcttgccctcaagcaattcttctgccggtttggcttgtctcagaaacctcttgtataactcagtctgaaggggtgtcagcctacaacaaacgacctgctcaatcttcacaggcagatatttagaaaggatatcagaagtcctccgtatcaggcatctattcacatgctggtgagctcccgcagccgctcctctcctagctgcctgtctgcctcactagcagcagcgtctcgacccttcaaattggcattcaaatgcttcttgaattcatgggcagtccctaggatgccggaattaacaaatgtaccagctgaaatactcaagcagatcattctggatgggagttccggagatgagcacccgccggctggtgttcaagcctgtccaggctt

SEQ ID NO: 450808 - DNA, 1463 bp, Homo Sapiens
  misc_feature (24)..(24): n is a, c, g, or t
  misc_feature (38)..(38): n is a, c, g, or t
  misc_feature (72)..(73): n is a, c, g, or t
  misc_feature (76)..(76): n is a, c, g, or t
  misc_feature (91)..(309): n is a, c, g, or t
  misc_feature (311)..(321): n is a, c, g, or t
  misc_feature (323)..(333): n is a, c, g, or t
  misc_feature (335)..(338): n is a, c, g, or t
  misc_feature (340)..(351): n is a, c, g, or t
  misc_feature (354)..(367): n is a, c, g, or t
  misc_feature (369)..(395): n is a, c, g, or t
  misc_feature (397)..(402): n is a, c, g, or t
  misc_feature (704)..(704): n is a, c, g, or t
  misc_feature (719)..(721): n is a, c, g, or t
cggtctgcgtcggccggggtcttntggcgccggcgtgnccggggccacctgccgggcgcccccgtctctccnncgngggcggcgggagtcnnnnnnnnnnnnnnnnnnnnnnnnnnnnnnnnnnnnnnnnnnnnnnnnnnnnnnnnnnnnnnnnnnnnnnnnnnnnnnnnnnnnnnnnnnnnnnnnnnnnnnnnnnnnnnnnnnnnnnnnnnnnnnnnnnnnnnnnnnnnnnnnnnnnnnnnnnnnnnnnnnnnnnnnnnnnnnnnnnnnnnnnnnnnnnnnnnnnnnnnnnnnnnnnnnnnnnnnnnngnnnnnnnnnnngnnnnnnnnnnngnnnngnnnnnnnnnnnnggnnnnnnnnnnnnnngnnnnnnnnnnnnnnnnnnnnnnnnnnngnnnnnnaaatttgggggcaaggcggcagcaggttgctgcgtattctcagcgttcgcggcgggggggtggcggggtcttgcatgggaagaattatatcagtaagtgggcctggcggatcagggaggagggggtggcggtaatgagggggctacaatcagctcccttgaaggcagcgattaagggctcattacccgctggggtgaggggatcctgggaaaggcagcggggcggggggattaggttaggaggtggggcagtttagagggaagaagagtgggacacccccaggggagtccaaggaggcctgncctggagaagaggannnttaccctcccaccccccactgggggaatatgactaaggaagcccccagaagggctgaaaggagaatgtcccagggaaagtgagctgagccactggagctgggtgcacagcaggccgggggcagcttggcaggagtaggggtgtcacggcttctccagctggacatctcctatgttgaggctgcccacatctgggtaggtgccctggaggccccgggagatgtcctcatacatggagcagtcgtccaggttcaggccttcataaaggttttcatcttcatattcatccccggcatccaacccgagcttctcgttctgccatcgtttcctgaacagcagcagcgtcccaggcactaccgcgcagaacaggaggatgatccccccggctgtgatgattcggttcttggtgccctcccccatgtccaggaagggcctggggggcggctcattggggtcctcgcccgggcccaagaactcagggggccacgtgtagttgccatggaggacgcgccaccaggtgacgttggcgttgttgctgctattgtgcgggcattggaagtgggcgtcttcccccaggctcaccatcaatgatgctgggaccttgtgcatccacagggcctggcacccagggcccaggtagacagcagacagcaggaagaggaggaagatggtggcaggcagagcttggaggactcctggacccccaggcatcttctcccagtgggttggttagtttgagttccc

SEQ ID NO: 450809 - DNA, 886 bp, Homo Sapiens; identical to SEQ ID NO: 313908

SEQ ID NO: 450810 - DNA, 1224 bp, Homo Sapiens
accaaggaatggctggggttgaaggttttttgctcaaggttctgcgctaacattgaagaaccagtttgtagggagtttcgtttcccaaaagggtctagtttcaaattggttctcctccctttaacgctggggtttctttcatggctcttggcatcagagaaaggaggaggtgcctggagtacgtttttaagcattcgttcccaggccttccttgtcttttgaggctttttcaatgtctttctgcagtctcaataattttggttttagtaaagactttcgtctctctttaatccattgcactgttaggatcttctcaaaagtaatccgttaacaggaactcagatttgttttctgtagataaaattgcagtttcttccattacagcctggatatctttttcaatgtcattcttgctgatggcacagtgaatctgcgtgtggcatagtggtcagggtttggcccaaaagagaaatatgttggctggtactggtttacgttattgcattaaagttgaattctttccttctccagctccagaatgctctggtagcagttctctagtgtgttttcccatttcagtctggtagaataacccgccatgtttttttggtagtaattttcatcttcctttgtccgacttttcagttgattttgtcagtttattgaggagcttccgcttctccttctcagtcatagattgcttggagctttctacaagctggaaaagtgcttcatgtttcttggtactaaccattaatttcttcttggccttaatttgctgattccagttgctaatgacaagatttgctgtcttttcaacttcattgtcaagtgattttctcttcttctcttgtacatttaggacttgataagtcggttttattgcttccaattcaattgctttgccaagtttttgatgcaggtccgctgtggatttcattccctctgaggcccaggcccaggcactgctaacacaactttttctcgtgttctgtaatgctttgctcagcttgcttgccagtttctgaagtcctttggcatagctaatttccaggtttgccctttgctgaagaacagatgtgacctgtttgcagaaattctctccattttgagaaaactcctttaggttcttgtatactttattatacggacaatctgtcagtgggtccctcatgttgaaatgtgtctggcttttgtcctttcacctacgctccagcattctgg

SEQ ID NO: 450811 - DNA, 929 bp, Homo Sapiens
agatggcggctccatggagtcgtctaccgctgtgtgagaaaccgcttctccgtgagagctgccttagacgaaagggggtgtgtgaaaggaattgaggggctcccttcccgcttgttgacttctccccaccgcaccctttcccggaactatggcttcggccgtgtcgcccgccaacttgccagcggtgcttctgcagccccgctggaagcgagtggtgggctggtcgggtccggtgccacggccccgccacggccaccgcgccgtggccatcaaggagctcatcgtggtgtttggcggcggcaacgagggaatagtggacgaactgcacgtgtacaacacggcaaccaaccagtggttcatcccagccgtgaggggggacattccccctgggtgtgcagcctatggcttcgtgtgtgacgggactcgcctcctggtgtttggtgggatggtggagtatgggaaatacagcaatgacctctacgaactccaggcgagccggtgggagtggaagagactcaaagcaaagacgcccaataaacgggccccctccgtgtcctcgactcgggcacagcttctcccttgtgggcaacaaatgctacctgtttgggggtctggccaatgatagcgaggacccaaagaacaacattccaaggtacctgaatgacttatatatcctggaattacggccaggctctggagtggtagcctgggacattcccatcacttacggggtcctaccacaccccgggagtcacatatctgccgtggtctacaccgagaaaagacactaagaagtccaagctggtgatctacggcggatgagtggctgcaggctgggggacctgttggaccctagatattgacccctgacgtggaataagcccatctcacggggtggcgcctcttctcgcagctccactcggaaacac

SEQ ID NO: 450812 - DNA, 1059 bp, Homo Sapiens
tccggaattcccgggatggtaacaaccccggaaagtagactcaccgtcttggtctagagactgacccctgcacagacagaccccttcccctctctgcgaaaggaccaagccccagaagtcactccatctcctacggctcgcaatttccagaggccccctggcaccttccagcctgatgtcgtgcgtcaagttatggcccagcggtgcccccgcccccttggtgtccatcgaggaactggagaaccaggagctcgtcggcaaaggcgggttcggcacagtgttccgggcgcaacataggaagtggggctacgatgtggcggtcaagatcgtaaactcgaaggcgatatccagggaggtcaaggccatggcaagtctggataacgaattcgtgctgcgcctagaaggggttatcgagaaggtgaactgggaccaagatcccaagccggctctggtgactaaattcatggagaacggctccttgtcggggctgctgcagtcccagtgccctcggccctggccgctcctttgccgcctgctgaaagaagtggtgcttgggatgttttacctgcacgaccagaacccggtgctcctgcaccgggacctcaagccatccaacgtcctgctggacccagagctgcacgtcaagctggcagattttggcctgtccacatttcagggaggctcacagtcagggacagggtccggggagccagggggcaccctgggctacttgtccccagaactgtttgttaacgtaaaaccggaaaggcctccacagccagtgacgtctacagctttcgggatccctaatgtgggcagtgcttgctggaagagaaacgttgagttggcaaaccgaaagcatcactcgtgttacgaagccgtgtgcaacagggggaaccgggcctttcaatggtctgagcctgccccaagccgggcctgagattcccgggattaaaggctgcaagaggctaattgcgctcttgggggaccagtgagcccaggaaaagcctccttcaggattgctaccaaaactgatgaagtctccgatgggggaaacca

SEQ ID NO: 450813 - DNA, 1179 bp, Homo Sapiens
gggcataaactgggtgacagagtcagaaaactccccagctaaacacccgtaagacttcatacaacacaatactctatactgtgatgatcacagctgccaaggctacctaaaagaagacagttatctcatatttggctgccagctttttatctttctctcgaccacttaaaacttcagacttcctgtcctgctggtatcatggagaaagtccaatacctcactcgctcagctataagaagagcctcaaccattgaaatgcctcaacaagcacgtcaaaagctacagaatctatttatcaatttctgtctcatcttaatatgtctcttgctgatctgtatcatcgtgatgcttctctgaagttctgctacaacctctagatctgcagcttgccacatcagcttaaaatctgtcatcccatgcagacaggaaaacaatattgtataacagaccacttcctgagtagaagagtttctttgtgaaaaggtcaagattaagactaaaacttattgttaccatatgtattcatctgttggatcttgtaaacatgaaaagggctttattttcaaaaattaacttcaaaataagtgtataaaatgcaactgttgatttcctcaacatggctcacaaatttctatcccaaatcttttctgaagatgaagagtttagttttaaaactgcactgccaacaagttcacttcatatataaagcattatttttactcttttgaggtgaatatcatttatattacaatgtaaaagcttctttaatactaagtatctttcaggtcttcaccaagtatcaagtataacacaaatgaagtgtcattattccaaatagtccaactgactcctcacatctgttatcttataatcaaagaactatttgtagtacctatcagaaatctaccttctaaaacgaacatgtacttttctatgccacattaacctcttttaacagttgatgacgacatcagttgggaaaagtaggccatatccttacattgataaaattcctttagtacattttcaagaaatccagaatctagtcctgtggggacccataatcgttcagaatttgtgtcccgatgaacggggggatatgtggaccgaattgccatccacgattcaccaccgaaacaactcctagggacgcagaaattgcgcaaactactcaccaca

SEQ ID NO: 450814 - DNA, 671 bp, Homo Sapiens
tgctgggggagagctgggttttcatggggcggcagccgaggcaggacccgcagccatgaaccgcttcaatgggctctgcaaggtgtgctcgtgagcgccgctaccgccagatcaccatcccgaggtggaaaggacggctttggcttcaccatctgctgcgactctccagttcgagtccaggccgtggattccgggggtccggcggaacgggcagggctgcagcagctggacacggtgctgcagctgaatgagaggcctgtggagcactggaaatgtgtggagctggcccacgagatccggagctgccccagtgagatcatcctactcgtgtggcgcatggtcccccaggtcaagccaggaccagatggcggggtcctgcggcgggcctcctgcaagtcgacacatgacctccagtcaccccccaacaaacgggagaagaactgcacccatggggtccaggcacggcctgagcagcgccacagctgccacctggtatgtgacagctctgatgggctgctgctcggcggctgggagcgctacaccgaggtggccaagcgcgggggccagcacaccctgactgcactgtcccgtgccactgtccccactgaccccaactacatcatcctggccccgctgaatcctgggagccagctgctccggcctgtgtacca

SEQ ID NO: 450815 - DNA, 1402 bp, Homo Sapiens
  misc_feature (531)..(541): n is a, c, g, or t
  misc_feature (891)..(963): n is a, c, g, or t
tgtgctgtggtcgtgtggtcggcgcggcgtcagctgcgcctggtggtgctgtccgtgactgtcggcggcggttgtacctcgtggcgctgctctgggcggcttgtctgtcatcgatcagtcattcatcctctccatcgccatgcttcccctcccgcgttcgatcgagttcttatgtcggtgcgctccccgccgcgtcggagtcctacgaggcacgccgcctcgcctgggtacactgttcgttggcgtgttcattccccgtgcgttggtctctacgcgcgcgtctccgcttgggcccttcgcctgaggtcgcatgagtggctctgtcttcatcgtatggtgttgttttgctggctgggtgcccctcggggggggtagagtaggttgtgttgtgcgcgagtcatagcagggccggcgctggtggtgacggctagcgtcgttccccagggcgcccggtggccgtgttttgtaacccttccttggtggggtgttgccgcccgcttttgacgtcgcgctgttttggtccttgtttcnnnnnnnnnnnctcgctggcgggggtcggggtgtgttctgttgtcttggtgtggtggtgactgttgttgtacccccacagttgtgtgagtggacccgacgcacccaggggtgatggttggggttctctttcccccgagattcattttgctctggggtgggcgcctatgctgtggtcgctactccttctggtatggtggttggtttcatgctgcgctggccgtgcgaggctctgccgattgatcatgcgctgcgctcgccataggtggtcgccacgtgctatgctaatagtagcggggggggtgcaggctctgtgggtgccccgtaggggagtacttttatgtcggggccctcccctcttgnnnnnnnnnnnnnnnnnnnnnnnnnnnnnnnnnnnnnnnnnnnnnnnnnnnnnnnnnnnnnnnnnnnnnnnnnccagggttttatctatttattatgaatttcttggacacagatgtttattgggtgtcttccatatgcaagtattgtgcttggcctgggaagacaagggtggaagtggagaatgacaacagggcctgtcctcatggaacttacatgcagggcaaattgggtgcacccagagggggcctagaacccaacctatgacctccacccctgaccgggtcaggtctctgtcccctttgtccctctgagaggcacgagatgaactaactcttaaagataactaggcttatggacaagtggatatgagggggaagggcatcccaggtggaggggacctctgggcaatggcactgcaatcagaccacgtgggctgagtttggggagcaggaaggtcatctggtgtaactggatacctggtagctaattagagaggtccgcagagaaccta

SEQ ID NO: 450816 - DNA, 850 bp, Homo Sapiens
gccatgaacggccttcgtcaaagatcccacggctggcctcccttccgggccaacctggcccagtgccggggctttccttcccagaagcctgttgaggtccgggtacccccactctcaggaccccaaggtcaggcaccgtctaccctggctcagctcgtcacccaccgtctgaagccccttctctcaccaaaggttcggagctggcggggggctgaggtgttcacgaacagtcccagcccctggggctgcatgtccagttctgtgcggcatgagaaaggggctccgtggtcgtctctgctggccagcacagtggcagtgacctccgctggctcctccactgcgggctgccggctcagctcctcctcccagcgaagcagcaccaccgtgaggctggtccggggcgacccatcctccacttggcagcgcagggtgaagttctggcccaccggctgccaaggaggcaggggtgccagctccacacgctccgggagcctgtacacggtgatgttagaggagcctgttatctgggagccattgcagtacactgagcagaggatccgactgttgccagtcacgttgctgagattgaaggctgcccagcccatgccactggccaccagctcctttgatagggacgtctccaaggcgattttctcagagctgggacaatcagtactgcagttcacaaacagggaccctccagcagagagcacagggttctggggctccacccgcaaaaggaactcctgcccctggacacctggggtcagcagacagcagaccagcagagtccagcaggcctgggccacaacacggatggtaccatggtggccattctgacagaggaagg

SEQ ID NO: 450817 - DNA, 1397 bp, Homo Sapiens
  misc_feature (1332)..(1332): n is a, c, g, or t
ctgagatgcatggagaccttttcagcgtggttccacagggatcctcgtggagactatgggcttcttctttgttcactataccagggataatctggacatgtcggggacattgccgctcccatgttcctgtcgggggcatccccgtcccgtagggagtctctgctcctgaggtcctgttcgttgaagcaggaccttgccggtgagggaggacgggatttgggtgctgacaatcagtcctttatagaggatgcagccagcgagaatgtgaggcgagcgctggcaggtctgcagaatgcgggctgccttcagcaacaacaggggctccactttagtttggtccaagttccagagggaattgaaaatcttatgcagatcactggtgtttttcagaatttgctcgatgaaggtgtcccactccgtgctcagttcttcctgagaacagttctcataagctagggaaacaggtccattgtaaaaattaaagaatccaactagctgatccagaaaccgcttgcagctgacatcagggagctccacagcacagcccagcacccaaaggtaatctccatcaacttttatggcaaacttcagttttctcagacgaacaagagtaggaggagagtcagaaatgtcagaaacacagcgggacaactgccagcaatctgtccacaaagcaactcctgttggtctagcagggtctgggaaggataaaagtaacaaatgccagctcttgttggatcgccttcttcgctttaccttggaaccatcataaagaaaaaaataattccaccacgaggctgactttgcctctgtggaggtagaggtggccatctactgtgcagtcatcctcattctcttcatttaggttttcttttccggtatcacttctttctccctagctgtgaccgttcctctatcccccaatccagtgaatctggacgtggtaggtttcagtgttttcagtcacaactgccacttggttagttttcactcagcatggaaagttccacttcccttccttgcaggttcttcagtttcatgtatatttccatgcctcttacaactcagggagaaactataacaaagaatcctagcagaaaagtcaaatccattcctctggtttcctgagtatcactgtggctgtctgcagaaccacctcttcaagctcctctccaggaaagccaaaagtgggagatgcatgctagagctggtgttctaaagaaatttctagcttgtctagttcaaacccatcctgaagactcttattaaacgttttgaagtttccagatcccgggaattccggaccggaccagccgctttgtgttggggggntggttggtagggaggaggcggaggagaaggtgcctggggggcgggcggtgtggggctcttttccc

SEQ ID NO: 450818 - DNA, 1051 bp, Homo Sapiens
tcgtacaatgatagttctgttggtacattacaattgtttcagctagtaattctagaaatgccagaggtcctatgatgcaatatcataaaaccagggaactgacatacaaagtcaaatataaagatagtaacattcagtcatccacagataaaaggctatctggacataagcctgaaacaagcaagacgccatccactgcgatttcgccggttttgcccttgccacgttctgcttcaaaaatgatgcttttggtagcatcagttccttgatacaactgaattttccctgtcttccactgtttcatcctcactcgtggtcttctcccatgccagggcattgttactgtttttcacaaacactcgaagtttcccgactttgtctccggccagccggtaatcaaagagcaaacagaagttgctttggggttgcaggtcaggtaggagaagtttcaatcggccaatgtctttcttgtgacctgccaaggccggaactgccatatagaagccaatagcattatctcgatcagcaggattccagtcaaaatcatcttctctatcctgtttccagtcacagatcccatgattgaagctgcagtcaaccgagatatttaaatctgctttatgttccagtttggaagttagcgctttcctttggaccagaatcaggccgaattcacctgcttcattcaccttagggaaaaacacatctcctcgcaggcttcgctcctctatgtcattcttcagggctttctcttctcttttctcatcctcaagcccctctttcattttctcttcattcccttttttacctccatgagagttcccgcctctggaaactatctcttcatagttgaagggctgcaagttcaccttaggggtaggagccctggtgggttctggggtaacatttttaatttttgccttctttttcatgctgtttttgtgagcaagcaacttcttgattctgtctttgatggtcccaggtgctctgaggacttccttcacagaattttcagggatagcagaacaccgaagtccattgcctttataat

SEQ ID NO: 450819 - DNA, 1062 bp, Homo Sapiens
gcccctcccccgaaatggggcccccggaaaggccccttgtgggggttttccccagtttttgggcgtttggagtttcgaattttttccgggggccccgggttttggattttccgcccgggaggtttcccggcccaattccttccccccctggagctccatgaaggctgggcatgtggtcgcaagcctttgcggaatggagggccatttccgagccccaggggatggtagaagttgtaccccaggttgtccaggctgcgtgggataatgagtcccttcacaggttacgaaggtccatctcaaacttgtccttgtccaggggcaggcagagggcttgcaccttttggcagttgctccttggccagctggcgctcttggtgctgcagctcccgggttttcacgcattcaaccagctgttcctccgccacgcgtttgttcagcagcacgctttccttatccttagtgcaaatggtcttctccttggctatctccacctccagcgtcttcaccttctgattcagcatgaagagcaaggcatcgcagctcttgttcatgtccttgaattgatctctgcattgcttctcactcaagatgatggcagccatgtacctctgattgttcgtgtagatgacccggtcaccctggcactggcggaagctggcattgatgcggtccaggtcgcggcgagcattcagccacatctgcatgatggcatccttggcgcgggtggtgaagttgagctccttggtcaagttggactgggaggccgtgagccctaggagctgactgtataggccctcggctcggcgctcggtggcctgcaggttggactctgtgctcacgtgcacgttgccatagaccatgaagagcacgagccccaggatgatgaggaattggatgagggagacgaagaggaagaagtagcgcaggtaataccagcagccccgagagctgccccccgcccgagcgtaggaccctccgtgctccatggccagacccatttgctcgatcccgccgtccggtgcaccgtcctgctcaccaccagatcccgggaattccggaccg

SEQ ID NO: 450820 - DNA, 846 bp, Homo Sapiens
atccccgcacccatggcacttctggatatgagctggttgacactgaccctgccagagcagcctgaagcaccaccaaattatgcagatgtggtatcagaggaagaattctctagacacattcctccttaccctcaaccccctaactgtgagggagaagtgtgctgtcctgtgtttgcctgtatacaggaattccggtttcaacccccacctctttattcagaggttgacccacatcctagcgacgtagaagagagccagcctgtttccttcattctctgaacgtatttcagaaatcactgtgttcatcatcaaattagaatgttggttcttttccttctgcctttttgggaaagagacaggaaagattcacttgaaaacataaatgaacgtcaagactgaaggcaatagaaattaaagaatgtgagacagttctggtgggccggcaggattgccgcacaagtttatatgatggtcgtatatatatccctgttaaaaactgggatgaagatgtgcaaagtcacagaatgtaatggaagtcctgatggttacagagtaagtgaaagggtgcctgcgctgacgtgagagaaaggaatctgtaaacagtggaaacactgtgggagtttcccatggtgaagagtggaacgaaggcgatatgaactgaaggggtgaagacttgattttggagagggcaacaaaacaagggtgtgtgtgcataggagaatggccactccaaatacgaagtgagatcctgagtctttgggtgcttcatgatttcctaccatattcaggcctaaaagacattgaaaaagcatctttcttgcagatcatggtcataatgaggtccta

SEQ ID NO: 450821 - DNA, 820 bp, Homo Sapiens
tggagcccttctggaaagctagcacccacgatgtctattttgaactccaccttcttctggttctgcaagacagtgcatgtccaggtgccactatcctggagctccagctgagacacggagagggtcttccccccctgtatgtttttaccccttggactcctacattgcactgaggggctactaccaggggggctctccaaggtcagggtcaggctctgcccctgaagcaggtgggtgtcagagttggcagtcaatccgaacactagcaattgcacctcctccttctggtcctccacttcacagatgtaagtatctgagtcttctatcttaagattcttgatgatcaggggaaagtttccttggtcccaaaggcttcttcttgagtcagcgcgatcattcagcttggatggacctttagttaagaaggagccctgatttcccagaatctttatctggttggagtttttccagtggaattgtatgctcttcttctgggaagctgtacaggtcagttccactgtatccccttttttgcccagcaccactttctttccctgagtggctgctgggaggagcgccagttgcagcaccagaagcaagtgcctaaaagggactccccggttcattgtggccttgccgagggaggcaggggcctgagccagtagggacctgagcccacagaaatggcagggcctctgggcttgcgtctttcttgcccgctgcttctcaaacaggcgtatctgtgtgaggacttggagctctgcaaccaggagcccagtggggagggtgctttgttccttctgcagagtcgtgcttaaat

SEQ ID NO: 450822 - DNA, 1151 bp, Homo Sapiens
ggcgcgcgaatcccctcccttgactcttccataccttccttgtgtcaatattatggcacacttcgccgcccgcaatttttcggtgaaacttggtatccgtttcccacatatctctggggttagctttgccgtgtcaacggtgttcatgttgctgtaccacaggtcctctcgtcggccttccggagcctcttcatgtgaaattaaaacactaaatcttgggccagaagcattgctttttcgagttttatcagccaaaggaaaaggtgtggaggttgcacggccttctgagactgcccctccatacagatgttttcttgttctcccgcctgtttctcaaagatcctgtcccaaccgtctgcagtttggtgtgcgcacttgtgtaaattaaccagagattgggaggaacttccactctgagacctgggcctgggctttcaggagatgacacaggacgtcaacttccagctggaaactgctttccaaaggactgaggattgggtggtgaaatctggagctgtattttttcatgatggcatccaaaaggccaacgagctcttcagcattgatgaacttctgtgtgctgagggtgtacatcttctcatagaagtctgctatctccatccgagccttaacaaagaagcagagctgctctgacaggtgggaaaggagttcttcacacgtgaggaacagtcccacccagggcaccacggccagtcaccaccttcttcagctcattatgcaatgaagtatagatggtgcggatggaagtcctgtcactgctgtaagtaaagacatggcacccactaggtttgctgaccgcgcatgcgatagcgctgagctgcgtgtcgaatacgaccgtattctcgtgcgcagcaggcgcagcgtggcgcatcaaagggctcggccacgcaagcgtacacgacccgaggcgtgacctcctcacgcgctctgtgtcggcctgtcgttccttctaccacatggtcctgtagcactgtgtctgtatacgtacgaagagtagctcacaggtgtgtagatgacagacacagtgctcacagcacacagcctgttgcacagccggggaacgcggggcggcacagacgggatagactcaccccatgcgagctgcgcgcccagctcgacccccgtccgct

SEQ ID NO: 450823 - DNA, 1056 bp, Homo Sapiens
  misc_feature (724)..(743): n is a, c, g, or t
gtggggaccctctcttcccatcaaatcatccagctcagtgtggggcgtggcagggggtaaatgaagccagccaatgtgttaacctgtctctgtcaacctaagaatgttggccttactgacacacctttgctccatgttcaagaccagaagtagctgggatttgtttgcaaattgggtaattagtttaaaaatctgtgattacatttttaaatgaaattttcaaagtggcctagattgaggtgattcagataggtttgcgaatataccattttatattgttgagaaagaacaaaaagggaatttccagatgtcctagaaatcctagcaacagatttctctggttgtcagtttccctggagaaggcgccagataggaatctccaatcagttgtttttctcttcgcttcaggcccttacacaaaagccatgaagagatgttcacctacccggtattttaaatgttctgtaaattattagccaaatagaactgtaatggggttgtatttatgggcgcctagaaagaaaacacaaggacttggtaggccaggaagaacaagattttaaaatttagaatgaatagcccttctgggttttctttttgacaattcttggacttgaggtaaaacaaggaggattgtggccggatttcagatcccaaagccagcctccatcttaggcctttgcctcattgtgccttttaggttttcttacccaccgtctcctgnnnnnnnnnnnnnnnnnnnnctcctacccctatcttgggacattcagaaactgcctgggtggtttgagaagagacaacccagtttgatctgcaatacaaggatccattcgtaatctctctctcactgatgttattcccccatctgccgtcttggttcatctcaccacagaagggcatttagtcctacccagccatcggctgcgtatgacagcaggatggcacttcccatttctctgtggttagtgctcgagtgaaaacctctttcagctgagtcctctgaggttctgctgttgagtcctgggtggctgatggaatgattgaggaggtctggtc

SEQ ID NO: 450824 - DNA, 875 bp, Homo Sapiens; identical to SEQ ID NO: 151693

SEQ ID NO: 450825 - DNA, 1169 bp, Homo Sapiens
  misc_feature (127)..(142): n is a, c, g, or t
  misc_feature (267)..(275): n is a, c, g, or t
gaaaaaatgtcgcgtggggggtcgggacacgccattagtttttaccacccacggggggcgggaggttttccgtgggtttggccccaacacaggttgggttcttccccaagggtgtgggcgcgaggannnnnnnnnnnnnnnnaggggaacggtgaggaaagtcccgttccccgggggaggacaacagtgggtgcgcccgggggttagggaagggaggaaaggccccagacctggtcggcccgagggaagcccagccggggtgaggtnnnnnnnnnagggggccctttcccgagggaagccggagccccagtaccttatggagaggacaccgcaggcatggtactgggtagttgtttccaaggcggttgtggggcaacccaggaggttcactctgggcccagggagcaggcgggatgagggcaagaaccaggagacccagagcccagagaagggtttgatcttggtcttgttcaggggccagctgcagggttttccaggtccccagagaactgcagcaggaggaaccccaagggtttgatggtgagcttcccagctgggaagctcggcacggctttggtaggggtcctccagggcctgtcaactgcaggagggtcagccgcacctggtgccagtaaggtgagtctggatttgactccatctcttcgtgcatccagtgtaggttggcctccaggaagctcttcagcctctcgcagtagccgacttcatgctcgaaggggccgcagtaattcaccaccgtgttcatccagtgcatgtagatgagctcctccgacacagcagcctccaccacaccggctgcataggcctgcaagctgtcattgtattggccacttgtgcccagctccaggaaggcccacccagtctcgcggatggcgttggtgaggttggcccaggccacggcgtcagggtggcgtccgtccaccataagcagctggcccagccgagacgtccaggagcaccgagcggctgcgggaggctggagggacctgcccatcgcgcgcccagcggccccccggcgctgggatcgcccccgccaggccgctcaggaacggcccgaccagcagggccagcaccagggccagcagccagccgcccgcagtcagcgacccgggccaggtggctgccggggtagcagtacatctggcccacca

SEQ ID NO: 450826 - DNA, 1131 bp, Homo Sapiens
  misc_feature (53)..(89): n is a, c, g, or t
cggatgtatagactcactatagggcgaaccggagcttatcgcggtggcggcgnnnnnnnnnnnnnnnnnnnnnnnnnnnnnnnnnnnnnatcaggccaaatcggccgagctcgaattcgtcgagagcgggcgagatccggcttggcgccgtgacctccatgtgggagctccagctctataagtaaacactctgcgcggcgcagacatggcctcttcctatctttgaggcggtgtctgcggcagcgcctcagagtggttccggtcgtctctcctcaagtcggctagtcgggcgcgcgcgctgagagtcgtcgccgcctgtcgggcccggcgtccggtcggtccggtgggcgcgctcgcccgcctgccgctgagggcccgagccgcagggaaagcggcgcgggccgggcggggcgcggcgcccagagctcagggggagacaaaggggaccggttcctctctaggcgccaagatgtggatacaggttcgcaccattgatggctccaagacgtgcaccattgaggacgtgtctcgcaaagccacgattgaggagctgcgcgagcgggtgtgggcgctgttcgacgtgcggcccgaatgccagcgcctcttctaccggggcaagcagttggaaaatggatataccttatttgattatgatgttggactgaatgatataattcagctgctagttcgcccagaccctgatcatcttcctggcacatctacacagattgaggctaaaccctgttctaatagtccacctaaagtaaagaaagctccgagggtaggaccttccaatcagccatctacatcagctcgtgcccgtcttattgatcctggctttggaatatataaggtacacatgaattggtggatgccagagcatgtcggccttggtgcttggttttgaagcacacatacatagtgttactagagcttctgatggacagtcaacgtggcaaaactccactgaagaatggcagttcttgtaacaaggactaatggaaatatacagcataaatccaaagagaacacaaataaacttggacagtgtaccctctacgtctaattcagactgtgtcgctgctgattgaagacgttatttaccatatccaggtatgattgaatacccag

SEQ ID NO: 450827 - DNA, 1476 bp, Homo Sapiens
tgagagttagggaaagtccgttcccactgccctcggggagagaagaaaggagggggcaagggagaagctgctggtcggactcacaatgaaaacgctccttcttttgctgctggtgctcctggagctgggagaggcccaaggatcccttcacagggtgcccctcaggaggcatccgtccctcaagaagaagctgcgggcacggagccagctctctgagttctggaaatcccataatttggacatgatccagttcaccgagtcctgctcaatggaccagagtgccaaggaacccctcatcaactacttggatatggaatacttcggcactatctccattggctccccaccacagaacttcactgtcatcttcgacactggctcctccaacctctgggtcccctctgtgtactgcactagcccagcctgcaagacgcacagcaggttccagccttcccagtccagcacatacagccagccaggtcaatctttctccattcagtatggaaccgggagcttgtccgggatcattggagccgaccaagtctctgtggaaggactaaccgtggttggccagcagtttggagacagtgtcacagagccaggccagacctttgtggatgcagagtttgatggaattctgggcctgggatacccctccttggctgtgggaggagtgactccagtatttgacaacatgatggctcagaacctggtggacttgccgatgttttctgtctacatgagcagtaacccagaaggtggtgcggggagcgagctgatttttggaggctacgaccactcccatttctctgggagcctgaattgggtcccagtcaccaagcaagcttactggcagattgcactggataacatccaggtgggaggcactgttatgttctgctccgagggctgccaggccattgtggacacagggacttccctcatcactggcccttccgacaagattaagcagctgcaaaacgccattggggcagcccccgtggatggagaatatgctgtggagtgtgccaaccttaacgtcatgccggatgtcaccttcaccattaacggagtcccctataccctcagcccaactgcctacaccctactggacttcgtggatggaatgcagttctgcagcagtggctttcaaggacttgacatccaccctccagctgggcccctctggatcctgggggatgtcttcattcgacagttttactcagtctttgaccgtgggaataaccgtgtgggactggccccagcagtcccctaaggaggggccttgtgtctgtgcctgcctgttctgacagaccttgaatatgtcaggctggggcattctttacacctacaaaaagttattttccagagaatgtagctggttccagggttgcaattgaattaagaccagaccagaacaggagaattacggagacgacacggctatacgcaccgacagatttcagaattgacaca

SEQ ID NO: 450828 - DNA, 1338 bp, Homo Sapiens
tatatagatcgagccggtaccatcagaagtactgtcccttgcgttggagactcagcactcaccctgagacaggggcctcggaaagaaagacctgaatggtgtggaggaaagagccctgagctgggagacaaggtccctccagctactgctccaaccctgacttgctgtgtgcctttgatcaagctgtctctgggctttagcctccccctttgtaaaacggggcggggaagaggttgagatggcatgggtgcctccagctctctcagcatgattctgagaactctgcgggtagctctggcctgcccctttccacgccctaccgcgatgtgcgcacaacagtattgtgacccttgtggtgtactgtagattttacctagttttgtttcccgtcaaacacataaagaaaaagtaatctttcccaccccgcccccattaaaataataatcatgagaatgaatacacagggaggaagactggaaaaaatgaaagggaaggacttgctccctcaaaaggaaggatctcagtttgaagtaatgtagtggctgttgcacagggttagacgtatctcgccgaaaggctgggcttgtctcccgatttgaccacaggccggggacatttgcaaacacgtcttcggttcctgtggttgcagtaaagggtgataaccagtgacaggagaaggaccccacaagtcccggccaagggcgcccagatgtagatatcacaggcgaagtccagccccctcgtgtgcactgcgccccccgccgctggccggcacgcctctgggcgcagggacaggggctgcgacgcgatggtgggcgccggtgttggtggtcgcggcgctggcgtcgtggtgggcttcgctggcaggaagaccggcacgaagtggctgaagtacatgatggagttgctcagggccgagcagaaatagtagccctcgttctctcggcggaagtcgctcagggtgaggacgaaggtgtcccccaacctcttgcccgagaaccgctgggtgtccagcccctcggccgccttgggcttgttttgggagaggtataggaggaaggtgggactggcggcggcgccgcgcggctggaagagccacgagcagcccgacgtcgggttggacagcagcacctggcacttcagctccactgtctcgcccaggttccaggtccgatccagcggcgacacccggaactggctcggcctggcggcgtggagcagcaaggccagcggcaggagcaaggcggtcactggtaaggccatgacgcgctccccaggacgctgcttggctcgaagctcgggcgcgaggggaggcgcgcgggagccggtggggcgccg

SEQ ID NO: 450829 - DNA, 1146 bp, Homo Sapiens
ggggttaaaaagaaattttttgaaattttcccctttcaagccctttccaaatttggccaaagccctttttctgggggccagccctgagaaaattcttggctgttcccaccagctagaagcaagtttgcaataaagttttcccagggtaatcaaaagccagccgtctaagtatttcatcatccaaggccctgtaaggttgcccacacattttcccatttgtagcatccccacagcttgccaggttttgtcccatagagcccagttaatattagagagcaatccccattggatgagggcactgctaatctccagcacaatggccaattaagatatttaccttccttccagtatcagcgtcccacattacaacggtatgatcaaaagaccccgtgatgattctgtctcctgaggtgttaaatgacaaggagatgatttcggcagaatgtcctcttaaggtgtaaacttcctcgccattctgaatgtcccacaatttggctgttgtgtccatacttccagtcgccaccaatgtgctttgagggttaaatgataaacacactatttctgctgtatgacccctgaaggtatggtaacattttcctgtttccacactccagagtttacaagttttatcaaaggacccagtggcgattttgtcaccgtaaggattgttgaatgctatggcataaaccacattcctgtggccctccagcgtgttcagctcctctccagacgcagtgtcccagagcttgcacgtccgatcatagcttcctgtgataaagcatgagcccgatttgttaagtgcaacattagtcagtggcaatatatgtgctttgagaaccttaaaaagatagaacgtgtgattgctgttctggccgagtttctcttgcaacctctgtatcaaaagtttgacttgctctgttcgtgaagctgtgagtagaggttctgccttctggatttcttctactaacgcactgacatcagtgctgggaccaagatcaagcaaatctatggacttagtctttaattctccatgtttttcatattccaacataattcctggcgggtaataccggagcaggaggctcttgagcttcattttcttgctctcttatccccggccgatcccgggaattccggaccggtacc

SEQ ID NO: 450830 - DNA, 1028 bp, Homo Sapiens; identical to SEQ ID NO: 151698
  misc_feature (75)..(85): n is a, c, g, or t
  misc_feature (739)..(823): n is a, c, g, or t

SEQ ID NO: 450831 - DNA, 847 bp, Homo Sapiens
  misc_feature (61)..(62): n is a, c, g, or t
  misc_feature (87)..(88): n is a, c, g, or t
  misc_feature (130)..(130): n is a, c, g, or t
gggcaaaggccgtgggtaaaagtttcccattgaaaaaatgtcccatagtctataagaatannaggcctgggatacagccaagatgcnnataatgcattagccaatctttttctttagtggagatttcttntaagcaaccacccagtacaaaacccactgcagggtatgtaaatcagcagatcagcaattaaaactgttgtacgcatgaggagcttatgtgcctgactctcatatccacgtgatgtatggagagcaatccagtctggatttataaactttgccacatatgcacataggagactatgataagctgtaagaggtgggtaatccaatcccccatactgtaaattgttatcactgctgttaaaataccattgtttgacccggtaaattaaaagttatttcttgccagtgtctctgagcttcataatcaccaaacatagcgcggtttaccacgcacctgaataagaattaagagacactgtccatcgtactgttagtcctattaaaaccactactgtcatcaagtaccatttctccatagttcttcaaatttagggaggggaagaaaacacagcaccagtgccagagtacttttaaaacgtggtcaatcacttcttttcttgttcagagaaatgttatcacttcttgaaatgttatcgattcttcgcacttaggagtttgagagaattttaatgatgcttggtttcccaatagtcaaaacttgattatgtctatgtagaagtatccccgccgcccgccggccgctgggattcgcgcctgccgtgggtcccaggaaggcgcatgcgcgctcgcccccgcggcggactgcccctccggccttccg

SEQ ID NO: 450832 - DNA, 878 bp, Homo Sapiens; identical to SEQ ID NO: 151699

SEQ ID NO: 450833 - DNA, 1455 bp, Homo Sapiens
ttcatttcacgggtgctgatgctgcggctccctatcactgataaccggccttacctttgcgatatttcgtcgaaggaacgtgatcgatttcatcaaatcctcactgtttggccttggcagtggagttgccgagcaaacccaggtcccaaaagaaaagccacagattcgaggcaacaataaagatttatcttgttgtctaagcatctgcctcactccccgggacgggactgattctagcctttggttccccgagaggagaggtctggggatgggctccggcctgagggaggaacggcagaaaaccgggacccttgggtcctggaggggaccaactgactgcgatgcaattccagaatcaaggaatggggcacggccaaccctacccagatctcctcccccaggcctggtctcctcataggacgcctcctccccgctcttcctgccgggtttcctcttgccttttcctgtcccccactcattgttgggagccgtggcatatgcaagagcagtggaactgacccaggccagtggagccagggcctccgggtgtgccggacccgaagcaggggccatgctgtctggtgaacggaaggagggcggaagcccccgcttcgggaagcttcatctccccgtgggcctgtggatcaattcccccaggaagcagctggcgaagctggggcggcgctggcccagcgcagcctctgtcaagtcttcttcgtcggacacggggagccgcagcagcgagccgctacctccgcccccgccgcacgtggagctgcggcgagtgggcgctgtcaaggcggccgggggagcctccggtagccgcgccaagcgcatctcccagctcttccggggctcggggaccgggaccacggggtccagcggcgcaggaggccctgggaccccggggggcgcgcagcgctgggccagcgagaagaagctgccggagctggcggcgggcgtggcccccgagcccccgctggctacccgcgccacggcgcctccgggggtcctcaaagatcttcggcgccggactggcatcgggcgccaactacaagagcgtgctggccacggtgcgctccacggcgcgcgagctcgtggccgaggcgctagagcgctacggcctaacaggcagccccggcgggggcccccgctgagagcagctgcctggacgcctttcgctttgggcgaacgctctgggccggtcccgcggtggcgggccttgcgaaaccccctagtggccgggccggatcacccgcaccccgctgggtagaatccccaatgccccgctgatgggtgcaaccaccttgtggcgccactcccacctggtttggggcgccgccgtcctccaagtcccaacaggaaccttctacaaggctttccctcccagagggcccccaccctctacaccccccagccacgtttgccccggaccacaaagctccacccaccaat

SEQ ID NO: 450834 - DNA, 846 bp, Homo Sapiens
agcgggctctcggagcaggtgcgcggcgcgcaggccggttgttccgggccgcggcgcgcgggcggggagggggctgccggcgccgggtgatttcggtgccagcccgccggccccgctcgccgtcccctgcccgacgggacccccactatccccgctgtgcggtcacctgtttcgcttcgcactgcgccgtcgccgcccctgtggccgtcgccgccagctcctagctccgccatggtgctccgatgacgcgcccggagagccgctccgccctttcctcggcttggctcccgccggcccccgcctcccaggccagcggcccagacaggtgagcgcagtccggggatggcggagtggcgggggcagagagcgcggcagtcggctgcggcctgggcctggcgcagccccctcgcgggcaggtgcggcgtggcaagccggtccgaccgcctgtgccgagatctccggctggaagaggcggcgggcggaaccagataccatcagtccggagcttccggtcgcccgcgagccgaaccagactgagggctcccggagatatggagcgggggtcagcagagggacttgggtgggcagccatccgtggagatctgaggacggagcgggacggatccgagggagcagacccagtgtggagagcgcagggatacggaagacagcaatatacccgctccgcggaaactcctcggaacagctagcccaaggggtcaaggaggtacggggcatccgccacgaagggcgcctggaacgatataccaaggtgtgaacaaggcaggagcaagaaagaacatcctggatgcccaccggttggcagaacggggaaggtaccattgg

SEQ ID NO: 450835 - DNA, 1163 bp, Homo Sapiens
gggcagcctcagtgtgcggacaaccagtgctgggggtcactgtggaaaactgcttcgctgctctttcagaacaatattaggtgcagcttccggggcttagggtttagaggggagctagtcggctgtttgggtcctcccctgatgagaggggagcatcttcagctcttgcattctgaggcaaaccctgcaggaggagcctgggtctgtgtgtacctggttgagactgtttccttggctttttgggacatggcttctgaaggagtctgctctctttcctgggagctggatggtgtgtggagctggggtgtgtggccctgctgtcctggcccctcgggcaggctggcttccctacactgctctggctgggtgtcccggaaagcttctggcggagggatgagcaccacgtccaagtcaaggcagcctcctgggggctggcaggtgcctgcctgggttggctgctctggctgacctgttctttctcaggctctggcgcaagcctccccggttctccagggttgtgactgctagcctgggtggtgcttttcctgaagttctggcttctggcaatgtggatattcgctagggatgtctgtaggagccagacctgaggcctaggccttggggctccaggagggtgggatgagcttggactcagttactgtcccttggcgttcgtccttgctgagtgatggtctcctctggacctccccggggagtggtttgggttatgggcgtgctcggaaacctctgggagttgtggctggctcagactcgtcagtggacagtccgctgtcagcctccgtgtccagtgagccaatggtctcctccaggaagagcagacactccttctcttcagtggacaggaagtcgtagctgctatcactagatccagagcgggtggagttgctgctcatcatgctgtcacagctgccgacacgggtcacgggttctgagccagtccccgctggccacagctccctctcgggcatcacccgaaacaaggtgcagggatggcaaagggggcttctagaggggaagcgaggggaagtgaacaatgtcccaagccgggcctccactgggttgggggctgaagagagaaaagacatacccttttgtttcaaagggcagagactggagacagaggctgcttccctgcctcctac

SEQ ID NO: 450836 - DNA, 966 bp, Homo Sapiens
gtcctccacttcctggggaggtagctgcagaataaaaccagcagagactccttttctcctaaccgtcccggccaccgctgcctcagcctctgcctcccagcctctttctgagggaaaggacaagatgaagtggaaggcgcttttcaccgcggccatcctgcaggcacagttgccgattacagaggcacagagctttggcctgctggatcccaaactctgctacctgctggatggaatcctcttcatctatggtgtcattctcactgccttgttcctgagagtgaagttcagcaggagcgcagacgcccccgcgtaccagcagggccagaaccagctctataacgagctcaatctaggacgaagagaggagtacgatgttttggacaagagacgtggccgggaccctgagatggggggaaagccgagaaggaagaaccctcaggaaggcctgtacaatgaactgcagaaagataagatggcggaggcctacagtgagattgggatgaaaggcgagcgccggaggggcaaggggcacgatggcctttaccagggtctcagtacagccaccaaggacacctacgacgcccttcacatgcaggcctgccccctcgctaacagccaggggatttcaccactcaaaggccagacctgcagacgcccagattatgagacacaggatgaaagcatttacaacccggttcactctttctcagccactgaagtattcccctttatgtaccaggatgctttggttatatttagctcccagccttcacaacacagactgttgtcccctggactctttaaggggagtgtactcccaggggcttacggccctggccttgggccctctggtttgccggtggtgcaggtagactgtcctcctggcggttcctcgttctccctgggaggggggggcactgcctctccaggttgaatttgtgaagcctggtttttaaaaacccc

SEQ ID NO: 450837 - DNA, 536 bp, Homo Sapiens
acatgtcaatagcagagtcgactctagaggatacacggcgggccaacgcaaccgtggaaggaggatacgggccgtttagaggagctgcaggagctcctggagaagcagaactttgagttgagccaggcccgggagcgactggtcaccctaacaacaaccgtgactgaactcgaggaggacctgggcacggcccgccgggacctcatcaagtcggaggagctgagcagcaagcatcagcgggacctccgggaggctctggcccagaaggaggacatggaagagcggattactacactggagaagcgctacctggctgctcagcgtgaggcaacatccatccatgacctcaatgacaagctggagaatgagctggccaacaaggagtccctgcaccgccagtgtgaggagaaggcccgactcctgcaggagctgctggaggtggcagagcagaagctggcagccagacgatgcgcaaggcagagacgcctgccaaaggtggaggctgagcctggccccagagaatgcaggcctcacca

SEQ ID NO: 450838 - DNA, 1558 bp, Homo Sapiens
ggttcactcgaggcctttaattccagtagtatcttttgaagaccaggaagtatgcgtttttcttgtctttgtgatgtattacagcttcccagtgcagaaattttgatatatttccacatagtcatatcttcctgtttcggttacatacagtacagaattggatcagcaacacgatttaaacttgttaatgcaaccgtgattctatacattgtgtaagttcgcttcccagaattgctgtggtcttcgaagttcacagcatgctctaaaatgcagcgaatcagcaacatcacatgaaagggagtaaagcataagaccaaagtaactgtgatgctgacaagtagttttatgattctcttctctttccttgttttccgtggctttattcgtgccgcacagcttggtagactttccggttgcagatcaggatggtgaccaaaggtattgcatagcctgtacacgtcctgaacaagttgaggttgatttgccatttctctaaagggtatttgtcatagcataaagtaaaacttagacttttcggcatcgcaatattcaacaactgtttcatcttcccacaacatgacagcattgaagatggtttccaatatccagatggacaggctgaccatgagtgcaaatcttcttgtccttaggaaaaaaaacttcaaagggtagacaacagccaaattccgatcaacggcaatgcaggtgaggaatgctgtgctgctgtaaaaattcatgtacatgagaaaagcactccctttgcacaaggcaggagagaaagtccagttgtctttattccaaagtataatcaatccataaagggagagttaatgcatagagtaaatctgatagtgacaaactgaagaggtaaattcctagttcactttccttctttgcttgcaggaaagacacacacagagatcccatattggctggaatgctgactataatcacaaagatgtaaacaatgggaaacaaatagtgatccaggtcatgctgttcttcaatacatgtgctgttcatttttttcctttttaaggtagcaattatattagttcttagaaagtaaacagagaagtcttgtctctttgtagtttgttttgaacatcgaattcgcttttactgagaattctttttcaatttttctttgttgtctaaagttctaattaattcatcaatgcttttaaagggtggatgtagatcaatttttacacagatatcagcagttggaagtaaaaatccaggctcctggcaattggctaaaggggtcaactgaatttaataaacagaagtccatgtgttcattatcacagaacgctgacaaacagcccacaagcatcaactgaggcatttgtaagtgtacatagagagttgtccgcaatttgtttttcttcataaatctcacagtagattggtgccaacatgaatatacaaggctttgtttgcacagagacttggtatttccttttaaaattcctttccttccatgtttcttccggtgatgtgtttgttgactgaggagcttgataaatctgtgcctgcatcaagtcagaagaga

SEQ ID NO: 450839 - DNA, 823 bp, Homo Sapiens
gttatttagggttgactggtcagtctgtggatgataaccagagcccttagctctctttctgtgacgtatgtggaaattaaactgttcactagcaactctgctcttagtggctttttaggagtagaaggaccccttggccatgttccatgcttcagtttttctgttctatcactaatacctgtccttggtataaaccagcatcctgaatggtgctgtctggtttattcagtggttcaaatgtgttactcatgtatcttgttccacagtctggtctccttttcatctggcatactgaagattttgtctgtatttcctgtttcaattgtatctattgtgtcagctcttgctaaatctgtcgagttaccacattattcatgtttccattttcacatagcttcaattctgtgagatatacttctactttgcagtgctttacatacataccctgttcaaccacctttcgtgctattggctcttgaccttccatccatgtgtaccagctgacaagtttattccaaccttcagttggccacagtatgtaatcccattcatcaataaggtgttccttaagtgactgggcatcaccatctttgagaagtccagagttatcaatgggtccaggatacacattttgatctcccatctggtatttgtcccaactgtcaaagcctacatattttttccactgtttgaaccagcgactatcgactaggtaccaggtgtcccctttccggagcgacggttattgagcagccgtcgcgatgtcagaccgctgggtgtccagatccgccgctccgccttccgccatcttcttccactagcg

SEQ ID NO: 450840 - DNA, 776 bp, Homo Sapiens
cgggacccaggcccaagaggggaaagagcgtccggccccttgccgcaggaacagtcgcagcgtctcgtcttcccagttgctggtgtatgaggcggagatgtcgtcttggtccagtgcatcggacccatggcagtctggtccagggcgggcagcgtcctatgtacagttcaccacagaggaagaagacagggtctgggtctggagttcctgcccgtgtctggggcctgaaactccccctggggacccccatgtcagggccagtccacgtccacagaagagtggccctacaaaggccccttgaactggttcccagacaggtgctgccgtatggagggcttggagctggctgcatctcccagctttctccagaccacgttgcacatctcgcgaacgatggccttctccttctcactcaggtcctcctcacagctgtcctggagctgccggtccagattctcgtgtacctccaggacgttctggcagggagtcctggtaggagggcggcagggacgcaggctgggactccgagtggtagggcgagaagcctttccgcagcgtgcggtactctccggagcctgcctgctgtgcgaggagcttgtcaccctccagcagcctcactttgctctccagttgcctgatgtaggtggatgagggatcgtgcagcctttgggcctcgtgcggaattcatcacggagtcctgcgtgctttgcgcgtaggttgtcaccctccagcagcctcactttgctctccagttgcctgatgtaggtggatgaggg

SEQ ID NO: 450841 - DNA, 730 bp, Homo Sapiens
agcgggggtggtccacccgcgctggcgggactggccgtcgtctccacatccgctccagtcgcttgtctggagcttgaagaagtgggtattccccttcccaccccaggcactggaggagcggccccccggggattccaggacctgagctccgggagctggactcgcagcgaccgcggcagagcgagctggcgccgggaagcgaggagacgcccgcgggaggcccagctgctcggagcaactggcatggcccgagccatggccgccgcgtggccgctgctgctggtggcgctactggtgctgtcctggccacccccaggaaccggggacgtcgtcgtgcaggcgcccacccaggtgcccggcttcttgggcgactccgtgacgctgccctgctacctacaggtgcccaacatggaggtgacgcatgtgtcacagctgacttgggcgctggcatggtgaatctggcagcatggccgtcttccaccaaacgcagggccccagctattcggagtccaaacggctggaattcgtggcagccagactgggcgcggagctgcggaatgcctcgctgaggatgttcgggttgcgcgtagaggatgaaggcaactacacctgcctgttcgtcacgttcccgcagggcagcaggggcgtggatatctggctccgagtgcttgccaagccccagaacacagctgaggttcagaaggtccagctcactggagagccagtgccc

SEQ ID NO: 450842 - DNA, 2372 bp, Homo Sapiens
ggtccactggggccccttaattttccggcaaaatggggcctgggttctgggccatccctagcccttccgaaatggccccatgggtttttcggggctgagggaaaaagggcttgggaaagggcttcctggaccccgttcccctttttcaagggcccggttcccctgagggcagtcctttgcccgtgcccaggtttcccccgggttcaagaggctgagcttgaatgcccccggccccttcacgggcccctggtgcacatggtgacccctggggcccctccaccctttcctccccctgggtctggggttcctgggctcgtgtcctaggagagcatggaaaggggacgacaaggttctcttaccgggtgagtggggatatggcttcctggggaggccgggctgaacggctcctccccgctggactgagcgcagccacggcacgtctcacacccgacctgagcctgccagcctccacgacctgggctagcctgagagcacggggcccggcggccgggtccgccaccaccagtgtctctgatgcctgcagcctccccagccccgcttcctctgcagcccggcgcttgggtgggcctgaggacccagggggagtgtgcggcggaggaagggctgtgccataggcacgcagcctctgtggctgttcccagccctgtctgatccctccatagggcacagttccctgcggggaagtcctttgtctgtgttctccaggggcagctgctgggcccagcctccccaggggcctcagagccccaggtgcctggggcaggcctgtggtgggcagctggaggcagcagcagcctgtttgcttgttttttgcaccccccaccccctgcaaactgctcagtctcaagccaggctggtgcaaagccccagctgtggctgctgtggctcctggcagctttgtccccaccgtgaggccaccccgggggtcagcaaaggcagtagcagcctgccttgggatgatgatggcagtgtcgctttttctagtactttctactatgagggaatgtggttcttaagaccctcaaggtgtgtgtgctaaggccggagacccactttcagcatgagaacggagctgcccggagcctgggatgccacagcactgcctgcaccgctgatagctgggggcccgtgctgcaggactggaagagccctgctagatataaaagggttgctagcggggcaaacagatgcccttccaggctgggcacgctgctttttctctttcctaattgcagtgcttgcttggggacttcaagggaaggctcttggctggtggtctgagtgaccccaggctccgagaggggcaggcagcgctggggaggaggtgggagatgcaggcaggcccggagcagggcgtggggtggctcagttaagaaggtcactgcctccgcagcccctcggcgctcagccagctgcagccccaaaggtctagggctttagggaaccgatccaggtttgggggcggggagaaagttctgaggcagctcctccctggacagagcagggcgaccccgcgccgggcctgcaggctcctacagctactgcccgccagcgggcaaggcgaagggccctaccagccagctgagcgggggattgtgctgtaggccctccagcagctgctctaacccctgccaagcctggtgcacaccctcgcggctctgcaccagccgctctgcgggcagctcctctacagagccagctgaggccacgatgccatagagctcacagaggctgtgccgcgcccgccccactggctgctggagctcggcgggcaggccctggaggctggagaccaggccactgtaggccgtgtgcagctgccggagaaggccgcagaccctggacagaaccccggcatcccgctcctcctggacagcagcgtcctccgcactggcacctgagccctggtccagacgtggctgcccttctggagcctgctgggccttttcaatcagcctgaagcagtcctggagctgggccagagtgtcctggcttggaactggccgtgctgcaggtggctcaccgcgtgttcaaatgcccgctggcggaagctgggacccaggtcacctaaacgaacgaagtagctcccctgttccgccgacagcacctttggcccgggctgggaggcagccagctgagcttgctcctccgcattcatggggtggaagatgtcccccagcccctccaactcattctgcagcattgccaagcgtggggcttcttcggggccgtgtgtggtggtcaaaagccccgtgtcactccctgcactggggcggccccattgggtgaacgtcgccacgtcagtcgcaaggcccttggtagtggctgcggcttcccaggcaggctccggc

SEQ ID NO: 450843 - DNA, 1116 bp, Homo Sapiens
cggtgtggtcactagcacgtgaagtcgtgtgtatgacaagttgttaactcgagtgaggtgagaagggagcaggtgggcttcatcgtcggcggctcttatttccttggcaggggctattagagagtcacagggccttttaccctataggaatcaggcgctacccgcaaccagacccagggggttctacccaggcgtttccacgggaagcctagtccgctttaagggggcccaagcactgggccttcacccccaaggctcatttcagcctatacggcgcggttgtgagtatttggaacaaggtttccccttcccaccgtgggggggttcatctttccttccactcaggcataaggggggctgtacaggtgggcacggttcccaagccaagtacaccccgtgctccgaagtgcctcttcccacaggggcgtctcgtgttttgtcgtcctgccccagggtagcccgagttgcctccgtcccagtaagaattaggctgtggtgtggcgggaagggacttcctgagctgcggccccatgcttggttggctggacgtgagctgcagtcactgtgcctgatttctgcaaatggctgtgtctggcatcctagcctccgatggccatgggtgtcgggctgaggagaaggcttgggaaggctcctgacccgtcccctctcacggcccgtcacctgaggcagtccttgccgtgccagcttccccggttcagagctgagctgaatgccccggcccctcacggcccctggtgcacatggtgacccctggggcccctccacccttcctccccctgggtctggggttcctgggctcgtgtcctaggagagcatggaaaggggacgacaaggttctcttaccgggtgagtggggatatggcttcctggggaggccgggctgaacggctcctccccgctggactgagcgcagccacggcacgtctcacacccgacctgagcctgccagcctccacgacctgggctagcctgagagcacggggcccggcggccgggtccgccaccaccagtgtctctgatgcctgcagcctccccagccccgcttcctctgcagcccggcgcttgggtgggcctgaggacccagggggagtgtgc

SEQ ID NO: 450844 - DNA, 867 bp, Homo Sapiens
cggtagggcccctgacaccaatcagggcaatccaggtgacataggtccgacggccccaggggctccgcatagcaggcccagcaggtcagtgaccccgctgccaccttccacgttgcgctgggcgaagatgaagagctggggcaggctgagaaaggagcgagaaggcccaagccactagcaccggccggttccagtgagccccactttccatggcggtacgccagcatgggacggcagatggcacggtggcggtccagcgtcatggccaggatcatgtaggaggaggcatacatgcccaccatctgcagatacttcacggcccgacacagggcatctggcccacggaagcggtcggtggccttccaggccagctggggcagcacttggaacagagccacggccaggtcggccaggcacaagtggccaatgaagacgtgtatgggtgcccagtggccccgccaggccccgccgagctagggccagccagcaccaggccattgctcagggccacagccacaaagactatggagagcagcgccagctccgcccgggctagcagcgggtcccgggtgtccagtggcctctcctggctgctgttgctgggcaggctgggcagagagggatgcccaggcacagcggaagtggtggacgccatgagcatggtggggctggggcaggtgttctgagggcctggaggtgatgtgcggactcagcctctgcctgaggagcaagttcaatggcccagggtctctggactggagcccttatagagatgccagcatggcagatgcctgttggcgtgtgtgcacgtgtgcggtggcagtatggccagtcctggctgggctcctgggcagctgggcggtggcg

SEQ ID NO: 450845 - DNA, 1219 bp, Homo Sapiens
  misc_feature (40)..(40): n is a, c, g, or t
  misc_feature (530)..(530): n is a, c, g, or t
  misc_feature (532)..(532): n is a, c, g, or t
  misc_feature (538)..(540): n is a, c, g, or t
  misc_feature (543)..(543): n is a, c, g, or t
  misc_feature (545)..(546): n is a, c, g, or t
  misc_feature (549)..(550): n is a, c, g, or t
  misc_feature (552)..(553): n is a, c, g, or t
  misc_feature (555)..(555): n is a, c, g, or t
  misc_feature (557)..(561): n is a, c, g, or t
  misc_feature (563)..(586): n is a, c, g, or t
tataggcgggccaacgggcttgaatggtatgcccaacccnacgtggtggggttgcccggagggccaccccgagggaagggctcacgcgacactgaggatcgtataggttgtgacacacttgtaatttcaagcaagaaagagggaatgtgcagaaatagggatggggaaggtaggcaaaacggcagtaaagggaagatcgtctagaaagcgacacaaaaaagaggaggcgggtgggctctaacacaggtttattgcctcgtagcaaattttgtggatgtaaccgtaaaagagtttttaaaatcgtgcgggggggagacgttggtaccaacgaaaaggcccagcccacaaagaagtgacggccccctcacaaaaaaggtttcctatgcctaacaaatgggcccccctcccgaggagtggaaaacccgggggccggcgggcttagactaccagtccggttgcttattgtaggccccccttcccaagagagcctggtttcgggaaagcagggtccccttgaggtgatccttcgncnccgggnnnccntnntgnngnngngnnnnncnnnnnnnnnnnnnnnnnnnnnnnntcagcatcagcatcccaaatttattctccagcagctgtggccgggtgggagaggctaagggaagaggaggggaggaggagagtcccagagagtggcaggcactggggagagttggggtgggtccgagccagacaggagccatgcacggcaggcgggctgcggggagaagtgatggcttcgggatggggaagtctagaacaaaagctgattgggagcctctggggaaagaatcctccatatatcccagaaatccccagagcacagcagcgggacgtactggaggaggggggcacgcctcccactcatctagaactagagtggaggcggggagcctcggaggccgagggctgttctggaacctgagtctggaacagccaaccccgtgaggctatttccccaggggcggggtctggggggaggcacagaactaccaagatggagtctcgaaccccatggagttggggatggttagtggtgtggtctctggacccgattggggcagagtccagaacgctaaggtcagggagaatatcgggctccgctcaagtcttgaacgcgggacggctgtagaggctgtatggaattcagaaggccaggaacgctgggaggggcgtctatcccggaatccggacc

SEQ ID NO: 450846 - DNA, 503 bp, Homo Sapiens
  misc_feature (451)..(451): n is a, c, g, or t
  misc_feature (480)..(480): n is a, c, g, or t
tattggcacagtcctgttttattcgataagcaattaaattttttatcgttggatttgcatagacttttcttctcccaagcaatctgattggccagtacaccattgcagcatatactttattattatcatcattattattttccacaacatttaataccaagtttccttctctcacatagaatattacccaatagaagtctccaaaaggggccatagcacattcataacaaagatagaaaagaaaactttcaatgtctgctttccaatatgatgattcaactaaaacaaagctgaatttctcagctatgaaactgaaaaaatgaaaatcagcccatgtgtacatcacggccagccatgatcattaacacctccatgaaatgagggagaaaagagagaaacaactgcttcttcttaccaaacttctatataacttcaatttactttaaaaaantttcccaaagggcattctgctgccttttngagggctggaactttggggtgtt

SEQ ID NO: 450847 - DNA, 798 bp, Homo Sapiens
cgatccagacagataacttctagagacagaaatgttctcatagtcacaacagaatagttgtaaggcatcaatctagaaggttctctagcctagaaatgcatgaatgtataatacagcaagtaagaacgtgaaagcactttgtaaactccgatggtaaccagcctttctttaaggtagctttttcctagaaatccatttaattgttggactccctttgggcagtggaattctgattgtcattcattcaggaagactgtatttctgtttttggtcctttcacccacctttcatccttcacataactgtacaaaagttgaaagtcacagaaccatagaaaagtctcagtttcctactgtagaattcttgtcatttcagtagtcacagttaaacttgttctaggtttttcagatgcccttttccaggacttcatatgttttgatatttttaaaaattctttctttcaacttttttgattataagccttgcttgcttcgatttgggatttaggcatcgttgtcctttattttctttcagggtaataatcacttctattttgtcacagttgttacttgggtacattatggaggctttctcaatatctgccactttcactgcttttaccccagggcctatgcaaagacagcgtcctcttttgaacatggggaagccttgaacaactgtagcacacaatatcacagccaaggctatagccatgcccttcacactcatgtttgttttttgctgttgctgctggtgctgttgctgctacttcagctttgctgctcttcttggaaggag

SEQ ID NO: 450848 - DNA, 890 bp, Homo Sapiens; identical to SEQ ID NO: 162547
  misc_feature (45)..(45): n is a, c, g, or t

SEQ ID NO: 450849 - DNA, 865 bp, Homo Sapiens
gtctatatgacgaggattatcaataatgtgttctactagtagtctatcatcgcctaactatgaagtcagcttccttgagatgacaattctataaccatccctggtcttcttcatcatcccaagcaatttcgcatgcctttcccaccaccacctgctgaggccttgatcatgacagggtatccaatttcccttgcaattctgacagcttcttctgcatccttgactactccatcaaagccagggattgtatttaacctctgctttcttagctaataatttgctttcaatcttgtcgcccatggcttgaatagcatgtgtgtcaggtccaatgaaaacgacatcttctgctgccaaacatctggcaaattctttgttttctgaaaggaatccataacctggatgtacagcttgggccctggttttcttaatggcttccatgatggcatccatgttgaggtagcttttactggtgggagctgggccaacacagacagcctcatccgccattttcacatgaacagaactagcatcaacatcactgtggatggcaactgtcttaatgcccatcttcttgcaagttctaataacccgacatgcaatttctcctctattagcaacaagaattttatcaaaagttttttcattaggatcatatcccactgaaccaagattacgggacaccattaagcactgtcttgaatagtacagaacatgcttcagggtccgcagcgccgcgctcagcatcagctgctgcggcggccaccgcccacgccgtccggcagcgaccagcggtgctgtcccgacccagaaccccgccattgttgtccccgcagaccgcccctctgctgacctctcacacagccgg

SEQ ID NO: 450850 - DNA, 1059 bp, Homo Sapiens
ttggaagactggcatgcttttctgaaaagagctccttaaaagtactcaacattcgctcaccttcttctgtgagtctcaagtctagttctgaaggcctgtttggctctggctgagaagtttcagggtccgtttcttcagtgctggcagtgtctaactgctggcttggctcaacagagagtgttctgtgaccagcccttacccagacactggaatttgggcaaggtctggagagagaccaccagaattcatacagacgcccataaagaaaaaaggcctccaaacttttgaaagctggtgtggcaggggattgatggtcccccaacttgtctcttaggtggtcacagccatcagggagaaaggctgagtacactttcctgcatgatggtgaagctccctgagtcatagctccggaccaccgcccgaaggagcgccttgcacagcctcgtcccagggagccatctgttggctcagcactgccagggtcaagtcatggcaaatgtgaagcaggagctgtttgcaggtgtgttatttgtagcagatgggtacttgatgttctgcagcttctgaaaggcttcctgatactgctcaggggtgtcaaggctgaagatgctcttccacactgcagtcaccctctccacgaaaggcccttcggtgcccgtgttccaagtgtggtaagaggaggagcttttgccctctgaaagctgcttttcctccagatgcctggacagtagctccagaaggcaaaacaccaatctctgaccctgtagactttcatgcagctgcagggcttcctgggctcccacccagttgttggccagaagcagctcttgggcacatctgagagccagggaagcagacaactcatcctctcctacgatggcagccaactctgcagccgttctaagtgatgccgcatccccctttttggccaaactttggctgcatcataagcacaagtggcccctaaatagcatttggcagctacagcatagtggccatctctttctaggacggttccccagctgaggtacaagtccttcaggactggtcctccgggcg

SEQ ID NO: 450851 - DNA, 532 bp, Homo Sapiens
cacatacactcacatgcagaatatttacatatatagatattctcttttccttttataaaatcaaagtctaggctcaattggaaaatggaaatattgcaccaaaagaaaaaagtgccattgttgtgatcaatggagtaaagctggggtatagtagaggctggggaagccctgcccatgttctctccaaggccacagcttgcacaccgtgaatggtggccccactggctccatggagtgtgccttcacgcgggggaatgtccttgtccaacacgctgtaatctactccatgggaactgactgtcctgcttttcacaacattgagaaacaggcccagagcctgtctcatgtgccaggtgcagtcacattattgttaaaataaagtggcttctgacaaatcagttcttcaaaatagcatcctatgtacttttcatttcttccaacaaccctcaggcccccttttgccagtttttctcccccaggggagattttcaagactactggagaaaaatctgttaataaaacatttgctctg

SEQ ID NO: 450852 - DNA, 1069 bp, Homo Sapiens
ggttttttggtgtcacatgcagggtgcagctcctggggcgaggcagcggggggggaagctttccccccttaaaggggccctccaaccgggggtgggagcagtttttgggcctcaagccattttccccctcaaaccccgttaggagatgcagtgcgcacaaacttccaacccgccgggcgctgttgacatgcagcccactgcaccggctccagtatggcagtcatggggggccctgagggcacggtggtcctcctctcggccttcacagctgggggtgcaccctgcatcttggctgcagcctggtccacgatccactgcacggtgccctcatccagccgggggaagggtcggggcacccgtcgcaggtggctgctctcaccgggcctctgtaccttgtgcatcgccacggctgggtacgggttctcgttcttgtagagctgctctgccagttcctggacgtgacgcaggacacgctgggggtggttctcatccgcccgcatccttgccacctcgtgggccaccagctcatcgaacaggtccgtagggcggtatgggaccccacgctctgacacaaagccagcaaaggccatgccctccagcaccttcatcaggaaatcgtcctctaccagcccacgctggcccaggaaggctgccttatggaagcggatgacaggctccgggtggatgcgcacgacgtgcaggcaccagcgatagccctgcagcagctgagcgaacagccgcaggaagaccgcgcgcagctccttgtcctgcatcttcagggaggaggtggatgtcgtgggcggagggaaggcgaggtcagccaactccagctccgggtccaggaccatgctcagcacactgtgcgtctgactctgcagtggctctggcaagggtggaatgtgcacacactcaggaatggtgaccgtccctccatccagatcagcaacaatcacatcgagcagctcctgggtctctgcctggaaggccgcgttgaccccaatgatgaagggcgtgggtgtgctgaggacctccagcagctgagccggcaggagggcatcccgggaattcc

SEQ ID NO: 450853 - DNA, 1096 bp, Homo Sapiens
  misc_feature (1013)..(1038): n is a, c, g, or t
gggaagaggcacaggggggttggggaaggacctcccggcacaattgaaaccggccccggaatgggcccatttggggagaagctgtatttggggggggaatcccggcagggccaggaaggccccctaaaggcaattgggaaagccgctggaaactccggggaccgggagggggaccttgtggtccggagaggggggccccggaccaaagccaagccggttggtgatgcctagctggcggaagaagcagggccacggttgtcagcggtgtgacgggcagcgagttggccagttgagtctggatgacctgcgggtcaccagccccccaaagagatcgtcctctgcgagcccccagccaggggcacagtgcacgtcagcaggttcccaatcacgttctccaggcacacattcaggccctccacgtggatggcatagatgaggccaaggctgttcctgaacacctccgtgtggtcgagtcgcgacaccagtaccagcgtcttcggtgcaaacagctgggcagatggggcaggtgctgtgggagacaggtgggtctggcctccctcatccccctcttcctccctctctgtggcatcctccacgcgcgtcgtttcctgtgaaggctccgctggctcccagaaggtcaagcaggcgcagtagtggcgctcggagttgatgtcggtgaggacagcaacaaagaaggtcggtggattcctctcgggacacagctgccacccgctgggctggcaaaacagctcgatgccctgggggaatgggttgtcctcccagtccttctctgggaagcgctgcagaatctggccctggccttccccactcccgcgcgggtgcggcccgaacgccaccagcacgaagtagtccgcgagccgcgccatggcgagggacgcggggcggcccgaggggcgcgggcgggctccgcggctcggggactcgaggacggcgcgctcatggcccggccccggccctggaccgcgcaccccggacacccctggttcgctccnnnnnnnnnnnnnnnnnnnnnnnnnnccaggctcccgccgccatcttcccagccagcatcccgggaattccggaccggtaccac

SEQ ID NO: 450854 - DNA, 1328 bp, Homo Sapiens
  misc_feature (46)..(82): n is a, c, g, or t
tgtatagactatatagggcgaactggagcttacgcggtggcggcgnnnnnnnnnnnnnnnnnnnnnnnnnnnnnnnnnnnnnatcaggccaaatcggccgagctcgaattcgtcgagagcgggcatttggctcgggcccggtccatggcggcccctcggaccctgcgctgagccccggaggccaggcgtccggggctgcgccacttccgagggccgagcgctgccggtcccggcggtgcgacacggccgggaggaggagaacaacgcaaggggctcaaccgtcggtcgctggagccccccccggggcgtggcctcccgccccctcagctggggagggcggggctcgctgccccctgctgccgactgcgacccttacaggggagggagggcgcaggccgcgcggagatgaggaggaggctgcgcctacgcagggacgcattgctcacgctgctccttggcgcctccctgggcctcttactctatgcgcagcgcgacggcgcggccccgacggcgagcgcgccgcgagggcgagggagggcggcaccgaggcccagccccggaccccgcgcgttccagttaccagacgcgggtgcagccccgccggcctacgaaggggacacaccggcgccggccacgcctacgggaccctttgacttcgcccgctatttgcgcgccaaggaccagcggcggtttccactgctcattaaccagccgcacaagtgccgcggcgacggcgcacccggtggccgcccggacctgcttattgctgtcaagtcggtggcagaggacttcgagcggcgccaaggccgtgcgccagacgtggggcgcggagggtcgcgtgcagggggcgctggtgcgccgcgtgttcttgctgggcgtgcccaggggcgcaggctcgggcggggccgacgaagttggggagggcgcgcgaacccactggcgcgccctgctgcgggccgagagccttgcgtatgcggacatcctgctctgggccttcgacgacaccttttttaacctaacgctcaaggagatccactttctagcctgggcctcagctttctgccccgacgtgcgcttcgtttttaagggcgacgcagatgtgttcgtgaacgtgggaaatctcctggagttcctggcgccgcgggacccggcgcaagacctgcttgctggtgacgtaattgtgcatgcgcggcccatccgcacgcgggctagcaagtactacatccccgaggccgtgtacggcctgcccgcctatccggcctacgcgggcggcggtggctttgtgctttccggggccacgctgcaccgcctggctggcgcctgtgcgc

SEQ ID NO: 450855 - DNA, 1391 bp, Homo Sapiens
tcttgtaaagagggcagtttttcttcaacattccccataaggaggttcttttccccccgaaacagggggataggttaatttatttccagtaaggtcaaaatggttttggaataaccataaaaaatgttttaaagtcttctttgacttttcttgatggcttcctttgcaaatgtttatgtcagttactgccactaacagcctgaagtccatggtggagctgctattttattttttcacatgtcactagtctttctgttttcatagttacaggaagggcaatagctgaaggcgcactgacaaccattacgtgggtcactgtcttatttccatctgctggtttttcttctactagctgcaaagttttcacatcatgttcttgcttttttgccactgcttccgatttaacctctggcccctttatgactgcactgataactcgaggaggagtctggccagatgcctgctgagtaggcattgatagtctcattacaggtgtaccatgggctattgaaacaggggtaagtgctctcacagccaatggggttccaacaatgttaatgcttcctgatccagtcagatttgactttgtctgcagttgacactgtgcaagctgtgtagctgggatggtaataattttggcaggctgcatggtgattttgtctccattttcagtagaagctggcatcacagtagggattgtctgaatgactacctttggagaggtcgctgttgttggactagtgctggttattaatggtgcacctgcattaactgactgaactgccacagttgaaattttctgacccaatgatgtcattacaacaggtacctgcattgccacacgaacttggagctgctgttgctgacacagatgcagtggtagtaggagacctggatgaagcatcgtgcccaggggaagtgatattcacaactctagctacacccttctctgctctggagcagtttataggggatgaattttttccactgcgaacagaggatggtgctttcaggagactttctgcagacagtgacactcgttctaatgatttttcatcagtagttcctgctaaatcttcattacaggtttcacttttgtcatcatctatgaccactatgtttttcggcatatccttgaactgatatacaagcctctgtccttcaacctttgcaagaattcccctttggtagtagtatctcaaagctcgtcccatggtttcatagttcatgtctggtttgttcttatgctttccccaaagcttagagacagcctttgaatccaccagcttgaatatgcctttttctctctgagtccatttaatatacctgggacaagtatttttatcttgaagtagatctaaaagaaactcccacaaataggttgtgtttcc

SEQ ID NO: 450856 - DNA, 878 bp, Homo Sapiens
agcggagtgctcttacaacattggctgccggcgtgactttgaccgcttcccggtgcgttaccggcagctgaacccacccggcgccacgggactttgacgcgtgctctgcgcttgccatgagactcctgggagccgcagccgtcgcggctctggggcgcggaagggcccccgcctccctaggctggcagaggaagcaggttaattggaaggcctgccgatggtcttcatcaggggtgattcctaatgaaaaaatacgaaatattggaatctcagctcacattgattctgggaaaactacattaacagaacgagtcctttactacactggcagaattgcaaagatgcatgaggtgaaaggtaaagatggagttggtgctgtcatggattccatggaactagagagacaaagaggaatcactattcagtcagcagccacttacaccatgtggaaagatgtcaatattaacattatagatactcctgggcatgtggacttcacaatagaagtggaaagggccctgagagtgttggatggtgcagtccttgttctctgtgctgttggaggggtacagtgccagaccatgactgtcaatcgtcagatgaagcgctacaacgttccgtttctaacttttattaacaaattggaccgaatgggctccaacccagccagggccctgcagcaaatgaggtctaaactaaatcataatgcagcgtttatgcagatacccatgggctttggagggtaatcttaaaggtatcatagatcttattgaggaacgagccatctatttgatggagacttggtcagattgtcgatatggtgagattccagctgaattagggcggcggcaattgagcacggaggagctattgaatgg

SEQ ID NO: 450857 - DNA, 1330 bp, Homo Sapiens
  misc_feature (83)..(83): n is a, c, g, or t
agctccacaaaatgccaaatgttcattcgcggtggaaaaaacagtgtcccccagccaggcccatgctggggaacccgccccantgggaatgtacacatccctgattaagaaattatgcagtcccaacatcaaaaatcccttcaacatccccgtgaaactgaacatggtgctcacgcagcgggggagggcgggtggagtgagtccatccaggcgcatgagcagagcaggcacgccaaagagcaccaagtacttcacgtagaaaaagagcacctgggctaacgccagtcctcctaaggtccaacaagagacagtctccaggagggggatgctgctgtagatggcatgcatgtacatcaggtgagccatcagctcggccagccaccaccagcaaagaaggcggcccagccccagggccaggacacacaggctggccttcagggagtcatgctcctgctgctgcatctgtttgatgaactccgagaagctgaggatgggcccattgtgtaagactggataataaaagacataggccagcatccagggaaaggagtaggaggtcgatgcagcaggcagctgctgccagcagagctccaggctgaagttggtgtagtagaggcagcgtacggtcagcgtgaactgcagcaggtagtactcgttttctgtcttgtaccaccttctcttaacttcttccacaccctgcagcctcagtgtggagaggaggaggagagaacagagccacgtcaggagctgagaccggaactgggccacgcagaaagagatggtggtatggagcaaaaccatagccacaccaggggtccccagcacacaccagcaggcccacatcccatagagcatgagaatccagggtctgtgctttcttgccagcagtgtggccatttgagacactaccatgtggccaaggagaagccacaccagccactgcttcccccattccatccagaagctccactcaaagtcggtcgcatccttctttaatcctccaaataaagtgtcagtctccagctcaaattcctggtccagctcctcttcgtgttctctggagactttgtaaacttcatagaaggaatagaagtggaagcctagtgaggcaagtaggtaaagtgccagttcccatcggggcagcatggctccttggcacgaaggttcccgatgcctacgctgagagtttctccgggctgtcccgggcggcggcgacggcaacgttcacgcgcgccgcgagttcccaacacccctctttcggcacttccgagtcccagcgacatcggcggcggctgcgggcttccccgggacgccaccctctttcccccgg

SEQ ID NO: 450858 - DNA, 888 bp, Homo Sapiens
cccttggattagtcaagactcatgatcacccagggtaccgtagaggacacgatggaagaggcaatggcataggcttggtttcgtgaagaagtcacatgcaggttttcaattggcattagcacgttgatggcttcctggtgggtggccctgtaccagtgcatctgaatgggcaagaaggaggtaaggcctgacactatccacaccatcagaatgatcacccgggccttattcttggtcagctaggctctggtacttgaaaggtgaagtaatggcaaagtagcgatccactgcgatcacgcacagggtctcaatgctggccgtgacgcacagcacatcaatggaagtccaaaactcgcaccagaagttgccaaaagtccacatttttcaataagaatatgggcggccccaaagggcaccactgctaggcccatgaccagatcagcacaggccagtgaagtgatgaagtagttggtgaccgtctgcagacgctcgaactctggcaaatcggctcgtgatgaccagcacattgccaaacacgatggccaggacgatgagagacatgacgatgcccatgcccaccacccacacctcgtgccctttgctgcgtgacagtcgtggtccggcgcatggcttcatattgggtgccagcaagaaggcgctgccgttcccagggttgccccatggcagcgcagtccgtggcaggtaagcagcactggctgggggcagccaatcagcaggcggacccacggcggggctctgcgggccagtcgagcggacgcctggaagcctcattcagcggctgtggtgtgggtgtggtggggactcagtcctgcacactcagcttgttcgggtgcttaggggctcgcggtgcctgccagttccagcccg

SEQ ID NO: 450859 - DNA, 527 bp, Homo Sapiens
cgtgctggccgcacaaatcacttcagccacccagaaggctgtgctccaactgtagtgcttggcaatggtgctgaagggcagcccagccagaaagccgcccacattggccatgagtcccacaatggcgtgggaggtgccacacaagttgggaggggcaactctcgttggcttatgactccaaacagggcaatggggccatacgaggagaaaccaaatacagctcccaataccaggatccagagctcatgctctgtaaagcctgtgagctccgcgagagggtgaagagccagagtccagaaagcaacatccttgggggagtcactggtcactgttacccggaagaggtacatggacactgtcatgccagccatcatgaacagcaacaggccatggcgagggttcccgtagttggacagtcccgcctttgccatggcccggtctgacaggtagccagctgcgatgctgcctacaaggcccccaacttccagggcactcatgtaggagctacctacaagggctgactgtcc

SEQ ID NO: 450860 - DNA, 801 bp, Homo Sapiens
ggggcaggtacgtcccatctagcttgttattgaccttccaggagcagccatgcagcacatcctccagacgactgtatttcaccacggcccgattgctaaagatggaagtaatgctgcccacctcaaactcctcacttgggggagccagatggaccacgcaatcatcttctacatagatggcccagtgctcatagccaattcgaaaaatctcaatcaggtctccaggtctgggtcttggttttccctcagctgcttgctttattaacttgccttcattctcaggctttggaattgaactccagtctgctttctggctgggtgtggtctccaagctaactacagccttctccccttgctggatgcttctgccctgttctaatgtgcccggcggaggctgcttggctgggagctggaccaacgctgcgaatcccacggattcttctaattcaaggggggaaatgctatttagacctgagtggggcacagctgaacgtctgagcgcaggcggctggtccttggggcccggtaccgtcggtttcgcgaggcgggtttgcgggaggggtctgggggaatcctagggaggcggagcgcgtactccccctcggcgcccgggctcaggcccatcccgcctctgcggcctcgccggcccccaggccttgcaggggactacgcccgtggcgagttcccagtcggcgcggcaccgtggtcggcggagccgcggaagcttgggcactgggggcggcctcggggaggaaccgcggaggggaaagcgccgcgggctgcaaacggcagaggcgcgcg

SEQ ID NO: 450861 - DNA, 1318 bp, Homo Sapiens
cggtctttctttttgacagtgtcgtctgttccctcctaagtatttctcagtggcttctggaatcagttccttagcaatgcaaacaaggggataggacttcccacaggagtgacatggctgtcttctggtccagttgcccttcggagagtggatagctcatcaactgcattggaatcaaccagccaaactcctgcttgttaattccgaccatgtaggggacagtgtggaaattcctttcagcttgaagctcttcaggtgttttcagcagcagcatcccatcaatcacagtgcccagaaggggttgactctctctggggtctccctgtaagtccagagataagaatttcattttcaatgtcgtctccaagagctcctcttccgtcttctgtcgcaggcagtgaaccatgacagcagaggtggtggttttgcacccagcagtgatagcaatttgctcagccaagggcttgacatcacctttcttcaccagaacaagaagtgagggccacgccacttctcaagaaatggcccggtggaagagtttctgtggccaatggagacaaaactagatcagagacactttcttcctcccgcgtgactctccaaagatggtcacagagcctggtttccctccaaagctggcaatgttgtcctggacccagcgcagggcagccacctggtccaggtgacctccagttcccccggctgtgttcatcccctgtgctgaagaatccccagatgcccaggcgatattgaatggtcaccaccaccacgttttcatgggcagcaagggccagcccatcataggttgatgccgcacccaccatcagcccccctccgtggatccacaccatcaccggcagcctgtttttcttggtcaagtcagcaggagtgtaaatattgaggtaaagacagtcttcagaaagcttgagaggaatgttctcctttcggtttgtaaatagctctgagagtaactgccccgccttgggatcttgggtgcacataggagggtacgaggtggcattcttcacaaagctccatggttctgcaggctgcggtggagtaaacctcaggggtccaagaggcggcttggcaaaagggattcccaggaaaatggccacaggctgtgcaaatccttctaagctgacgaacttccccagcactttgccatgcacggtgtccaccacaggtggcgaggacggatgccctgcccaagccgcggaagcagcgagagtggccaggaccagagcagggagccacatcctggaagggcgacagttccggggcctgcgagtctccgtgcagctcagaggactgtgct

SEQ ID NO: 450862 - DNA, 788 bp, Homo Sapiens
  misc_feature (13)..(13): n is a, c, g, or t
  misc_feature (24)..(24): n is a, c, g, or t
  misc_feature (37)..(37): n is a, c, g, or t
  misc_feature (49)..(50): n is a, c, g, or t
tggcctaatttgngctgacaactnttagaaaccaccntgggcttgtaannaaaagcagtgacgccgagtcgattagcacagccgacagccaggagacaggcagcccagcgtgacagtgcagagagctgaacgtgatcggactgactggactgctgctcagtgtctgcactcacactggaccactggagactcacgggctccggcagtcggctgcttgggtggatccgggtgcccgcaggggctgtgggagggccccggggcctgcactgctcccccgatggcctgctcttcctcacggccggggctgcaccctgtgtccacgtgctagatctggagggacgccccatctgcctcctgccctgccgcactccggggagcggggccttcgttccagaggacgtggctgtgacagcgtcagggcttgtggtggtcagcgatcccatccatggggctgtccatgcactccagcacacagcccgggaccccgggggccactgggtgacagtgggcaccttcctgtctccccgagggctggctgtggatgccctcaaccgcctcctggtgacggactacttgcctggggctgtgcacagcttctcgttgggtcctgcttgggagcccctggccccagcctccatgctgggtctggagggcccctgctgggtgggcccagggcctgatgggggccttgctgtgagtgaggagttcggggatgtgaggctgtttggcagtgcccgccaacccctgggctccctggggggctggacggggcacactttcggctggcc

SEQ ID NO: 450863 - DNA, 786 bp, Homo Sapiens
  misc_feature (535)..(639): n is a, c, g, or t
gactttctccttttcttctctttcaattgatgtcatccggtgtaacctggtatgtcctaaagattctcgccatattggtagcatcacaactggtttaactgcacactccaaaatggctaaagccaatgcaaattctctgggtttgctacacatctgaactgccttgatccaatttgccctatgtgatgcccagttgggatgaagaaaggatgaagggatgttgttttctaattgggtgatagtcagtctcagagtagatatggtaagaactttggacccatggacagaaccgttccatttgaactctcctgctggagtcagacagaacttatgtgcaagatgccttctcttatcatggtcttctctgtgctggtgcttattcaaagcaaatgaattagtggagtattgattgtggtagacgcgatacttcccttcttgacccaatttaagataattgttgatacttcctgttcatgaccactttcttttcggtgctcaaccgtgaaatttctccttgagagttaactaccagtannnnnnnnnnnnnnnnnnnnnnnnnnnnnnnnnnnnnnnnnnnnnnnnnnnnnnnnnnnnnnnnnnnnnnnnnnnnnnnnnnnnnnnnnnnnnnnnnnnnnnnnngcagtgtctcgggctggataagaaggggacccggccacagctccttcgccacctcggggcgtccgctcgccggcctcgtctccacttgtcccggcaggcgcgcgtgggctcggcgtcccgcgctccctcctcgaccgcgcggctccg

SEQ ID NO: 450864 - DNA, 1180 bp, Homo Sapiens
cggggcttccgaggtggtgccggagaggtttcgcggaatcggagctggcaacggcagcgaatagggacagcgacgctcaggagtgctgtcacccaatacccaatgtagcttgcgtctgggcggggcgaggtaggtacctgaatgcctcttcttgggaccttggggggcattgggacgaggaccggagcagtaagccggggtccggagccaggaaggcctgcgtctgaaggggctctggtctggtcgctagcggagtcccaaggagggtgggcctcccctggtcccgccttcccccttcccttctcccccggggatttgctgtcccggagtccctgctgtccctcccgcctgcaggctctgggaatgccggtctggggctggttgtctagtgcgggcgttcccagttcgcggggatggtcacttggcaccctgaatcacccaactgcgagcccttccaaccggattgtagacctgccagctccgggcccacctcccccaacagggcctttcccggagcaacccggccgggcctggaaaaactccgagagggattcccagcgcagggacgcccaccggagcgcagtgtctcgggctggataagaaggggacccggccacagctccttcgccaacctcggggcgtccgctcgccggcctcgtctccacttgtcccggcaggcgcgcgtgggctcggcgtcccgcgctccctcctcgaccgcgcggctccggcgctgccaggtttcctgtatagcactataaccagtgaggcaccggcggagagcgcccggcagaacttcctcccggactggggctgggctgcggttgcgagagacaatccccggcgtcctggcttcctgtcgcctctgggccaggcccgcgcctgaagaggaaagatgccaccccctcccctgcatttcccgggatcctgggccactcccgggatcctggctgtctccagggaggaagaggccgcggggctgagatggtgggactggggatggcgggagtctcccgcgcagcttctcctggccagattgccttcccaccatcccccactccctcttgacccttgcggggaaagaggtccaccctccaatccgtccacagggtaagctcagaacaacctcctgggggccaggagtccagccccagggccctccgccttggggtcttctgtttgg

SEQ ID NO: 450865 - DNA, 954 bp, Homo Sapiens
gtggaatcctaatagttttttccgtaatctccaactatatttaaaataatgcccttctaaatagctctgtaaagagcctattggaagctgcacatttaaaaatggcaatagcactgcaatatgctgtagcatgatgcctgtcagccatgttccagacaattccttgtaagtcatctttcatttaagtaaaaaacaggttatgaagtactgcctcccagaccggaagtgccattctaaaaactccactatatatatcctggagccataaaactgcctattgggaggctaaatgctctgcttttctataaaacagagataaggttctagaggaagtactgttaccagaaacaaggcacgtttcttctctgcctaggaatgctcatctggggacagagggaaggttcaatgaaaaggaacttatattaacaagtcctactacatgatgcaacccatttcaaatgactcctcttattttgatcttcaggaataactgatctctgggcattgatttcacagatgaagtctactatgtttggtagtatttaaaattgggatctcaagtttcaaattgatcatcattgggcttttctatgtgtatagaacaccttcactctgcataatcctacataacaacattcttgtcttctagtacatgaaaaaattggggtaacatagcatttaaagtagttatcagggaaaagtctatactgaagtgaaccctacactgttattcaagttgccttaacacattataagctattattctaaatagctttaacagattatgtggtcacactgtattactaatagttaatttaaaggcagactcagcatgttttaaactcctttaagtttacatcttcagaaagtctgcagtccttcagtattagggtcagctaagggaaagatattattttaaaaatagtgataagactatcactaatatccatactc

SEQ ID NO: 450866 - DNA, 484 bp, Homo Sapiens
  misc_feature (450)..(450): n is a, c, g, or t
tggaatcctaatagttttttccgtaatctccaactatatttaaaataatgcccttctaaatagctctgtaaagagcttattggaagctgcacatttaaaaatggcaatagcactgcaatatgctgtagcatgatgcctgtcagccatgttccagacaattccttgtaagtcatctttcatttaagtaaaaaacaggttatgaagtactgcctcccagaccggaagtgccattctaaaaactccactatatatatcctgggagccataaaactgcctattgggaggctaaatgctctgcttttctataaaacagagataaggttctaggagggaagtactgttaccaggaaacaagggcacgtttcttctctgcctagggattgcttcatctgggggacagaggggaagggtttcaatggaaaaggggaccttattatttaaccaggtccntactaacatggtggccaaccctttttcaaatgga

SEQ ID NO: 450867 - DNA, 2200 bp, Homo Sapiens
ggtcggattccgggattcccgctatgactctgctctacagaacaaaccctgcggacactaggcctggccccggtgggcggaatgtgtgagcgcgagagaatctgcagcgtcaatgaggacattggcctggccacagcgttcaccattgcccacgagatcgggcacacgtgaggccagggcacacaagagggggaggaggggaggagctgggcgggtccctcagcgcccggcagagccgacacccctttccccagattcggcatgaaccatgacggcgtgggaaacagctgtggggcccgtggtcaggacccagccaagctcatggctgcccacattaccatgaagaccaacccattcgtgtggtcatcctgcagccgtgactacatcaccagctttctagactcgggcctggggctctgcctgaacaaccggccccccagacaggactttgtgtacccgacagtggcaccgggccaagcctacgatgcagatgagcaatgccgctttcagcatggagtcaaatcgcgtcagtgtaaatacggggaggtctgcagcgagctgtggtgtctgagcaagagcaaccggtgcatcaccaacagcatcccggccgccgagggcacgctgtgccagacgcacaccatcgacaaggggtggtgctacaaacgggtctgtgtcccctttgggtcgcgcccagagggtgtggacggagcctgggggccgtggactccatggggcgactgcagccggacctgtggcggcggcgtgtcctcttctagccgtcactgcgacagccccaggccaaccatcgggggcaagtactgtctgggtgagagaaggcggcaccgctcctgcaacacggatgactgtccccctggctcccaggacttcagagaagtgcagtgttctgaatttgacagcatccctttccgtgggaaattctacaagtggaaaacgtaccggggagggggcgtgaaggcctgctcgctcacgtgcctagcggaaggcttcaacttctacacggagagggcggcagccgtggtggacgggacaccctgccgtccagacacggtggacatttgcgtcagtggcgaatgcaagcacgtgggctgcgaccgagtcctggggtccgacctgcgggaggacaagtgccagagtgtgtggcggtgacggcaagtgcctgcgagaccatcgagggcgtcttcagcccagcctcacctggggccgggtacgaggatgtcgtctggattcccaaaggctccgtccacatcttcatccaggatctgaacctctctctcagtcacttggccctgaagggagaccaggagtccctgctgctggaggggctgcctgggaccccccagccccaccgtctgcctctagctgggaccacctttcaactgcgacaggggccagaccaggtccagagcctcgaagccctgggacgattaatgcatctctcatcgtcatggtgctggcccggaccgagctgcctgccctccgctaccgcttcaatgcccccatcgcccgtgactcgctgcccccctactcctggcactatgcgccctggaccaagtgctcggcccagtgtgcaggcggtagccaggtgcaggcggtggagtgccgcaaccagctggacagctccgcggtcgccccccactactgcagtgcccacagcaagctgcccaaaaggcagcgcgcctgcaacacggagccttgccctccagactgggttgtagggaactggtcgctctgcagccgcagctgcgatgcaggcgtgcgcagccgctcggtcgtgtgccagcgccgcgtctctgccgcggaggagaaggcgctggacgacagcgcatgcccgcagccgcgcccacctgtactggaggcctgccacggccccacttgccctccggagtgggcggccctcgactggtctgagtgcacccccagctgcgggccgggcctccgccaccgcgtggtcctttgcaagagcgcagaccaccgcgccacgctgtccccggcgcactgctcacccgccgccaagccaccggccaccatgcgctgcaacttgcgccgctgccccccggcccgctgggtggctggcgagtggggtgagtgctctgcacagtgcggcgtcgggcagcggcagcgctcggtgcgctgcacccagccaccacgggccagcgtcgcacgagtgcacgggaggcct

SEQ ID NO: 450868 - DNA, 1021 bp, Homo Sapiens
  misc_feature (45)..(45): n is a, c, g, or t
  misc_feature (51)..(51): n is a, c, g, or t
  misc_feature (89)..(89): n is a, c, g, or t
  misc_feature (161)..(161): n is a, c, g, or t
  misc_feature (902)..(956): n is a, c, g, or t
cccccaaacctctctgcgcccaattgccaaaagccctccaacaanaccctnccaagggccccaaacaagctggttgttagggggtccanggcccctcccatgcccggggaacggaggtgcaaccgtgaaccacagttggtgggggcctgaaccgctggcgnccgggctctggcagagcccctgagatcctgtggggtcctgaccactgcactgggtttttcaagatgaccaggaattcgtgaggctgggtggtgactccgtgggggggcggagacatggccatccagaggtcggggaccaaggacaccgtgagcagaatagccagtctctcctcactctcccccaggcaaggagagcacaggaaggggttgcaggaactcatggtccagttgccagagagccccccacaacccctgcagacccagagctggctcagcggaggtgccagcccagccttaggtgcgaggcttggcctcctttccagttagggcaggccgccaggcccggccacgtctgcatacacagtcctggctgtagtcctggcctggaggggtgtcctggttgctgggtgatctatgcagggacgggaatgaggggcaggggtcttggggtgtgtcccgccttcccctcccccgtcggtgccacctactcagtgcaccgggtgggctttttggattccctttgtccagccctgacctccccacagccatcgggagggccccccagagcgcatctggaggaggagggggcgcaatgaggcagggaaggtcggcgccctgcagctgcctccgctgcgtgtggagcgaagggagttctcaccttgcgaagtctcatctgtcaggctttcctccgggtgggcgctgtccgtcctgctgcccgacgtgcacgacagcgtcctctannnnnnnnnnnnnnnnnnnnnnnnnnnnnnnnnnnnnnnnnnnnnnnnnnnnnnngagacccccgagccggccgagtgcgtggagttcaccgccgagccggccggcatgcagacatcgtg

SEQ ID NO: 450869 - DNA, 1761 bp, Homo Sapiens
cgcttcaggatctccagccggttgttctcctgaagctgcaggatggccagtgtgatctcatcccggaacggggagcccagcggcatgccaatgccgtagcccttggtgtcgaggagtcccccgatctgggtgaggttgcagttgaggcgccggtggtattcgttcatggtggactcgagcaggaaggcgtagcgggagttgaggtaccgcggcaatgccctcttctgtgctcttgacgaacacgctgggctgcttcgactgcatgtagttccacatgcgctggtacgtttggtaccgtgaattctggaagaaggtcatggtggagccggcgtggatggtgccatactcgatgttggtctgatctgccaggtcatcggccgactccacaggcacctccatgcgctgcacggtgaggaaggggccaggttggccgtgtaggaggagatgatgatcaaggtgaaggcccaccagactccgctgacacagcgcgtggacagcgcccggggcatgatctccgagccctgctgcatgaagccccccacgggaaaccacaggctgttgcccagcgtgtactggttctccaggatgtgggggcgtgcccgcaggcatgggtgtgggttataccactcataggggctcagcctggcagccagaaacaggacgcagctgacagccaggtaggcaagaagcatgaagagccacacagcaggggagaaggggtccaggaaggagaagtagccaggcttgcggcccatgtgcactcggtagaggatgctgatccccagggtcataaagggcttggaaaagtcgatgaccttctcccgctcagctgtgatggtgaaggcggccacagccaggtctgccttccggttgatgagctcgccaaccatgcccgtccaggagccgttgggctcgggcgccccgtacagcccatcctccaccaaccgcaggcggtagcggaagcgcagcagctcggccagctcccgcagcatgtccacgcagaagccctcgaagcgttcgttccccgacagggcctggaagttgggccggcgcatgacgtatgggttctcccaggatggttgtgaccacccagggtcttgttggcccaagtgtctgcgaacaggttgatgtcccagggtggtggcattcatggcccagggtgcggttagagtaccacaccccaatctcacggtggccctgccgggacttttctaggatgcgcagggtgtagttggttctctgccctttgctgttgaactcgacccgcccggtcagcccatcatactctaccatgcgcaggtagttcatgaggctggtcccgtggggccaaatgttggccgatgtacaggccagaggcttcacaccgatctcctggctgcggttcagctctcggacagcgctcaccaccacgtgcacggcgtcaaacatcagggcggctgacagcgcagggcccaggtaggtgctggcttcacagttctccctccaggacatgttgaggctgcggacaaactcagggtagagggggtgggacgtgttgaacatggagaagcccaggatgttggaggagtcctcctcaatcccgtccagatgcaggatggggaagtccatggtggtgaggatgttcttgtcccccgctgaggtcattcccagttccgaggccttacggaggatgaggtggtagatgcaggcgttggcgtcgatgatgatggtacggtgcgctggccctccgtgtatcctctagagtcagctatgaagatgact

SEQ ID NO: 450870 - DNA, 714 bp, Homo Sapiens; identical to SEQ ID NO: 151729

SEQ ID NO: 450871 - DNA, 963 bp, Homo Sapiens
  misc_feature (841)..(841): n is a, c, g, or t
  misc_feature (874)..(874): n is a, c, g, or t
  misc_feature (931)..(931): n is a, c, g, or t
  misc_feature (941)..(941): n is a, c, g, or t
ccccgtaccaatatttggagtccttagacattagattatatgaaaatgattgattgataggtaagaaaggttaaagagaaatgactttttaggaactagacttgaacgtataattaatatgtggaactagtttgcttttataattcattgtatcaagaaggagtcatgttttaaatccaaggcattgagactatctagaagcaaaaaagttggttttaaaaattctttttattagaagtgtgtttaaaaacatgtctttttttcccttgagcgacagtggcctcactacattgcccaggctagtcttgaactcctgggttcaagcagtcttcctgccttggcctcctaagtagcagggattacaggcatgcacccacatgccaatttttattgcttaaaatggcgggttctatggatattatctagccccaagcccatatctgtacacttttgttcattttataataccagaaagaatgttctatcagtaaaagaaggttttaagtatgaatctccatttttgtggagtttttctaccctgtaaaaattaactttgtggttcccagtaattacagtaaggagttttctatattttcacagttggatttatctaaggatatttctcagcatattaaggaatccttttctacatttgagcaaatactgaggttcacgttgtacccaaataataataaattgcttttgtgtttaatatgtaacaccgtaagaacaattgaaattttcttctaagatttaatactagtcttttagtataaaggaatgtaactggagaaaaaaattaatgctacagccatttatcctgtgttatgtgttatataanctgaaatttgtcacaatgttacacgcaggaagntttttttctggtttcttcttccaaaggaaaataatagcctacttgtattttgaagtnactgaaatanaactctctccaagcctttttgc

SEQ ID NO: 450872 - DNA, 818 bp, Homo Sapiens
atcaggccaaatcggccgagctcgaattcgtcgagagcgggagaagcgatggcggcggcctgaactcacctaacaccgcagcagcaaccgggcccggccaggttcggcgttccgtgagtgaacgatttagaaatctggactggccagtgacctctgggcttgccattccagcctggtataacctctggctccatgggcagctactggctcctacagaccggatgaagcagactggagacacaagtggagaaaacctccagctggcaaatcctcagagtgtaggcctctggctgccagtcctgcccagcctgcctcatggagaggatgaattggctgagcagactggcctcccggggccctgggcaccgtatacctcaaggggccaatctccaaaccccagtcatggctgatcccgagacctgcctcatggtcttcaagaatcactggtcccaggtggtgcgaatcctggagcggcaaggccctcgggcagctcctgggggtgcagacgatctcagtgctgtgcgcaaccacacttaccagatgttgacactgctggcagaggaccgtgcagttccctcggcccccacaggccctgggcccctgctggagtttgctctgcacgaggatctgctgacccgtgtgttgacatggcagctgcaatgggatgagcttggggatggggtcgaggaacggcgggctgagcaactgaaactatttgaaatgctagtgagcgaagctcgccagccactgttgcggcatggtccagttcgtgagggctctgctcaccctgctggatgcctgtggcccgcctgtgccaa

SEQ ID NO: 450873 - DNA, 701 bp, Homo Sapiens
ctctctccacactggccagcaagaaacaacacttcccacaaggggaaacctggttacagcagctgatctgagatcctgttctctggccctttgtagacacccttcctcttcctcatttcttcctctttcttttccaagagtccccaattacttttgcaccagtttaatatttagtctgtgctattgctgctctggtggtgtggttgatgttgctgcgtctatgtttgagggtgagaggggagcgtggcttgctttgaaatgaggctgtaaatttggcaatcatattttcagaaccccacattgtaatacactattctagcctccttagatttcaactattctggtgccagaagcagatgggagctgaaggaatgatgaaggttgaagaaggggggcttttcttggtgtggggcagtactgcatttggcctgctctaccaagcatacgggagtagtaaagccacggctggcagaccatttggcatgcatgctcaggggccagtggataaagaattacttacagttcaaacactgtttgaactcagtgtcgggagtagttaaaggtatcgtgagaagttgcacacagctttggggactcttggaaaagaaagaggaagaaatgaggaagaggaagggtgtctacaaagggccagagaacaggatctcagatcagctgctgtaaccaggtttccccttgtggga

SEQ ID NO: 450874 - DNA, 1075 bp, Homo Sapiens
aaatttagaaaggagactttatttttttataaagggttacagcctgcaagtggccattctgacagactgggaggcatagcttcctgctgaaacccgaaaagtaggtttccagggaggggagggcgaatagtgatttacgttgatctggctggccacatatacatattcaacagggaatagggggagctctgaatatttgtgaagggatcctgctgcatgcatgctgagtaaacatgcctgttacatgcaacccatgttcactttggggtggagacaacatttaaatacattataattaggccctatgcttcaaaaggtgaagcagggacacaaaggcaatcaagtgcatagcttctgtaaactgtccagaacccgcccacggccagtggtctcttatcaaggggaagttactgaaatcagtctcttgtccaatcaaagctgtagttatggcttgtgtagggagggctcagtcagtttatggtaatgggtgagctgcaagtgcttcagcattgcttatctcaaggccagtgcttgtttagcttcgacagccacgggaggactgggaggacctccagaggaggttaggttgacttcatggtcaactttagatcctgaaacctcccaggatttttcttgtcttccctttgatctctcttccgcctactcaacaggacaggactcaccgcctttctttcccgtcagaaagggatcccttccggacaggacagaagtgagcagatggtttcccctacgtgtctttccgggcctgggcgtctcaggagctcaggctgacctgagacctaactcctggcaagtgggaccagcaggagcctggaagagcgcgcgcaccggggtggaggtgggcgccgggggtggagaaccgcagtcaaatcctcttcttccccgcgcacggcacctgcccccggggatgccgaacgaatggcccataaagcttctctgcaacggaaagaagcctgaaagctccaggaggtgcgagaggagcctcgttgagcgagcccagccctctgccggctggccctggtcaacaggtcggaagaggcgattggaggacaaa

SEQ ID NO: 450875 - DNA, 1132 bp, Homo Sapiens
ggatggaatatctataaaggaattcgggcccctacgtgagaagctcggagggggtggtttcaggagttccttgtggagaggggatcgtccgtgactcagaccccgtcgaaaagctctcgatttcacgcaaccaaccttaccctcgtccccaacacaatccttgattttacccctgggaaaattagcgtaggtggtcatgaccccggcttcctctttaaaagccctcagaacctggaccgggctcctcaatgaaccctagtgttagaggccacaaatcgggaatcaaggtcggggagcggctgtttagggtgcatcactgttcaggatgcatcggggctcctttttctaagcggaagtgtgcgccctgcaaattggaagcccgttagttttggggaagggtgaacaagggccccctaggtctagaggaccgcatggagtctcgcttaagtgttagtggggtcctcagttctagaaatctgcgttctcctgctctcggtttggggtgagagcacccttcctaacggtcttcgggaactgtgcgcgccggctgcaatggggccgcattttaccctcctgtgtgcggcgctggccggtttgcttgcttcctgccgaggggtgtgttcatatgtgacccgtctgtcgtgctggcgctaaagtccctggcagaaagattacctgcctggccacctggatgcgaagcaatcacaaagccatgatggaaagggtagagaatgccgtgaaggatttccaggaactgtcgcttaatgaggatgcctatatgggggtcgttggtgagggcaggggggaccacggacccctgggtcctgggaaaggagggagataagaccaggggaaggaagaggctgacagcagggtctccgggattcgggaatggagaaggctgagatgcagattccgaggttccccgaggctagtaaatactgttttccctatcctcggctggcaattttatgtaataaaactacaactcccagaaggcaacgggcggctgagtccttaaccaggcctatccttgcccagtggcctcatgggtattgtagtttctaagattaggcgcgccaatgagacagtaaggctggaatctggggttatatctcctctgacagatgag

SEQ ID NO: 450876 - DNA, 785 bp, Homo Sapiens
cggaggcagaagaccaagcagcacgcccagaattcgccattccagggttcacaccccagcgtaaggataatagtcgggtaggcatatggttggggaatacttagatctgtgatgaagagtatgactccaactgcagagcagattgcactgacgatgttcaagcccaaactgccagacagcaggcaataagaatatggctgattttctgctgccacggagagagatcctgaaatgataaaccacaagcctccccagaagggaaagcctccgtagaatgaaatagacaggtattcccctacgagaaccgtcgccatgatggagccgaggccgatgtgagccaggccaatgatgatctggatggcccccaaggttttgccttctttcagagctttctgcacaggctgcccattcacattcgacaccaaactaggtgggttcccaggaactaggtggacttgcggctggctgtttggatacaggggcacgtgagacataattcctggggtcacaggataaccattgtggggtgccaccaccaacacagaattggccaccggaactgctgaagtcatcgaattcatgcttgctctgccagcagccacgtatctcttgatcctattccttttctttgctgtggggaccttgttttttttcctgagagaatgaatgtactggggccagttgggtggtagggttagaaggatccgaagtcctctatttcctggatgcaggccaggttacatgctgcttagagctcagtttcattcgtatttatttcctgtttt

SEQ ID NO: 450877 - DNA, 859 bp, Homo Sapiens
gtcccgcagcatgggggggctccagtttcacacaatccatggattcaagacacagtttgggggacatgctggtccccagcgcattctctgcctgcaacccagatgcccatatttctggtacaacagcaggtgtttgcgtgggatgcagcaagtggctctgcccgtcctttgggcacgcagtccaggatggagtccccattgggtctgaacagttgccccggctcttgaaactcttcagagtgaagctggtgggtaggtgggtctcaggtcctggctcccactggcagatgaggctgctggttgtgaggttcatgaggcaggagaggttgtggggtatggctggagggtagcctgcgcgcagctcaacctggtccaggatctgcaggctgttgccccagttcaggcagcaggagagaaaggcctgagtcgtggttgaggtaggggcaggtgtgatgatagattcctgggtcccatcagacagacgctgctgcctgcccccgggctgaagctctgctcccacgtctccacagaatctgtggctccgggtccagatggctgcagttctgcttgatgatgcaggaggctgtgatgggatcccccaggtggacgatgggggctgagacactgatgtgcccgcactcctccagacttccggggagcagcaggatgatcagggcagcccaagtcaggctgcagtttcccagccttcgccatagctaccaaacttgatgttcaccagctcttgtgatcttggacaagttacttcacctttcacgagccgagccgtcagtttccccatgttggcacctctggcccagcccctggcttggccatccttggtctctcttctcgtcaagag

SEQ ID NO: 450878 - DNA, 703 bp, Homo Sapiens
tggcctgcggggcaagaggggaaaccagcctggaggcgcactggggccttccacctgtgatgaatcctgctgtgaagtagagctggctgaggttgtgagagaaggagctggccaccatgcccaggctggccagcacgccccccagcatcacggtcactcggcagccgaagcgtcccaccaggatgctgcacaggggccctgccatgtggagcacagccgtgaggatggaggggaaccaagaggtctcgctgttgctggcctggaactcccattgcagttcagtgaagaagatgccgatacacgtggggaagcccagggtgaggccctgggtcaccatggtggccagcagcaccacccaggcccaggtgccatctgcacgcttcagggcctggggcatcctctgctgccgacgctgccacggcttcactgccaatgtggctgctgcctgtgtttcccagggggcaggcaggcccaggaccaagggcaatgcagcttccaggcagggaggtccattccagactcaagcagggcagagaggtgatggggccagggctctggcttggcctctgccccagcagggaagtgctcttttctttgtaccgctcgcacgggcctggcggagaggtggctcagctcccccgagcgcggcgtcctgcggcccgggccggtcgcgacgaggaccgcgggactgggccaagcgccg

SEQ ID NO: 450879 - DNA, 587 bp, Homo Sapiens
ctgccagcgagacaggtccacgggcactgagagtgagcggcagtgcctcttggatggaggggcagggggcacaggaagcttctctggatctgggggctcaggtcttaggacttgggagaagggctgctccttgggggagtttccccgactgggtggtctgaggtgcaggctcaggcctgagggatggtagctgaagttgaggctgtcctggaactcagcacaggaacagtggggcaggcccctccaggaagcaccttcagacacaagctggaaagagttcccacagttggagatgtctgcatgatcaggcaaaggcagactgatgctgaagcgtgtgcatttcagctcatccagagtctgcttctgtagctgctcagtgatcagggttatcatgattctccccaggatttgacttgcacactttggagcaaatgatggatgtcttccctgttgttcttccagacctcacttgtgagccgtcttctgccactgcagcaccattctagcaccattgggacttccctctccagtcatgcctgctgagtcgcggttcctccagctcccagggccgcggccggagcagctct

SEQ ID NO: 450880 - DNA, 1113 bp, Homo Sapiens
acctttgggcggggcggtttcgggtgatgggccgtgcagagccgggtcgtagacgttggtccggtgccccggagcgctgcgttgtcgcgggtagggtgcatgtgtgccgggtgaggcagttggcttatgaattagcgtgcgggggtcggggtcctgatgtggggacctggttgttagttgattctgcggtcagttttggctaaggcagtggagctctagtttcgaggttcggtgaccagaggctcagaagggggaagaagactgcttggtggaattgctgatgaatcgtgatgtgtgtgtgatgcgtgcagatattttgggtgatggaatttggaaccttcaagtgatgctgccgtcatttcatgtgctgaaaagatgaagtgttcagggaagaccgttgggaggaattaaatgtggggaggcagacgatgggaacatgtttgttcttgctgaaggagaaccaccaaagttgattccagaccgtacatacttgggggaggcatatgtaatgttgtctggttttactcatcactatttgttatcagggagaaccattctcctttttggaattcttgcagagccagattcttagtagtccaggctcaacttcttggcgttcattttctggacatgaccactcagctgccatttattcaatacctactatgtgctggacttcatgtctgatgatttatatgtattttctgtaggtctcccatcaaccctgctgaaaaacattttgacaatttatacattaaaaacattgcaattcaagaacattaacattctaatattacaaagccaatgaacagaactgccagaatttgatctaaagactgcccacacccaaacccagttgctttccataatgtgctgtcaggttactttggaaaaaccttaattcatccctgaggaacattttctgtaaagcttctgccatcatcctattagtatttctttactgcctcttacatttctgctaacagcatacgttctcccatcttctgagaatagaagcaatcagccctccctgactctcagttaaagagagagatcccagggtttggcaccgtacctgtgtctgacgtcagcttatacccatcctcatgtttg

SEQ ID NO: 450881 - DNA, 1827 bp, Homo Sapiens
  misc_feature (176)..(176): n is a, c, g, or t
actgggttttagagccccccaaggtgcccctgaaatgcttgtgggatccctttcctttttcccccctccccacagttttttggggagttggggaggaaaggggaagggagaggaagtgtccaacgttcgcagtgacggggtcctgagacaactcatttctgccaccccgggcaggncggcagcagacagtggcccgcacgggcctgaggggcctcctgtctgtggtgcccatcccaccgagaggatcctggcccgcgagccggcagacactttattatacagaaacactatcgtcgtctccacgggcggaaccaacaaaagcaagtctctccaagtcaaaaataggttttggattcttggtggcggcagtatccgctgaaaaaatagactgaacttctgaaattatcttagtagcaaaacaattacaagaaaaaagttgcaacttcagtgctatgactggaaaggggcctttggccggcggcccctgttaccggcggcccctgtgcgcctgggagctcctccgggcttgaggaagccgcccacgtgccctgatggagaaaatgggactccaacaggaggccgtgtcctcacacctcagactgcgctcacagctcgggaggatcaagttacaataaacagtccattaacttcttgctttcaggtttccctggagtcaggcatctctgcacagtccagggcagccaggggctgcagagggtctgtgacaccccgccacgatgcagcagtggggacacaagcctgagggaacctggagtgtggagaggcaggagaaggtgcaaggagaggctgccatggtgtgcaaggaacctgggattgcgtctttaaatagttctcagtcattcttaaagtcctccctcaagacacaatgggacctagattaaagagaagccgtctctccgctgtcccagggcgcaggcggaatgcccgagcggtcttcggaggcacgggtgctggtggcacctcactgaagctcagccgggctgtcgccagcccatcatggccttgcagctctgtctgctgtgaaggtgacaatgccacagtccttcggggcaggaacgcccctcactgcatcctgtcaggctgcagctgcggcgcctggtactgcacgaaagtggtgcccgcgggtgctgcggctgagagggcctggggcacggcggcagggtagctgtagcccacgaagctggcagccgtggcaggcgaggcggcgtatgggtactggtcataggtggccggtgggtactgggcgtaggccgggctggccggcgtgtactcaatgtagggcgaggacagcgacgggacaggggcggctgggatcaccacgctgggctgcacgatggctggtgggtagatgtagtgcggggtcagcctgtggggccaagcagagcaggttagggccagaacggagttggggaatacagctgggagaacagtggggtacacgatgcgtgccgccccccaccccgagccccgactttcctcatcggtcagatgggcacagaaacagcacctggccagatgctgccgcctcaaggccttcgcactgactgtctgcactaaccaccaggctccctcctccactccatgtctccttctcagcaaggccttcccagactgcacccccgcatcccagccctacaccccacatccccggagctggtgcaaaaataaaaatcttgaatggttgttttcaaatgattgagagtttgaagccacgacggcggagcatgcgatcaagagcagggcccagtacgaatgtcctggttgcatgtctgcctcgtgccgaattcgccacccaggcctcgctcc

SEQ ID NO: 450882 - DNA, 1128 bp, Homo Sapiens
  misc_feature (988)..(1031): n is a, c, g, or t
aggggttgtttactccacaggggtgaagcaccaaggggcggggagaaaaggcccccgcgaaaggcggggttcttttttcgggaatggcccccggggggttttcctggtggggtcccccctcccctcgggaaagtcgttcaagccacgggggcttgtttgaaccaaggcccttttaatggcacttggggcagtcttctgttttgtcctggttaaaggtgtgcacaatgttcccccagtccctttgggggccaggaaacggccccttcattggcattcctgtccagggcttccattctggggccgcttgggttcttgcaccaaaaggtggtgccccggcgggtgcttgcgggctgagagggccctggggccccggcggcagggtaagctgtagcccacgaagcttggcaggccgtggcaggcgaggcggcgtatgggtactggtcataggtggccggtgggtactgggcgtaggccgggctggccggcgtgtactcaatgtaggggcgaggacagcgacgggacaggggcggctgggatcaccacgctgggctgcacgatggctggtgggtagatgtagtgcggggtcagcccgtctggaggctccgcggcttggcgcccagatatgccaggttcacgttggccttgcggccgtcgatgatggggttcgggtctttgcaagccctctcaggctgccgcccggtcggccatggtcacgaagccgtagccgcgggacttgcccgtctggcggtcggtgatgaccacggcctcctcgatgtcgccgaagccctcgaagtacttcctgagcgaggcgtcggtagtgtggtacggcaggccgcccacgaagatcttggtgaacgtggtgtccttctgcgagccgtgcatggcgccgggggcggccaggggccgcgggaagcccgcgctcggggcgcacggcgcgggctgcagcagcatggggggcgccccgccgcctacggacccgggccgcgcnnnnnnnnnnnnnnnnnnnnnnnnnnnnnnnnnnnnnnnnnnnnaggggcgcccgtccagccgccaggcccgaccactcgcgcgccgctcccgccgtgcgcgccgagctgcgccgcgccctcgtgccgaattcgccaccca

SEQ ID NO: 450883 - DNA, 892 bp, Homo Sapiens
  misc_feature (67)..(96): n is a, c, g, or t
tcctagaattccatttagggggctcaactccccatttttcaaattgctttgctgggcttccctctannnnnnnnnnnnnnnnnnnnnnnnnnnnnnacattatagataacttgaaaaaggtctttaagatcaacaactaatggttcagcctgttgcccggtttttatggcaaaaaactgatgctggccttctcctccacacacgtaaccaaatgcccggttgtctgtcacatcacgggcaatgaaagaaatcttatttactggatgttcatgctctattaccccagttttctcatcaattatttttatcccagaaagggaaatgttgacccagatcctttgtttgtgttgtccctgagaccgaccagctgccgccattccctttagtttcatcatagagtcttggctcattttatcccctcttgcatctggcacatcatcaatgccaatcagcttggccttatattttacaccatcgcctttgaaccttgctaagagatattcatctgtcttttcagggcctttctttttttccttctttgagggtgcttttggtgcggcctgttggtcgggctgaccattggttgcacttgtttctacttcgttagacatggcaagaaggcaggcagcaaacctcagtaccagtggacacttggtgacaccaggcgatcccgatggagaactctcaaataaacataacctcccacagacaccggctagctattgcctccgtgaagcgagcatgacttccccgcgcccggagcctccaggctacagcgcagcggatgcggcgggcctcgcttaaatagccgccggccgggagcttcggagccgcgcggccactcccggcgagagatatggttctaatatcccaagaatccggaccggtccag

SEQ ID NO: 450884 - DNA, 646 bp, Homo Sapiens; identical to SEQ ID NO: 151741
  misc_feature (14)..(14): n is a, c, g, or t
  misc_feature (512)..(527): n is a, c, g, or t

SEQ ID NO: 450885 - DNA, 657 bp, Homo Sapiens
gatcctcaattttggttgaccccatcatcatcatacgaaaagagaaaagtaaaaaggaaggattttacctaacatggttacatatatgacagcattccaggcccaaaataatcccactgacctattccacaatgacaaagaaggccttcctgatgtcaccaacagagttaaatataatctttgaattaaacaaatgaattgcttgcttgctaatgggtattacataccctacactaaaggaaacaaaatacatctttcattttctgatatttaaagattgagtttttccataatactgatatacaggcaacttttactaatatattgtaatgataacagacaaatgaaataatattatctaaagtacacaggaaattttgtttgatttttaaatgaagctatggttagcaatttatgtcaggtcaataaaagatggagatatacaaacagtagaggaaataaagtatgtgtgtatttaatatgaaaactgaaagcaaacgactgagaatttgcttagctcaaactatacgtaagaatttcttaaacctccatgttataccttaaacacatctttgttctctgttagtaaatacaagctcttcaagggcagagatattgttgaatacatcttcacatacaaatatatcatccaaatac

SEQ ID NO: 450886 - DNA, 715 bp, Homo Sapiens
ctctttgagtacatacttctcaagattttcaactgtcttttccttaagggagcccttgtaatgaacccagtcaacagcatctcttacatcctggaacatactccggtaggacatgaagaggtccccatctttaaatcctgtttcacaactggtatatctgggacaattagtaaaaaaatctactaggcaggccaacaggtaggtctctggtaggttgaatagtgtgttcagaatgtaaaatctttcagtatcatctcgctggataaatttatttggatactgttctctagtttctggtccccttataaagttaaatccatgtgcacagaccaagaggtttccataggcatcgactttcaaaagatttccatacagtgtgtcaaagacaagtcccctggtagggaatgtagaatcataagcaaagctgagcaactcctggggatagccaatagaaactaatctctccacagtaagctcaaaaccaagggactcatactctggggacttgtacacagcaagggtataatccatatcaaaaccaaaacactttatcttttcacattgctaaacttcggttcacaaacacccgatgataggcttctcgacgatactttttcagggcatgcttatccatgttagcaggcatatctgctgcattctgtaaccgatcactccaggaggctgacattttattttaactgtattttgtattcgc

SEQ ID NO: 450887 - DNA, 758 bp, Homo Sapiens
tttgggtgtagagttatttaattataaagaactattttaggtatagtcaatgattttcaattattatgtcaattacattcgttgtattcacttacggactttatggtaggttacaaaaatatatactttgaaaagaaatatactctttatgcaaaggaagctatgccatcaacaaacttgacctctaattcccaagtttattacagaaaaatttgtagtgtgaaaaaggcaaacatctccagctcatcttctcaggtatctatgaagattccgtacaaactcctttcaaatttttcccaggaatgctgtcggaactggaccttgatgaaggaaatactttctgactcattggaatttgttatagtcaaagtaagtaaggcacaaatattgaagataaacttggtacagtatgtagtgccttttgttattaaatgcaactttgggtgattacttgacattttgacttcattgatttactaaaagaagttttgaaaattttactgaaggccactgtttttgtttttgctattgtttttaaatttacctatatatggatgtttgtagtcatttctatgaaaatgttggcattaagccttttaatgaggggcacaatctgctaccataatattcttttaatgggaaatcaagtaggaatggataattgtgacttttctaggaatggagaccactgaaaatgagacagaaactagtgtgtataaatacattacagtatgggtgtggatgttcacactccacac

SEQ ID NO: 450888 - DNA, 941 bp, Homo Sapiens
ccgttccccaacttcctcggcgctccggactcccaagtctccgccggaccctccttgggatattcctcgtgtctccgattctgagacagagggggaagacggtggggcctccccacctgccccgcagaagatgcagttctttggccgcctggtcaataccttcagtggcgtcaccaacttgttctctaacccattccgggtgaaggaggtggctgtagccgactacacctcgagtgaccgagttcgggaggaagggcagctgattctgttccagaacactcccaaccgcacctgggactgcgtcctggtcaaccccaggaactcacagagtggattccgactcttccagctggagttggaggctgacgccctagtgaatttccatcagtattcttcccagctgctacccttctatgagagctcccctcaggtcctgcacactgaggtcctgcagcacctgaccgacctcatccgtaaccaccccagctggtcagtggcccacctggctgtggagctagggatccgcgagtgcttccatcacagccgtatcatcagctgtgccaattgcgcggagaacgaggagggctgcacacccctgcacctggcctgccgcaagggtgatggggagatcctggtggagctggtgcagtactgccacactcagatggatgtcaccgactacaagggagagaccgtcttccattatgctgtccagggtgacaattctcaggttgctgcagactccttggaaaggaacgcagtggattggccttgaaccaggtgaataagcaagggctgaccccggctgcaccgtggcctgacaggctggggaacgccggacaatggtcccgagtgctggctgcatggcgcacaatgctacgggcaacatcaaatggagccgaaaggctagcccaatcaatcggccatgaaggtctctcaga

SEQ ID NO: 450889 - DNA, 731 bp, Homo Sapiens
gtggttgctgatgggggtggaaagttgaactccatgtctgaggacaagaggtcccgggggtggtgggaggtggcgccggggtcccttggactggcctccttgttcatgaccaagaccaaacctgggccctggatggccttggcctgttcccgaggagaaatgagaaaatcccagatctctgagcgccccccaactccattcccctgtgttcttctgtcttctgtagtatttattttattagtatttaatttgtattgtttcattggtttctgataagtctgtatcactgtgacgatttgagacaacttgttgtattgagggactttctgtacctccttttctttttctttgttgatgagctctgacaaagctattccctggtgtttttttcccccactggggagggggtgaggtggaatggggtgggggaacatggacttgtgactaacgaagctggttgctgctggcccaggctgggggcttgggggtaaatcctgaggctttggtgctcccccagccacccattcccgccctttgcagcagccccgctatcttgagattagtgttgacagggaggggagcgattgtgacggtgagcgggttaatacgttactctaataaaggagcgtggagaacgggatctgaggggtgagggtggccccctcctcacgccttcttcactgcccccctcagagtgcacaatacgagtttgtcctgcctccatctcccac

SEQ ID NO: 450890 - DNA, 937 bp, Homo Sapiens; identical to SEQ ID NO: 151744

SEQ ID NO: 450891 - DNA, 673 bp, Homo Sapiens
cgtcttccgtgaattcatctggaatagttaagctatcccctatgtcaattcctgtagaatgtttccagaaacggataatttcctcaatgtctgtaacaggattaaataagaagtagtctctccattcattccagtccactgtcattgtcccatcaacatcaatgctttgaagaatcaactctgcttgttgttcagaaatagtcagacccagtgtctggagagactggacaatttctgaagcctcaatttttccatcattatttttgtctaaactcttaaatgccaacttcattttcttctcatggtctttaaggtagcttcataaattctttgcaaaatccggcttcccatctttgttgacatctccagtagtgaaaaattttctgcctcggcgtcctggcccagagggatgcccaggttcctgagcccctcctgcagctcgccgatgtccaccactccgtccccattgcggtccagtgcctggaagagggtctcgtagcgcgtcggctgctccgcgtcctggcaggccgcggtgggcagcacgaagtcccgcagccagcgcaacatggtcccagaggcgcaggcggcctggccgaggaagtcacgggagatcgaggctgcggggcgagaccggaccagcgcgagccggctggcgggcgcgcgcacacccgct

SEQ ID NO: 450892 - DNA, 1076 bp, Homo Sapiens
cctctcccatgccttgctcttgctggctcttcctgggccagctgccagaggtatgcaggcaccaggatgcctggaggagggacagtgggggcccaagtccagctggggctgatgtcccctccagggtgcgactgggtgagggtgggcagattgccccgtacagtcagagctggaaggggtactgtcggaggtagttgggccatgcgccgggggcagtggcagggcagtccaggtcggcccccagacgggttgatgacaaggcggcacaggtgttgcaggctgcgggcactgcttctgcgtacaaagggctgcaccagttttaggtgtacagcagtggctggtggaggagcaggcagtgctgggtcactaggcgcatcctccttaggcataggcagggccggggtgggagcaggatcggggctgtcgcttcgggtatcagcagtgcaggaggccacatagtgctgcacaaggctgaccacatccggaaaggccaggatgcgtggcctggacaagcagttggagtccagacggaagctggagtcggcatactcaatgcgtacattggtggggccacgagtggttttcactgacagcgtgaacaggtagctggggtgcgtgctgtcacgtactaagaacgtgccttctggcatcttctgcaggtgttgtcgggcctcgctggccgtaatggaaccccaataccagccagattcccgaaggtaggagaaggtcttggctatgcacagcagatcctcctctgggtccagcacctttggctcactctctgtctgggctggggtaccctctgccacctcctcgaggaaggccccagcaggcaagggctgcatgactggcttgggcagttccagggacggggcccacaggggccgctgcccagtccgctccacagccagcaaaggacgaggtccctgaacgcagaggaccatgtccccgcggcagcggcgactccggagtggggactcggctggacggcggcggctggagggaaccagtgggcgcggagcgcgtgctgggtaggctcccggggcgcgcgggcgcaggacagggactgagagcag

SEQ ID NO: 450893 - DNA, 869 bp, Homo Sapiens
agcgggcggggagggctgagggcgggtcacttccggcggcttttcctgcagctcctgcgtaaaggagcatgagagcgtgggagttttgcagtggccgtggcgttcttcgtcgcgtctcggtcgggcgtcgctttctgcagctcctgtcagggagcgcgaggcctgttattaaccgcggagcgctttgtcacgaagtccctgtggcgtcttgaagaaggcattccccacccgccaaatggcgtccatgccccccgacgcccgaggcccagggaccaatactgtttgaggatctggctgtgtatttttctcaagaggagtgcgtgactctgcaccctgcccagaggtccctcagcaaagatggtacaaaagagtctttggaggatgcggctttgatgggagaggaaggcaaagcctgagattaatcagcagttaggcctagagtctatggaacttgacgagcttgccttagaaacagtaccccattgctgcaccccttgtcccttacccagaaaaatcctctgaggatggagttggaaaccctgaagcgaaaatattacagtggaactcccacttacaagagaagggtcatcagccttttagttacccattgaaaaccacaccccattagtagaactctctgaatatttaggaaccaacacactttctgaacattcttgattctccctgggaaggagccaaaaatgtgtacaaatgtcctgagtgtgaccaaaacttcagcgatcattcatacctagttttgcatcagaaaattcattcaggagagaaaaaaccataatgtggtgactgtggaaagatcttcaatcatagagccaacctgaggacaccaggagaatccatactggtgagaa

SEQ ID NO: 450894 - DNA, 948 bp, Homo Sapiens
tgggtaccagagccaagccacggatgcctcggcaacaccgtgtgcacaaacatcgggacttccctgggccctccagcacgcgggcagttaggtctgggatagagggcacggctcgggccccacagcccaccctagctggtcattttgggcacggatgcctgatgggcactgcacggtgtagttggggcttagaaagtcatagttgtagcagtcaggggaagccatagaagccccagaggccgcgaggacgcagtgcccgccccagctggagggtgcctgccaatccaggcccgtgcagctccctggaactggtcctgggctactgcctccacctgaggagctggccaatcagggtgctgtgcctgtaccagtgcccgtgagcgctgccggtaaatgtccttggtgtcccagttgaaggcccagcgtgggcgccatgcctcccagtcgatgactgccagccctgagaagtcaggagcaggtatggcagccaggatgtcctggaatgtgcgggccaggtgggcaatcaggctggcattctggggcagaccaccaaacacaggctccccagtgggcgtgtagtaggggtaggtgcccagctgggagctatagaaaattgtcatgtcagggccgcggaaggtctgccctgggttggctaccacatcgaagacactgacatccacgtccacaccgtgcctctccaggcaccactgggtgtttgcattccagacggtggtgaagggccggttgggtagcaaggggcccctaaagccttgggccatatcgagtaaggtcaggaagagggcgcagatgggaagcaggtgggctgccatggcacgggactggtcgaggacaaccttggggctgaagggccttatcctccaaatttcctgaccccaggatgggggcctaagcagggcctggccagattccaccccagctgcaccagag

SEQ ID NO: 450895 - DNA, 956 bp, Homo Sapiens
gggctcaacattcatccccgcctctgacatgagctcatgccacgcacaagtcaatcctgtggttccatgagattctgcacatctgagcatgacctcttaattgggtgggactggctggttggagtcaccccatgccgagctctgcccgccccaggtgcttgaccacaatgcagcatcgttactgggaaacccttcgtgcctgacacttgctgcagggcctcgtcagccagctcccttcaggttcacaagcttgttcccccctgtagaaggcatctgtagtgatgagaagactgcagctggaatccaagatccgttcacatagagactctgaagagaagcctgcaaacacaatggagtgcaaagccccaatgcgggcacatgccagcatggccaccacaagctctgggatcataggcatgtagatggccactcggtcccccttctgaatgccctgttttcggagaacattgctgaactgacacacttggaccagaagctgatggtatgtgatctgagtggtctcccctggctcattgccctcccagtaaaaagcaactttatctccaagctttttctcatggacatttcgatccagtacattgtagcagatgttggtagttgctcctttcatccactcaatgaagattttccctttagtcacatcaaagttgtaccgaaggaatgggccagggcatggagtcttccagtaaaattccttggcaatgtctccccagaattcccgcggctcctccacggagcgccggtgcagctcgcggtagcgctgcagcgaggggacgtgcgcggagcggctgacctcgggcggcggagaccaactccgcgcccggcctccggctccagcttcctcctggccccggctcccgctgccgctccggacccgctcctcaggaagccccatcacgtcaagttcctagaaccgcggccgcctttgcggtccc

SEQ ID NO: 450896 - DNA, 1176 bp, Homo Sapiens
  misc_feature (233)..(243): n is a, c, g, or t
  misc_feature (265)..(303): n is a, c, g, or t
cgagcccccactcgggtgtgtcccgggggtagagaggagagtgcggggtctgccgggggcactccacctccgcactctggtgggctccaatcatatttcttaccctcctgcccctcttgggcgcaagaagagtctaatgtcccccgccctcagagggccaattctcccctatgggttcccccaagggaatttcgcccccctatctgtcaggccaaggcccctctgtataatcnnnnnnnnnnnaacctgctttgggtgggaagtnnnnnnnnnnnnnnnnnnnnnnnnnnnnnnnnnnnnnnnaggtgggctttgggccccccaatggcgggggtttttttattggggaaaacccctttcttcccggacccacttgtgggcaggggccgttggttgaagccaaggttcctttccagggttgcccaaggttttttccccccctgttggaagggccttctgtagggtaggagaaggtctgccaggtgggaatcccaagaatcccgttccccataggagactccggaaagagaaggcctgcaaaaccccaagggaggtgcaaagcccccaatggggggcacatgccagccatggccacccacaagctctggggatcataggcaatgtagatggccacttcggtccccctttttgaatgccctgttttcggagaacattgctgaactgacacacttggaccagaagctgatggtatgtgatctgagtggtctccccctggctcattgccctccttgcaagtatatctgtaggatgaattaccagaagtggaccagtaaaaagcaactttatctccaagctttttctcatggacatttcgatccagtacattgtagcagatgttggtagttgctcctttcatccactcaatgaagattttccctttagtcacatcaaagttgtaccgaaggaatgggccagggcatggagtcttccagtaaaattccttggcaatgtctccccagaattcccgcggctcctccacggagcgccggtgcagctcgcggtagcgctgcagcgaggggacgtgcgcggagcggctgacctcgggcggcggagaccaactccgcgcccggcctccggctccagcttcctcctggccccggctcccgctgccgctccggacccgctcctcaggaagccccataacgtcaagttccc

SEQ ID NO: 450897 - DNA, 993 bp, Homo Sapiens
  misc_feature (82)..(82): n is a, c, g, or t
cttaaggtctcccctttttggagttgacccccagatacatcttttttccttttctttcctttcctgtcctgaaaggtgtgcntggacacctccctgggggctcttctgggtcatttggtttctggagaattatctcttatctctggcatagagcccaggggagagtggggcatctcttgagggtcttctttatctctatttggggggatcaggttgtcactggccacttgcacagtgctagtgaggaggctgggcatctcttctgagtcttctttcgcattcattttggatgttaacttgtcattggtcactgaagtgcttcttccttcctggatgagtgcagggagaggcaggacagggtcagatgggctgggcgactcactcaggatctcatcgctttgctgggaggatgttccaggctcactgactcttggcgcacagggtgaacagcttggttgagggggttgtggtgggggcagcgccagtggggtatggagggagcttccttctgctaggccagttggggcttcaagtaggattggtgtgtctctgctctgccgttcataggaagcaccaacacgtttgaagcttctgtaaatcgtcaccagattgggatattcacgcaggttaatttgactgaacaatgtcaccagaagagacaggttaaaagtcctctccagttgggtgagaatgttgtgcaccactctggatacagggatcaaatttctacaggcttccagagattccatgtacattctcttagtgatgatggagttgtctaggaggccttcaaagaagggaaatggcttgtgtatggcataggcgatccccagcttctggtgcatgaagtgctgaaaaagagcctcttccatggctcttgtcatggtgaacatcctggactttgagtttgtcgttcctgcccctttccaggggctgggacagggatcactcctcaagattgggagagttacagatcccgggaattccggaccc

SEQ ID NO: 450898 - DNA, 945 bp, Homo Sapiens
gggtcacgttgttttcaaaattttgaggaccgtctctggtatgcttattgttcccaactgttgctggattccggagttcattttgaggccgttgaacctagatgtttcctttggccaacctgtgttaagatttccgttctcccggaaccaggactgttcatccctcgggggagaaggttcttgacggccaacacttcttcacccggggccaccaagccccgccacactttggccattactgcctgtttcccccacagttcttccacccaagggcaaacctgccgttgcccacctgtcctctgcaccagggaaggggagcccctgagccactccccttttggtgcagtcacctgttccaggaggttccccccaacatgctgtcgccctgctcagatgctttcaggatgagactggactctcccagctcgctgtgcaggccacgctgcttctcctgcctccgtcggacatgccacaggcccaggacacccagggccaccagggccagcaaggccagcacggggcccaggatcagggccagctggccatctgttcccggctgctccgaaggaggttgggtggcctccagcaccagggacacgttgtggttgcagaggtggctgtcgcagcagtagtggttgacgaactcggtggggcgccccctgcagagctccctgtgcaagttcccgcagccccgatgttcctgggggtgcctcccctcctcccgcaccagcactactgtgcaccaggccccccggcaggtaggccccttgcaatgtgggctctcacacgtgcaggtcaccagcgggccccgagacggcttcacagggtctcctgggtcaccaaggccatcagcagcatcagaaggcctttcctgggggagcccaaggtcatggtccctgcagagaggagcaagagaggtggagtaagagccatgaagtgtgacag

SEQ ID NO: 450899 - DNA, 763 bp, Homo Sapiens
cagggccaggggcacagtggtgcctggggcgaagtgtccgctggccccatacagcgcggtggtcagtaggaaggcgcaggccaggaaggcgagggcacggagcaggatgacctggaccggggacttcacggcggaggagaagttctgtgcgtgggtctggtcggcctcccggcgcttgaactggtggctgagcaacagggcgcgcagctggcggttctggtgcttgatgtagtactccacagccgcttggcacggccggcacagcttgtacatctgctccaggtgatgccggtacacctcgacctcctcgtcatacctgccctcctcgcggggagcgaaggcggccagctgcttgatcttggtggtctggtggtggttgcacctcttgcacagcaggacttggctgctcacccactgctgcggctgcgaagggtcgcgcaggctgggcgcgctgctcaccacgtggttcaggtgctccaagtactgggcggggatcggcttgttgtagtcgccgttctcctggaagccgttgtactgctcgcagtggggacagtcccagcagttgcggttcccatagggcaccagcgtatcctggttgcagaaccagcaagttgaccatcgtgtgcgttggcttcatcctccgcgcgatccaggtagagcaacacgccggccgcggcgcacgccgtgacccccaggccgccggccaggccggccgaggggcagcagggccagcagcgcgcatcactccctccatggctctccg

SEQ ID NO: 450900 - DNA, 1096 bp, Homo Sapiens
  misc_feature (98)..(106): n is a, c, g, or t
  misc_feature (111)..(137): n is a, c, g, or t
  misc_feature (218)..(218): n is a, c, g, or t
  misc_feature (277)..(277): n is a, c, g, or t
cgggtttcagagaccagcaaaaccggctttgggtaaaaaggggggttccctgggagctgcccagttaggaaaacccaatgggccccagagccctgttnnnnnnnnntttgnnnnnnnnnnnnnnnnnnnnnnnnnnnggcccaatgaaagggcccattggcccagagaaggtggccagcagtggtgagttggttaacagggcacttcgggggattggncctgtggtgcccgaaaaggaaaaaaaggcagggcagactgactcttttgaaggccaagntgaggactgggccagggccctggggcttttagggtgggggtgggagggcgtgagcaggtgaaaagaggcaggacagagagggggcccgcttcggacctggcaaagcctgggcctgagcatccggtgtgtcctccccccgcagtcatggctgcttctctgaccttcggggccggaacctccgtgggcccgttgccttccttgtggccacagccgccgtgaagccaaccaggcagcacaaagatgtggtgctgaacttgagcgtgtctagccagctaggcgaggcggcctgcaggtgctgctcagccaggtgcagccccagcagcagggcccacaggcaggtgcagaaggcatcgatcctccggagcctgatgcggccagccagcagcattgccagcaggcaggtgagtaggcccagtgccacgacgcccgtctggtggctctgcccaaaggcccaggcctcacacagcttctccgccatgtgctcggggagtaggcccagcaactgccgccagccctcggccccaggggtggtgccattgtcaggtgtggctgagccattgccaccaggtggcagggccaggggcacagtggtgcctggggcgaagtgtccgctggccccatacagcgcggtggtcagtaggaaggcgcaggccaggaaggcgagggcacggagcaggatgacctggaccggggacttcacggcggaggagaagttctgtgcgtgggtctggtcggcctcccggcgcttgaactggtggctgagcaacagggcgcgcagctggccctcgtgccgaattcgccacccaggcctcgctcttt

SEQ ID NO: 450901 - DNA, 1401 bp, Homo Sapiens
  misc_feature (374)..(466): n is a, c, g, or t
  misc_feature (828)..(861): n is a, c, g, or t
  misc_feature (887)..(915): n is a, c, g, or t
  misc_feature (991)..(1071): n is a, c, g, or t
cagggggctccacaggggaccaggggtcagatgtctctctaagatggggacaggcacgcaagctgctattcctggggctctgatcacggctgtctatttatagcgctgggcgggagccgcctcacatacgacacgcacgagaggctgccctgctgcaatgtcacctgtcgtcactgcctctgcaggctgcaggcacctgcccactaccgcagcaggactgcaggggccttgcgccccaccagcgcacccccacggcccttgcgccgccactgctctcgcacccctcggcacaccacgtcgccccggccacactggcgccagccacccacggagccccccgtgcgcgcgcctcgccgctcccctgcaaccctcgnnnnnnnnnnnnnnnnnnnnnnnnnnnnnnnnnnnnnnnnnnnnnnnnnnnnnnnnnnnnnnnnnnnnnnnnnnnnnnnnnnnnnnnnnnnnntctcacgcccctgcgactggccccaccccgcggctgcgctccacgccccgccgcctcccaacgccccaccctcactgccccatggccccgcacactgcggccgcatctctgccctatccgccgcaccctcctgcagcctgcgatgcgcctgcgcacctgctgcaaccttcccaccacgccaactcccccaccgccctccacccctggcccgcgacactcctcccctgcgcgcgacccacacctcttccacagcggccctggccctttctccgcccccatcgccactcggccccaccacacatggcgctcacttgcccgctgcaactcgcgccctcgtcccacgtcccccctctcgctctcannnnnnnnnnnnnnnnnnnnnnnnnnnnnnnnnntgggccgcggcgcacggctgcttctnnnnnnnnnnnnnnnnnnnnnnnnnnnnngcggccctccttcgctcccgccccacgagcgcaccccttctctacacgcccttcgaccgcaacgccacaccgcacnnnnnnnnnnnnnnnnnnnnnnnnnnnnnnnnnnnnnnnnnnnnnnnnnnnnnnnnnnnnnnnnnnnnnnnnnnnnnnnnnggacgccagttcggggccccccttgacgcccacgacgcgaagcccacgccgagagccccaccaggggcccacaccggacgcacagcacgcgaacgccaccaacctaaccttacgagaccacgacccggaacacggaccaccgacgcccggcacaccccctaccacgccgaacgtaccagcaccgaacccgacgcaccttaccccccgacgaccgcactgtgggaccgttcaacactctacaaccggacgaggacacggactacgagcctccacacactacgaacgcacacggccacgcactaacaccccggcgcccgacttaacagactg

SEQ ID NO: 450902 - DNA, 1719 bp, Homo Sapiens
  misc_feature (49)..(85): n is a, c, g, or t
  misc_feature (1207)..(1207): n is a, c, g, or t
  misc_feature (1554)..(1554): n is a, c, g, or t
  misc_feature (1605)..(1605): n is a, c, g, or t
  misc_feature (1670)..(1670): n is a, c, g, or t
agatgtatgaatcactatggggacccggggtttatcgtggtggcggcgnnnnnnnnnnnnnnnnnnnnnnnnnnnnnnnnnnnnnatcaggccaaatcggccgagctcgaattcgtcgagagcggggtcgcatttttccggggaacgcggattcgcattcccaattttaggtggcagtcgcaacccatactattcggacagatggcacagaaaccgctgcgcctcttggcttgtggagatgttgaaggaaagtttgatattttattcaatagagttcaagcaattcagaagaaaagtggaaactttgatctgctgttgtgtgtaggaaatttctttggctccacccaagatgctgaatgggaggagtataagactggcatcaagaaagctcctattcagacatatgtgcttggtgctaataaccaggaaacagtaaaatatttccaggatgctgatggatgtgaattagctgaaaacattacttatctgggtcgtaaaggtatcttcactggaagctcggggctgcagattgtgtacctcagtgggacagaatccttaaatgagccagtaccaggttatagttttagtcccaaggatgtgtcttctctgagaatgatgctgtgtacaacctcccagtttaagggtgttgatatcttgctcacatccccatggcccaagtgtgtggggaactttgggaattcttctggagaagtggataccaaaaaatgtggttctgctttggtttccagtcttgccacgggcttgaaaccaagataccattttgctgctttggaaaagacctattatgagaggcttccatatcgaaaccatatcattctacaggaaaatgcacagcatgccacccggtttatagctctggcaaatgttggaaatccagaaaagaaaaagtatctttacgcgttcagtattgttcccatgaagctaatggatgcagcagaactggtaaaacaggcctccggatgtcactgaaaacccttacagaaaatctgggcaggaagcatccataggaaagcaaattcttgcccctgtggaagaatcagcctgtcagtttttctttgatttaaatgaaaagcagggaaggaagcgttcatccacaggtagagatagcaaatcttctcctcatccaaagcagcctcgcaaacctcctcagcctccaggacccctgctggttttgccttgctagccnctgaagtggaaaaacatttggtggtcaacatcggcacacattgctaccttgccctggccaaaggaggcttatctgatgaccatgtcctcatcctgcctattggacactaccagtcagtggtggagctttcagcagaggtggtagaagaggtggagaagtaaaggccactctgagacggttctttaagagtcgagggaaatggtgtgttgtatttgagagaaattataagagccatcacctccagctacagattgcacagccaggagcagcatatttttatggtgaaatttgacacaggagaaaaagctttttccacagaatttaaaaaagatttttccctttgcagntttggaaaggggaggtcctggggccagtgaagcccatcccttaatgttccntgataaagtctggtaatggcctagggctccaagggatacctccggccctgggccttctttaaccntgcgtggggaattacaaggcatggaggacccccatttccctggcgccta

SEQ ID NO: 450903 - DNA, 980 bp, Homo Sapiens
ccgggcccccggcggccgggctcagccccagaacaccggcgcgtcttccaggcgcgcgggcgtcgcgcagcgagcggtcgtgggccagcgcggcgaaggccgaatggcgcagctggcaaccgatgaagaggacgacgagcgccacccgagagcagcagcaggaagaagagcagcaggtaggtggcaagtcgggctttgtggccgcgccgtccctcataccgcgcgcagtggccagctccagcgggcaaagcgccttctgccttgaccgtggctcctggggccagcgcgctgcctaccgccgcctcggggccgcccgtggcgttgaatatgtcgccgtacatggcccgcgggtcccgccgaccccagccggaccgcttcacttggcctggagcatactggcgcgacccggcgcctccatggcgcgcccctcccgccctgccgcgcccaactgaccgagagtcggtgccttggggccggcggggactgcaaagaccccgggacgcgtccgctcactcgcctccgcgctcagctgctttccccgccggctggcggaccccagttctcggagctggacagttctgtgcccgcgcccctcgggctcactgtttctctccgtcgccaccaggacagaggtcccagtcactgactcgcctttcggctttacaacagcccgctcagctcggaccctcagctccagtgagctccaggtgctgggcgcctctgggctgcggcggcggggagaggcactcagcaagtgcagccgcagcccggggtctctgctgagcgcccggtggcagagcgcacggagggcgggtggccagggagtcctccgcgtcctccggcgccgccgccaccgcagcgtctcggaacagtcctgcaggctctggtccctgtcgagacgcccagtgttcagcgagcttgtccccactccctccggctgctgcgctcctgttttgagcaggagactgagctttctggcg

SEQ ID NO: 450904 - DNA, 625 bp, Homo Sapiens
cccgtttttgtgatgtcttgtttgttttttgcgagaacagtcactccttgttccttccacgacatgctgcatcctgcgcacagtcctgaccccaggaaccagccccaggttctggctgagtagcctcttgtagaacagtgtttaatgtagcagagcaaggagaggagaaagaagagactggccccgacatcggctcgtcccacgattcctgccactgcctccgtgtgaatggggtgagaagcaaacatcaagccagccatgaatgtccagtatccaatcaccaaaggaggatcttggagaagctttgtgaagagaccagtgactgctgcattgcaacaggacattgacaagatggtagctcccagggattcaaccctccaatggcatggttcaggcgaaaagaaagagtgcagagtggccggtaggacttgtggctgccactgtgggttagaagagtcccccaaaaatcattgtagaaaatgtgcgtccatggagtttctgggagaaggtcctgattagtcttgatagcacggctgtcatcatagcagaaatccgcgctctggggctcgccttgtatctcaacacctgagtgcggatttctgctatgatgatagcacggctgtca

SEQ ID NO: 450905 - DNA, 1054 bp, Homo Sapiens
gggattcctgtcacaatagtcacctttcctttggccttcgtaacctttgcgaagttcacatgcatcgacaccctcatcttctttcaagaagcaaatgagtggaagtaaagttagagagtcctctgctctcctgcaactctgaactactacttggcggcataacacatcctttttgcacttgcttcgggtcctgaggttccagtttgaattgttactttggttttgtagatgggatgtcagggctgccatgctgcagtctttatatcttgacttgataccccttttagaaagtacagtaaaatcaaatcttctggcttaagagaagtctctccatttttgtgaagataattagcaagtgaacttttggatctgaacttcagtccttgtgggctgataaagtacacatcaaatcttcctgctgtcttcccaaataacctttgcttcacaactctttcccatccacatgggacagacttacggcattctgttcctgcagtagcaccaaactgagcagaagcgatgggttcttgtagcaagggattacattcactgcttctttttatcatcatttgttcctcatcttctcccactctttccaattccatagcaacatcttctttgcggaggtcattcggcgggtctgggactaggcgctcactagaggtgacggtgggggcagctccgcggtcccccagactcagactctccagcccagtcgtgcccatcgagcagggtccggctgcagcaacgagcccagcgccgcaacgcccagggtgtggggcggagtaagatgtgaaacctcttcagctcacggcaccgggctgcaaccgaggtctgaatgttgcgaaagcgccccagacgccgccgctgctttccggccgccccctcggctacagccgccatttccacgctccaccaatcaaatccattctcgaggaagacgcaccgcccccacacgccccgaccaatcgctcgcgctctggttgcgctggcgccttaggggctccagtgccaccattgcttttgctgcttttctggctttcccttttccgct

SEQ ID NO: 450906 - DNA, 1369 bp, Homo Sapiens
  misc_feature (70)..(70): n is a, c, g, or t
  misc_feature (113)..(114): n is a, c, g, or t
  misc_feature (124)..(125): n is a, c, g, or t
  misc_feature (163)..(163): n is a, c, g, or t
  misc_feature (174)..(175): n is a, c, g, or t
  misc_feature (184)..(185): n is a, c, g, or t
  misc_feature (188)..(189): n is a, c, g, or t
  misc_feature (191)..(191): n is a, c, g, or t
  misc_feature (207)..(207): n is a, c, g, or t
  misc_feature (217)..(217): n is a, c, g, or t
  misc_feature (233)..(233): n is a, c, g, or t
  misc_feature (235)..(235): n is a, c, g, or t
  misc_feature (238)..(239): n is a, c, g, or t
  misc_feature (243)..(243): n is a, c, g, or t
  misc_feature (246)..(247): n is a, c, g, or t
  misc_feature (259)..(259): n is a, c, g, or t
  misc_feature (311)..(312): n is a, c, g, or t
  misc_feature (315)..(315): n is a, c, g, or t
  misc_feature (323)..(323): n is a, c, g, or t
  misc_feature (341)..(341): n is a, c, g, or t
  misc_feature (344)..(344): n is a, c, g, or t
  misc_feature (371)..(372): n is a, c, g, or t
  misc_feature (377)..(377): n is a, c, g, or t
  misc_feature (432)..(433): n is a, c, g, or t
  misc_feature (438)..(438): n is a, c, g, or t
  misc_feature (449)..(449): n is a, c, g, or t
  misc_feature (529)..(529): n is a, c, g, or t
ggggttcacattcccttctttccttcccggctataacccccccgggtgggggaaattcccccgagaaaanaggttggttttcccctttttccaaccgggggttttcccttcanncctggggganngggccaagggaaaaccccccggggaaccaatccccttntttcccctttnnccttccttnnccnntnggggggcccggggtgnaaggcccccnctccccttccgggggntnccnntgtnatnnccattcatttcntttcaaagccctttctttttggggggcctcccacccattcccttccagttannggncttcctgnaaggacctttaaactttnccnttcctgggcgggggggaagaaaatganngggtncagtttttccctccccccagattttcgggtttttgaaaaagccatgagggagaannaagcntttcccctttngttcagccaaagctggggttttgtgttcagcccttgggggagctttcccttgtttatccagaaaggggtgggagatgggngcttgggaaatggtcttttcccaggaaagggctgcttctgggaacccaccttgtttaggggctgtctttttgagggtctgctcctcccgcaccccgacttgctgggccccgtctattgggcccctgctcctctgcaccggacttgttagagccgtcttttggagtctgctttctccgcacccgacttgttaggggacgtctttgggggtctgatcctccgcacccgacttgctggagccgtcttttggggtctgtccgtccgcacccgacttattagggacatcttttgtggtctgcgcctccgaacctgacttgctagggctgtctttttgggtctttgcctccgcacccgacctgttggggctgtcttctggggtctgcgcctccgcacccgatttgccagtgctgtcttttggagtctgcagctccggatgcgacttacgtagtgctgtcttttgtggtctgcgcctccgaacccgacttgctagtgctgcctttttgggtctttgcctccgcacccgacttgttggagctgtctttttgggtctttgcctccgcacccgacttgttgggggtgtcttctggggtctgcgcctccgcactcgacttgctagggctgtcttttggagtgtgcggctccggatgcgacttggtagagcctgcaggccgttggctcaagctggggtgggtggagacgctttccgtgcagaaggccgtactgcagcttcttcttgcttgacgctttcggtggccaagagcggcacggctcccgccgctgcgacgcttcaggaggaaccaaggcaaccacgaaccgcatcctgctcggatagcgcttccgcc

SEQ ID NO: 450907 - DNA, 899 bp, Homo Sapiens
  misc_feature (57)..(57): n is a, c, g, or t
  misc_feature (77)..(109): n is a, c, g, or t
tcgagcaaacagcaaacaaagacctgccggccgacgatgatatatggggaactgggntttacgcggggcggcgcatnnnnnnnnnnnnnnnnnnnnnnnnnnnnnnnnnatcaggccaaatcggccgagctcgaattcgtcgagagcggctgtacaaaccctctccagggctcgcagtgtgcggttgagtcgcgagtacggctgagctgcgtaccggcctccctggctctcacactccctctctgctcccgctctcctaatctcctctggcatgcggtcagccccctgcccagggaccacaggagagttcttgtaaggactgttagtccctgcttacctgaaagccaagcgctctagcagagctttaaagttggagccgccaccctccctaccgccccatgccccttcaccccactccgaaattcaccgacctttgcatgcactgccgtaaggatttcagagtgaggcaaagcagtcggcaaatctaccctggcttttcgtatagaaagatcctctcgtctaggtaccctggctcactgaagactctgcagatatagcccttataagagggagggtgggcggaggggcaaagaacgagagcagggaggcaaagactgaccacggcgaggatgccaggaggtccgtgcttctgcccagagtcccaatcagatgcgacggcttcagcctggtcaccgtgaacgaaagttgcttccgccgcctaggacgtgggtttgcctgataagacaaggaggaggggactcggctgcgacgcagctcccctcccctccgggaagaccactgggtccctctttcacccaacttctcctctctactactccacccctccgtttcccatccccactgactcggatgcctgcatgttctgccacggccactga

SEQ ID NO: 450908 - DNA, 1237 bp, Homo Sapiens
aagaagccctgtccatgcccccagcacctttctctttcatcctgcatccagttctgttgtgggattctcttacagtgggtgacttcgaaaagctcaaggcatatcaatatattagtaataaaactagtttaagagcgacttttgaattcctctcagtctacatgagtaggtattcactatcaataaggacagattaagcttatggatttcccaacttaaagagcatgccttcctgtctctttagtgcctttatgcattaaaggaatgcaaagggaaaaaatgttgaatagtcctgagaaaagtgaggactgcctgttatgagcctatctttgttctctctcatacataattttaacctccatgttggcctctacagttttggttaagtcagtggatttgaccagtgtggttattttcattatgaaccaaataaaatctatgtacatttgcatatgaaaaaactcttcattttgtatttgtgtacgtgtgactatccattgtcacttttgttactacctttatttcctttgttcagggtgccatggcagctacatattctgctttgaaccgtaatcagtcaccagttttggaaccagtaggccgctctactcttgctcagcggagaggtattaaaaaaatcacctcaacagccctgtgaagtgacctcagtgagatatttggtaccctggtgtaagctgatagcaccagttctggcgaacaggtagcacgtatctgagagacacctggcaagcacacactgtcccagctggtacccataatgctgctgttcctgctgctgctcctgctttcctctcttctcgctttgaatgattgttagcaagttagattttcctggagcttcggaagaaatgaaaatggaaacatgatgaagatatagtcactgaatcaatgagaaaaataatgaacatatgaataccacctaaaaatacactgaataaagtacaccatatagcattatttttataggaaatatttcatgtcccttaaatattctttgttagttatagggatggacagtttatgttaagcacttagcttaaacaatccgtttatattagcactgtatcccttgtgccatccaacatttgtatgtttttgtaaacagttcatatacagtacatttctgtactgctttctttaatgtatacatgccttgtttaacttggaatctattattattaatcaattgactattaaatctggttaaatagttcaa

SEQ ID NO: 450909 - DNA, 1061 bp, Homo Sapiens
  misc_feature (137)..(137): n is a, c, g, or t
  misc_feature (189)..(189): n is a, c, g, or t
ggaagggtgtcccgattttccattaggttagggcccccagaaacccccagaactttccccgggttttggggttccagccaagggccccagggcccagttggtagggggcatcaaattcccatggtttggaggggttngtcaagaaagaaaggagtgtcccataggcctgggaatcccaccatgagcttntcagctggggccctgtgtcctttccagtagttcatgacataatccacaatgaggtaggcgttgctcccggtgtcagtcggtatttgtagagggggctgttctctccagtgtagccctcccaggagccatggaggtcataggtcatgacatggatgtagtccgggtactgtgacagttgggggatctcatagccagactggatgttggagatgccagcagctactgcagcagtgaccatcagcctgggcttattaatgtgcttggcctcctgctcaaaagcttcacgcatttcctgcaccaggacagtgaagagatgcttgtcctgaggagggctcacacgagagccggggtactcccagtcaaagtccagcccgtcaaactcatactggtgcaggaatttgatgactgagttgatgaaagtctgatggttctcaggagtggaaaccatggcagtgaaaggagcagtgccaaagttccagccaccaatagccaagagagttttcagttgactatttctgcttgttggcctgtttggaatttcagcctgaagtctgctgtggaagatcttgtttaaactgtccttaaaggttaaaagatttgaaactcaggttttccgtcatttacttgtttttcaggccattgaaagcttggtagagagtcatgtcatcccattcgatggtggtgatctcattgttctgcattccagcaaaggcgtagatcaagtgggtacagaggcaggggtcaatgtcatcaggcttgaagcaccccaggcctggctggttctgggcccagttggtgaagtaacatgtcagctggtaggcagagccagtgaggagggtgagcttggccatgatcccgggaattccggaccg

SEQ ID NO: 450910 - DNA, 733 bp, Homo Sapiens
tgagcacaagatacaggccaatctagcaactccagacctgggtcgacagagacaggctgtgcgtcaatagaaaaagtcacttctagacacattatacataagatactggaggaggttctaatgatctgatctgggaagagggatctgacacagcagaaggacacttggtcaaaactctcgttgagagaagtcctgcaaaggcgtcattgatctcacgatagttctctttgtgtgaccagctaggtcgtcgtctaagtaggcgcgatgacacgctggcaggaggagggaggggcaaaggcggcagcatccagtccagtacaatgcgagatgttcagcagacttcacaaagtgcacggaggattcctatggtgtcaagacattctttaccccgtgcaccctattcaggcgcctggtacatactaaacacttcatactatgtcttcattgaaatgaattattcggaaccgcagggggtgcttcttaccaccggaggcatcccaaaaataatactgaggctttctcgagtgagggttctttaaagccttcgtgatcatgcagggtgtcagtggacatggagctggggagacttgggtccagctccaccggctacactgctcatcgttaggaatgtttcctcgttcaaccagcttgggttgaaataggggagcgctggtagcacatagaatcgttggagtggggttaggggagtggggatactcatccaagccccggc

SEQ ID NO: 450911 - DNA, 848 bp, Homo Sapiens
tgataatccatcccatggaccatcagagataaccacggggttccaatgcaaaccaggaaaggattctcttttgaagtattgctcccccagtggattgggtggctccattcactccaatgctgagcacttcccacagagtgggttaaagcggctccgaacacgaaacgtgtagcgttttctgcccatccacactaggcaaggagaacttatgtctataatccactgattgttcagtccagctgtggtcccagtcagtccggtactgcaccaagtgctccaaacagtggttcaagaatctgttgttccagttcagttctagctgggattcactcagtttgtgaagtgttaggttctctggagcccaggggatcaccagattctgcagttttagcatctgtgtggcctgtctcctgggttcccgtgggtcctggagctgaacaacaaatgtttggtagaggtggatctcctttttttgcaactgacagccagaagtgatttcttcagagaatagatagtggctgcacttctggactttatcattatccgagttcttgtaccaataatgcagagtgaggttggtaggctggggctcagagctgctgttccaagtgcaattcatgtactcgacattgaacacaaaacactgaacctctgggaggggcagagtggaaacactgagggagtcagtgggcatagtggtcaggaagaaatcagctgtggtgtcttcattcccattgggcgtcagaattgtcgtgttcagccccactcccagcaggggcagctgcaggaataagagggatgtgaatggtaatgatggcttcaacatggcgcttgctcttcattcctgg

SEQ ID NO: 450912 - DNA, 930 bp, Homo Sapiens
actacccgggagattacgccggcgggttttgccgaactcccaaccccgggaaaagggggtttctcctttgtgaagtatattggtctccccccaggtggaaatggggggggctccccctttccgcttcccaattgggtgggccactttccaccaggagggggagttaaaagcgggactcccggaaccacgggaaacgtttaagggagttttctgaccccattccaccgctaggccaaagggaaaactttatgttcttattaatcccgcctgatttattccagtcccagcctgaggttccccagtccaagtccgggtcctgccacccaagtgctcgccaaaccaggggttgcaagaattctgttgtttcccagttccagttataggcggggattcactcagtttggaaagttttaggttctctggagcccaggggatcaccagattctgcagttttagcatctgtgtggcctgtctcctgggttcccgtgggtcctggagctgaacaacaaatgtttggtagaggtggatctcctttttttgcaactgacagccagaagtgatttcttcagagaatagatagtggctgcacttctggactttatcattatccgagttcttgtaccaataatgcagagtgaggttggtaggctggggctcagagctgctgttccaacgtgcaattcatgtgctcgacattgcacacgaaacactgaacctctgggaggggcagacgctggaaacacctgagggagtcagtgggcatagtggtcaggaagaaatcagctgtggtgtcttcattcccattgggcgtcagaattgtcgtgttcagccccactcccagcaggggcagctgcaggaataagagggatgtgaatggtaatgatggcttcaacatggcgcttgctcttcattccctgggtgtagtctccc

SEQ ID NO: 450913 - DNA, 1058 bp, Homo Sapiens
  misc_feature (163)..(163): n is a, c, g, or t
ggtcccggcaaggggttttttctcccttgtgaatggccaggggctttccggccaccggcgccctgggccctggccgggtgtagtcgggccctcttttggtaccttgaagcttcgatgacgtttcaggggttgcgcctgcttttttccaccaagccccggcttntgcaaagaagagctcgtgtacgtcgcggatgcggctctccaggcgcagcagttcgcgtgggcgggctctcgatctcgttgagggcggccccgcgcgcctttcacgtcggccagcaagttctcggaaaacacgtcccacttaccctgctcgaacatgtcctcgatctggtcgcccgagacttccttgcccatgatctccagctggcgctggatgcggatcttgcagttgtcgcgctgcttcatctcggcctggttgtagtcgtgcatggcgcgctggaaggtgagggtgagcgcgttgtactgcgcccgcgaaatgcgcgccactgccgagtgcgggccgtgctgggcctcagccgcctcgctcagctccttcatggcgcgcagcttgcagtggatgacctcgccccgggccttgatggccttggcgatggagttggtgtcgcgcttgatgctgctgaggcgccgcatggacgtgaggaagcgggcgttctgctttcccagccgcttcacgtcggccaccagcagctggttttcatcctgaatgtcctggatgtctcggtacagggactccaggatgtggtccgtctcgaacacgatgtcctcgtggggcgagtcaaactcatcgtccccgtctgggaactgctggtcatattgcttggacaagtccagaagttctgctagccggtctttcattttgcctggactgggagcgagagtgcgaaccgagaagcccctctcccggcagggcgcgcgtcccctgtgggcgcagcgatggagaaggaaacctgttgcgcgactcccggcggctccgctcccggcgcctcctgcggccgaggctgagttcctgccacggccgcccgagctccgcgccgccgcgatcccgggaattccggacc

SEQ ID NO: 450914 - DNA, 1348 bp, Homo Sapiens
  misc_feature (162)..(163): n is a, c, g, or t
  misc_feature (192)..(192): n is a, c, g, or t
  misc_feature (1156)..(1164): n is a, c, g, or t
gaggtggggttatttagcttgagctggttgccacggtagtcacatgtcactgtatgtatcaaacgatgtttggcgtacggtgatgagtaggatcacttctctgtcaccaggtaggttgtatatgtcgaacaggcggggacgtacgggttgcgtgattgaggnngtacgacaactcccgacatcagctatatnatcacgtgcgcgggccgtcgcgcgcaattctagtggtagtctatgttgtgttagcggtagtcggtcgtcgtggtgccttctttatgttctatttgtcctagcgttcaactagggcgtgtgtattgatagaggcatcgggtagaggacatctgatagtaggggagattcgtatggaagggggtggtttaatgtcctcgtcatttatatcgtccgtcgctggcacagcgtaggctcgctgcgggtttcttatagtgttttgcgactggttggcgaatcataagcgggataagtccggtgggtttacaaaggagttagtttggagagcgttgggagggcgcctagagattggggggcgacccccttgggaaagatgcaagtttttttggatatgtatgggctctctttgtggaaaccccagttttgctttcagaaaaaaagaaggttgatagtgtatagaattcaggcaaaaacaatcaccccgttggttagggggtggttttctttgttttgcaagcaggcagatttcttggtataaaaagaggatcttcgggaaagatcctttgggtcacaaaaaaaagcacgctccttcaagcgggttaaactgccgggtggtgcagccgagtcaataaagcagctcaacccgcatcatcggtggtgcatgcactgaagtccagcagcagcgccagttgggtactcgtggtcactctacaggtgcacctccaccatggccaccatggcgaagcccgagagcaaggcagacgtgcggctggaagctttgagcttggcccggctgaggtagaggcggcgccagctgagcgcccgcagcgagtgctgactggcccccatgaggtccaggtagccgcggtgcacgaactcccggtacgtggccgagcctgcagggctctcgccctcagggttcagcggggcctgctcgcccgcgtccccctcgccgcccttcatcctnnnnnnnnnccggcaccaggcggtcactacggggcggaagcgcctcgggggccccagccgggccggcccaagcccgggggcggccccattcccagacagggcgagcaggatgcaggcggcgggcgcccaggaagaggcacccccagtgagcaagaaaagcagcgtccctcgtgccgaattcgccacccaggcc

SEQ ID NO: 450915 - DNA, 653 bp, Homo Sapiens
  misc_feature (105)..(105): n is a, c, g, or t
  misc_feature (203)..(211): n is a, c, g, or t
  misc_feature (540)..(540): n is a, c, g, or t
  misc_feature (616)..(616): n is a, c, g, or t
  misc_feature (629)..(629): n is a, c, g, or t
ttgtcttgatgtagtgagctcaagtctgcggctgtttctggggacgtggtggaggctgcatgttctgttctctccaggaagagctagtggttttctagcctgtgntgttggtgagcaatgtgcagaggcagagccgctgaagtatggttcctgaggggtggcgaagcaccgccctcactccaggtcacctcatcagccctcgnnnnnnnnngggccccagccttggggctgccaaagctgagaggcatcaaaaccaatgcacagccagccccctgccactagcccctgccggtctgcacatcttctatttatgttccttggagaagaaatggttgttgccatgtttctgttagcagtcatgtaatgccattgcccgctctggtacattcacttggtcaccaatttgcctctgacctttgggagggagcagccagggcccacagggcccactgtgaggatcctgggggaagagtctagcccaccctgcccactgctttcccagatgcaaggggcgagcaagacaggcctgcctagggaatnggggggctctggccttttcaggggctgttgcgatgtcagcattgagcctttcttccttcagcccattggcttgggntccgacgtatttnaggaccaagacaggacaacgagat

SEQ ID NO: 450916 - DNA, 511 bp, Homo Sapiens
ctgataatgggtatcttctccctcgtattagctcataaatattcatgtccataagttcacatattagtgcaagagaaccagattttctgtcaaaaaccacttcatgcaacataagaatgtttgggtgcggattcaggcgcctcagtgcttggatctctcgtaggttgttgacttgctcaatactttcaaagcgctgcttcatttgtttacatgcatagtagtttccatctctcaggctttgcatcttcataacttcagaaaacgttccctctcctattttgccaattgctttatagttcttcatcttggatgcggaagccggtgacaaccccttgccgacactggacggaaaagaaagaagcaggaaggttgtccccctgctttccacttccctgaggcggggtcccgcactaggatctccgtggtggtccctcgaaggagagcgttagagatcccgccgccatgttgtgtacctgtcaccctagcaaccgtcaggcctgaacgccatgag

SEQ ID NO: 450917 - DNA, 738 bp, Homo Sapiens
atacatctgtcagtgagatgtgatggcaggttcgttcttggacagttccagagtgtgactcatctctcctaagagggacgcacggcggggcccaaggatgcgtcgtctttggacgtggccggagcgaggtctaggcagctagtctgcaatgtgtgcatagggggctcttgcttctttccagcactggggccatcccacctgagcttgctgttccttgtcctgggtcttgggcctcaaggtctgtttggagggagtgctgggtgactcgaggggtgtcagcaggcaatctcctccaaggtccccagggtcgtctgcaggggcacgttcacagtgtgactgatggtttcagagtggtttggcattgtgtcacaagtactcacattctcatcgtggctcccttcgtcctcctctttgccaagcaggtctaatagcttctctttgatcagctcataaatataatcaaagagctctagtattgtaaggatactagcaccaatgaacaatcccatctgaccaccaatatcaccaagtaaggcagcaacttcatacgccttcttctgttcaattgtctcataattgagagcttcaaaaaatatatccagaacaaggatgttctctgagatatatttttctgatttgttaaatttcttctcaaggtacttggctgatgtcttgctggggatcttcaccatggagagctctttgttgtagcgggttaggttgcagggtgtcctgcag

SEQ ID NO: 450918 - DNA, 549 bp, Homo Sapiens
  misc_feature (15)..(15): n is a, c, g, or t
  misc_feature (53)..(53): n is a, c, g, or t
  misc_feature (59)..(59): n is a, c, g, or t
  misc_feature (73)..(73): n is a, c, g, or t
  misc_feature (533)..(533): n is a, c, g, or t
aggcaagttcgttcntggaacaatcccaaaatgtgaactcatctctcccaaanaggaancaaggcggggcccnaaagaagcctcgtgttggaaacgtggccggaaaccaaggtcctaggcaacctaatctgcaaatgtgtgccatagggggctcttgccttcctttcccagcactggggccatccccacctgagcttgctgttcccttgtccctgggtcttgggcctcaaggtctgtttggagggagtgctgggtgactcgaggggtgtcagcaggcaatctcctccaaggtccccagggtcgtctgcaggggcacgttcacagtgtgactgatggtttcagagtggtttggcattgtgtcacaagtactcacattctcatcgtggctcccttcgtcctcctctttgccaagcaggtctaatagcttctctttgatcagctcataaatataatcaaagagctctagtattgtaaggatactagcaccaatgaacaatccccatctgaccaccaatatcaccaagtaaggcagnaacttcatacgccttc

SEQ ID NO: 450919 - DNA, 1040 bp, Homo Sapiens
cgggtcgcgggtcgcgggtcgcgagtcgccggtcgccggtcgcggcggagcctgggcgctgagtgaagaaaatgaggcacgaggaattgttaaccaagaccttccaaggcccagctgttgtgtgtgggactccgaccagccacgtatacatgtttaagaatggcagtggggactcgggggactcttctgaagaagagtctcaccgtgtggttttgcggccccggggcaaggagcgccacaagagcggtgtccaccagcctccccaggcgggagcaggtgacgtggtgctgctgcagcgggagctggcccaggaggacagcctcaacaagctggcgctgcagtatggctgcaaagttgcagatatcaagaaagtcaacaacttcatcagagaacaagacttatatgctttgaaatctgttaagattccagtgagaaaccatgggatcctgatggagacccacaaagaactgaaaccccttctgagcccgtcttccgagaccacagtgaccgtggaactgccagaggcagacagagcaggcgcgggcaccggtgcccaggccggccaactgatgggcttctttaaggggattgaccaggatattgagcgtgccagtgcagtcagaaatctttctacatgaaagttactgcatggacacctcccatcagccactgctcccggcacctccgaagacgcctatggcatggtgcagattgtggcattcagtggtggaatgctgtgtttcatcatgctgctgattggaaagatctaggagagagggagaaattgatgctgccagaacagaggggacagttacagaagcgaagaccttgagaaggagatgatgagacccaggatgcaacacagaaggcttggacttagataagggcatcaaggtccctcgacagttgcctggagggaagattcctggatatcacgtgagaagctgcgtaggctttggttagctagaaagcaggcccatcatgcatctgtaagacagtgactggagtgtaggccctggcgtctaagccgagtacgactc

SEQ ID NO: 450920 - DNA, 732 bp, Homo Sapiens
gtccccggctgagcgctggcggtcggtgcggcgtcaggtgcgcccgccaggtgagcgcgctccctggcaccgttggcccccggagggtcgggcccagttgcggcgagcggattggtttatcttggaagctaaagggcattgctcatcctgaagatcagctgaccattgacaatcagccatgtcatccaggcctcttgaaagtccacctccttacaggcctgatgaattcaaaccgaatcattatgcaccaagcaatgacatatatggtggagagatgcatgttcgaccaatgctctctcagccagcctactctttttacccagaagatgaaattcttcacttctacaaatggacctctcctccaggagtgattcggatcctgtctatgctcattattgtgatgtgcattgccatctttgcctgtgtggcctccacgcttgcctgggacagaggctatggaacttcccttttaggaggtagtgtaggctacccttatggaggaagtggctttggtagctacggaagtggctatggctatggctatggttatggctatggctacggaggctatacagacccaagagcagcaaagggcttcatgttggccatggctgccttttgtttcatttgccgcgtaggtgatctttgttaccagtgttataagatctgaaatgtccagaacaagaagatactacttaagtgtgataatagtgagtgctatcctgggcatca

SEQ ID NO: 450921 - DNA, 912 bp, Homo Sapiens
  misc_feature (31)..(31): n is a, c, g, or t
  misc_feature (899)..(899): n is a, c, g, or t
gtccttcaaaatgttcccagcccagagaggncgaagtagtagagttttgcaagacccattgaatattaccagccaaatttggagttcctccaaagttcaaacttttggaagaccgttgaatcaaaagcccccaagctcaatacctttaacattattgccattgaagttcaggcttaggttgatggcctgctccagagacctcatgtcttctctagagatgtagtgtatagcattattctgaaaatccagtactttcagattccgtgctgggaagtctttggggaacttaatggaggaaatatggttgcttccaagatacaagctttccaagttttccagattgtgcactggaataaactcgagattggatattcccgtttggattaagaaaagatgcttcagtgacttgggcccattaagcgatgtttctgccatgaatatcaggggatttccagttaacacaagtgtgcttaattgatgatggctttgaaaagtgtcttcatgtatccagttaatctggcacctagttaaatccaaaaaggtaagattcatgagtctgctgaaggttctattgtgaattgtaggcaaaaaattaaagctgaattcccaaaattctgttgtgtttggtagagtgtcagggatttcactgagacctaaattttcacagttatatgttttgttggcttctttctcaatgcacatctgatcccaggaggtgatgactttacagccggcagaaaacagcaccaccccaaagaagcagctgacgtcaaacgccatcacaggctaggattgcttggtgggtttacctaatgcttggagctgagaaatggaatcaaactgtgaaggcctggcaatttggcagccagagaggtactcagaaggggtgatcatcccgnggaattccggacc

SEQ ID NO: 450922 - DNA, 1018 bp, Homo Sapiens
ggtgactgggaggccaaagatttaaagaagcggaagattcttctcttaagacatgaggagtaagttgtgtgataatggtatgtgttttgtgtgcatgaatggacattgtaaatgttgaattctaggctccgacaatcattgtcaacagaagatcaagctgcaaatatttatgttttaaaacttaaattataaagctagttaagtctttctaatgactagttttaatgttcatgggtacattttacctaagttaccgtttacattgtatagaaaaagatacatcttaagcacagattggttattaggaattagtttggggaagaggtttttttgtggattctttcatactgcaaagaaaaaccatttgccttttggggaattgagctaacttctaatctagtcttaagactagaatgctaaaaacaaaaacatgaaggaaattaaaaccccttattattaaattgatttgtaaaaacattgttactggaaatttattggacttgaggccttcctccagaaaataaggacttgattgtcaggcctatattaggttctgaaccttaatgccatgtatttgtacttactaaaaattgtttcaatgaaaagtacattagcagtatgaacttctggtccagttggaagtttttccatttgaaaaatgtgatgtttgcatggaactgtttgaaacttttttattttctagtccccctcccccacactggatagaatttagcctagaattttccctttggataaaagaacaaaaattgaacatgttatttgtaaattgatgtttagtaattagtgataaacttgaaatactagcatatattataagccttaatcttaggtagtcttatgaaaatgaatctcttaactatcttttgaacctgtattcacattggtttccaagatattttaagttatattttttcctcttttcagagctgcttcttattctggggctacttttttttagttgtgtaattcacaaagggctgccatttttttaaagttt

SEQ ID NO: 450923 - DNA, 433 bp, Homo Sapiens
ggagcttggtaatgagcatttttattaaattccccaagtacaagccccggtgtacacaataagcaatttcagttttgagtaactgccagggaaggaatgtccccctttctgtttgttgactgccttctgatttgtttgaaagcttttttcttcttgcattatcttgaccattcctggtatgaaggatgttgtcttgtttctcctcagtttcatcttctgcagaagaagaaaccatgccaggcggcagtctcttactgttcatggcttccatggctttactctgttccctttttctctcacaagtcatcagctcagatctaaaaatactctaagggtaaatccactggtgaataaaatggttccatgtgccatattcctttctttagaaagcagaattacctccatatatgaattaaagatcaattgtatctat

SEQ ID NO: 450924 - DNA, 752 bp, Homo Sapiens
tagggccctgacaaaagtgacccctggataaatgtcatctccagccatctgttttctttagttctcattacatctgtccaggctcttctatcagcatcaatcctttcctgcagggacggaagagttttcaaatccttgctgaaagcattttgttctcctctgtaacagcacagggcatgaaattgtttggagtctttgtaaccagtctgttcagtcctggtccctttccagtcccggtccctttccagcctctggagtcctgacagaagagaagcttgtaaggtagcagcaaaatgctgcatctgttagaatctcacaaactcacttggtctttgaatgtccattcttggataacgtccttatccatcctcttctcttcagtgaactttgatggaatatttccgcagtttcagaaactggaaaagcttgtcttttgtcctcttcttcaaggccatcagggcacgcgttttctcctccacatcttgatctatggcaaaaatgatcttggctctctcctctgctttcttgtctccagagtttctgaagagcctttctagtgattcttggtctgtgttttcaaagatgttgcccacggctttcttacgagaggctgtgtcgaagtggtagccatggatggatgggctgactcgtagcgacgtggacatgatgatggcttggtggcttcgctttgctttcatcgatgtggggatcttccggaattcagctcccaggctttccagagagtctgtccc

SEQ ID NO: 450925 - DNA, 923 bp, Homo Sapiens
tgtgggcgcacctacagcacaggataaagggacagtcactggtggagaggatcatctggttaagccaccggtcccgtgacccaagtatcctgtcaaagccacccagcaggttccaactgcacaaagggaatgcaaatggacagacgccaatggtccggagacgtcaatggccaatgaagtccatcacatagacaaaccccaccacaagatagccacttgcaaccatggcaagaaaaaagcgagcagccatgaaggtgctaataatcggctgcaaacgccgctgctattccgacaccgaaacatgcgtaacttgcttgtggcccacaacgaccagcccggcgtcctagcctgtcagaaaagtagccataagtcaccgatcccagtaggactccacaacataaataggggctggactcagcattgcaagccatttctcggtcacagaccaggttccatctgggtcaccgcagtgcttttccatgtgcttctggtcatatatgtagccatccacacaaggaaactctttcttactgccagtgtattcatagcgccaaactcgatgtgcttctgccctctctgttcctgcgtacaccttgagagctgcccagatctcaccattctgcgactgcagcccgtaacataatcttgtctggcactgaagacgacatgggccccggtcgtcctccaaactccgattagacgtgattatggaagacatcctgactcacattagcctgcgggtgcctgcagacatgacgaggggtgactcaccatgcacccagtagccaagtagtgaataccacaagagatgttctggaaggcacatatgaaatagaggactctcatggaatctgccgtaatgtgccccaccgtggtcataaatcccctcgaagtgcgcgggaccccatggttcgtccgtgcac

SEQ ID NO: 450926 - DNA, 1137 bp, Homo Sapiens
cctttacactccatcaaggctgggtggaattctctcccaaccagggcagttggtgtacttttaatcaaatgtaaagtttgtaaggttttcagtccacgttccccaggatggtcaatcccagtttctaaaaaggaaaaaagtgtgggaggacgaaccttgtttaagggtccctaaggtagatgagggattgtagtcccaatcatatgcttgtatccagaattgcccaacaccgactgaagctgctctccaatggaaatacaattccgctgctgacacctaaccatatccatcaactgctgagctccaggagataactttgaccccatggactccattatggtttggaccttgtcaaggtctatccttgatcctagagcaggagagctttgttgaagaatttgcaaaaactgatctcatgtgtaccacaactttactgatgaacacacactgcctttcgccaaaggagagcaactttattttacaagcatgtgtggaggactccaattttagattttttttatacaaaatgatcttttcatgttcactgtcatccaggacagtacaaacattcttgcccctactggttccacagtactcctctcctaagtacacttccatatttcttgctgaacttaaaatgccaatagaagcgatttcttcacctccatcagggccacacctcaggtaaaggaagcaggggttttcatctttgttgttgtggtttctcttcaaaatcaccagatcctgacctggagcaggcggtgccagcagctcctcccagtcgaagtcaccggggccgagaccggcccgggtgaggaggaggctgtgggtcagggccccgcctgcaacatcccaagaagaggccagcgtggggcggcgggtgaggcccccgtcctcggtccgcgtctccattccgccgccttcagtcaggccagcccagccccggaacctctcttccagtgcttgaatttccgccggtacagcgtggaaatgggcaggcaaagcgacttccggctcactccgcttcaagtacccgccgcttcttgctttggtggggagagcaggcaccagagacacgcatgcgcatgtgccagctggcctcaggcgcggcgttcaaagtgtgcggggaggaggtcg

SEQ ID NO: 450927 - DNA, 826 bp, Homo Sapiens
gacgtgctgcgcttggctggctgtggagtcggccgaagctttcggcggcggctgagccagctgaggggaaaaatggctcggactgtggcggcttcggcggctcaggttgtggtagaggcggaggctcaggcagcttgaggccttgctattttggaagctacaagaaaaaaatagaggaaggaaggtttggtctttttagtggacatggctcagatatctagcaacagcggatttaaagaatgtccatcttcacatccggaaccaacaagagcaaaagatgtggacaaagaagaagcattacagatggaagcagaggctttagcaaaactgcaaaaggatagacaagtgactgacaatcagagaggctttgagttgtcaagcagcaccagaaaaaaagcacaggtttataacaagcaggattatgatctcatggtgtttcctgaatcagattcccaaaaaagagcattagatattgatgtagaaaagctcacccaagctgaacttgagaaactattgctggatgacagtttcgagactaaaaaaacacctgtattaccagttactcctattctgagcccttccttttcagcacagctctattttagacctactattcagagaggacagtggccacctggattacctgggccttccacttatgctttaccttctatttatccttctacttacagtaaacaggctgcattccaaaatggcttcaatccaagaatgcccacttttccatctacagaacctatatatttaagtcttccgggacaatctccatatttctcatatctttgacaccttgcacaccctttcatca

SEQ ID NO: 450928 - DNA, 1037 bp, Homo Sapiens
  misc_feature (87)..(87): n is a, c, g, or t
  misc_feature (312)..(312): n is a, c, g, or t
ccctcaaaaactcaaaatttttgggggggaaaaggattggttttgtaacaagggtgttgctttttattacccttttaatctttgctnccgggggagtaataattttccggtagctctccgttttcattttccctggccctgtccttttgcgttcgggatccttcggaggtcctccctctgtcttcttcagctttcccctcaggagaatctgctttcttcgggattccctcctctaagctctcccctgcagcttctagtcttcggatctgcacccactccgtcctgtcaaagtttgccacggccttctccgcntgcgtggcagcaagaacagttccaaaccacagaaaagttgcccttgttccgtcacaccatagttctctagatgaaaactctctcggctcagggggctttgggtagacatgtatggtccccatcagtgccagcctcacctgtactgcacgacttcctgtggaccatgggtttcaatgggaacgcccggtccactccaactcgtttctttgtaaaggggataaagtcctggttattggctttgggataccaggattgagggcctgacgagtaaaacaaaccatttccttggccctgggaatcactttctggatcttgctggctgattccagtacagtggggataggagtagctccgggcttttgtttgggtgttccatttggggtgagtatagactttatccagaatcaactctttgttgctcaaaagctgcttctggaaattgttcctcaggtgccccttcaaggactgctgggaagagtcaccttgttcgtaagagtcttgcttggctgagtggggccctggagcttccgttgtattatgtgggagcataacgcccacaggcagatgtgacgccaaccgctggagaccagccattcagggcctggactgacgcctgaggccctcgggcaccgctcctgctcagggaaaaccccagggcctagtttcccagacctgacctccccatcaaccgacagccgcgcaggcgctctcatcccgggaattcc

SEQ ID NO: 450929 - DNA, 288 bp, Homo Sapiens
gactttggacaagtttattgacttctttggaacctcagttttctcatttgacaaaactagatggtcaagaagcatctaggattattgggacacgtaaattacataattctgacacagcccccccaactctgggttcctggtatggggtaagtttttagtaaatgtgagatgctgtgattagtactgtgaatatgatggctatttcaacagaagaattataaagaaagggcttcaggaagggattgggagtgaatatttagctctttatgccagcagctgcacttgtga

SEQ ID NO: 450930 - DNA, 738 bp, Homo Sapiens
  misc_feature (126)..(139): n is a, c, g, or t
  misc_feature (651)..(651): n is a, c, g, or t
tttatttttggctttgaggagcccccaatttaatgagaagttggagcagtaaagaaatgttacagtccatgtaggaagtgctatggtagaggcagctggagcaccttaccgagctcaggagaccannnnnnnnnnnnnncttgcagagggcacagcattgcaagcagggcaatgacccagttctaagacagactcgtcacatggcaagcagagtcggtcagactttggacaagtttattgacttctttggaacctcagttttctcatttgacaaaactagatggtcaagaagcatctaggattattgggacacgtaaattacataattctgacacagcccccccaactctgggttcctggtatggggtaagtttttagtaaatgtgagatgctgtgattagtactgtgaatatgatggctatttcaacagaagaattataaagaaagggcttcaggaagggattgggagtgactcaagcaggcaaccatcaaagcactttgtgcaaagatcaggtccttttctgagcactgaaaatttgcctatttagagatgcggcaagctgaagtgacatttactccccgcggaaggacacaggaggcagacaagtggtgaagctcattatctggtgatgcagccgcagacgtaatggntcaaagaacaagacttccaggggctgccccaagttcgccacacacgcctcttgattagaaagaatagtccatgcaaaggtagggcat

SEQ ID NO: 450931 - DNA, 1237 bp, Homo Sapiens
  misc_feature (16)..(16): n is a, c, g, or t
  misc_feature (383)..(392): n is a, c, g, or t
  misc_feature (651)..(659): n is a, c, g, or t
gtgtatttagatccanccaaataaatttttcattgttctaagccatgatctttgtttaaaagctgtcccgttatatttttatagttggatggtgtggtcagtaaaagattcatacaccagcatactagtttatttgagcccatgtaagaaaatagggtcaatcacctaagggcaatgaatggcatgttatcaagaatctggcgagatgaattccctgaaattcataactgatgtgttaacggaaatcagtgttgctgaacagtgatttactcatttcctttcctcaattacctctctcaattcattaacaacattaaccaatgagaggaaattagttggaaaattcactaacagcattagccactaagaggaaatcggctggnnnnnnnnnnctaatctgaacaaaggtacacagatgcaaatcttaagcagattaagtaagaccaactaaatggcataggtaagcatggctgtggccacccatacacatacacaccacctcatatttagagtgtgaatatctatcattgcatagattccaccacgtggaagagctctatgcctgtgggtgtatataccctagagatcagaatggatggtcttacttaatctgcttaagatttgcatctgtgtacctttgttcagattagnnnnnnnnnctccagccgatttcctcttagtggctaatgctgtatagtgaattttccaatctaatttcctctcattggttaatgttgttaatgatatcgagagaggtaattgagcgaaaggacaatgagtaaatcactgtcagcaacacgtgatttccgttaacacactcagttatgaatttcaggcaattcatctcgccagattcttgataacatgccatgcattgcccttaggtgattgaccctattttctaacatggctcaaataaaagctagtatgctgtggtatgaatcttgtaactgaccatagcatccaatctataaaaatataacgggacagcttaaagaccgagagcatcatgtttagaacaatgaccaaatcattggtcgttatctaatacagcggctgttatggtcgaaaagcttcatatttagcctgatgtgataaattttgaacttccaggtaaaataatctgtgaaatggccaaagatgccaaggatttggagatagtgtctgagcctcatgctggggaacacttgcatgtggatgacctagtgatactaagaaaaaagcttcaaactcccga

SEQ ID NO: 450932 - DNA, 733 bp, Homo Sapiens; identical to SEQ ID NO: 151780
  misc_feature (204)..(349): n is a, c, g, or t

SEQ ID NO: 450933 - DNA, 935 bp, Homo Sapiens
  misc_feature (415)..(466): n is a, c, g, or t
atcaggccaaatcggacgagctcgaattcgtcgagagcggggagtaggagacagcgcctggaggtggagggcgcccagggccgagctgccagggccggacacctaggctgagccctcagccggccaactcgcctggcacaggggcagctctagacgggatggagaggatgcatcttcagtgtccacacgtggtcaacagataaaagccatggccagaacgttctaagtggctacatgtgcatctgcctgttcacggattccttcgacaaatatttgagcatcccctcctgcgactgtggacagcagaggagcacgcaggccacgtgcagcccacagctctggggcgaggcaggccctcaaccgaacacgtatagagacagggtttcaccgtgttagccaggatggtctcaatctnnnnnnnnnnnnnnnnnnnnnnnnnnnnnnnnnnnnnnnnnnnnnnnnnnnntgcgtgagccactgcgccccgccagacgtctgcatctttaaggggcaacaccagcaggtgacatgtgaatggatctgggctgggacagatcccgtgggcctcgtgcggagcacctccagcgtccgggtgcgggagctgagctggcaaggcctgcacaagccctgcccacagagcaagggccctggcagtcagagggacagacttggagagcagctggtggaagagtacctgtcccctgcccggctgcatgccctggcccgggtggatgaccttcggctggtgaggacgctggagatgtgtgtggacactcgtgagggcagcctggggaactttgggggttgcacttgcccaactggacccaattgaagctgaacggcaggcaccttggctccctgaggggccttgggcacagtcatctgggaccactggcaggtgctgtggctggctccgtgttgccttgctgaacttg

SEQ ID NO: 450934 - DNA, 1169 bp, Homo Sapiens
  misc_feature (203)..(203): n is a, c, g, or t
agatagaggctggagttcgatctcccacagataccagccgagttagaggtgggtccgcttcgcagaggacggtttagtgatgttgttagtgccccgtgggggggtgtgggaggatagttttcattcgcagtgaaaaagcggtgacagttggctatttgcgcgggttgggggtaatatcccggggtgttaataacagtgttagnggcggcaatgtctcccgctctcgtggacaaaagaaggggccgctgtaggtgtgccgctacgtaaaactttagcctggttggagccatcgaaaatggaggggggcgggagacgcctgtatagggttgaggagagccacggggtcgttatggcgcccccacccaaacaggccctcgtcatttggcatataagtggtgtgagggagcgcctttcttcattttcgcggaattggccccggtgttgggttacacaaggccttgcccgttgccttaaactgggcaggcgcacccaattcaagtttgacttgggtgtctccaattaacagaagggtgacattttttgctgttcgaaatagggaagagtgtccgccccatgggttaatcctttaatgcttcggttgggagagagatcaccctccgaagggggtgacccgggagaaacaaaaggtggctgggctcattcagtgctcggggaagaggatgtgtctgcagaattcactcacccagaagaagaagttgaaggcaaagagtaaatgcttcaagtagatgatcagccagtcgtcctgctcagtcttatagtgggccatggcttctgggccctgccaggggctccggaagcggcgaagggagctgcgcctagagagactgagagcggcggctcccggggccgcccagccgcccaccgcccgcagccagcgctcctccctcccagcccagggaaggtcagcgtgtgggcagcccaggcccgcgcccctgcgcccacggaggcttcctgccggccctctagtccccgcctgcccagcgctcggccgcgacgccccggcgccaggctctcccagcccagccggcaggacgcagcccgggagccccgcacgcgagctgccggctctttgtttgggggtttgcctctctgcgattcagagcacgcggagggaattaagtcagagtccgaggcagctgtgcggttgc

SEQ ID NO: 450935 - DNA, 1014 bp, Homo Sapiens
cttttaaaataagatgaattattttatttctgaattctgaaggtctgctgggcttggccaggtgattctcattcttgtggtctcttatgaggtcagtggtggctagggctgaaaccatctcaaagccttcctcactcacatctcatgggtgattccagctgttgctggaaccctcattctgggactatccggccaaaacactcagaacttctccatgtgttttgggcttcctagaaagacactgttattggtttttaaagtagattcatagccaaagctagagtagcaccctggacaagtcacatccacatttatggtatctccttctttgatttgataacttggtgatttatgttttctccctatgcattcctgtttgaaagcgcctatgtcctccaaccatgtactgatagagctgctcaggcacattgagatcagacatacctatcaaattgctgccgtgccccaagcagaccatgcccagggccaagccagcagctaaggagtatgactttctgtcagtgcagtattccatttcaggaccaggaggccgtcctatctcagccaacaggacttctgcagtatgtctgtgagctgtcccttgatatacaaggccaatgccaaccactgcagccacttggacattgtgaggaacatccagctctgtggacgttgggggtaagagagcaggaatgcgaatgctaagaagccgagtaatagacatatccatggtgcctagttttgcagcagaaacaccaagtagcagtccaatgcttgtcatttcatggcccttggtcaagtagtcatggatattgagagtcgccagcttggtaaggtgcccattcaaacccagagccatgagaaagccagcatactcattggccaactcagcatgcttgggcttattgtaaacaatccaagctgagtcgatctgggaggcaggagctatcttcaggccagcagccacaccattatgaaagctggcccagcttgtcatgttgggaggcacatcga

SEQ ID NO: 450936 - DNA, 897 bp, Homo Sapiens
  misc_feature (718)..(772): n is a, c, g, or t
ggcacggcagcaatttgataggtatgtctgatctcaatgtgcctgagcagctctatcagtacatggttggaggacataggcgctttcaaacaggaatgcatagggagaaacataaatcaccaagttatcaaatcaaagaaggagataccataaatgtggatgtgacttgtccaggtgctactctagctttggctatgatctacttaaaaaccaatttcgggctacagagtgcggtggcgccagcacagaactctgctcagtgtccctctgtgctttcacgatgctgatggattatgaaggtcaaggagagcctctggatgactatgtaaatgcccagggggcttcactgttcagtgtcactaagaagcagctgggggcaggaagcagagaagaatgtgcagcaaaatgtgaggaggacaaagaattcacctgcagggcattccaatatcacagtaaagagcaacaatgtgtgataatggctgaaaacaagaagtcctccataatcattaggatgagagatgtagttttatttgaaaagtaaatgtatctttcagagtgcaagactgggaatggaaagaactacagagggacgatgtccaaaacaaaaaatggcatcacctgtcaaaaatggagttccacttctccccgcagacctagattctcacctgctacacacccctcagagggactggaggaatccagacaacgatgcgcaggnnnnnnnnnnnnnnnnnnnnnnnnnnnnnnnnnnnnnnnnnnnnnnnnnnnnnnnttatgtaaaatggtgcagtatttgcatataacctacataccttctcttgtgcaatccctaatataatgtaaatgctatgtaatcgttgttatgctgtattgtttttatttgtattatgttttatt

SEQ ID NO: 450937 - DNA, 1062 bp, Homo Sapiens
  misc_feature (947)..(983): n is a, c, g, or t
  misc_feature (1027)..(1027): n is a, c, g, or t
tgtactatatctcaatgctgaaactgtttctgcagtgaaggaactcctgatacactgacaagctttggagattgcgtcctgggcctcggctatcattcttgtcaaaacttgaagattcagagttgttgttcaaaatggggacatatgtactctaggttcatgtcccaaagcttcttgcctcatattactataataatcttgttcagaggattcagatgctttatttttaggttcagccaagattgctctaaaacttcgatcacagttttctattgcttgggcagcttgtgatggttttaagtatcgtacgtagcccaaacctttactttctccagtcactttattcttaataatgctgcaatactcgatatctccatacaccttaaatttttcccgcagatcttcttctgtgtaggactttggtatcataacaaagattcttgtaagttcttcatcttcaacatctcggtgacttccagatgatcgggactgagcaatgaaaaccttgatgggcttggtgtcgttggggccgaggcactggccatgcatctcctccatggccctgcaggcctgtgagctgcgggcgaacttgacgaaagcaatgcccttggactccttggtgtgcttgtcccgcaccacccagatgtcctggatgtcgccaaaaggcgagaagcgctccctcagcaccgactcaggtgtgtacttgctgatcacaaggaagatgcggctgttgggcggttcgtccaggctgtccacgcccgggcggaagcccccgccgctcgcagagctgccagcttcgtccatggtgctccacccgaatgcaggagcctcactgctctttgcttctgcggtgtctgccaccgctgctgtctcacacccaagcctttgccggctcggtgctccgcttcgctctcgacgaattcgagctcggccgatttggcctgatnnnnnnnnnnnnnnnnnnnnnnnnnnnnnnnnnnnnncgcccggctcaccacagccagaaaaaaaacggcgcggggtggcncgctcttatttattgagttgctaggtaacaattcc

SEQ ID NO: 450938 - DNA, 1098 bp, Homo Sapiens; identical to SEQ ID NO: 151785
  misc_feature (83)..(83): n is a, c, g, or t
  misc_feature (97)..(97): n is a, c, g, or t
  misc_feature (162)..(162): n is a, c, g, or t
  misc_feature (180)..(180): n is a, c, g, or t

SEQ ID NO: 450939 - DNA, 577 bp, Homo Sapiens
  misc_feature (263)..(340): n is a, c, g, or t
gtggtcccgtcccgccgaggtcgccgcataggtggtcctcgctgggctgtggccggagcttgccggccggggcggggcgcacgtggctggggcccgcgcgcggctgggcaaggcctggggggagacgtccggaggggccggtggctgcgtcctgtccaggccggggccgcgccgggccggcggcctcttgagcgtggcggagggccaggagctggagaggagcccctcgggccgctgtgggggcctcttcttctgtcccccgnnnnnnnnnnnnnnnnnnnnnnnnnnnnnnnnnnnnnnnnnnnnnnnnnnnnnnnnnnnnnnnnnnnnnnnnnnnnnnatagtgcagccgagccgccggatcctcagcccctgcgtccagccgcggcctctccggcttcctcacatcccagcgaccaaacccggggactcaaagagaggcgctcccaccctcccctcctcctgggggtgctcccgggactggaccctgcaggaaccgcctcccgccgtccgactgtgggcgagtcgcggcgcccccgggtccccacagctgagacgcgggccgggccggcccgct

SEQ ID NO: 450940 - DNA, 653 bp, Homo Sapiens
tccttctcctccaggtagaagcggatccagttatggaagccagtaaccttgcctttttttacctcacctgagaagacatgttcaaagccactcgagtccccctcttcattgcctcttgaatagagcccaaaccacatgttcttcaagtcatcgacaactcttgctctgagccatagcgattctggtgatggaggaagctgtagagctccttcatgactgctgtcttcatgatctctctgaggaaggcgtcctgctcggccagctcctgggcactgaagtgctccccatggcctgttgcccgctggtagttgttgaggaggttgatgaaggctgcataggtgggcttggagaacagcttctcattgacataagtgaagagtggctttgggcagcgatccacttggtttctggtctctgacggggagatgcagttttggctattgagaacgatgtcttccttctgggctttgttggtgtctgccctgtagatcttctcagagatgctctgaatctcctcttttgttatggcatcactgctgtgggagacctcgtggtcactacacaggctctcaaaatccttgcagcagttcccaactcttggcagcgggcattgcagtgacattggtggtgcttgtcaaaggcttcgtagcagc

SEQ ID NO: 450941 - DNA, 1099 bp, Homo Sapiens
  misc_feature (165)..(165): n is a, c, g, or t
tttcaaggagtttgcttttcggacacttttccctttcctgctctttccggggcaggggtccccaaacatgcttgataagttgccctccccacaaggggagacatggatccgctgctggtgttactgatgttccggttcctttcttgaagatgacttcctcagaanaatcatccccctcccttggggaataaggcactcatcatctgtactcgtctgccgactgaaggcacccctgctggagtcctcagacacacacgtctggtagccatcttcactgtccatcgtcatggagctcagccagctcttacagctgctctcactggataatcgattccggtccacaagggctgggcctggcccaggcaggggtccaaacaaagacaattcatccaagtccatgttttccaaactggggcaattagctgcatcaccatgaagcagacgatgttcctgtaactgcagagatctgtactccacccatttttgtttcaaagtttgctttaaaacctgcagctttgcttcaagctccgttcttttcagaatcattgttccattaagagtctctatcgttagcaggtttccggacgatctgatcaggtcaacgacttgtttgtaggtaaaaccttctgtgctcacaccattgatatttgcaaggacatcaccagcttgcaggccagcacagtgagctgggctgtcctcctgtattttgcatatcaaagtgaacatttccgaggagcaggcattctgattctggggcctgtaagactgaatttcaaatccaaatgtttcattatcctgcttctccacagtaacaagctttctttgagaccaggaaaagtcacttaaagaacttgatctggtcaaagcaagctgctttcgtccccgaggcagagtagccaccgtgtctgctagcatttgaatccttctattatcgtccatcgtaaggctgccggtgagtgtggagtaagagctatacgctggcccagcgcagaagtccgccaaattgccattgctgctgtgttgcaggagcctttgtaaagacattgtgaataaagatcactccagctagcacatggttgagtggccttgcaggagggga

SEQ ID NO: 450942 - DNA, 784 bp, Homo Sapiens; identical to SEQ ID NO: 151787

SEQ ID NO: 450943 - DNA, 1084 bp, Homo Sapiens
  misc_feature (55)..(66): n is a, c, g, or t
  misc_feature (331)..(534): n is a, c, g, or t
atatttttttaaaaaatggaaccaagggaaatatatttttggccaaaccaagggnnnnnnnnnnnnttggaggtttttccaaaaaaaccaacccaaacattgagcccccattttatggggaatacggtttattctccccggaggtggttaataccaaaatttaccataatttggaaacaaatttcctgtggaaggaattatgaaaaagaaaattttacattggcgatggttagtagtatggggtggttattcctatttctttcctcccatttttataaacatcttcttacattgttatagtattttaattcacttgaaatactctatgtannnnnnnnnnnnnnnnnnnnnnnnnnnnnnnnnnnnnnnnnnnnnnnnnnnnnnnnnnnnnnnnnnnnnnnnnnnnnnnnnnnnnnnnnnnnnnnnnnnnnnnnnnnnnnnnnnnnnnnnnnnnnnnnnnnnnnnnnnnnnnnnnnnnnnnnnnnnnnnnnnnnnnnnnnnnnnnnnnnnnnnnnnnnnnnnnnnnnnnnnnnnacacagctgtattaccagctactcaggaggctgaagtgggagaaacacttgaaccccaggaaatttggaggctgtagtgaggtatgattgtgccatgtcacggcagcctgtttgacagagtgagaacatgtctctaaaaataataatacttttttaacatgaggacaacttaataaaatggggaaaaattcaccaactgtatatctaaggaaacacagtttagatgtaggagttcagggatctttggcttatgataaaatggtgttcctccttttatcataaaatgatttcttatagcagtggtgatttagaaaccaggcatgtactctgtgccacttccttatttctcaccttgactttcctgtcatctgcagtgacttcgtcaaattcctggcccagtatgaaggaaatctcagtatttttaaaggtactttcagatttaatggtgatcacatccccattcacactgatgatcatgttaggtttggccatgccagccactttcctggtggcaaagcccactcctacagttaggaaaagaaaagatgcc

SEQ ID NO: 450944 - DNA, 874 bp, Homo Sapiens
gaaaagaaagggattttaattattcaggtaaatggtaacatactgtgttatccttctacctaggggaaatccattagatatcccctttttccttggaatttattatgaaatatgttattatttcatttcggaaccaaagaaataatggcaaatttccccatttccttcacttcagttatgactaagaaatacatcataagcacaatgaatacatcattacatcaccttctaaatctaaaaaaagtttatttaaccaacgtaaccatattgaataaaatcagcttgggagaaaattagttgcttgctaaatcatggaaaacaacaatatctttttgaacaatatatcccacagaatgttgtagagttcaatgcgaacttcagtccaggtcaacgtcccttggcttatgctctctcataaactctcgtggaagtgacgcctttcatgacgcattccaccaccagtttatcatcctctcgttttctctttatggtggttgattttccatcccatttctgcacatgtaccaggacacccccatctaaggttatggtgctcttgactttcctgtcatctgcagtgacttcgtcaaattcctggcccagtatgaaggaaatctcagtatttttaaaggtactttcagatttaatggtgatcacatccccattcacactgatgatcatgttaggtttggccatgccagccactttcctggtggcaaagcccactcctacttctttcatataatcatcaaagttttcactggagacaagtttccaggtacctacaaaagcatcacacattttgtgagttttctaggattattcttcaaggtgagaaggaagctgcagttttcaggagggtgctgtgaccccc

SEQ ID NO: 450945 - DNA, 793 bp, Homo Sapiens
tttccatttccggaaccaaggaaataatggcaaatttcccccatttcctttcactccagtatggactaaggaattccttcataaggcacaatggaatacatcattaccatccacctttttaaatctaaaaaaaagtttatttaacccaacgtaaccatattgaataaaatcagcttgggagaaaattagttgcttgctaaatcatggaaaacaacaatatctttttgaacaatatatcccacagaatgttgtagagttcaatgcgaacttcagtccaggtcaacgtcccttggcttatgctctctcataaactctcgtggaagtgacgcctttcatgacgcattccaccaccagtttatcatcctctcgttttctctttatggtggttgattttccatcccatttctgcacatgtaccaggacacccccatctaaggttatggtgctcttgactttcctgtcatctgcagtgacttcgtcaaattcctggcccagtatgaaggaaatctcagtatttttaaaggtactttcagatttaatggtgatcacatccccattcacactgatgatcatgttaggtttggccatgccagccactttcctggtggcaaagcccactcctacttctttcatataatcatcaaagttttcactggagacaagtttccaggtacctacaaaagcatcacacattttgtgagttttctaggattattcttcaaggtgagaaggaagctgcagttttcaggagggtgctgtgaccctcttgagtccagataacttcctttttccc

SEQ ID NO: 450946 - DNA, 641 bp, Homo Sapiens
aacccaacggctaacccattaccgaataaaaatccagccttgggaggaaaatctagttgctcgctaacatccatggaaaacacacaattatcttttttgaaccaatatatcccaacagaaatgttgtagagtccaatgcgaacttcagtccagttaaacgtcccttggcttatgccctctcataaactctcgtggaagtgacgccttttcatgacgcaattccaccacccagtttatcatcctctcgttttctctttaggggtggttgattttccatcccatttctgcacatgtaccaggacacccccatctaaggttatggtgctcttgactttcctgtcatctgcagtgacttcgtcaaattcctggcccagtatgaaggaaatctcagtatttttaaaggtactttcagatttaatggtgatcacatccccattcacactgatgatcatgttaggtttggccatgccagccactttcctggtggcaaagcccactcctacttctttcatataatcatcaaagttttcactggagacaagtttccaggtacctacaaaagcatcacacattttgtgagttttctaggattattcttcaaggtgagaaggaagctgcagttttcaggagggtgctgtccc

SEQ ID NO: 450947 - DNA, 824 bp, Homo Sapiens
ggccaggaagtgagtacggggtactccacttgggtacatctctacatatttcgctgcgccgccgaccagcctctgtcccctccagctcaagagattcagcatcgctaatagttgagggataatcctgagtcggattctgggtcttcttggggcttaggtggccctgctggcagcccaatgtccaggagggctaaggggtcttggagcggctcactgagcaggcctgagaggctcagtggcttggagactggtatggccatgttgccataggagtatgggggatctgggacatgggatgtggatgctgggagctcataaggtggtggaggaagtgggaagccagaatctgggtggattgagcaggggcagtaagttgtgggtggtggaggtccaaggtatggagctggggcttggggctcaaatgatggctcacttggagcattcagaccctgcagctcggtgatggacatgatctcctgccaagtcagttccatctctcctagctctgaagtggacagctgtatcaccctgttcctgctctgctggggaggacacggggacatcctactgggccagagtctggtccaggttcccggaaagcccagatggctctagaaacctgtggtggagtcacagcagggtgaggagagagatgaggctcccggtgttgtctctggggaggctgagcctgagctgacactgctggacgaggatcccggctacctttgagaatctgcgaggaccgcgccccgcccccgggccattgctgagcgctgagtgtggaagctcaggctgagctgagcacaggagccccaagcaggcgc

SEQ ID NO: 450948 - DNA, 1220 bp, Homo Sapiens
gtttcgggagtctgctccgatagttcctgaacaggggagaactggcatagcttgttggtcccatccagagtagtggaaggtttgtagtattccaaagcatcttctgatgaggagaagccatgtaaggatgctgccatgctggctgaatatgaaactgatttgatatccagagagaaggaacgcttgagcttattgctgtcttccagcctgtctgcggacaggtgcagcccactgagcgcctgtaccagcgggctgtcctctaacagcgacggctgcacgctgggtacgctggcgggatgcacgggcctttgtcctgctgcctctgaggtagcagagtcggcacagggtggactgaggggcgtctcgcttttctgtccaccctctgagacagcagggacaggttcatttggcttctccaggtgcagcagcttgattttgctctttggccctgatgctccagtctggttcttaatcttcttctcatagtccaggagttggccccagaaaattgaagttctggagatatagtaggtctctttttctttcacaaatctgtaagcttcatctaaagacatgtccatcctcttcatgatgtaggcgatagcgatggtggccggagcgggagatcccagctaaacagtgcactagaacacatccattggaggcttttgctttctcaatgaaatctactgatttgtccaaccacggcaaaattttctcacagaagctgtcattcacaggcacacgcaggaaatgagactcggggataaagtcaggctttggacaggtattgctggcatttaacacataaccgatcccattctgctgcatcagctccttgttgaggacatctcgctggcagccaagataaagattgggaagaattcgggttggcccaatgttggcaacaggtaagcaaggctgagaaatgcaggtagggactagagtggattttccttcacagaggccagggaaactacgagagaactcagcaaacccacctgcaagcaggtgaacagagttgaagctcttctccagtttacccagaagtacagtgagaaaacagtctgaagagagagaggcacatcttgggagctttgatcgtaaactacaaccttctgactgcatcaatgtcaaccttatgtttcgctgaatgctggatgagctctgtaattaacactttgtcctgttgcaaccttcgcttcataagcttggagcag

SEQ ID NO: 450949 - DNA, 1055 bp, Homo Sapiens
  misc_feature (967)..(1008): n is a, c, g, or t
aaggagcgaggcctgggtggcgatttcggcacgaggctccgcagaatccaggggacggttgctgagcgggcctgggacagcgggtcgcggcacctccggcctgcgcgtgtctaatccgtctgtcgggtcccgaaagagctaagccgagcctgcgccggacgggtgggctggactgagagaattctctgagctggtgacaggtgccacaggcactggggatctcaccagaaaggaaccgacggagctaggggccagcgagatggcggacgaggccttagctgggctggatgagggagcccttcggaagctgctggaggtcacagcagatctggcagagcggcggcgcatccgctcagccatccgggaactgcagcggcaggagctggagcgcgaggaggaggccctggcatccaagcgtttccgtgccgagcggcaggacaacaaggagaactggctgcactctcagcagcgggaagctgagcagcgggctgccctggcacggctggcagggcagctggagtccatgaacgatgtggaggaattgactgcactgttgcgaagcgctggtgagtatgaggagcgcaagctgatccgagctgccatccgccgtgtacgggctcaggagattgaggctgccaccttggctgggaggttgtacagcgggcgtcccaacagtggctcaagagaggacagcaaggggctagcggcacacaggctggaacagtgtgaggtgccagagcgagaggaacaggaacagcaggcagaggtttcaaagccaacccccacccctgaaggcaccagccaggatgtgaccacagtgacactcctgctgcgagccccacctggggagcacatccagctcacctgccctcaccccgcagttcacccaccccctgcctctcctgaaccttccattggaaccctgcccagggccaaggcccttaaaagctgaaggttccagggaggnnnnnnnnnnnnnnnnnnnnnnnnnnnnnnnnnnnnnnnnnnttgagccctccgggagtctccaaccgcttcccccacgactttggggg

SEQ ID NO: 450950 - DNA, 1027 bp, Homo Sapiens
tgaggctcggaattttggtgggaaccgtagaaacgggtttaagaccagtggtctaaggagcagaggggactgatggcatcataatggcctgggggaattgctgtcccgggaagcccagctcagcagggtccagggcagcttgcaccacgtggtgggggcacgaagcagatgatgaacaccggcccaagaccgggcacaccatccaacagcgcccggcgccttgacttcagcgttgcgctgctgctgcaccggctgcatgagcaaggtacggatgatgaccaggttgcagaagaggatgatgaggaagaccaggaagaagctgaacacgatgaagatgtggatgatgaggactggcacgctgcccttctcgtaatgctcaaagcagcgagtgacgttgcctgagccagcactgtcgggcactgtgttggtggagtccaggatgaggaagtaggatgcagctcccacaatggccacccagatgaccaaggacaaagagatgccacgcttgcgggtgttggcctgagcagtcttgatgggccgagttactgcctggaagcggttataagtgatgacgcccaggaaggccacagagcagtaggtgttgatgaagaaaaggcagccagccacgttgcacaggaatttggggagtatccagttgccctggttttggtagtagacaatccaaagtggcagggtgatcaagaagagcatgtccgccatggtgaggttcaccatgaagatctttatctcattgaatttcttgcaagggtacaggcgggcaaagacccacagcacgtagccattagcaatgaccccgagcacaaagatgatgctgtaaacaatcgggaagagagtgtatcggaactcagagtccatgtgggaggagtcatgtggctccattgctgtgggctggaatgatcagctggtcctggtggtgcctgtagcaggggcagcggcttcagctgcagtgaccgtgtgtctctgtctgggtcctggccccagcctcagcctctatgctgtctggcaa

SEQ ID NO: 450951 - DNA, 1203 bp, Homo Sapiens
cgtgccctcagcacctccgccagggcctggaggacccaccttgcagcaccttccggagcgttggccccccgccttgcctggaccggtagaagtcaaacctggtgcacgtgggccctcatagcccgcctccttgcacaggcctcagtggaactggaactgcaggacgatactcacgaagtacctgatgtatggtcgtcacattaggaacatgagacttagctccagcatcaaagtggcttcgtttcgggtacacaggaggacagatcccctgatacttggttcgaagataccaccagtcgaagttgtagcggtaagggggggtacgcccatctaaagaccccccagcgccactggtccaccaagtagccaaagggcaggaaggcaattttttccagtggccatttttagcaagtaattgatgtcactttccgtgtcattggtgacacggtccagcaggccgattttgtgcagatgttcaggagtggagaccgagagcgccagcacgtccccaatggcctcatggaagccggggttggccccccgacgcagggagacggcagatccttgtactgcaggtagtactgtatatggcccatctcatggtgcactgtggagagctggtccatcgtgacccgtgtgcactgcttgatcctgaagtctttcctgttgtagaagtcccaagccgaggcgtggcacaccacttcccgcccgtcggccggcttctccagcatcgacccttcccagaactcgggaggcatgggggagagctccagggaggtgaagaactcctctgccacccggaacatgtgcgtggcgttccagccctgctgcagcatagtactggctgacatcgaggttgggcttgtctgggaaaggcaccaccatgtcgtagatgttttcccagctctgggcccacatgtctcaccagcagatgagacagggatcgggtccccatgaggttgatgtatctgtctccgtatcggcgatgcagtgcgcggcggacgaaggcatggaggttcaaggtagaggggctctagctgttggtagaggtgttccagatcgtcctcgaaggtgggggagttgtaccaggagcgccagtaggcccccgtgtctgtgaagccgtcctgcttgtaggcttcattgctgagggcagtgaaatcctcgtacagcggtttcagcgggatgcccgcagcgttgtgccag

SEQ ID NO: 450952 - DNA, 930 bp, Homo Sapiens
cagcagtacctggtgcccatctggatgagggcgtgtgagtcaccaagcagcagaagtaggcgtgatatgcggtggtaggccccgtgtgtcaagggggagctgtcggaagctgccgagtcgtctaagctcatggctggaccgtgcatggctacaaggcctcacttccccccagggggctggggccggagcagggccaggagacaggaagtggacacggcaaaagagccatcagtgtctaccaggtcctcctctgtgcgcaggctcagcacgtacagtgtggacatggacaccacgctgaaggccatgaccaccaccagggcaatgatggttccctgcaggaagcgctggctgatgcaggcctggtccaggaaccacggacgatgacttgctggccaccttggggggcctcttcttgtgggggacgctgcccgcccgactgaactggctccctgcatggctgaaggcgcccgagctggccggtggacttgaggctgtcgagccgccgcagcttggccagcttgtggctccagcgctccagctcatcaatgcgcgtctccaggttgtctgtcagcttgcacagctccttcacggcccctacgttctccatgaagatgcgctccttgttcaccaccaggaagttctctatggttttcccattggcaaagaccatgtctccggtgtctttcacagcctcaggcaagatctccttcacctcctgagcgatgacacctgtctctggcgcggtggcctcgatacccgcgctggcggcgaactcgggcttgtatctgtagtgcaccagccgcatgcgcgagatcctcttcaattgctcggtggtgtccacctcctgcacgtgttccttggcgcgcagctcggaggggtgcattaagcgagcccatgaccttgacattcccgtgcacaaccagcgcctca

SEQ ID NO: 450953 - DNA, 1060 bp, Homo Sapiens
  misc_feature (178)..(179): n is a, c, g, or t
tccacggaaggcaagccttttgggccccagttggtttcggaggcctaccctttggcccctgggggctgtgttttgggtggccccaggggcccagaagcccccccttttccatttcggccgggacactgggggggaccccaggtggcttctgttggtttttgcttctggtgcccagagnncctcgttcgggggtccaagcccccaggggcctttgcgagtcagacactgggggccctttgcttgtgttttttctgggagctttgggccgagggttccccgggaccccttccctgaacttttccgcagtttcagaggagagtctgcaagtgagagctgcagtgactgtgccttgtgcttggcacccaagcagggcatgggagtcttaagtggaaccagggcctcaaggacaacagagagccgcatggcagggtagacacctggataaaggtgggtggggaagcccactgctgcaccccgggcatggctggcacttgattgcttcagagagctcagcagcaggttggtggtagcatgcttggcaagggctggtgtggatgctttggccagtctgccagatagcggcatgggaagcagtgtggcccgacctgcaggcaaccgcatggcagttcggggagcactggctggaggtgatgtggcagttgggttaggggcacgagcttgcagtttcgtctggcttgggggattagctgtgcatgaactatagccatagacatcaccactgcgcaggatggtaggttggaagccatcatctcgcaggccctgcaggaaggccacaagctgggcctctgtggcactgagatcctggctcattgggttaaagacaagcagtgcctcttccagggccttcttccctgccgtggagatgcgcgaccaggagtgcacagctttttcctccacatgctgaaccaccacactcatggcattaggcactgcagatctgcctgggtatccgcaaaccagcgcttggcaccggcgccgccgcggggacccaagacgcgcctctgcgccgccctcgtgccgaattcgccacccaggcctc

SEQ ID NO: 450954 - DNA, 919 bp, Homo Sapiens
tttaggttttctcctggcgcatgggcgccgccaatcatttcggggcttattttggttctaaagcccggggcagccaggcctccctgcctggcctcggcggggacgcgggacctggggccccggaccgggcctaaccgccctggccggtccccactgatggtggcggtcggtcctgatcgtcctgatggcagcgaccaggctggactcgggctgtgcaggggcgaggggagcagggcggggtgacgcccggagagcggcctggagagcgcgtgcttcagaaggcgtgggcaccctgtcccctttgcagatggggatgcaggccctggtggcggtggaggggagatgggggcagggacgttgccgggcagaggaagctggaagtttggctgctgtaactgactgggaagcttaaaataacagacaatcatctctcacatttatggggactgggaagtccaagaccaagttgccatctggggagggcctgttcctcacagcgccttccagctcaggcctcgtttataagggcactcaagccttccacgacaatgggtcctcatgacttactcacctcggaaagccccgcccccaagaccatcacattgtgggtgatggcagagcataaggtgcccttccccacatgctcggggttggccccagcgtctcacgctagcagctacgtgggaatagttattttttttctgggagaactctggggaccccctcttgatgttcttgggagcaccccataacaggccgtttcacctgtccacgcctgttgagggctggtcgttctttgggaaccaccccccccaccagggccggttttccacttgttgccaaccctttgggttgtagaggcttgatccccttctttgggggggaaggttttcctggcctcgcgtttggttaatggggc

SEQ ID NO: 450955 - DNA, 1093 bp, Homo Sapiens; identical to SEQ ID NO: 151801

SEQ ID NO: 450956 - DNA, 845 bp, Homo Sapiens
  misc_feature (210)..(277): n is a, c, g, or t
  misc_feature (296)..(338): n is a, c, g, or t
  misc_feature (548)..(714): n is a, c, g, or t
  misc_feature (823)..(823): n is a, c, g, or t
aatacaatatcaatttattgataaactcaacatagaaaaaatgtgaaatttaccccaaattgatacacagggttaatatatttactatcaaggcacttcgtagatactgacaagattatccaacaattatgtagaaaagcaaaaacaaacaaccacagaaatcccaaaaacctggaatagctcaaacatctgaaaaaaaagatagagcannnnnnnnnnnnnnnnnnnnnnnnnnnnnnnnnnnnnnnnnnnnnnnnnnnnnnnnnnnnnnnnnnnnagagtgaaactccatctcnnnnnnnnnnnnnnnnnnnnnnnnnnnnnnnnnnnnnnnnnnnggttggaatcacttcacgttacttcaagtcctctaatatagtgaaagcattttttcctttttcatatttacaataaaacgtttatacctgccattgtcttgtgcatactcttgtcaaaaaatattgtctccaaacaacagtctcatttttgtgtcccctaaaattttcactagagtgacattcggaaaaaatgtattaagcatagcatcnnnnnnnnnnnnnnnnnnnnnnnnnnnnnnnnnnnnnnnnnnnnnnnnnnnnnnnnnnnnnnnnnnnnnnnnnnnnnnnnnnnnnnnnnnnnnnnnnnnnnnnnnnnnnnnnnnnnnnnnnnnnnnnnnnnnnnnnnnnnnnnnnnnnnnnnnnnnnnnnnnnnnnnttcatttcacacacaaaattgtttgtgggatgctttcaacctttaaaaatcctgggccagggcgccgttggcttcatgcctgtgaatctttagcactttcgggaacccnaggttggcttggttcaacccca

SEQ ID NO: 450957 - DNA, 746 bp, Homo Sapiens
ctaaatttacattttcatcaacagtgtacgagggttctccgttttctgcactcttgccagcatccgttttttcctgtcttttgataaaaaccactttaactgggggccttctgctgaagggccacagaggaacaccaggctgggatggattcagggcaagcaagtcactgtgctgggaagccctgtgcctgtgaacgtgttcctcggagtccccttatgctgctcccccgctgggatccctgcgatttacgaacccgcagcctgcatcgccctgggataacttgcgagaagccacctcctaccctaatttgtgcctccagaactcagagtggctgctcttagatcaacacatgctcaaggtgcattacccgaaattcggcagtgtcagaagactgcctctacctgaacatctatgcgcctgcccacgccgatacaggctccaagctccccgtcttggtgtggttcccaggaggtgccttcaagactggctcagcctccatctttgatgggtccgccctggctgcctatgacggacgtgctggttgtggtcgtccagtaccggctaggaatatttggtttcttcacgtgagtctctccaaatgatggacatcccagatccccaaagggcagcagtgcagtagccatagacagtgcccagcaacctaagaaggagcgagccttccgggacaatgaacaaaactggccctaattacttagcacatgggatcagcatgctccggggaact

SEQ ID NO: 450958 - DNA, 858 bp, Homo Sapiens
ttgctagtaaggcgtagactggtctcggaaggtcctcagattggcattggaagacttaacttctttcccttaaggactttggtcacaatacaagtagaagaagtcacagtagaagatggtttgtactactcccagacacgactgcaaatttggtcatagaaattctcagtctggtaccgcctgatccagttagccaggtagagtgcccggtacagacccagaaagaacaggtagtgagtagttatggtctcagccttctccagtcttgctgatcatgaagagctggggcaggatagccactgattccagatagatagagaaagtccagaggatctccagcagagtgaaactgtagttttccaaggaaggaaaggccaatgactgggaccagaagaaactccaggcggaatgtgtcattctcactgtcaaaagttttacggaatttcccatatatcatgtacactgtaccataggcacagaggagaaaaaccaccttcattactgtgttgtagatggagatgaagttggtgaacaggtccaggtacctggtggtgaagacgagagcaaacaggatctggctcttcccagagatgcccttgcagcacttggacctccagatcttccccagcagcaagatcatggccaggaggtggctcaggtcgccgaggattcggaacacgttcatggtccagccagtcagtcgtgcgcccgcgcccagcaaacttctaggaaactttctggcgggcagggcggctgccacgtctccggccccggtctctaggtgccccagagccctgcctgcgcctcacagctccgcgatcgcacccgcgcgccgccgcccacgcactcttggccccc

SEQ ID NO: 450959 - DNA, 1133 bp, Homo Sapiens
  misc_feature (1109)..(1109): n is a, c, g, or t
gaagggggtttttatagaggggaaatttttgtggttctgtgggcccaaggaccctgtttggggccattttatgttttacccggggcgggtttttcaaagtaagctggcaccaccccttgccaattcctcccatagaaccaaggcttttacccattgaatcctctggggaggccaacccggggagaggtgccctttaggccagtgagggcaagcccttccccttttggatttggaagggacaggagggactgcgtggttcaaagagggcggctaaaacccgacattatccatgatgtcaccactgtgcataaccatggccgtgggggcctcatccctttgaagaccacccaggagaaagatggcgggactgttccaaagctgaatgacagcaaggttttggagtgatctagctcagatctgtctacgtggattcccagtgtggagtccaggcggtagtaattcaggatccctgcttcagctcggaaatcctcaaatccacaggcagcggctacttgctctgagaggaaacccaggtcagaagggaaaggtgtgtaatgatctgctgagtatttcttactgtcccagttataatggtagcctacggtcacccaacgcagtttctccagtaaacttcggggtctccgtttagtcgcttctttatacctcaggaactctttgctctgttcccacagatcttgggtctcttctttagacatgtgtttgtccaggttacatacattaggtttctgggaatataacttaaggcactgtttcacccagtgccactggtaacctgggaggaaggggtttgggataaaaataaacccaggatagcctttgagtccataggcttgccacttgctgacgggctgaagacctgctctatatgcattctgctcactgacagaagacacatttagctgagatttgatcaccttttgggcaccaggacccttgccacgggctgcgtgggccgccgagaagtcgatgaccccttccaggtctgcggtcccgggccggctctgacggtagaagcggaaaagtttccgaaaggcgtcctccccgggctcagtcgccagagtcgccacagagcccacggccgcatccantactcgtgggcagtaccagcctgc

SEQ ID NO: 450960 - DNA, 1561 bp, Homo Sapiens; identical to SEQ ID NO: 324451
  misc_feature (80)..(132): n is a, c, g, or t
  misc_feature (592)..(669): n is a, c, g, or t

SEQ ID NO: 450961 - DNA, 808 bp, Homo Sapiens
  misc_feature (719)..(751): n is a, c, g, or t
ttattcgtaagacattaatgcatgtactaatgcccaagaacatggtgtgaatcaggaacttacactcagctttccccaaggtactataatgtttccaagatcttgtgatgaagcaaatattccatacatggccctgtctctccagattcccgttcattgttcttcttgaaccagtatatctaacactctgttccagatgcgatggaatatttgtatcggtcactggggctttatcatctgaagtctctatgtagctaatgggtaattgccttccacgtgatatacgggatcttcttgtaaaggaagagaaggtgcaagcgcctccaccggcttgttgcaggatggagcgtgaacttggagaacatcctgtcccgggactgcagcagcactctcccgggacgacctggagagctcctcgatccgccgccgccgcccctgctgcggctgccggggccgctccagagtgaaggccggtgcttgggcggggaggacgagctgaggatcgaggcagggcctggcccggccgcttcaggtgtgcgcgggcggctcggcggctccggagggcgccgggacgcggcgggcggcgaggagggcgttcggcgatgactcggggcccggagaagctccggcggcggcaccggttgggacacggtggcagcccggctcgggttcctacccccgctctcgacgaattcgagctcggccgatttggcctgatnnnnnnnnnnnnnnnnnnnnnnnnnnnnnnnnnatgcggccgccaccgcgtacgctccagtcgcctatagtgagtcgaacattcgggggg

SEQ ID NO: 450962 - DNA, 488 bp, Homo Sapiens
tgaaaatggggcggaagaaaatacaaatcacacgcataatggatgaaaggaaccgacaggtcacttttacaaagagaaagtttggattaatgaagaaagcctatgaacttagtgtgctctgtgactgtgaaatagcactcatcattttcaacagctctaacaaactgtttcaatatgctagcactgatatggacaaagttcttctcaagtatacagaatataatgaacctcatgaaagcagaaccaactcggatattgttgagactttaagaaagaaaggccttaatggttgtgagagccctgatgctgacgattactttgagcacagtccactctcggaggacagattcagcaaactaaatgaagatagtgattttattttcaaacgaggcccttcttgtctgccacctcagaacttttcattgtttgtcacagttccagtgaccagccccaatgctttgtcctacactaacccagggagttcactg

SEQ ID NO: 450963 - DNA, 1446 bp, Homo Sapiens
  misc_feature (1227)..(1227): n is a, c, g, or t
cggcggctccaccttcgctttgcgcctctttattatatttttctttgttgtcatggaccgtgattcccgggatgcgaggccgggcacagccttcctgtgtggttttaccgcccagagagcgtcatggacctggggaaaccaatgaaaagcgtgctggtggtggctctccttgtcattttccaggtatgcctgtgtcaagatgaggtcacggacgattacatcggagacaacaccacagtggactacactttgttcgagtctttgtgctccaagaaggacgtgcggaactttaaagcctggttcctccctatcatgtactccatcatttgtttcgtgggcctactgggcaatgggctggtcgtgttgacctatatctatttcaagaggctcaagaccatgaccgatacctacctgctcaacctggcggtggcagacatcctcttcctcctgacccttcccttctgggcctacagcgcggccaagtcctgggtcttcggtgtccaacttttgcaagctcatctttggccatctaccagatgagcttcccttccgtggcatgctcctacttctttgcatcagcatttggacccgcctacgtggcgaatctcccaagcatgtgctcagcttctgccgccaacccgtcgcccggcgacctttcttcttctagaaaactggtcctgagtgggggcaatcctggattactaaacccccagggcttcttcccattcccaagaagctccctggtaccgatgcaccctcccaagaagggaagcatcccagtgaccccaacgcggaatggcctatatggctccctcacccatcaaacaaaagctattggggggaaggggcctttttaatcatcacttcccaaaggtgggcccccatataatggtgtgaatcccggggtttttatttgggtgaccccccctcggcgcggggcctatgtgaggcttttcttggtttacccctttgctgcatatcattgccagtgcgcccgctgggtgttccagaggacgacacctatacttttggagaagcagccaccaccaggggggcgcgttcacaaggggagaactcccactccctcgtgccgcgccgcgaccgggtttcttgttccatagaataactattaggagaaatttgaccccactaacgatgagagggtggcccgacggcccccccaggtggggtcaccgtaaaaactgagtggaggggcatacccaactncactacactatagatatggggcctgaggcacgtgggtatcccactctccgctcgaacccgtctctgatccttaaccacactggtattttttttaatcggcgatgcgccggcttgtttccattggaaccgcccgcccccagatataaacaaaagacaatcatggcgcccacctgttcgttagcacccccgcccgtctttcccctcttccgcgaccacaca

SEQ ID NO: 450964 - DNA, 947 bp, Homo Sapiens
  misc_feature (893)..(893): n is a, c, g, or t
attgcgccgcggcacggcctagcgagtggttcttctgcgctactgctgcgcgaatcggcgaccccagtgcctcgaccactatgccgcgctctttcctcgtcaggaagccctccgaccccaatcggaagcctaactacagcgagctgcaggactctaatccagagtttaccttccagcagccctacgaccaggcccacctgctggcagccatcccacctccggagatcctcaaccccaccgcctcgctgccaatgctcatctgggactctgtcctggcgccccaagcccagccaattgcctgggcctcccttcggctccaggagagtcccagggtggcagagctgacctccctgtcagatgaggacagtgggaaaggctcccagccccccagcccaccctcaccggctccttcgtccttctcctctacttcagtctcttccttggaggccgaggcctatgctgccttcccaggcttgggccaagtgcccaagcagctggcccagctctctgaggccaaggatctccaggctcgaaaggccttcaactgcaaatactgcaacaaggaatacctcagcctgggtgccctcaagatgcacatccgaagccacacgctgccctgcgtctgcggaacctgcgggaaggccttctctaggccctggctgctacaaggccatgtccggacccacactggcgagaagcccttctcctgttcccactgcagccgtgccttcgctgaccgctccaacctgcgggccccactccagaccactcagatgtcacgaagtaccagtgccaaggcgtgtgctcggacccttctccgaatggtcctgctccacaagcaccaagaagtccggctgctcaggatgtcccccgctgaacctcgaggctccctncttcctcttcatacctgggcccctggcttgacagcctttccccaggctccagaa

SEQ ID NO: 450965 - DNA, 1210 bp, Homo Sapiens
  misc_feature (951)..(981): n is a, c, g, or t
  misc_feature (1079)..(1162): n is a, c, g, or t
ggaatttccgggatcgggcgggcgggcactgcatgcttcttcctccgtggagcggagagcgagacagagctacagcgaacgagagagcggcgaaggcgggtagaggggcgcgggcgaggcggcgcagccatccccggaccaggggccgcgccgccaccatgctaaacaacctgacggactgcgaggacggcgatgggggagccaacccgggtgatggcaaccccaaggaaagcagtcccttcatcaacagcaccgacacagagaagggaaaggagtatgatggcaagaacatggccttgtttgaggaggagatggacaccagccctatggtgtcctccttgctcagtggcctggccaactacaccaacctgccccagggaagtagggagcatgaagaggcagaaaacaatgagggtggaaaaaagaagccggtgcaggccccacgcatgggcaccttcatgggcgtgtacctgccgtgcctgcagaacatctttggcgtcatcctcttcctgcggctcacctgggtggtgggcattgcaggcatcatggagtccttctgcatggtgttcatctgctgctcctgtacgatgctcacggccatctccatgagtgcaattgcaacgaatggtgttgtgcctgctggtggctcctactacatgatttccaggtctctgggcccagagtttgggggtgccgtgggcctctgcttctacctgggcactacctttgtcccgaccatgtacatccctgcgccccaatcgaaaccctgcctggcttaccttttcccagccatgggccatcctccagggcatacaatgcacctggggggaaggccgtatccctgctgcaacaccacggctcgttttacgcgcacctgtggtgcctcccccgtcttgcccccctcccggtcgcccccttggctagtcccctccattctccttactactctgnnnnnnnnnnnnnnnnnnnnnnnnnnnnnnnatccctcatcaattcaatgcgcaaaaacctagaacgcggcgcgccttatgattacccctctttcccacccaccccacacatcttcctccaacaataannnnnnnnnnnnnnnnnnnnnnnnnnnnnnnnnnnnnnnnnnnnnnnnnnnnnnnnnnnnnnnnnnnnnnnnnnnnnnnnnnnntattgccgcctgtacacccgttttcttccggcgctctttccccactcc

SEQ ID NO: 450966 - DNA, 1276 bp, Homo Sapiens
gggaaatagataaaacacgccacagcctgggaaggagcgtgctctaccctgtgctaagcacggggttcgcgcaccaggtgtctttttccagtccccagaagcagagagcacagcccctgctgtgtgggtctgcaggtgagcagacaggacaggtgtgccgccacccaagtgccaagacacagcagggccaacaacctgtgcccaggccagcttcgagctacatgcatctagggcggagaggctgcacttgtgagagaaaatactatttcaagtcatattctgcgtaggaaaatgaattgtttggggaaagtcgtgtctgtcagactgccctgggtggagggagacgccgggctagagcctttgggatcgtcctggattcactggctttgcggaggctgctcagatggcctgagcctcccgaggcttgctgccccgtaggaggagactgtcttcccgtgggcatatctggggagccctgttccccgctttttcactcccatacctttaatggcccccaaaatctgtcactacaatttaaacaccagtcccgaaatttggatcttctttctttttgaatctctcaaacggcaacattcctcagaaaccaaagctttatttcaaatctcttccttccctggctggttccatctagtaccagaggcctcttttcctgaagaaatccaatcctagccctcattttaattatgtacatctgtttggtagccacaagcctgaaatttctcagtgttgggtaagtttctttacctaccctcactatatattattctcgttttaaaacccataaaggagtgatttagaacagtcattaattttcaactcaatgaaatatgtgaagcccagcatctctgttgctaacacacagagctcacctgtttgaaaccaagctttcaaacatgttgaagctctttactgtaaaggcaagccagcatgtgtgtccacacatacataggatggctggctctgcacctgtaggatattggaatgcccagggcaattgagggactgagccagaccttcggagagtaatgccaccagatccctaagaacgcggagccaatggcactgcaggtgagaacccgccatccgtgctatgacttgggaggcctgaaagcccgaggacagtgtgtggagaatctaattcccaccagccaggcgtccccttcagcattatgcttcacacctaagtccttatcttcaaccactaggccatgagcaactttccttcacattttaccaggactcgtcttcccacact

SEQ ID NO: 450967 - DNA, 1316 bp, Homo Sapiens
  misc_feature (1221)..(1274): n is a, c, g, or t
cacggaagtatctggggcaggaggtgatggacccagtgtacggaggagctgtggggtctgtgccttgcactgctagaagctgctcctctgtggtccaacgggcattaattttctgatttgactcaggaggtttgaattcttcaattccaccttccattttctgtttaagtgcactgtttacttgcttagcattctgaacctgacgttttagagagatcaactccatgtccagttgcctcaggatggtgttggctgcattggggactacaaggaaactggtaccccatcttcctgggttaaatacatgcccttaggtggacggccacttagaacgctgagaatgatggcgatgttgtaaactctgatactctcttcttccaagtccaatcttgctagtttggacaggttgttcagtattaccctcttttttggcttcttttttgggatcataatcactatcattcccatccattggatgtgtttcttctacatcatcatcactgtcagcctgattatgtctattagctagtttacgagcctggcgatccatcaaacttgtcctagagcgagtttttttccaagaatagtaatattttacaaggcttgcaattgtcttatctggaagcatttgctgaatcctgtgaaagctctttccatgaaaactaaaggcttgttcaaataggactttatcttccactgtccactcatccggaaagggagtgaaattagggagatcagcaagggacttctcaatgttatgtttatgccagaacaacatgccaagtgcctgttccacattgtagccatgcttttcctttgcaattgcaatgtattcatccaatttggcatctgggatactgtgatatggagaccatacaagcatccctccattgtctttatctgtgtactttgtagcacctggatcaaattcagggatccgagcttggtattcggctccgactctcatcccaacatcgtgctcgtcgtcgctgctgcagccgctctcgggctctgagtagtgcagcccgccgttggtggacgaggcgccgctgccgccgccgcctgccgggctcttggcgctgccgttggccgatcggttcttccccagtaactcgggccctttctccatcatgccgggcatggtagaacaggggagggggaaaggtgaggggaagaggcaggcgtcagggtgaaggcggagatggcttagagcgcgggcgnnnnnnnnnnnnnnnnnnnnnnnnnnnnnnnnnnnnnnnnnnnnnnnnnnnnnntgttaatatggagccgccataaccgccccgctccggcagtag

SEQ ID NO: 450968 - DNA, 858 bp, Homo Sapiens
ttctctctagtgacggtctgcagcctggcctgcagctcctggctcaggctgctgtgtgtctcctctgccttagctatctgctccacagcctgctggtgctgctgcttgagggtctgcagctggctgcgcagctgttctgtctccttggtgtgggtgcaggcctgctggctctgtagctccagcagctccttctcgcgcgcctgtgcctggcaggcatcctgagcacacctctccttcagcgtttctagctccccagtgagggcctcacaccggactgtgagctgtaatactttcgcctcctcatccttcagagcctggctgaagaggctgctattctccagcctcagcttctcattctcctccctcagcttgatgttctcactcttgtattcatccttgaagcggagcatcaactcgtggttggctgctagggtcataaagcgttcctctagtttccgactgtactcaccctgggccttgagcttctcagcctcctgcatcatcttctcctccagctctgcattgagcagctctaggatctggcagcgctccagggcctcatctgacctccgcttcaggatgcagatgagctgggactgctcttcaatgcgggagcgaagcatagccttctcgctcctctcctcctctgacagtccccggaggtttgccaaggcttccctcagaccgtccagttccttaaactccgtctcctcttcctggttgttcagtttttcattttgcttctctaagcgttcttcagggggcggggtgtccatcctgggagcctgctgtttctggagcataggcgctctcatccactaagggctgactacagtcttttcccctcagatttcaaac

SEQ ID NO: 450969 - DNA, 1046 bp, Homo Sapiens
gggtaggggtacaggggtgtggccgaagtagcggcgctaatacggtttcccctcaatctttttgtgggggggaggtatggccaaggcgctgggggcaccacaccccgccaaggggtcaagttgggatgaagttcacaaaggggtagggtcccgaaagtaaatgtcaagggagggcggcgttggccacctcccaccaggatcttcttgggggggccgtggagtgcctcatacataaagtaaacaccatctcggaccatgggtctgatccgctcagcaaagcccttgagccttttgagttggccttcaatgtctatttccagggtggggaacatcgactggtgctggtgggccaggttcttgaatctggaggaaaactcatcaaaatctgacaggaggtcgcagatgcggaggcctgtccgggcagctttggaagagtaggttggtccgattcccttcttggtggtgcctatattcttcccctcttgtgcctggcgctgcacttcctgaagtccgtcgacagcctggtgaaaatcaaacacaaggtgggctctgtcagagatgatgagcctcttctcccagtccttcaggcctttcttttcattcttctctgcttcctcaaacaagcctggcaagtggatgaccaccccgttgccaatgaaggacacggccttggtgttgatgatgccgctgggcagcaggtggaagtcgtactctttcccatccaccaccaccgtgtggccggcgttgttgcccccctggcagcggctgatgatgtcggcgtccgtggccagcaggtccaccaccttgcctttgccctcgtccccccactgcgcgcccagcaccaccgtcacgcgggagccggtcgccgccgcctcctgctgcagccgcccccgcttgacgccgcctgcgccggggggccggtcgttggaggctcgggtccccgacatgctggcttggctcttccgctgcgctggcccggccaggagcccgccgccgccggcgtccgcgccattaaatggagatcccgggaattccggaccggtacc

SEQ ID NO: 450970 - DNA, 928 bp, Homo Sapiens
ttggtgtcattttgagagcaggaaatttcattagatacagtgtttaaacattcattgccacccaacatttgaatcgtgccaaggaacgtgcagggtggtgataggccagctgcagtgtgagcaacccccatcaggagtggctggtggttggctttggagctccatcagtggcacacactcaccgcaagcttctggaccgcagaccttgcatcctggtttgcgaagcctttgaccttcttttagcaaagagaaaaggtaggctgcttctaccttcaaacagtcaagagcaacttctgttgagttcaccttgctgctgacccagaagttggagcaggggccaagctaaggggtgcagaaaggctaacagtacttgctgtaaaaagaagtcatcttcagtcatcctggggagattcccttgcccctctctcaacttgagtgcttttagcttcatgcaggaaagattttagttgcatcttttattaaatgttcaatctcgttttacaaaagcataccaactagcagtcctgagcaactagtatgaaatttgctgaatacagctaacagaaagctttctaaactatcctgttctttgtttctttctacaggggtgtctgtagaatattctttagtttcacagtgatatatgctgtttcaggaagcacaaggtattctgtttctgggaagtgatgacctacttttagtttgagcacaagtttccatgactggttctaaatctggccagatattgctaataccaatgacaggagttagggcaattgggaggctcttggtccccagttcctgtcaagggtaagcccatctgggtcatggctgggctttcactatcagtagttatatttccctttgatgcttcaaaaagcctatggtgaatctgttgcctcactttacttctccatttgacttgaaa

SEQ ID NO: 450971 - DNA, 738 bp, Homo Sapiens
aagaaacccgagacgttccgaagtcaacgcaagcaaaggggagtgcgggtcggggaggaatattcttttggaaacgtaatattggccttggggctctccagccctttgggacttccaatgggatcttagaagcagccgaagcagcgtgagggcggcagcccagggccagccacgatttgaacgctctgccttgcagctcttctggaccgaggagcccaaagccctaccctcaccattcaccaggttacagttcttatccgcatgaatacacatggctctgttacgaaaaattaatcaggtgctgctgttccttctgatcgtgaccctctgtgtgattctgtataagaaagttcataaggggactgtgcccaagaatgacgcagatgatgaatccgagactcctgaagaactggaagaagagattcctgtggtgatttgtgctgcagcagggaggatgggtgccactatggctgccatcaatagcatctacagcaacactgacgccaacatcttgttctatgtagtgggactccggaatactctgactcgaatacgaaaatggattgaacattccaaactgagagaaataaactttaaaatcgtggaattcaacccgatggtcctcaaagggaagatcagaccagactcatcgaggcctgaattgctccagcctctgaactttgttcgattttatctccctctacttatccaccaacacgagaaagtcatctattggac

SEQ ID NO: 450972 - DNA, 888 bp, Homo Sapiens
atgacttttccttcgtgtttgggtggataaagtagagggggagataaaaatcgaacaaaagttcaagagggctggagcaatttagggcctcgatgagtctggtctgatcttccctttgaggaccatcgggtttgaattccacgattttaaagtttatttctctcagtttggaatgttcaatccattttcgtattcgagtcagagtattccggagtcccactacatagaacaagatgttggcgtcagtgttgctgtagatgctattgatggcagccatagtggcacccatcctccctgctgcagcacaaatcaccacaggaatctcttcttccagttcttcaggagtctcggattcatcatctgcgtcattcttgggcacagtccccttatgaactttcttatacagaatcacacagagggtcacgatcagaaggaacagcagcacctgattaatttttcgtaacagagccatgtgtattcatgcggataagaactgtaaccctggagaacttcctttcctatggcaggcccagggactattcaagaacagatgtccaatactcagctcacaatcttcttccacgctctgcaccttctaacctcagcccacctccacgctgctcttcccacaggacctggtgaatggtgagggtagggctttgggctcctcggtccagaagagctgcaaggcagagcgttcaaatcgtggctggccctgggctgccgccctcacgctgcttcggctgcttctaagatcccattggaagtcccaaagggctggagagccccaaggccaatattacgtttccaaaagaatattcctccccgacccgcactcccctttgcttgcgttgacttcggaacgtctcgggtttcttccacctctgc

SEQ ID NO: 450973 - DNA, 876 bp, Homo Sapiens
  misc_feature (23)..(23): n is a, c, g, or t
  misc_feature (62)..(62): n is a, c, g, or t
  misc_feature (166)..(198): n is a, c, g, or t
ccatggaatcccaccactgcttntattaggctgcctgagttcagataatgatctcaaaaacnagcactcgctgcccttcacccactaacccccctggctttaagcagcttcctttctcagagggccttgcaaattgtcagagggctccactgctcggcaaatttcnnnnnnnnnnnnnnnnnnnnnnnnnnnnnnnnnccaactcggtgatctgcaggtgcaaaacagaagcctcgtttgacattttcagaaccattgcggctcactctcttcttccgtcatgatgggaaaaacacagttcaggaacagatgctggctggtatgacccatgggagtccacagggactctactgctctttattttctttcgctgtctcttcgcagttatcttgctcatcctcctggaccaggaactcctcagggggccaccggagctccccgctctccacctccccttctgtgggttccaccactatggagggcagacggtccttcagtttgcagcagcggtcaaaatctgacgggtctgggaagatctggtaggaaaggccatccttgcgggggctgaggccgatctcctccatgggctgggtgttcatcatcacctcagtcatcttggccgatctcagatagtcggggcagtgaatggggaaatatatagacatgaagtcctagggcaggctgacacacgcccctgtgatttaaaaacggtccctgcgtcccgagtgaggatgacacgggcgcagacgggcacggcaggcggccgagtgcggacaccgggcgctcgccgtccgccttcccaggacagccccacggctagcgacgtcggcaaggtggacacaactccccgctctccactgagcactcagccccccc

SEQ ID NO: 450974 - DNA, 986 bp, Homo Sapiens
  misc_feature (291)..(291): n is a, c, g, or t
tggattccaaagcacgtgggatccggcgaaaccccgactttgagtcgtggaccgcccccagtgccccaaggaggtaccccgagagcttcaaacactgcgcgccttaaatcgctgagaccgcgaaaccggagttcgccgcctccggactggcgtcccgagccagggacccgcttgggctcccgccgagccccgacctcggacgtttttccgggagccgcgaggagcctggggcctgggccaggcgccgcggcgggcatcgatcgccggctcccagagagtggccccgcgcanggtggaggtgaccccgtcacctccaggagcgcccccaagccccggtacccgcagggtgcgccctctcctcttcccggaaggttaagttcgtctttttcggttctcggttacgcatccccttggcacgcatgcccagccacaccgtgggcgaaactagagggcccgcgtcccctgggggctgccgcggggccccgagtgaggtgtcccctccgggccgggcccgagtcggaggccccctttgcagcctagaggagcgcggggctggcgctgcgcaggaaccgccaggccggggagggggccgcgcccgggcctgggccaagagcgcgcgtcccccgcccgggccctgcggccctccccaggtgtctgagcagagctgctgaagctgcagaaatgtggtggcgcctgtccaccgccgcacacaaaacccagccaaaagcggcgagaggaaaagcgaatatggcgctgctgaaaatggagactccgcatctagaaagtctttctttcctttcctcttttcgctcttacttcgtcgatcttttcccccttgccctctcacgagggcctcctgcgctttccttcgggtgttctctacccctcggcccctttcctgttcttatgaataacctcctttactcggttttccttcttcctttccactcccggttcctctttctccattttgtgtcacaggcgcc

SEQ ID NO: 450975 - DNA, 954 bp, Homo Sapiens
cggatatacaccaagtgccttttgcacattctgattcagcaggggcccgcatacgtcccaaggagcacatagcacatgcacacgctatacacacgtgcacaggccaaagggcgctccgataaccgcacaggttcctgcggaggcgctgtcggcccagtctgggtgggaatgggggttgcgcaccccaggactcctaagcttcccatcgcccctattctcatagctccaatgtccccgtccctcctggtctctcagctatggtgcgccccacgcagctgcgccgtcgtcgtctgagcacccctcgcctcgcccatccgttaccgtcacaggcgtagcacggtgtccgcgggagcgtccctggcaggcagccggggcaattcagcggtgggttcggcgcaacagccttcagtggacttgacgaggagcgcgtcgggttcggcaaactcagctaaggtggagcataggcgcggcgccggctgtggggcgcccggggcctcgcccgctgggcttgggggcgcgcgggtggacggggagagctgagcggtacggggttccccgcagcgcacagacctaggcgcccgggctcctggcttcgggcactcacctctgggaaaggagtcggggagccgcggcgccctcgctcgcccgcaccggcctcgggcggcggctcctcgcctctccagagcgctgccgggctcccccagcccacagcccccccacttatatagctgcggcggcgctggctccgggcttccgactccccgggccactgccattttgggaggccccggccctgccgccgtgacgtaaatgcccaaacatggacacaggatgtgtgccggggactcccgaaaaggaaagctcgagctgtgacgttgttgttgtcgccgccgccgccaggctcgcgccgctgcatcgcgcgcgctccccaggcgatccggagaattccggacc

SEQ ID NO: 450976 - DNA, 1308 bp, Homo Sapiens
ctcttgctttgtttgttttcgcttctgctgattttgccgtgttttctgtgttttttcgctccttctttctctcttacacgtgtgaccctggccattttctatccggcttttcccgctactcgggttgtcctccgcctgtgccctttcgattcggggtaccctctgttctgctacccccttatctgtacatgggcgatccttccggatttctatactccgtccccgcagttacactcggtctcgaggatgcgactaattgtctgggccgtatgcctaaatggacctgggagcacccactttcagccatgaatccccaaagggcccagttggcaaataccatgcatattttaaccccctttataagatgagcctatcagagtccacacatatcattaggttccaccagcagcaggtcaaatttttctttcttcagaccctggatcagggcatggttgccaaccatcaggtcacagttcttagtatagtgatccagtatgtcaaacagttcgattgctgtcaatctcccagagaaaatattccgcatcttggactgtaggaaagcatctgaggtggtactgttaaagatccctgggtagcgctggaggctgtaatgattagatggggcgatgtctctgccttcagagaggaggaacactgtatggtggcctctctcgtgcaaggctgaggctagcgtcttgaaaatgtacatatggctttcaaacataattggcggcacgatgatgattttggcagccttcgctatcccaacagcactccacaggagaatgaaatatggagtgtaagacttcatagctcgtctcttggctgccccgcgcgagtctgagtgtgtgtctgccgcgtaattgtatccgggacagaagggacctgtgtttgtgcgctgaatcaggtgtcgccgccttcggtggttcgggggcgtaagggaggcttcggagttagcgtgttggctaaggagggctctctgggttcacagttgatagcaatgctttaaccgtgtcctccctcgggtcctcagcgcgcctgctcgtccgcagctcccagcgggcggccaggcccccccgccctgcgcgcggcgagcagagctggagcgcgccgctgcccttccgcacttggctcagcggggcacgacacgggccgccacgcgctcagcctagcatcactcgcctctgactgcgagcgcctccagctccccgggctggggcatggatgcagacgcgccttcgtaccacgcgctcgcaggctgggcaaggggcagcgcgttgggatccggccagtcgtccgctgagcgcg

SEQ ID NO: 450977 - DNA, 1139 bp, Homo Sapiens
ggttaccatttccctttggaaaattttcctcagggcttcttttttaggaaggaggtaacccccggttgctgaatcccagatttggggggtaactttggggaagaagtcaatccagtttatgcttagggacgtccagctgtttcgtaggtgaaggggattggcgttcacgcgttccatctgggttgccagcaagggccggcatccaggcagggttcccagctcccaatttttgtagaagatgaggctttcgtctatctcgcgggccttcttgcctgaaggacaggctgtcttctccactttcccgccggaaccgcggcgggaggatgtccgtttcaggctgccgccaggatgggtcccgagaggagcgttgccgccacgcggccacgatgcccagccggggtagcagcacttcggccgactcggccacaaagcgcccaggcaggtcgcaagccaggcctcccagagcccgcacatcagcctcgctcagcagagacccccgcacaccccagcaggccagagccgcaggcagcagccgctgtcgctcgggagcccccctcgggagcaggtccacattggccttcgtgatgcgggagaagaaacgggtgcaggcctggggccccgagaacgcatctgggttgaggaatagcagcaggtccaatgggagggcgtccaggtcctcggggggctcagagagccggtgagccagacagcgcagctgctctgttgagagcttgacattcttctgtgccaaggccacagccagctcccggacacgctccgtgctcaggccggacacctccgcacacgggaagccaaggagttggcgaggggagaggctggaaatgttaggtgggttggccaggactccgtccaggggtgcagcctcctgccctgtctctccagccagggtcctcgagggctgcacccatccgaggctgaagagcaggaacaggaggctgccgagggcgggggtcccacaggaccccaacaggggtcgagccgttggcaaggccatggtctgtgtagatcccagggagggaggcaccgtgggtccaccggtagctctctgtccgcgcgtcacagcagacgggagtggccggccctcgtgccgaattcgccacccaggcctcgcttcctag

SEQ ID NO: 450978 - DNA, 881 bp, Homo Sapiens
caggggactctctcagcctgttgtgttgttatcttctcgaatcaccatgttgtagctactgcaggctgcgacgtaaatgatagctgtgacatcgttaaagcactggatccatgtttctcctctcatccctctggccaccaacatcaaacatgtggaagtttactttgtccacttggaatcgtgtctcaaaaatcccagatgtcagaactctgcatctgaggaggtcctggtctgtgggtgtgtagtcaaccaagctgacgctgtcgattctttccaggaagtattgtgcacagtcaatcagctggtattcgttggatctctcaaagcatgccttcacgccttcatcgtcccaaagttttttcacatggtcaaagaattcctgggaatattcaaagtcagtgataggggctatgctcttgatgtagtctgatcgaaattggttttcagggttggccagcggaactggaggtattatagtactcattgctgaaacaattgtcacgatagcatctttaacatttttccggatgtccagaattttctgtttcttttcctcgggattaaacccattgacgtgcaggatcctcatctgtttgacgatagtgcttttcccagactcaccagcccccaggagcagcaggcggtgggtagccttgtaagccaggcgctctttctgcaactgcttctcgatctttttgttggcctcgcgtcgttctttttcatcgacgccctggtcttccgtcgtcttgctgttgccgcccaaacaccccatgcctgcccgctgggatggacgtcaggaagttaggaatgtgcgcaaaaagcaatagagagttggagacgtgtgcggctcctgcgacggctcctctctttcccttgacgct

SEQ ID NO: 450979 - DNA, 987 bp, Homo Sapiens
  misc_feature (242)..(242): n is a, c, g, or t
gctgaaaaaaagctcttaaagaagggatacccccaggccttttgggggtttccatttgaaggggaggggaagccccctctcaaccaatttttggaaaaattgggaggttttggattccccaaggggaggggttcaaggccggttcctgacccaagttccttagccccctggcctggggccgtggtggcccagcctcatgacagctggcaggcagggcagacttctccttcttgcccaccggngcctccctccccacaattgagcccacagagtgcaggggcaaaggtcccagcctgcggagccctttcgcctctgacgccccactcaggaacacttccagattcgagacctaacacccttgccccacaacactgaggcccttccccgtttcagaactccctggggcctcccttcccacctccttgcagggacgccccgccccctaaccagagccacctgtccttcacacaatgtcctgatcccggatttcccaaagctgctccccaccaacacccgccttcccccaccggggagctgggatcctctcccctcactctccacccagcgtccttccatgtaccttagcccgggcgacctccaaagagggcaagtctgggcgggtgagagaaggggacacgagaggccagggccattgcctccaggccacgttgttgtctcgcccgccctccggcttgccggctagacctgaggtccaccccagccggaagccgcgcggcagcagggccccagggaggtgggaggatgggctggtggggtggggcggccagcctcctgtgctccccgaaactctgggggacaaccccgcccttacccctgccgccttgcgccccgagggggtaaccggagttcccgaccgagacgctcaggtttggcgcgggccacggcggcccggagggggtgccgggcgggcggcagtggaggggcctcaccggcgggaccagcggtcgcctacctgcgagttgcgcc

SEQ ID NO: 450980 - DNA, 1560 bp, Homo Sapiens
  misc_feature (79)..(79): n is a, c, g, or t
  misc_feature (93)..(93): n is a, c, g, or t
ttacagatggaattttctattattaatgttattgtggttgttttaaaattaaaagttctgaatgtatatatgaccaaancaaacaaacaaaangggcacagtgaactcaaatcatattccattaccaatagtcccaggacttcattagacagactcccagtaattaagcctccaaatcttaaaatgttaaacatttcaacatgtattgactaattcctgtaaaatacagaaagtgcaaccatcaccaaaacgtgcattttcccaggattcattttagaatttctcatgaaaatttaataatagtatttcagttaattatggcatttgagaaaaaagatactaatggggaaagatcacatacatgctttgggtgatacgttaaaaaaacctacaataattagtagtattgccttaacatttctaaaatcacataaaaatgatcatctttgattgccatttcagtaattttgaatacagggtatgttattttctgctcactagtaatcaaaacacataaaacagacttgtaacaaatattcagagtcgattattttcataagctaaacagttccgatactttaagatttgtgtttgagcatacagtactgcaatgttggctacataaaataaaaaaatctttttaagaggaagctcaataatcagaggctgtattgcatttaaggatttaacactggctatatacaaaagggaaagcatttcaatgagaaatacttcacgttaccaagttctctcctttaatatggcaacattcagcagcttatgctactcttttatcctttggttcccagtgacaaacaatgcagtaataatgcctctggttttagttcctcttggatgacatttattagcagagagagagacctgatgctttagctgaaatttggcagcccaagaagtgcaccaactgctccaaagtaaccctcatgttctagaaacaatgcttttagttgaccttttgaccagtaatccagtgcatatgccaaaagtttcattgagagggtattgacaacgtaaaaagtttccaacaaagacaaactctgtttattttctcattaacagcacacattcgtgccacagaaccaatgttattggtgatagtaactaaagtagctcttgccagatcttctttactaacagattctcgcttctccttataaatcatattcccaaactagatgctacagcccaacctggcaaaccaaatctttcataatctcctccataaatatcacggaccagcttgtcagcattgtcgtgcatatcaccttggaccattcaagagcctcttttaaatggcacggccagtcaattgacatgcagttaacaccagaaaggctaccccctccaaggcttctcaccagtcactcgttatagtcgtcttttggaagtggagctgctagcacgacctgtaatgtgcgcgaactcccagggcatatgtccggtaccactcgactgagaaattcgtataagtgtatgctactacgaagttatgcggccgcttccattgctcaactgaatcgatgcgctcgtcgttcgaca

SEQ ID NO: 450981 - DNA, 360 bp, Homo Sapiens
  misc_feature (128)..(128): n is a, c, g, or t
accccccctgaaacctggtggaggaaagagaaaggtggctggggaccccactttcagccctggtacaggaatccaagccagggagatgaggacccaactgccggtcccgcagtgagcccatgtcactnctgacccccaggggaccacatttcggactgcaaggcctaccatgggaccggctgcctcctaactgctgggggcagcgagagggaggggtgggctgcagggggcgtgcctgggctgggagctgcttccacaggatcctggagcctgggccggatccgatgagggggagggaggtgcctggagcggtctgattcttctcaccttctggcctcgtcacggaatttttttatactt

SEQ ID NO: 450982 - DNA, 1174 bp, Homo Sapiens
  misc_feature (824)..(848): n is a, c, g, or t
agcgggagcggagcgggcggagcgggccggctggggcggagcggagtcgtccgcagagcagcccctcccggccgcggccgccgaccccagaccccggcccccggccaggctctatggacaggagctcgctgctgcagctcatccaggagcagcagctggaccccgagaacacaggcttcatcggtgcggacaccttcactggcctggtgcacagccatgagctgcccctggacccggccaagctggacatgctggtggccctggctcagagcaacgagcagggccaggtctgctaccaggagctggtggacctgatcatcgtgttcctgtgttacggggcccgcctcaacaagtgggtgctgcagacctaccaccccgagtacatgaagagcccccttgtgtaccaccccgggcaccgtgcccgcgcctggcgcttcctcacctacatgttcatgcacgttgggctggagcagctggggttcaacgccctcctgcagctgatgatcggggtgcccctggagatggtgcacggcctgctccgcatcagcctgctctacctggcaggcgtgctggcaggctccctaaccgtctccatcaccgacatgcgggccccggtggtgggaggctccggcggggtctacgccctgtgctcggcacacctggccaacgttgtcatggtaacgggcctgcccggtggggggcgtggggaggggccccaggtgagcctcaccacttctcgtctgcacacacccatagaactgggctgggatgagatgtccctacaagttgctgaggatggtgctggccttggtgtgcagtgagtnnnnnnnnnnnnnnnnnnnnnnnnncctctcagcctgcagccagggcacctcccacctgccgcgtccctctgcagtgagctccgaggtgggccgggccgtgtggctgcgcttctccccgccgctgcccgcctcgggcccacagcccagcttcatggcgcacctggcaggcgcggtggtggggggtgagcatgggcctgaccatcctgcggagctacgaggagcgcctgcgggaccagtgcggctggtgggtggtgctgctggcctacggcaccttcctgctcttcgccgtcttctggaacgtcttcgcctacgaccttggtgggcgccagatccccccacggcctgaccgg

SEQ ID NO: 450983 - DNA, 840 bp, Homo Sapiens
cggggcccgcatgtcggtgatggagacggttagggagcctgccagcacgcctgccaggtagagcaggctgatggggagcaggcggtgcaccatctccaggggcaccccgatcatcagctgcaggagggcgttgaacccccagctgctccagcccaacgtgcatgaacatgtaggtgaggaagcgccaggcgcgggcacggtgcccggggtggtacacaagggggctcttcatgtactcggggtggtaggtctgcagcacccacttgttgaggcgggccccgtaacacaggaacacgatgatctgggcaagagtgaccgaggccatgaacacggggggtgggcagctgcggtgacggtagaagtaccagcggcggtccacctcacaaggcaggatctcgtaggccacgtaacgcacaaaccgcttgtagacacctaggcctggctcatccagcggcccgtcccggggcagtgcccgctgtccgttagcaatggcccgcttgaaactgctggagcgcttgctgctgatcaggtccaccagctcctggtagcagacctggccctgctcgttgctctgagccagggccaccagcatgtccagcttggccgggtccaggggcagctcatggctgtgcaccaggccagtgaaggtgtccgcaccgatgaagcctgtgttctcggggtccagctgctgctcctggatgagctgcagcagcgagctcctgtccatagagcctggccgggggccggggtccggggtcggcggccgcggccgggaggggctgctctgcggacgactccgctccgccccagccggcccgctccgcccgctccgctcccgct

SEQ ID NO: 450984 - DNA, 893 bp, Homo Sapiens
ggcaaggggtttggtgtagtggcagaccagtgatgaacctcaggaatggtggggaaactctttcttcattgcctttgtactgatgggggatcagtcgcttctgaaggggcacctggagagagggctgagtgcaaatttggttctggaagtcacattccttgctctgcaggtaatcatcagagacaacctccagccattccggcggcacctctttttcgatgagctcactagcaatagaccagacacaggtgccaggcaggacatcgcggtcagacacacacaacttcagtcgatagtttgtctgttccagttgccggatcatctcctgcacaaactggatgtcgctggggcaatagcagatgaaggcatcgaaacgctcaggcatatgccccagggggtcatcaagtgtggtgatgcccgccagctctgctgtccgtgggacactgctgtctacagcggccacctgtaaaggcttctcagcctcctcctgctgctgcttcaagatatacttttggcaatcctcctcaatgctgggtcccagctccagcagcacgtcgtcgcggcccagcttggtaagcagctcgagcagtcggcctacagaggcgccagggcgtccctgccaggcgtccagcagcctgccagtggggtccgcttgtgtctccagttgccggatctccaagtactcaaagtccatctcctccgccagcgcggtccagtcggccgccacctgtgtccgcacgttcaagaacagagacaggcggcgccgcactcgcatgttgagagcagccaggggaagggaggatgtggaggagaccggggccgcagaccccgcgccgggacctcctgcagccatggcgggcggtcctggagcctcagcgcggtcgggtcgcact

SEQ ID NO: 450985 - DNA, 1018 bp, Homo Sapiens
  misc_feature (47)..(47): n is a, c, g, or t
gatccaatatctttatctccatgaatatctcctttccctctttcctntaagatatttcccactagtttcctttctagtttgctgccaaataaaaaggacgcatcaggtttcatctgagtaaactgcttccaagcacttgatgatgtaagcttgccggttccaggcctatgcatagcagccagagtataaatttctgcagtgattttttgcttggacctcagaagagccagcgtggtcttggctgttcaatcctgatgggtttggattacaggaactaatgcaccatgaagcataaaccgaggatttgaaggtggcctgttgcacataattgggttttgtataattcaagaagcacctactcacagtagttgttgtccgcagactggggaactgaagaatctgctggaaatctgccatgtccgtgagaagaagagttgagtctgccacgttcccgctgggggcagaggccatgcggaccagcatgccaacaggccgcttgtggcccttcccttcctcttccagctgaccatctcctgctggtaatgaagaactctgtgggctcatgctcatgtccgatgccgtctcatcgatatctaattcatctgaagattctttgctttcagaaggcccactggacttctgccccggaagtggtgcccgggaaccggaaagcatctccttgctgggcgggaatggctccctggaagacgggctaacagaaggatagtcttgagatgaggagggcgacagcgaggagaaggaagatgaccctgactgcaagccatcttcttggctcagaagcacatccttgtcgaaccagctggggtttactgggggcgggagaggtcctttttgatgtctgagttggtcagctccacagcactaagctcctccacaatctgtccgtacatcttttcttctttgacccttttctgctgcttggtttccatgaagagctccaagctactggctggagaaagcattcgctcgctacctcccagggtggccagctgtcgag

SEQ ID NO: 450986 - DNA, 1178 bp, Homo Sapiens
catacaaaaatagatccatttgcaaaacaatttctcagccaggaggctccacctcccatttccttgtagacagagggtgaggtgttgggatggtcacagtacaacccatagtccagatgagatgcaccaaagctcagggaaggcatgaggagggaaggtggctcagtagcctggggttggtgcagagcgtccagagaggcaagggcataaagcgtggcagaagctgggggcaggtcccacactgtcgctatgccctgcctgcctgcccacaggctctggcctgggccacagcacagcagggaaactggtccagatcctttgctttggaggcctttcccaggaaggtggggtaaaggtgggatttgctccctgcttccttaggagcagctcccagtgccacaccactaataataaataaccacagccaggagagggaagagcagagacaacagcaatgaaaggagggatctagcccaaaggtttacaagccccatgctattctcagggccagagaaaccacaaaagaaaagcacaaatccagcaagactgacctaggggggaaagcccattagaaagtcagggctgagaaaaagcaggctgggccttgtctgagatgaggccctctgagtaacagagaggagacagggttaaggcagcaaacatggaccctgctttggtaatacaacagccagggctggctaagtcgggctcaggcctcccctgcactgccctttccttctggcctccaggcagctgaagctgtatgtgatgttgagagagcagcaggccagagagaaagacagggtcagggtggtgggagtggccaccccagaggaatatccccttgagcctttaggcacatgctgcagggcaggacagtctgcggctccgctgaggagctgccgcggtcacaggacccacattagcttgcacggccaaccaactccttggcttcctcaaggattgtggggaatgtctcactgttcttggacaccttggcaggaacagcagccatggcatcatccttggtcagctccgaagctagcagagatgtgactgcacacccggccttcctgttggcttgacggggccctctcttccgtcggaatgctgcacctgactgcagggcttctagaagactgtccatcacacctgtctcatcgccctctgcattcatg

SEQ ID NO: 450987 - DNA, 773 bp, Homo Sapiens
  misc_feature (158)..(178): n is a, c, g, or t
  misc_feature (675)..(705): n is a, c, g, or t
aagaaccattaattgttttatatgcattgtgttgcaacaacctttgacatagagacttctattttctcccttaaaattaaagtaactaagcttagagatgtaacttgcataagatcatacacatcaaagcagtggtaaagaataaaaaatttgtgtcnnnnnnnnnnnnnnnnnnnnnatgattcagctattaacaaaattgatacataaataatttttttcctctgttttacagagtaaccgaaaacatggataagatcccaggaagacaagtgcttctaaaccttcaaagatggcaaaattgtttacaccagtgagagggagatcaaaagctaagaactaccctgtagccaggggctacaactgtgtattttaaagccattattcaaggtttcttacttgacagttcctacacaaccctgttgaaaatctacaatatatgctgcatttaatgaaacatgtatatgtcaaatcagaagagaagaactataaacatatattgtgtaaagaaaaagttcagcaatggaactagtttctgcagatcaagcaaagatgtgtcttgggcatggaaccaaagttacaatgaaatattcaacccctgctgtgcaggggggtcattttaatgtaacaccacaccccatggaaacactagtcctgataataaacatcattttnnnnnnnnnnnnnnnnnnnnnnnnnnnnnnnagggtgggtggggagtgaagcacgaggaatacctatgaagagctatttacaataaaatgtttcatttg

SEQ ID NO: 450988 - DNA, 1126 bp, Homo Sapiens
aaaagggggttttggggttggttaaaggaatttttttggattcgttaaaaggtgaaaatagtccaggcataaggtggcccttgccaggtcaaaactaagttggtccagggtcaaaatgtattttatttcgggattatgggatgatgggtaaaataatttttacttggctacttaaaactctttcggtattttccaaaatcttcttcaaaggagctttgtttgttttaatccagaaaaacattccttgcatgccagttgttagagagatgcaagagaccagtgtgagtacatgggcaggccagatctggcaggctgtagacaaatgggaaccaaggctcattatgaagacagagagggaaaactaagtgaagcactaggcctcccctgcatatggctggctgttaggtatgctttacatatactggttcttctcctttagtaccctgatggtttaggccaggtaacaagaatcccactttgctttttgttccatgtcaatcctcatgacgtagctgttgtggcattaatgcgtttcaccatgacttcttcatattgtttttgtgtcagtaacccttctgttatgcttttactttcttcaaatttgggtaacacaactgcaatgtagccttcagtagatggcttttcttgaagaatagatggcttatggaggatgttttcattcacttccatcaaacgtcctctaacacaactagacacagtatattcttcaccatctgagcagtaaatcttacagagaggtgcaagctctgttagaaactgtgccccccgcttaaatttcccagagaccttgttctgaagtctgctacagttggtactgatctgataggaaatgcttttaattgtttttccactttgaagaactggatgagattctgccaatgtgatgacacatattcggttagagtgctgtagtatacagtggtcctcacaaaattttcctttgacatccggtttgtaccagcgagtgaagtatcgatccacgagcgaaggcaccaccggctccgcggcttcgggctcggtagccatggcgacctccggcgccgccacccccgccctccgggaccccagcgcttcctccgcgatcccgggaattccggaccggtcc

SEQ ID NO: 450989 - DNA, 910 bp, Homo Sapiens
gttgtggttaccctcgtgagttctctctgtggtggggccacatgggtccccccgttctccctgtcgcagggcgttcccacttctgcccatctggcgcttttgcttcttggggaccctcggtcgccacggtaatcgcaaggcgggtcatgcgctgtttcctctcgcggggggctcaagccatgaacgctttgcggccccgctcggggcgtgcttttcgtgccgcttcataggacccaccgtcagtggccagcggttttcttccggcacggtatcggcatctcacgggccccgggagacctaggggtgtaccggcccgcacaaccccttggtgagcccggaggccctctgggtgggaaatggacggcaaggggactgggccaagggttcgaaagggtaacgcaagcccccccaaagggtcgagtcacggaaggagagcagcatggaggaggccgctaccggcgctggaatgatggctcgtagctcccggtagccagatcgtacccgaggtcatccagccctgcaggccaacggggtgggcctgggccctggcaggtcccgattggcagcgggggtgcgggcagacagaacgctgggaagcccagccacaccgctcaaagcggggtgacaccagtgcccctggccccagtgcctcggcagaacgggtggcccggctcaagtagtcatctgagcgagctcggtgccagccctccatggcccagctggctcaaagcatcctgggaggtggagcagggccacagggcggggggcagccacctcctccaaccggtcactgggaggcgctgcagggcccggggggccatggctgggcaccagtcatctcaccccagcccggcaggggtaccatggtttgacagccagtgtgacaaggcctgcatggcactccagtctg

SEQ ID NO: 450990 - DNA, 909 bp, Homo Sapiens
acccagtgagcccatacttgctctttttgtcttcttcagactgcgccatggggctcagcgacggggaatggcagttggtgctgaacgtctgggggaaggtggaggctgacatcccaggccatgggcaggaagtcctcatcaggctctttaagggtcacccagagactctggagaagtttgacaagttcaagcacctgaagtcagaggacgagatgaaggcgtctgaggacttaaagaagcatggtgccaccgtgctcaccgccctgggtggcatccttaagaagaaggggcatcatgaggcagagattaagcccctggcacagtcgcatgccaccaagcacaagatccccgtgaagtacctggagttcatctcggaatgcatcatccaggttctgcagagcaagcatcccggggactttggtgctgatgcccaggggggcccatgaacaaggccctggagctgttccggaaggacatggcctccaactacaaggagctgggcttccagggctaggcccctgccgtcccaaaccacaaccatctgggcccgggttcaagagagagcggggtctgatctcgtgtagccatatagagttgcttctgaggtgtctggcttatgtatagtagaaggtgggcagggaggagctgaggggctggggctggggtgtcgaagttggctttgcttgcccaggatgcgccatcctggggatgtcatcaccctggggaaccgcgagtgagccctggcttcacagaggtcctggcatggtttgggaatctgaacttaatggtgctttctgctaaaatcccaagcggaacttcttccatactccaacatgtggctggtacgccaaatccaagccattaataacacctgaaagtagcaattgtctgaataatcacctgtgccca

SEQ ID NO: 450991 - DNA, 1599 bp, Homo Sapiens
accccagaatgattcctgccattcacaaatcatgctccaccgccccatggttttacttgtgccctaaaagatcagcctagactaatacataaatagaaaataactctggccttgaaatgaggggcagacaagtatttcatcctcagtacttataaatcacaaagaaatgctgaaattaatggtctgtctccttttactacaaaggagatcccatgagttaaagtcatgcaaacaaagaaagtcaaaaagatatgggtagcagccacctttccataccccgccctggattttcaaggaagctttttcactcccttatgcctttcaaacaaaagttcatcagtttgaagaaaaagaaatggctctaaagttaaagagtccccagagataactaacagtacatgaaataggccctatgtgggcaaaaggacaagctgcagaaccagttaagacagaagaggcagcccaaggtcttactaaattacagttttagcatagtgtagcacaacatgggcagccctttttgccatccaagcgacaattcaggctcatccacgtctggttcaaaagattactgaagtctgggctttcatctttggtaccacctcatgagttattcttggtttgcagtaggttcaaagaaacagaaaagctggtacctttgccttgtctgtgagtacaaacgctgggactctgattgctgcaaccattgaggccaattaaaataatactgtaacacacaggaatgatgcatccaattcctaatttccagataatagcagccatgcccctacagaggcgggatcatccatccccatcgtttaaggccttcggtttgttgtcctcagagtagaatagaacactgtgttcccacggacaaggaactccagatgaacccatggtctacatttggacagaattttaagtaccagatatgccaggcacagaaagaggactgacctgtggccatcatgcttggagaagcttctgttttggcacacaaactagaaacttcttagtgtattctggttttagttccctttcctgagtgaagcagccagggagtgaccaggttccataagccctcaatctgatacttggcattaattctctccatggtcttcttccacccaagctacaattttcccttcccatccagggatggcatcatcatcatggaaaatctcctctttgacagtgccaaactcaggatccagtgctttgaagtgataccggtgatttccttcccgatcaatagctgctttaaaatcctttaacgtcacctcctccaacctctttggtatattgaccatgaagggcgtaagtgaccggtcagtgaaatagagcactttagtacaggtgctgctgacagttggagagctctgtgagtgaggcaactttgagttagggggccaggactcccggtattcactacctacttgagttctgggtgacttgacccgaacctttctttcttgtttcttctgcgtctccataacatgcaggcgctccatgaggctagaaatgcctgctccaagctgtcaattagtgtggtgctggagcctcgtgccgatttacccccagcctcgtacctagcctaag

SEQ ID NO: 450992 - DNA, 792 bp, Homo Sapiens
  misc_feature (380)..(380): n is a, c, g, or t
cttgtcagaaattgtcaccataatgcgtggtaccttgttcctattccagtagattgacacccttaatacttgtaatggcttagaatcatcaaagtttatccaagttctggattagaagaaaattagaggtttttctgccgaatcttgtttggcgaacacgcctatatcttcagttgaatgactctgacgagcagacgtccccgcccggccaacaccccggctcgcggggggtacaagtagcctaattcacatttctcaaaatcagtgctaagagagggaagagggggtgtccataaatggcatctttatctctctttaaagcgtcattgacagaggagcccatgctgggggccatggcgttggtatgagctgtgtgcggngtactgatgcgagtgcagaggaggcccgtggttcaggtggtggaccggctgcatggacctggctgcatgcgggtccccatacatcgtggaggggatgcctactccatccatgcccccgtaatggggtagatcgtcgtactgcatgacaaacaggagagaaagaaggttcaggaggccaggcgggcaaatgggagaacggcaaggcaccgagcttatataaggtcaatacagctgggtccttccacccggaattcggtggccttgcattctattaaagctgagtttttcttattttaaaattaaagcttttaagtaaaaaatacagatttttcagcgagactcgtctgggatgaatgatcttgccctaacttgtgtccctatcaactagtttagaaattcaggctcctttggc

SEQ ID NO: 450993 - DNA, 1074 bp, Homo Sapiens
  misc_feature (854)..(854): n is a, c, g, or t
  misc_feature (911)..(911): n is a, c, g, or t
  misc_feature (922)..(922): n is a, c, g, or t
  misc_feature (980)..(980): n is a, c, g, or t
  misc_feature (1043)..(1043): n is a, c, g, or t
gggagagctcgccactccttagtcgaggcaagacgtgcgcccgagccccgccgaaccgaggccacccggagccgtgcccagtccacgccggccgtgcccggcggccttaagaacccggcaacctctgccttcttccctcttccactcggagtcgcgctccgcgcgccctcactgcagcccctgcgtcgccgggaccctcgcgcgcgaccgccgaatcgctcctgcagcagagccaacatgcccatcactcggatgcgcatgagaccctggctagagatgcagattaattccaaccaaatcccggggctcatctggattaataaagaggagatgatcttccagatcccatggaagcatgctgccaagcatggctgggacatcaacaaggatgcctgtttgttccggagctgggccattcacacaggccgatacaaagcaggggaaaaggagccagatcccaagacgtggaaggccaactttcgctgtgccatgaactccctgccagatatcgaggaggtgaaagaccagagcaggaacaagggcagctcagctgtgcgagtgtaccggatgcttccacctctcaccaagaaccagagaaaagaaagaaagtcgaagtccagccgagatgctaagagcaaggccaagaggaagtcatgtggggattccagccctgataccttctctgatggactcagcagctccactctgcctgatgaccacagcagctacacagttccaggctacatgcaggacttggaggttggagcaagggccctgactccaagcactggtcgccatgtgctgtcagcagcaactctccccgactggcacatccccagtggaagttgtgccgngacagcaccagtgatctgtacaacttcccggtgtcacccatgcccctccacctctgnagctacaccanatgaaggatgaggaaggggaaattacctgagggacatcatgaagcctcttggaagcantcgggagtggcacccaacaaaccggggaattgggaagggggtacctactcaatggaccctggnagtccagcccaccttctggtctagggaagat

SEQ ID NO: 450994 - DNA, 887 bp, Homo Sapiens; identical to SEQ ID NO: 151832
  misc_feature (635)..(685): n is a, c, g, or t

SEQ ID NO: 450995 - DNA, 137 bp, Homo Sapiens
cccatcctgagcccgcacacctgcccaagctgatgccaacaccactgacactggcgggcgggcaggtcgggcttcctgccagccactgaatcatccgtacatccgccgcactgccggacaggctcagcatcccatac

SEQ ID NO: 450996 - DNA, 805 bp, Homo Sapiens
ggattaatactggtccccatgtcctcttcgttctgccagccctctccacagagaatctgtcctgaccattctctcgataagcttcttccacagcatgccatcagaggtcactcggtaccattccttgcacacaagttcagcagcacatagtgatttggcatccaggtatgacagaatgttctcagcaatatgatccaatccccgagctggcagagcagttatgaaatctctctgcaacataggtttaagatacgagtttatgtgcccatgttggtaatgacacatttgggatataacgatgttccacaaattccactttgatctgactctgaccactgctcataatgtactttgacacacagttccgttttccttttcatagcttgctgagagtttccgttgcttgggcacaatcatactggaagtgccattggcaagttttgttttggccacacaattctcagtcttcatagcagtgcttgctaaacatactgtttcttggtttaagcagagtctggcacagctgttgtatgtctgtctaagtgaattcttctctggtattatcttcctagggggttcgccattattacagtcttctctctctgaggaattctggaaagctgtgagtgcgccagtccctgggttatacaggcatcgcagcgaaggcatgctgtccgccaggctggagcagcccagccacagagacctgggcatagagcacataaacttgagtgccttctcttgcagcaccgcctcggccgggtccataatcgccgaggccactgggtccgctctccgccggggc

SEQ ID NO: 450997 - DNA, 596 bp, Homo Sapiens
cctttccaaccagaagaggagaaggcaagcgaacgcatcgggcctcggagcccttcccggaccgccgcgccatctttgtctggagcgcactcgaactacggcgtctgggactgtgagaccccgacgccgcagaccggccgggcaccctcgggcgctccgactcggctctagactccgcaccggggcatggccaccgccccaagttctctctgcggccgcggttccggcactcaagcgtgcccccggtgcccgggccgctccggagcacccgtcgggggccgcaaaccccgcgcccatccgggccggccggcccgccctcgctagctgcgaactccgccgattcgggcaaggtgtacccagcctgcgctcttcgtccgcccggggcacgccgagtgccgctaccgacaccggccgagggcagtgctgccgctgcgcctggaagacaggcgttcagccccgcagcccgagctcggtgccggcaggcatcttcctctgggctcggagcgcaaagccgtagacctcgggctggacggcgcggccggccccgcgctgggaggccccagtgcgcctcgctgtccccacgccgcggccagaga

SEQ ID NO: 450998 - DNA, 1035 bp, Homo Sapiens
gacgggggctggaacccggcgccgagagtagagaaaaggggcctctggtgaccgcccctacctggcatccctctaacccaggaggagcgtggggaaaggggctgtgggcctctcggggagcgagctgcgggtagcggcgcactgggtacaggcgcgcgcttggctgtcgcctctgccgctgtgtttgggaggactcgaactggcgccaggaaatattaggaagctgtgattttcaaagctaattatgaaaacatttatcattggaatcagtggtgtgacaaacagtggcaaaacaacactggctaagaatttgcagaaacacctcccaaattgcagtgtcatatctcaggatgatttcttcaagccagagtctgagatagagacagataaaaatggatttttgcagtacgatgtgcttgaagcacttaacatggaaaaaatgatgtcagccatttcctgctggatggaaagcgcaagacactctgtggtatcaacagaccaggaaagtgctgaggaaattcccattttaatcatcgaaggttttcttctttttaattataagccccttgacactatatggaatagaagctatttcctgactattccatatgaagaatgtaccaaggaggaggagtacaagggtctatcagcctccagactctccgggatactttgatggccatgtgtggcccatgtatctaaagtacagacaagaaatgcaggacatcacatgggaagttgtgtacctggatggaacaaaatctgaagaggacctctttttgcaagtatatgaagatcttaatacaagaactagcaagcaaaagtgtttgcgagtgacagcataaagacggaacacaacaaatccttcctgaagtgaattaggaaactcccagggagtaatttaagaaccttcaaccagattcatggtattcctgtggtacactgacggccattgttctatgtgatttattgcacttggtttccccctgttggacattatttcctgcatggacaagatgtcctacagtggccctc

SEQ ID NO: 450999 - DNA, 1142 bp, Homo Sapiens
tggattgtgatgtaatctttatttcttactctgagctccagttagaaaagtttgacaatcattgttatagagctatgttcagaaagtggagactttctgactcactgtgagctctgctgtatctatgcgctccctggagagggacaacttgctaaggtacagtcctggccattggcatggatatttattgttccacatgttgggaaaaccatgtgcaataaaaatcaaacatatgaaacaatggctgtcattgtaccacagtatacattgtatcttggtgaagggttcttaaattactccttggagtttcctaattcacttcagggaaggatttgttgtgttccgtctttatgctgtcacttgccaaacacttttgctttgctagttcttgtattagatcttcatatacttgcaaaaagaggtcctcttcagattttgttccatccaggtacacaacttccccatgtgatgtcctgcatttcttgtctgtactttagatacatgggccacacatggccatcaaagtatcccggagagtctggaggctgatagacccttgtattataattaaaaagaagaaaaccttcgatgattaaaatgggaatttcctcagcactttcctggtctgttgataccacagagtgtcttgcgctttccatccagcaggaaatggctgacatcattttttccatgttaagtgcttcaagcacatcgtactgcaaaaatccatttttatctgtctctatctcagactctggcttgaagaaatcatcctgagatatgacactgcaatttgggaggtgtttctgcaaattcttagccagtgttgttttgccactgtttgtcacaccactgattccaatgataaatgttttcataattagctttgaaaatcacagcttcctaatatttcctggcgccagttcgagtcctcccaaacacagcggcagaggcgacagccaagcgcgcgcctgtacccagtgcgccgctacccgcagctcgctccccgagaggcccacagcccctttccccacgctcctcctgggttagagggatgccaggtaggggcggtcaccagaggccccttttctctactctcggcgccgggttccagcccccgttatcccgggaattccggaccg

SEQ ID NO: 451000 - DNA, 825 bp, Homo Sapiens
  misc_feature (393)..(393): n is a, c, g, or t
  misc_feature (432)..(432): n is a, c, g, or t
ctttcgatggatttaaaatggggaatttccttccagcactttcctgggtctgttgataccacagagtgtcttgcgctttccatccagcaggaaatggctgacatcattttttccatgttaagtgcttcaagcacatcgtactgcaaaaatccatttttatctgtctctatctcagactctggcttgaagaaatcatcctgagatatgacactgcaatttgggaggtgtttctgcaaattcttagccagtgttgttttgccactgtttgtcacacatgaaatcacatttcctctgcgatgcctccttttccccatctctctccacctgggggccagctgggaggtctgctgtagcttatcacaacaggccagttatttgtctcttctgaccggnactgtgaagtccaggagaaaggggcactgagttactccntctttagatctagtttttgcagcatcgaggagatcacacgggagggaggcacttctcgattcagtcatttattgaaagcgtgttttaacctggggctcatgtctgtgaacataagtcagggcatctgtgaaccactgattccaatgataaatgttttcataattagctttgaaaatcacagcttcctaatatttcctggcgccagttcgagtcctcccaaacacagcggcagaggcgacagccaagcgcgcgcctgtacccagtgcgccgctacccgcagctcgctccccgagaggcccacagcccctttccccacgctcctcctgggttagagggatgccaggtaggggcggtcaccagaggccccttttctctactctcggcgccgggttc

SEQ ID NO: 451001 - DNA, 1226 bp, Homo Sapiens
  misc_feature (1094)..(1185): n is a, c, g, or t
gttctccctccccccatattgttggtgtgttgttgctttctctcttctgttggttcttgtctgcttccagctgggttgtttttgttttcgccttcgacgtctgtgtctggtttatgctgtcgtcggccgcttcgcttcgtctcgtttatttagtccttgcttttccctttgtgtgggctccgtctcttcttttttgcatttcttctttgttttgtcgtagttatcttattctgtgccctctcctcctcgcgtgaggtgtgtgtctttcttgtgcgtctccgtctccctctctttttctcctgttacttgttcgtgttctctgcttttgttctgtttgttctctcttgtctcttcctatttttgttattcctatctgcttccgtttcttctctctttttcttctttggtcttgtgtttgttgccacgcccaaatttttttgtttgaaactgaatgaagaaacaagaggaggggctggggaagggctggaagggcgggcagattgtgggaccagactttcccgaggctccagatgaggcctttggaatacaacgctcaaaactcatcttgccgctcttgccttctgctcacaaggtttcatagccaggacggggaccgccacagtgagcacccaggctcagggcacctgtacagagcaagaggatagctgagacccagcccaggtagaaggaccaggagaagaaggtctggatctgggggtgtggaggctggtcccaccgctcgctggtgtacaccgccatggccaccaccatggagatggctgcagcaaaggctgcggtggttgagacaagcgggccgtggcctggggggaacagtgaggggaagcaggacaggaccaggaagctcacggacaccagggcccacagaacagccataatgctgaaggtctgcgtcacgtggatgtagcctgatatgatgtccccatgccctgttggccagaggcccgagtgagctgagtgggtgggacccacagcctcaaaccagaaatcggtgctcaaagcaatcaggcagaacatcaggcccagggagccccccagcagggccagggaccggcagagctccatggggataagcnnnnnnnnnnnnnnnnnnnnnnnnnnnnnnnnnnnnnnnnnnnnnnnnnnnnnnnnnnnnnnnnnnnnnnnnnnnnnnnnnnnnnnnnnnnncttagagcccaagaaagagagaacagcaagcagttgggccc

SEQ ID NO: 451002 - DNA, 815 bp, Homo Sapiens; identical to SEQ ID NO: 151837

SEQ ID NO: 451003 - DNA, 611 bp, Homo Sapiens
  misc_feature (598)..(598): n is a, c, g, or t
tggactatcgtctgttctctttcaccaggttcctagcttagccactaggtcttccaggtcctccagagtttcttcaacccatttcttctctcttctgctttacatgcagtgctccaggatcttgaagcgtcatagccaagatgctgagtgggtttacttgagtataagattgaaaggagggaggaagaggagagggaaagtgcagaactggtcccagcaaaggaccccaggttctggcctgggaaattggtgactattgctctcaaccattcttactttgaagagttgggttgcagagggagcaattcatctctcttgtccctcttccacgttaaggcttctcatctccccttggctctggaacttatgcaagtttctaccaggaccataggaagcaattcagagccagaggccttgttattgctaccagccatgtggtcactctccccaaatctttgtcttccagatccatctggaccagaaccaacatcatggaaggtgtcacttggcccttcctaaagtccatggcgtttctagaggctcttttgcctgctggttatgcatctcaaatctgacttccttagccttcacctccctnccttggccctaag

SEQ ID NO: 451004 - DNA, 708 bp, Homo Sapiens
  misc_feature (314)..(338): n is a, c, g, or t
tagagatagtttttagaggtaggttgttgtgttttaggattctgtccattttcttttaaagttataaacacgtacttgtgcgaattatttttttaaagtgatttgccatttttgaaagcgtatttaatgatagaatactatcgagccaacatgtactgacatggaaagatgtcaaagatatgttaagtgtaaaatgcaagtggcaaaacactatgtatagtctgagccagatcaaagtatgtatgtttttaatatgcatagaacaaaagatttggaaagatatacaccaaactgttaaatgtggtttctcttcnnnnnnnnnnnnnnnnnnnnnnnnnccccagaggggttttataggggccttttcactttctacttttttcatttagttctgttcgaattttttataagtatgtattacttttgtaatcagaatttttagaaagtattttgctgatttaaaggcttaggcatgttcaaacgcctgcaaaactacttatcactcagctttagtttttctaatccaagaaggcagggcagttaacctttctggtgccaatgtgaaatgtacatgatcttatgttttacctgctttgtggatgaacacaatatttctgagtggaagtattttcgacaggtagaccatgtcttatctcgttccaacaataagtatctctgattccgtacacatgaccctatcacactatg

SEQ ID NO: 451005 - DNA, 968 bp, Homo Sapiens
tcttggcatggcgataagattgcagataagggattgaaagtgtgcccggtgttctctccagccggttctttagtgtgcgcagacacgggtgcccaggaagaatttggtttccaatagtgattctggaataaagtgtaaggaagttctccattaccatgctgtaattcttggttgctgataagttagtatccctctctgatgccggtcctctgtttccagggaacatcttgacaaagctgttccacatatccagtcagcttctttcacgtcaacaaaggccaggatactaacagaccctagatacacctgtgggtgacaggctgatttcatacacaccctctctgtcaatcactcgtggctcaggagctctacgtactacctgctgaggttctttgaacacaaactctctgtcagagagatgatgctctttgttcttccaggtctggccaggcttctggtggagatggctcttagcagtggtagctggctgagcaatggcctggcttttaacaggggcagcccaggctccctgaactcgggctcgccgtcttttttcctccatgttgaccaaaaaggcttctgctccgagctttcagaagattttgttcctgtttcaaactactccatggtatctttctgagccccagtttttcctcagtaaacagggcagtcactttccgcacggttgaggtgcagactaagcgagctccgcaggtggaagagcttggtcgtggataagggcacttccttttcctaatttagatccttctctttaaggaggcctagaatgaggccccggaggtcgcccaggaagagacttcaggggtggtactcgcacccccagccccgcgcacccagcagtaagtcaggaaggcgcacttgcgggcggagccgggcgcgcccgtgcaaacccggtaggacttggggcagccctcgcagccctgacccactccgcagtctgtgatccc

SEQ ID NO: 451006 - DNA, 2558 bp, Homo Sapiens
  misc_feature (42)..(42): n is a, c, g, or t
  misc_feature (107)..(107): n is a, c, g, or t
  misc_feature (209)..(209): n is a, c, g, or t
  misc_feature (239)..(239): n is a, c, g, or t
  misc_feature (242)..(242): n is a, c, g, or t
  misc_feature (362)..(362): n is a, c, g, or t
  misc_feature (451)..(451): n is a, c, g, or t
  misc_feature (502)..(502): n is a, c, g, or t
  misc_feature (525)..(525): n is a, c, g, or t
cggggttgaggggcggggagaagagacgcggggcgtatatantggcggtggaaaagagtgttatagactggaggggcgcgtgtttattgtggtaatgggtcgggagnacacaataattatcgagcggagaggagttggtgggcacccaacagacatagaatcttctcgtgagacggccgccgcacggcaattatgagtgcacacttatntttgtgtggtgcgtccccgcgcgcggcgtnttntctccctcccgctgcgcgtcagagacaataatagtcgcgtgcaccagcgcgagaaggggtggacaccacacaaaggtgatgtgtcgtggggtagaacagccacgggcggcggcggaaatnaaatacaaggaagtgtggcgtgacgcaaagacaagagcggcggggtcgcaataagtataaggctctcttccacagaagtgatagtggtnggcgaggacggggccacactcgttaaatagagaacaggccgcggtggcaangaaccacgcggtagcggcggcgntcaggcgaaaacacagacacgcgggcggtagaaggacagggcgtgagagggcggagaaaaatttgtgagacgaacgggcggaggggcgccggcgcgcaagaggcgccgcgccctctgtttgtgggataggaagatcccgcaggtgagttgaggccctcctccccagggaccccgccctgccttagggaaatttgttgtttacagagccgcggtgtgtgtggttaacacccgcgggggggttttttttatcggtgggaagaaaagccgcgaggaccctatggggcgtagggcccgggggttttgtggggggaaaaacaagatgggacaaaagggttattgtgccataagggagaccgccgcggccaaacggggggtgttttggaaaagtttttgggaaagcggggggaccggaccgaagaaatttctaggctatagaggggataggggttcccgcggggaccattacgattcggcggttcgtgcttgtagtcgttttgcgatcgggttttggtgagggaaatattggagatgtttcggattgtggttgtgtcatgagcactgccacatagattttaatttgcctaaagatgatagcgattttgagctgtggttagggataactgttcccacagtagacctattaccaacatgagttgctggctttcatttaataggactccaagctggcaaacaaaccccaccatcttcccaacagccacatcatgagatctagcagcaccagcctcttgaagtggcttctcagtggaaggtttgctccgtttcagtgaagcttctctctcaaagctctgacgtcaccagggtgcccctcgagggtctggatagactgtccgaaaggtcaggttcactctcggttctctagagtggtattctttgggcactcgatgctgccagtcagcttgtgtcgctccttccatgattaacaaggtaccatgatccaagggtatcttcactctttccacatatgtgtagtctccattctcttctggtggtggcttctttctcatctcaaaatgtgcgtgtggcaccaaactttagtgaagccattatggggcacctccctagtgaggggttcatcatcactgtgccagtccacgctgtccttctcattgcgataaagattgcagagtaaggagttgaaggtgtggccagtgttctcttcaatgcggttctttagtgtgcgcagcacagggtgccacctctctgatgccggtcctctgtttccagggaacatcttgacaaagctgttccaatatccacgtccagcttctgttcacgtcaacaatgccaggatacaaacagaccctagatacacctgtgggtgacaggctgatttcatacacaccctctctgtcaatcactcgtggctcaggagctctacgtactacctgctgaggttctttgaacacaaactctctgtcagagagatgatgctctttgttcttccaggtctggccaggcttctggtggagatggctcttagcagtggtagctggctgagcaatggcctggcttttaacaggggcagcccaggctccctgaactcgggctcgccgtcttttttcctccatgttgaccaaaaaggcttctgctccgagctttcagaagattttgttcctgtttcaaactactccatggtatctttctgagccccagtttttcctcagtaaacagggcagtcactttccgcacggttgaggtgcagactaagcgagctccgcaggtggaagagcttggtcgtggataagggcacttccttttcctaatttagatccttctctttaaggaggcctagaatgaggccccggaggtcgcccaggaagagacttcaggggtggtactcgcacccccagccccgcgcacccagcagtaagtcaggaaggcgcacttgcgggcggagccgggcgcgcccgtgcaaacccggtaggacttggggcagccctcgcagcccctgaccccctccgcagtctgtgatcggaaccttaaggaggggggattaatttaattaaggatcc

SEQ ID NO: 451007 - DNA, 1266 bp, Homo Sapiens
  misc_feature (72)..(72): n is a, c, g, or t
ttcatttcggactttgagacggcagatgaaaatgtatatggcaacaacaattggatattaaccccaagcacnaacacccatgctggacatgcacccatacaagtgtacttaaaaggagtcattatagaagccagtgggagctgttaacgcttaccatcgtaaaggcacgtccaattttcagtttggaagcactttcatcagctgcagtctcctttgggattcagattataacctctataacctccaatttatttgcaaattatctggatctttggatggttttataaatatttccttttttctcagaaatacccaaaagaaacatgaaatttgttgctgtaaaatttccgctgggttcttcaacaggaaaatattttcatttgttagtctttagaaaatccatgaattccaaggctcagttaactgacgagcaacctttaaaaaatacagtcaacgagtccaacccataggattataaatttaaagaaaagctgtgatctgtgaccagaatgaaaccacttgtcttctaaacttgtatttcagtagtcaagatgaatactccaaagttaatgtttctttatgcctcagaatgttaagcttaagttatcaatcttattttcttttcagtgcagagtttcagagacttaaacattcccaatttgtcccattttacttcttgcttcttttaaatgaagttttccttttttgttttcctgcagtggatcccagattgtgggtaagcagaagagtcttttaaagattccgaaataaactcccaagcttgttagctcttgttgaattgaggccttttcctcagttgccagttgtatcttgaggtcgctttctctgaagtgaaaaagaaaggcttcctagatttgtaatatgacatcacaggaagaagaggctgggtttggacaaagaaactttcagcccagtttgtttgcacttcctttaatctgataatgtgtctgctgggaatatacctaggaggcttgcaaatggtcactggctgttgaactgcgtggtctgctcattaactctttttatgtggaaatgccttctgcggtgctggcaacctcttagagttgttttgatttgtttcagtagtaataattgggagagaaaaatcactatttagcctgttctcttattcgattgttttcgtgtttgggatattaccattttggaaaagaaaatgtgtatgggtgtgtatttataaattgggattgttggtgatatctttacatagcattacaaagaagtgtt

SEQ ID NO: 451008 - DNA, 785 bp, Homo Sapiens
caggaaggagaaaatgaagaaggaagtgagggggagctggtggtgaagtttggtgagactcttccaaagctgaagcccattatctctgaccctgagtacctgctagaccagcacatcctcatcagcatcaagtcctctgacagcgacgaatcctatggcgagggctgcattgcccttcggttagaggccacagaaacgcagctgcccatctacacgcctctcacccaccatggggagttgacaggccacttccagtgggagatcaagctgcagacctctcagggcaagacgagggagaagctctatgactttgtgaagacggagcgtgatgaatccagtgggccaaagaccctgaagagcctcaccagccacgaccccatgaagcagtgggaagtcactagcagggcccctccgtgcagtggctccagcatcactgaaatcatcaaccccaactacatgggagtggggccctttgggccaccaatgcccctgcacgtgaagcagaccttgtcccctgaccagcagcccacagcctggagctacgaccagccgcccaaggactccccgctggggccctgcaggggagaaagtcctccgacacctcccggccagccgcccatatcacccaagaagtttttaccctcaacagcaaaccggggtctccctcccaggacacaggagtcaaggcccagtgacctggggaagaacgcaggggacacgctgcctcaggaggacctgccgctgacgaagcccgagatgtttgagaaccccctgtatgggtccca

SEQ ID NO: 451009 - DNA, 632 bp, Homo Sapiens
gtttgaaacctttattagaaggaaacagtattctatggactcccaagaccaggatatatatggattgcagaggctgagggctgaagttgtcactctggtgatatgttttggagtggacgcccctaattttaatattcttcatctgtgacattctgctattcacagtataaagatcatgatctcctctccaagctgactttattgtttaacttccgaagtattccagaacaagcaacatttcaaaattgcatcatcagtattaaagggaaaaagtccatttctttcatcagacatttactgaatagtgtctatgcagcagccactatactggcactggagttatcaagtcagacagttgctattcagattaattcagcaaggttcattcaaattactcatgaaatctctttcaaagtctaagtaaaacgttaatttataacttgaatcttgacataatgtggtggggaatggggatgggaaatggtaaaattacatgaagctaaccctgaaggcaagttctgaagttcaccagcgaaaattatctttgcttttgaaaatgcttccactggggaaggaaggggtaaggccagtgggaggaatgaggtgaagccactgggggaaaatgttcacca

SEQ ID NO: 451010 - DNA, 814 bp, Homo Sapiens
  misc_feature (312)..(366): n is a, c, g, or t
tatatcaagtgttacataaaatgtaactactatcaaaattgccaatatagtcatctaaataaattagtttcaaatttagccctttatcaagaatatgggaaaacttagtagaatttcaactcagcctaacttaactgaaaagtgagttatgttgatgaattcataggttactgatatttttatatattctaaatttgtagtgctcattaaaatttattgtggagcctgaatgtctaatacatgttttacattgcatcagaggcagaactgttactgaaattgcaaagcgttatagctatttttaaagtaacnnnnnnnnnnnnnnnnnnnnnnnnnnnnnnnnnnnnnnnnnnnnnnnnnnnnnnngttcatgccaaaaacataacatgccacttcagttgggtggtccaaatcattatctttgtttcagggttcatgtacattatgcataacaatgtttgtgttttgtgcataaggtattcaagtttgtggcattctcattacaagtctcattctttgagatttttaccttggtctattggtcagatccaggcacaaatggtaccttgacacctgattcaatatgtatcacacttccttaccaatctcctttctccttataccttagcctcacattaaggattataaaagaaagttaaattaaaatttatgaatattcaatatatcaatgttttcaataaagccgtaaaatatgaaacctataatatttcgactgctctattctcataagttctacctgctcttctcatgggaatgacccccagaaacaggcacagaatcatgtgccaatgat

SEQ ID NO: 451011 - DNA, 912 bp, Homo Sapiens
ccagatgctacagcatcagccttcccttgcccgcttcctgcggcgtgaagggatggtccgacctaagcctcctgtcctgggtcagccgatgccactgcatgctttttcctgcgcttgggcttcacggtgccacggatattggctggcttgctgcgctttggagcgtagggttatgtacaccaccattgggctgcagagtggacccattgccctgggactctggaggggccagggtaccatccaggggtatctcagggaaggatggctcggcggtgtcgcggctgcgatgtggccccttctcagccgcctgtccatgctggagagaggccctccccacctggctcaccaggaagcccaagtagatggcacacgcagtgcccagcagaaggtttctccgggtccttggacgcgggctgctccagagcttacgcacccgcgggacgcacagggagcagatgaaccagtttatgaagctgccccggcttgtctggacacggtcatttctctgccgcatccacatgttgaacggagtttaaagtctgcagttggctcctgctaatgtgatgcatggtttcctgacttcagctgccgcgtccgcttcgggatgtaagtggtctccagtgggcagaggtggaaggaaagggttggtgatgaagctgggaatgtttctgacacaacaaaccttttaaattatcagtctccccaaggagaaatgcggcttgtttcttaccatcttggccgtttcatttgtcttccaccagttctggaaagagaaggcctagaagttcagaaaaaaaggtaagaagagttaatataaatgaggagaaaaaatagaacagtgagataagagtacacacagataaggaaagacatttatagtgtgcaattgcacggtgcaacagttcacccgct

SEQ ID NO: 451012 - DNA, 1071 bp, Homo Sapiens
  misc_feature (223)..(223): n is a, c, g, or t
cgggctcttcgttaattttgccaggcgcagaaaagtgcccacgggaagcccgggggggaccccttgggcccccgcctcttttgcgggttttggccctggacaaggctccatttctgggctgccggcttcaggcgtgggaggagtttaaaggctggggccaccgaaggagccttgctgctgagccatgcggtcgagaagaggggttcgggcccccgggggcctncctccccccttttttccaggatctgggacgcggccttggtctgggcttgctggggccgcggctcctggttctcccccccgacgcgggctccagctccgggtcagccttctcggcacagacctgttggtctccttggccaggatcttcctgggcctggggacgcctcctcaggatctgaagcctttagggggacagaaggcgatgggaaatcaggtccctcagtctccctgagcctctcctgaggggcctcatcaatggtgagcctgggctctggcccctcttccttctctttcacagcagcctcagcctccctgtcgtggcctggagcctggtctcccctggtgctcttcttcctgcgcatagacgctcggacaaggtcagagccgaagtgggcattgtggtgccgctgggagcgtgcttcctggaaccagtcccctgtcaggatcttcagctgcccagggtctgccactgaggcccggagcttgctgacccgcccctcctccagctggcgcaggcgggcatctcgttggaggacgccagcaatggcctcctgctcctcctctgtcaggaagctgaggtccaacagtccttcagtctcaggctttggcccatgcgccatggggagggagggcagagcccaaagcccctcttgcgatgggtggcccctctggggcatcagctggggctgtgccccagctgggcacacggagcttcctgtaggggtccagtatgggaggacaccttcgcaggtggctccagctcccctggcagccgagtttcagggaccgggagaagagccgtgagggaagaaggctgactcaacaggcagcccagccagccgctccgct

SEQ ID NO: 451013 - DNA, 1178 bp, Homo Sapiens
atgcgaggcctgggtggcgtctcaagacgaggcccagcaagcccaggtaggcgggagtggcccgtggctgctctcacatccggagcggactccgggcggggagcgctcctgcccagggctgcgagccgcccgcgacccagggcgctcggggcaggggtggggaaagaaggggcgccccgtcacttgccccctctgcagaccaaggccgcgtcccagatcctggagaatggggaggaggccccggggcccgacccctctctcgaccgcatgctcagcagcagctcctcggtgtccagccttaactcctccacgctgagcggcagccagatgagcctgtcaggcgacgcggaggcggtgcaggtccgcggctccgtgcacttcgcgctgcactacgagccgggcgccgccgagctgcgcgtgcacgtgatccagtgccagggcctggccgccgcccggcgccgccgctcggacccctacgtcaaaagctacctcctcccggataagcagagcaagcgcaaaacggcggtgaagaaacggaatctgaatccggttttcaacgagactctccggtactctgtcccgcaggccgagcttcagggccgcgtgctgagcctgtctgtgtggcaccgcgaaagcctgggtcgcaacatctttctgggcgaagttgaagtgcccctggacacgtgggactggggctctgagcccacctggctccccctgcagccccgggtccccaccctctcccgacgaccttccgagccgcgggttactcgccctgtccctcaagtacgtccccgccggctccgagggcgcaggactgcccccgagcggggagctgcacttctggggtgaaggaggctcggggcctcctgccgcctgcgggcaggatccctggacacttacgtaacaatgctttcgtgctgcctgatgacagccggggcagccgccagcgtacaagggttgtgcgacgcagcctcagccctgtgttcaatcacaccatggtgtacgatggctttgggcctgctgacctgcgccaggcttgtgccgagctctccctctgggaccatggggccctggccaaccgccagctgggaggcacacgcctcagcctgggcaccggcagcagctatgggctgcaggtgccctggatggattccacacctgaggagaagcagctg

SEQ ID NO: 451014 - DNA, 775 bp, Homo Sapiens
  misc_feature (672)..(684): n is a, c, g, or t
ataggtttattttatagaatttttttgtatcactgaagtgcattgttaaactatatgaagtacattatacagacaggcatagcacaatacatatttggggctcagtagtaaagattttatttagtttcatgtaaattcaattagctaagttctgttaatacctacaaatcacacataattacattttcatgtaccttacaaaaccataataaagtatgacaaattaaaaataacattatgataaactctgcctgtgctgttattattacttggtaatattaatagcgactgaagcaagacttcagaggtgagatttactactgaggcccaatgacaatgatttggagaattaggtatatatctagaaatgaaacgggtccagaacccttgtaagaaagatttgaattctataaggcagaatctggccagacacaggggcctagccttgacctctgtcctaggcccctgggccaggtgccaggacaaccaaggccattctgcttctcacctccagtgggtactgaccgtagggctaggctttgtttacactcatttttacccccatttctgtccccacttccataaaagacacttcaaaatgctgatgcttcagagaataagaaacattctgaaaaggaaaaaaacaaaaggcctgctggcatataaacttcnnnnnnnnnnnnnggtacaataaggagaccttatctattccttatccattgagtagttgtagtttttaaataactataagaacacttggtcttatgtttataac

SEQ ID NO: 451015 - DNA, 969 bp, Homo Sapiens; identical to SEQ ID NO: 146857
  misc_feature (267)..(267): n is a, c, g, or t

SEQ ID NO: 451016 - DNA, 883 bp, Homo Sapiens
  misc_feature (679)..(709): n is a, c, g, or t
tcacagaatgttgtgtagatgatcatgaggagtaccctgctgctgatagcacctaaaggaggcttctttctctccagccaatccttgatgtatcttcggacaatctgtccaatgatgagaggaaccactacagtcataaaagctgagaaaaaatagatgtgaaaggcacagaagaagatgaaccaagaaaaagcagcaggagcagggggtgttataacgatgcccaaaaacttccaaaggctgaattaaaatattgcagctgcctcatttccaccaactgccttggttaaaatcactgcagaagacacaggcggaggcatgcaacctactgtctgcaaaccttttaaaagccattcgttgatgggtgtgattgataaaagctgaagaaaaagccatattgttgctgggaagaatgcaagagtaaagatctgaataaaaagatgcagttttagatgcaccaaagcactggtcagctcctctgttttcaatgatagtccactgttaaagaatattgttgcaacagcaatgtaggatacagttatttctggcttcagtggtcccccattcacccctatggacggctccagtttagctccagcgatcgccagcactattccgaccatgaaccagtctttcctcattctctccagcagcctcatatttgttagggtgggtgggnnnnnnnnnnnnnnnnnnnnnnnnnnnnnnncaagctccgatcacctaatccttggagcgtctccacactttccttggtccctccagacatgcagcagagcaagtcaaattgccgattgtaaagtaaagacctgggggttgctccggcggctttgaggagggttgggagtagtagtagccagtgacaggaaagtctcactccgct

SEQ ID NO: 451017 - DNA, 1123 bp, Homo Sapiens
  misc_feature (1053)..(1053): n is a, c, g, or t
  misc_feature (1071)..(1071): n is a, c, g, or t
  misc_feature (1088)..(1088): n is a, c, g, or t
  misc_feature (1101)..(1101): n is a, c, g, or t
gggttaaattggttaaggcctgcagatccagagacgtgttaggtctaggattgtaaagctgagggaaggaacacggaagaggatggagattaagatgccaggagaggaattattagtgggacaactcctggaatatttgggaggggtagaaataaggcacaaatttgagaaacttactggtggaaagaggagtagagaactccttttcgggagatgacaagggagtagaaagtgaggattactatatggagaaatgtttaaagtggagataaaagaagtcgggagtgctggcgtctaatggtctttgtttcagtgaagtatgagactgggtcaccttcagaggtgagattgacaggatgccggggtccaagggacatgcttctgtcacagcttggaaagggcatgtgataagcccttcaagcatttagaatactggcatcgttacaccatatcattttttttcagatgtggtatgtgggttaagggagggagtgagagacacagaaagattttgagcatctttggaaagctggatgaattcggtagtatatttgaccttttgccgttatatatcatctgaagagtttttgccagtgtatataattgttaggagaattagaaataggatacaaatatagttgaataggatagtctctgtatattttaaaattaatgaagcctaataaacagttaatgagcatatttacaaaaatttaaagttttcagccttttaaaaattatagcaactgtgcttgcggacagtccaaaaatacactgtgggccatactttgcctatcctggtgtaaaacaagtaaatcttctgagcagtatttaagataagcccagggcagttagtagtataggaaaaggtctggataagcctggttgagaatttcaacattgcaattttttaatttttaaaaatttaatttcttcaataattattgaattaatttgcatttattttgttagccaagtgggagtgatttttggaattttttaaggagggctattattgggtgggttttataaggatggacttggcccaagttntatttgggggataacccntaagggaaattaccccnttattaaggatcntccgggagggggagggtggggg

SEQ ID NO: 451018 - DNA, 1317 bp, Homo Sapiens
  misc_feature (136)..(150): n is a, c, g, or t
  misc_feature (663)..(728): n is a, c, g, or t
ggtgtgcgctcagcgtcttcgctcgccatcgaaatagcgccggtgagggagctgaggcaagggtggtccccgcgcgtgcctgtggcgggggttggcgtgcggccgtgcagtgggcggcgggtgatggaggccgggnnnnnnnnnnnnnnngattctcggggggccctgtggcgcctggtgtgggcttctgcaagcgtcctgtccctggcggcgcctgccgtctggccgagtatcctgggtggccgcctcgcacttctcgtccaccggcgccgcggggctcgcggccttcagccactgtggtgctcacttgggtggaatcaggcggtcgggcatgagtcgcgggcggtcgcatctatcgtcttggtatggggcgggcgacacggcgcgacctgtaggaggtccggagcgcgcagcttggagatagggctgcgcgtgcctcgggtgacgaggagtgtcctaggccggccgggcgctcttccattgcgcggcgcagtcactcatggggtctgccgcggaccggggtgtggtgtgatggggcgtgcgagggcggggcaggttctgggggctgactcctcggctcgagtgggtgctgggggggttggttgcgcctgcggggcggtgcggccggctgagctcgtctgtgatggggctggcgcttggatnnnnnnnnnnnnnnnnnnnnnnnnnnnnnnnnnnnnnnnnnnnnnnnnnnnnnnnnnnnnnnnnnncggcgggcgtggcgggtcggcgacgaccgcgtccagcggggcgtgggtcgtggtgcgggcccatgatgggggcgccagtaggctgggtgtctggttcgcgggtgagccgcgtggaagtagtccacgctgcattcctccggggtggagatctgccgcctcataggggctgaagatgtggcccttggggatgacctcgtttacacatcgcacgtcactctctccactagtgtccttgaccacctccatgccctgtgggatggtgagcagccgcccggtctgggatgcccacgggcaccaggtgtgtcagacacaaacaccggggggccatggtttgggcattcatccacgaagtactcctggcaggactcacagaaccagaagtccacttgctggaagcttttgggcacgatgaggtcgcgcttccccttcagtttcttgggctcaacttccatggccgaggagtccggtctcctagagctggccagggcagaggccagggctggccatactcctggtctcggagtggtgagcagacaaccgtcttcaccaccgtcacatccgggaaattccggtccggtgccagcatggt

SEQ ID NO: 451019 - DNA, 1941 bp, Homo Sapiens
attttcccttccccgcaaagttcccaggccggggtccagttcccagcccgaaccaaattttttggggttttaaaaaataaatgtgtaggccttcaagattaattttcactggattttaaaataggaaaatcccttttccccacgtgccctccttcaatcctttcttttaacacttcaaaggccctatcctttgagaatcaaaaataatatggttctttttagcaaaggggatttgtgttttgccctcacatagcttaagcccgtagagaaaatagataaaacgatctcaaaattattttctttcacagacaaatcatgtggaaaagacaagctactgctatgtcagggatcttgggcagagagaccccactcagtctaccaccttgagaaggatgtggcaggacccagtgggtttaaatagttcatcctgtttactgtaacatccttggtacatatgatttttttgtgctccttggagacttattctttctttggagattataggctgtttctcagtcctaccctttctaacactctcttcctgtcctcatctgccctcatccagtctccacgtgtctcagtttctgtatccgtgctccacggcagcctccttttaaggcttgaagtcttctgggcggattttcatctccacccgtttgagggagtaggtagatccatgccagccataccaggtgatgccatccaggtgcttattgtgctcacccaggcggtagtacactccattgaggttggagtctgtgcagcagttgtaccagtagccacctttgcggagctgtgcacacttgtccaagcagttgtcattgtccttgtccttggtgctgaaggctgtgttgttatgatactggagggcgtcgttccccacattgccagtgtagttccccaggaagaggcgatagctgttgagttcattgcccaaaacaaagtggctatactcagcgtagcgcaggttgccctcccagtcctccatctctacacgcagccgggttggctgtctggagagccggtggatgtgttcgttccccagccagaagtccccacggatgctgccaaagccctgcttgtactgcttccagtcccggtagaaggagacaaggccactttttcgtctctggatgatggtccagcctccgcctgaagtctccatgtcacagaacacctccagttcagggctgcccaggaagtcatcaggaggaagcttatacactccagagatgcggtagttcttctggtagagggaagagcagtcgtagatggcatctgcggaggtctgagtgaccgtctgtgctgcctgcagctgcatgatgtcaatttggttgttcatctcggagtacttgctctcagcatctgtgagccgcgactccatgcgcttgctgttgctctccagctccatcacctgcatgaccacgctgacccagtccctctcctgcttcttgttcagttcactcagcaggctgctaaggttggcaacttgggccttgagctccttcacctcctcacagcagttggccgctttgagctgtggctgtgctggtgtcttgtgcttagagagcttctgcagccacgctgggtggctgacaaaggccacgatgaaaatgcagagccaggtcacagctgagagaggctttttcagcatcttttgtgggtttgggtgaggaaggctcttccttcaggggagtctggagatgcccagctgaggtctgcaaagctgcagcaggctgactgaaccttacgctttcactctgagggcctcgccactttgttgttttctctctttccttgctctttgctagcctttctcaaagcttgagtctctgacaggggagctgaatgggtagcctatagctttccttccaagcccgaatgctccacaagtcagcatcttaaatattgatccgcgggaattcccggaccggtacccag

SEQ ID NO: 451020 - DNA, 801 bp, Homo Sapiens
gtttaaaacaaaaccacaatattttatttttacaaagtgagatgcttatttacagcatttattattaactataacaccatctaccttcagttttcaaccatttcctacagacaaaatttaaaaggaagctccttgagcttgtttcttacaaagtaaataaaaatagatatacctgtattaactatgaatattttaaggcagttttgtgccggcatccatgagagactctgtccacctcctgctggtgcttcattcctttcagtgctgtacatgaccaaggcgagcaggggcagtgctcagagtctgatcgccagattgcagtgccctggagtttcctccccgcaagtccagcctgggtcagttccagccgaacaatttttgtgttttaaaaataatgtgtagactcaagataatttcactggatttaaaaatagaaataccatttcccacctgcctccttcactcctttctctaacactcaaaggcctatcctttgagaatcaaaataatatggttctttttagcaaagggatttgtgttttgccctcacatagcctaagccgtagagaaaatagataaaacgatctcaaaattattttctttcacagacaaatcatgtggaaaagacaagctactgctatgtcagggatcttgggcagagagaccccactcagtctaccaccttgagaaggatgtggcaggacccagtgggtttaaatagttcatcctgtttactgtaacatccttggtacatatgatttttttgtgctccttggagacttattctttcttggagattat

SEQ ID NO: 451021 - DNA, 993 bp, Homo Sapiens
  misc_feature (550)..(559): n is a, c, g, or t
gtgtttaaagaaagaggtttaaaatattttattagagaacacatatcaatattgaacaacacttaaatagatggcattcatattaataaggacaatataaattcttataatttgaacagtcagtttgttcaacaaataaaataaattcatttttatcagtgggcatgatccatgaagtatattttttcaataatttattcatctgcttagtactatatacattcattttctttgaaaagaaacataaaatcaacgtgattgtttatctcatcacatcataaacagatggacctgtaaaaatggcgtgtagaaaattcagaaacacttaaacagcacattccaaggatactgagtccatttaagagaaattaaactctttgaagccattgtagtcagcctgggtgtcatatatattccttgatacaaaatgttgccacaaattcaagtataatgattcacacacataaatatattattctgacacagaagagaatgctcccttgaatagtatagcgtgcataccaaactctcagcacgattcagattaacnnnnnnnnnnaaatggaaggaaaggtaatgacatcgtcaacttagtcgaccaaataccaaacctggagaaggtggatgtggttcacaaacactgcacagttagaaattgcaccttacatggaatcttatttgtcacaacaattgttaaaggttacagaaaaaccatagcagctaaaatcagccagtcagcccacatttgcttctctggcaacatggaaatgctgtgtttgtattttaaacaaatgtaacaaggagacaagcagaaacgctgcagcaagccaggaaatgtcaccgggttcatggttaaatggcgtcagctttatttactaaagtataattttaatttcacaggcaaaatgaacctccagatttgttttccttagccccagcaagtcaagtccttcctaactgttagttgattgcaaaagtgcagcttcaagtctg

SEQ ID NO: 451022 - DNA, 1013 bp, Homo Sapiens
ggaagattcaactgggcattgacccctacaacgctgggtccctgaagaaccatcaggaagtagacatgaatgtggtgaggatctgcttccaggcctcatatcgggaccagcagggacagatgcgccggatggatcctgtgctttccgagcccgtctatgacaagaaatccacaaacacatcagagctgcggatttgccgaattaacaaggaaagcgggccgtgcaccggtggcgaggagctctacttgctctgcgacaaggtgcagaaagaggacatatcagtggtgttcagcagggcctcctgggaaggtcgggctgacttctcccaggccgacgtgcaccgccagattgccattgtgttcaagacgccgccctacgaggacctgggagattgtcgagcccgtgacagtcaacgtcttcctgcagcggctcaccgatgggggtcttgcagcgagccattgcctttcacgtacctgcctcgcgaccatgacagctacggcgtggacaagaagcggaaacgggggatgcccgacgtccttggggagctgaacagctctggaaccccaatgggattcgaaaagcaacggggggaggaaaagcgccggccttctcgtggaccatcttctcgtgcccaaccacgggctcagggccctgttcctcccgccgtcagccctgctgccagaccctgacttcttctctggcaccgttgtccctgcccggcctggagccccctggcgggcctgacctcctggacgatggctttgcctacgaccctacggcccccacactcttcaccatgctggacctgctgcccccggcaccgccacacgctagcgctgttgtgtgcagcggaggtgccggggccgtggttggggagaccccccggcctgaaccactgacactggactcgtaccaggccccgggccccggggatggaggcaccgcagccttgttgggcagcaacatgttcccaatcattaccgcaaggcggctttgggggcggcttctatcga

SEQ ID NO: 451023 - DNA, 1031 bp, Homo Sapiens
  misc_feature (18)..(18): n is a, c, g, or t
  misc_feature (30)..(30): n is a, c, g, or t
cctgagccagacctccancatgtatcaatnagatgtcaggcatccaggaacatccaggaaccactaagccatacagtgcagtcacaaagtaaggaacagaatagaacatatataccagcatctgaattttaggataagcagcaggatcctttagatagggctcttgaaattgcggtatataatcggcagagctcagatgggcaatccaaagcaatcaaacctctgaacaggcaaaatccagttgccaggaggagacacacaaccaagattaaatcaaatggtcttctcagcaggtctttcgcttgggcttcttgaataacctttgaggggtaattataattttctgatggctgattatagattctgaaaccagcccagacaggaagacaagtatatggtatgcttaagaaaaaagcagggcaaattcgtgttccatacttccctacaatgtttcctggcacaaaaacaacaacactcataataatagatccaacccaatataggccaatggttctataagtttcctcccatgctatggctgccaccatcaccaggtacatcagataatgagcagagccatcccagtagcagatcatgtgcccatatgcggtgttcagatacggttcaccctctctcaagtagtgtgtcatgaacccgtcaatgattccatcttgctccagtcctatgatgaggttcaccacgctggtaaatccaaaaactgcatacacatagaacagtgggtcccggggtggttttcttttgacgaggacacgagccagcagtgctaccaggaacaggatgagggcagcaacccctacaatagtccaggaatcatgctgggccgccaggtggttgaagacataggtgaccggggtggccgagagggacagcacgaagaccccggtggccgcagaggcactcatcgcagccgccgcgccgctcgcccttcaccgcatcccgctgggcgcctccccccagcttccggcggcgcccgcgcccccttggcgctgcccttcgaggcgcctcagcca

SEQ ID NO: 451024 - DNA, 544 bp, Homo Sapiens
agatggaacagtagacatacaacttgaataacaagtcacagtgcatcgcgccatgaaaacacccctcccgcccacccaccccaccgtaccccacccactctggtttctgaaaggaggctggtggtcaccagggccctagagaggcaccgggagtcctcaagattgtggagtccacggacatagcacactgtgccactagccacacagacagctgggcttagtttccccaaacattgccgtgtgaaggaatcagactgctgaatatggcagcaatggctggagccgtattacaggtgacaggttcacgcggaggatccgctgagcccgctgccgcacctcatcatccgaggaccgcctatctacctttatggcacggaacttcagcagctttgctgttccaggccctagccatgccttaggagatcggggcccaagccgtgttctcttcttgggaggaagatcttttgcctcctcagcccttttcctcttctgcccaacagtctcagggcggtttttctggcccttccttgtagttctggcctta

SEQ ID NO: 451025 - DNA, 1633 bp, Homo Sapiens
ggtccggaattcccgggatgcctgactcgggacagctcagagcagggcagaactggggacactctgggccggccttctgcctgcatggacgctctgaagccaccctgtctctggaggaaccacgagcgagggaagaaggacagggactcgtgtggcaggaagaactcagagccgggaagcccccattcactagaagcactgagagatgcggccccctcgcagggtctgaatttcctgctgctgttcacaaagatgctttttatctttaactttttgttttccccacttccgaccccggcgttgatctgcatcctgacatttggagctgccatcttcttgtggctgatcaccagacctcaacccgtcttacctcttcttgacctgaacaatcagtctgtgggaattgagggaggagcacggaagggggtttcccagaagaacaatgacctaacaagttgctgcttctcagatgccaagactatgtatgaggttttccaaagaggactcgctgtgtctgacaatgggccctgcttgggatatagaaaaccaaaccagccctacagatggctatcttacaaacaggtgtctgatagagcagagtacctgggttcctgtctcttgcataaaggttataaatcatcaccagaccagtttgtcggcatctttgctcagaataggccagagtggatcatctccgaattggcttgttacacgtactctatggtagctgtacctctgtatgacaccttgggaccagaagccatcgtacatattgtcaacaaggctgatatcgccatggtgatctgtgacacaccccaaaaggcattggtgctgatagggaatggtagagaaaggcttcaccccgagccctgaaggtgatcatccttatggacccttttgatgatgacctggagcaaagaggggagaagagtgggaattgagatcttatccctatatgatggctgagaacctaggcaaagagcacttcagcaaaacctgtgccttctagcccagaagacctgagcgttatctgcttcaccagtgggaccacaggtgaccccaaaggagccatgataacccatcaaaatattgtttcaaatgctgctgcctttctcaaatgtgtggagcatgcttatgagcccactcctgatgatgtggccatatcctacctccctctggctcatatgtttgagaggattgtacaggctgttgtgtacagctgtggagccagagttggattcttccaaggggatattcggttgctggctgacgacatgaagactttgaagcccacattgtttcccgcggtgcctcgactccttaacaggatctacgataaggtacaaaatgaggccaagacacccttgaagaagttcttgttgaagctggctgtttccagtaaattcaaagagcttcaaaagggtatcatcaggcatgatagtttctgggacaagctcatctttgcaaagatcctaggacagcctgggcggaagggttcgtgtaattgtcactggagctgcccccatgtccacttcagtcatgacattcttccgggcagcaactgggatgtcaggtgtatgaagcttatggtcaaacagaatgcacaggtggcctgtacatttacatttactgg

SEQ ID NO: 451026 - DNA, 867 bp, Homo Sapiens
agcgggggctgacgatgacccgagtatcgtcgaggccagttaacccctgtgggccctgagcagaggccgtatcttgcgccgcacccgcgtgcaggcggagcctaagatgccggcttctgcatgcgcaggcccggcccgggtcccgggcatgcctacacgcctctgctcttccctgctactgaccgtgctgtcgtgtgctgatcgggccggtatccggtccgcgtccctccgctcggtgcccagaacctcgctttcaatctctgaggctgagttcctgtctcagcccggtttcgcagtcctctcacacatacaattactctgttctccttgatggatccgtgccgtctgcacacactttatgtttggcgcccgggacaccatcttcgctttatccctgtgccttctcagggtgaagagacccgcgcaggattgcattggcatggttcctgaaggctcacagaacagaactgtacggaagtacacggcacgtaaagaggacgcaactgtcagcagattttgtccagattctcgccattgccagtgcctctcacctcctcacttgtggcaccttcgcttttgatccgaagtgcggggttattgaatgtgtccaggttccacgcaggttgaaagacttgagaagtggccggtgcgacatgtccttttgagccagctcagcggtcagccagctgtaagtggctgggtgggtcctctatgcttgccactgtgaaataactacctggggacggagccaattatcatcagagcagtgggtcttgccgaggactggattcggacagataccttgccttcttggctgaacgccccagcctttgtcgcagccgtggccttgagcccagccgaatgggg

SEQ ID NO: 451027 - DNA, 652 bp, Homo Sapiens
ctgtcgtggcttcagtgtaggctaatgtcaggcagggtagcgctgctaggggagcaaggttggagggatctagatgtgaagatttcctcgtatccctggagtggactggttgggccatcgttgcaggcaggccaggcaccagtctggcttctgaccgagaagtagctcgttctgctggtgatatgggccacctgctctgtggttcaagcagtagtgcgagactgtctgcgatgatcgtcagttgcatagatatggcctgtatctgttcttctggagccgagccgcagcctggccggaagctcctcttcgtagtgaacgtttcagagactcaaagtcagtgcaagccaagtctggtccttttgagccgtaagaactctgtttctttgcgagcgtgttgtgatcgacgtaactttttctcttcatctgctaatccttcttcttccatggccacttctaatttcttctgcctggtttctctctcttcatgctgtaaaattaggttgctataaaattctccaatgtgagcttggctacagtcactctttcccgggtatggttgctcataggaaaggttgttgtagtccctgccgtcattgccatagtaacggaaactgcctccggtcgcgcccgcggccggctcagactccccgct

SEQ ID NO: 451028 - DNA, 1211 bp, Homo Sapiens
  misc_feature (95)..(103): n is a, c, g, or t
  misc_feature (222)..(222): n is a, c, g, or t
  misc_feature (483)..(498): n is a, c, g, or t
tgtgatcgactgtggcggcataaccgcgcgggtgatctttggtatccgggcgggtacgcgggaacgggtggtggtgtgtgtcgagcacacgagcnnnnnnnnnaaacggcgcgataaaacggtcacagaggggtgttttatatggcggcgaatatggcgatcaggcgtgtgcgtagagggcggaacggcgaacagaagcggggcggataatgggatcgaganagtggtgaggtggggacgaataagaagaggcctgcggaggggcagggggagggggagtgaggacttgtgcgggagagggcatatcggggcgcatagggtggtcgttctcgcgccggcggcggtatttttggacgctagtggttcgaggacccggcgagggccccgttgtctttgttgtgtgttcgcgggggcattatcttcgcggcaaacgagtgtgggacaaggggggggaaacagaaggggtttgtgtggtgcattacnnnnnnnnnnnnnnnnagagtgtggtggcgcccccgcgtcgcataggtcgggggggtttgcgccgcggggccgcgtattcataaacccttgtgcatccttgcgcgctgggttgggggcaatgcccgggttttgtccttcggatggagcaagccgcccggcacgattcgaggactttgcgcagcgtttggttcatggtttcatcgtaggcatcaattcagtaagcccgcagggagtctttcatttctggctcaacctttgcatccactccagagccctcgaggattttggccaaaggtgccagggatgggtgtacaccaatgggagccccaggggaagagcaaagccaccccactgcgttcaggagaaagggcgtgagctgggcttccaccaagtagtcctcatgggacacgaccaccaggcggccacggccataggaggaggcagcaatgaggacctggcccatgtcattcaccatcacaggaaatgaagcctctccaataagaagcagttcacatggaacagcatcttcgggtacatcccagcttgtcacaccattcataagggcctcgaaggcagcagagggagtcgccatggctctattggtttcaggtcaccctgcgatttccacgggggcaggtgggagcgggcagagcctggcgcagagaggaatgcacagggaagaggcttccctgtaccagtgactgggcgatcccgagaattccggaccc

SEQ ID NO: 451029 - DNA, 1687 bp, Homo Sapiens
  misc_feature (306)..(584): n is a, c, g, or t
  misc_feature (687)..(687): n is a, c, g, or t
gcgagagcggaatgactgtcaggaaggcgagcaacgagcgagtgtgtgcggtacacgtgaggggtgggcaaggcgaggggacgaagcggagatgcagtggcgtgtgcggcgaggatagaactatgcagggatcgggagaggtgggcgtgcagatcatgcggaggctggccagcatcgcaggcgagcagcgtaacacgatgtaacacacaagtagggggcgctcggtggggccacacggcgggcggaaacgggggggcgcacccccagtcatgggcgggacgagtgcaggcgggacaaaagaaagcnnnnnnnnnnnnnnnnnnnnnnnnnnnnnnnnnnnnnnnnnnnnnnnnnnnnnnnnnnnnnnnnnnnnnnnnnnnnnnnnnnnnnnnnnnnnnnnnnnnnnnnnnnnnnnnnnnnnnnnnnnnnnnnnnnnnnnnnnnnnnnnnnnnnnnnnnnnnnnnnnnnnnnnnnnnnnnnnnnnnnnnnnnnnnnnnnnnnnnnnnnnnnnnnnnnnnnnnnnnnnnnnnnnnnnnnnnnnnnnnnnnnnnnnnnnnnnnnnnnnnnnnnnnnnnnnnnnnnnncagccccacctctacccccagtcccagcctcgccgcgcaccttgactggctggccgttgctcgtccgcaggaggctctcgtcgtccgctttcgatgccgaagngccacggagggcccccgtggcgatgtcccccccagtaccccgcgcgctgccacgcgcttcccacgggtagctcaggaggcgaccggacgccagggtcccggttgggcacatgataggcgctggagtccctgagttcaaaggcgacgcctgtgttcccgccagcgtcggaactcctgggggtgaatgacttgagccccgcggtcatgcagcttcatgcgcaggtcccagtcgctgacaccgcgccgggcgtcgtagcgggagcccaggtagtggcgcaggcgcgagtcccagaggcggctcatggggaacgcctggggccctttctcgccgccagcccagaagcggaatacggcctccagggcatcccgctcgcggaacttgagggcgcggaggctgagccagggcagctgttcctccaggcggtcgggctcggggaccaggtgcgccagcaggtcggcctgggcacgcacgaaggcggccactggcgggcgcagcagcgcgttcccccacacttccaggaaggtctcgcttcgctcttgcagccccatcttctccggttcctccagggctaggctgaagatcagcatgtgtcgggccacagcttccagattattctccagcacaaagaagttgaacctcctgcgaggccagaacttcgctcgggacagggtccgcagcaggtgccgtccatccacagagcccagaagcagcacatctagctcggggttgctgtgcactgtatcggcctgggagtctgggtccacaggaggactttcagcctgcaggtccagcgccggggacaggccccaccaggacacggagccgaagccgctgccggagccggcaggtgtggtcatcacccttgcccacacctttatcctccaaatatcccgggacgccccttcctctctgctcagtgcagcactgtggacccgcggcactccacaaccgctgcccagagtccccgcccttttcgaggaatcaagcaatgaagcatgtg

SEQ ID NO: 451030 - DNA, 900 bp, Homo Sapiens
  misc_feature (17)..(17): n is a, c, g, or t
ttttcttttcacggatnctgccctttcttcccgaaaagaagacagccttgggtcgcgattgtggggcttcgaagagtccagcagtgggaatttctagaatttggaatcgagtgcattttctgacatttgagtacagtacccaggggttcttggagaagaacctggtcccagaggagcttgactgaccataaaaatgagtactgcagatgcacttgatgatgaaaacacatttaaaatattagttgcaacagatattcatcttggatttatggagaaagatgcagtcagaggaaatgatacgtttgtaacactcgatgaaattttaagacttgcccaggaaaatgaagtggattttattttgttaggtggtgatctttttcatgaaaataagccctcaaggaaaacattacatacctgcctcgagttattaagaaaatattgtatgggtgatcggcctgtccagtttgaaattctcagtgatcagtcagtcaactttggttttagtaagtttccatgggtgaactatccagatggcaacctcaacatttcaattccagtgttaagtattcatggcaatcatgacgatcccacaggggcagatgcactttgtgccttggacattttaagttgtgctggatttgtaaatcactttggacgttcaatgtctgtggagaagatagacattagtccggttttgcttcaaaaaggaagcacaaagattgcgctatatggtttaggatccattccagatgaaaggctctatcgaagtgtctgtccatacaagaagtaacaattgttgagaccaaaggaagatgagaactcttgggttcaacttcattcgatgatacatcagaaacagggagttacacatgcgaagttactaaactacattcccaggag

SEQ ID NO: 451031 - DNA, 580 bp, Homo Sapiens
  misc_feature (329)..(366): n is a, c, g, or t
ctccctgcgcctgccccagccccgccctccctgcctctgtcaggcccggtccctcagccagccttggcccctctgcgcccgacgtcgcgatcgctgggcgcgccagggcctcagtttccctggaagcgtccagccccctcctgtccccgccgcggcgacaggctctttcctcggggaatccggcctggcctcggggtaggggcgggcgagaagccgcgcggagcgtcggggaatggacgtgtggaagcggaggtcacttaccgtgtcccggcctggccgccactgtcctggcccgggttccgcaaggcctgaaatagtcgcagagtcannnnnnnnnnnnnnnnnnnnnnnnnnnnnnnnnnnnnnaaccgcggaaaacccgcgggcggaggccaaggcccagcgcggcccggctgtgtccctgcgtcccaggggctgggcgcgcccggcctgcccagcgggggatgcggggcgctgtcacttcctcccagcagccgggcaggggcggggggctggccgcgcgtcgcatggtatgtggagttcgggggacggcacggggacgacggggttgtcaggcgcg
